United States Patent Application Publication US 2023/0026259 A1 - sequence listing, part 79

SEQ ID NO: 183187 - DNA, 2992 bp, Homo sapiens
  Payload ID: 16087
  Gene Symbol: SLC20A2
  Gene Name: solute carrier family 20 (phosphate transporter), member 2
  Uniprot ID: Q08357
  ENST ID: ENST00000520262
  CDS Start-End: 695-2653
gtgcttaaaaatcaagtgaatgcctgttgggaaaaagcttactccttctctttgtcagtacttgcaaaaacaacttaaaagaagttagtattattggactgaattcagtaattagcataatcatgatgctatgtattgttcaccagggcacgccccttggccgcatttcccattaagaggacaccgatgttgtcctagtgaataaatcccggcacacatgatgcaaatcagcgtgttcctgcctgctgcttggctgcagttaattttagccggggttagttctatgagttgtaaaagtagaagttagcaagctgaaatgtgacttctcggcctaatgtggtaggatatctattttagacttcagattgtgtttgtgatcaggagagcagtcttctgaagaattgtggctcagttttcttggaaactacttgaggagacatcacagctttcccagatcgggaggaaaaatatggaatgtgttttaccgctgactgaacacaaccaaatgaactgtcctgacagtagtttgcaaaccagcagctagcagtttgtccagcctctaacattgtccagcactttccagagcaaactcactgtttacaagaactcttggccttacgaagtttataacctcaagctttgtttatttaaaatattcctgcaaaagaaaagtacccggcacccactttccaaaatggccatggatgagtatttgtggatggtcattttgggtttcatcatagctttcatcttggccttttctgttggtgcaaacgatgttgccaactcctttggtacagccgtgggctctggtgtggtgaccttgaggcaggcatgcattttagcttcaatatttgaaaccaccggctccgtgttactaggcgccaaagtaggagaaaccattcgcaaaggtatcattgacgtgaacctgtacaacgagacggtggagactctcatggctggggaagttagtgccatggttggttccgctgtgtggcagctgattgcttccttcctgaggcttccaatctcaggaacgcactgcattgtgggttctactataggattctcactggtcgcaatcggtaccaaaggtgtgcagtggatggagcttgtcaagattgttgcttcttggtttatatctccactgttgtctggtttcatgtctggcctgctgtttgtactcatcagaattttcatcttaaaaaaggaagaccctgttcccaatggcctccgggcactcccagtattctatgctgctaccatagcaatcaatgtcttttccatcatgtacacaggagcaccagtgctcggccttgttctccccatgtgggccatagccctcatttcctttggtgtcgccctcctgttcgctttttttgtgtggctcttcgtgtgtccgtggatgcggaggaaaataacaggcaaattacaaaaagaaggtgctttatcacgagtatctgacgaaagcctcagtaaggttcaggaagcagagtccccagtatttaaagagctaccaggtgccaaggctaatgatgacagcaccatcccgctcacgggagcagcaggggagacactggggacctcggaaggcacttctgcgggcagccaccctcgggctgcatacggaagagcactgtccatgacccatggctctgtgaaatcgcccatctccaacggcaccttcggcttcgacggccacaccaggagcgacggtcatgtgtaccacaccgtgcacaaagactcggggctctacaaagatctgctgcacaaaatccacatcgacaggggccccgaggagaagccagcccaggaaagcaactaccggctgctgcgccgaaacaacagttacacctgctacaccgcagccatttgtgggctgccagtgcacgccacctttcgagctgcggactcatcggccccagaggacagtgagaagctggtgggcgacaccgtgtcctactccaagaagaggctgcgctacgacagctactcgagctactgtaacgcggtggcagaggcggagatcgaggcggaggagggcggcgtggagatgaagctggcgtcggagctggccgaccctgaccagccgcgagaggaccctgcagaggaggagaaggaggagaaggacgcacccgaggttcacctcctgttccatttcctgcaggtcctcaccgcctgtttcgggtcctttgctcacggcggcaatgacgtgagtaatgccatcggtcccctggtagccttgtggctgatttacaaacaaggcggggtaacgcaagaagcagctacacccgtctggctgctgttttatggaggagttggaatctgcacaggcctctgggtctgggggagaagagtgatccagaccatggggaaggacctcactcccatcacgccgtccagcggcttcacgatcgagctggcctcagccttcacagtggtgatcgcctccaacatcgggcttccagtcagcaccacgcactgtaaggtgggctcggtggtggccgtgggctggatccgctcccgcaaggctgtggactggcgcctctttcggaacatcttcgtggcctggttcgtgaccgtccctgtggctgggctgttcagcgctgctgtcatggctcttctcatgtatgggatccttccatatgtgtgatttgtcttcttccagctgcaaacagctaaagggatggtctggtgttggcgtgtgggagacatgtgtgctcgtgccgcacatacacatcctggccgtgcacggctctctcatgaccagctctctgcctcccttccaggaggctccatcccacactgttcacccaggctgcggagactcaccttcccgagctaacttaactactgtacataataatatgtattaaactggtatcgtggtgatataatgtggtgcagttacttatatattaaatatctattgtatccatagaataggcagcattatttcaaacatattcaagttgggagtggagatcattgc

SEQ ID NO: 183188 - DNA, 968 bp, Homo sapiens
  Payload ID: 16087
  Gene Symbol: SLC20A2
  Gene Name: solute carrier family 20 (phosphate transporter), member 2
  ENST ID: ENST00000524211
  CDS Start-End: 391-708
tttcttacattatctttgttaacccatccgcttttgtgtataatattaagttattttccactactgcaatggctagtaatttacttaggctcagagttttactctgtatggacagagaaataggaggaggagacatcacagctttcccagatcgggaggaaaaatatggaatgtgttttaccgctgactgaacacaaccaaatgaactgtcctgacagtagtttgcaaaccagcagctagcagtttgtccagcctctaacattgtccagcactttccagagcaaactcactgtttacaagaactcttggccttacgaagtttataacctcaagctttgtttatttaaaatattcctgcaaaagaaaagtacccggcacccactttccaaaatggccatggatgagtatttgtggatggtcattttgggtttcatcatagctttcatcttggccttttctgttggtgcaaacgatgttgccaactcctttggtacagccgtgggctctggtgtggtgaccttgaggcaggcatgcattttagcttcaatatttgaaaccaccggctccgtgttactaggcgccaaagtaggagaaaccattcgcaaaggtatcattgacgtgaacctgtacaacgagacggtggagactctcatggctggggaagttagtgccatggttggtagagatgacgacacaacagacagctgatgtatacgggtaatttggttagggagaagagggttagagaggaattctaccaccttctgctttcaacaggacatatcctcttgtaggaagagtcctgcagcaggaggttccgctgtgtggcagctgattgcttccttcctgaggcttccaatctcaggaacgcactgcattgtgggttctactataggattctcactggtcgcaatcggtaccaaaggtgtgcagtggatggagcttgtcaagattgttgcttcttggtt

SEQ ID NO: 183189 - DNA, 573 bp, Homo sapiens
  Payload ID: 16087
  Gene Symbol: SLC20A2
  Gene Name: solute carrier family 20 (phosphate transporter), member 2
  ENST ID: ENST00000518717
  CDS Start-End: 340-573
cttttcatattcacgtgtactcttaagaaagcgtctgttctccaaactggctttccattctccccgtcctaaatggaggagacatcacagctttcccagatcgggaggaaaaatatggaatgtgttttaccgctgactgaacacaaccaaatgaactgtcctgacagtagtttgcaaaccagcagctagcagtttgtccagcctctaacattgtccagcactttccagagcaaactcactgtttacaagaactcttggccttacgaagtttataacctcaagctttgtttatttaaaatattcctgcaaaagaaaagtacccggcacccactttccaaaatggccatggatgagtatttgtggatggtcattttgggtttcatcatagctttcatcttggccttttctgttggtgcaaacgatgttgccaactcctttggtacagccgtgggctctggtgtggtgaccttgaggcaggcatgcattttagcttcaatatttgaaaccaccggctccgtgttactaggcgccaaagtaggagaaaccattcgcaaaggtatcattgacgtgaac

SEQ ID NO: 183190 - DNA, 557 bp, Homo sapiens
  Payload ID: 16087
  Gene Symbol: SLC20A2
  Gene Name: solute carrier family 20 (phosphate transporter), member 2
  ENST ID: ENST00000518384
  CDS Start-End: 473-557
atttcctgccggccggtcggtttccggatgaaacgaggagccaggcatctccttggaaacaatgccatctttgaatgtgagagataaacctagtttcagcatgtctgcagcagagaccagtacatcaggcttattcccacaggaagcctcctaaagcctgtggcgcggcaaccatttccaggactaaataataatgtgtcagatgcctgaggagacatcacagctttcccagatcgggaggaaaaatatggaatgtgttttaccgctgactgaacacaaccaaatgaactgtcctgacagtagtttgcaaaccagcagctagcagtttgtccagcctctaacattgtccagcactttccagagcaaactcactgtttacaagaactcttggccttacgaagtttataacctcaagctttgtttatttaaaatattcctgcaaaagaaaagtacccggcacccactttccaaaatggccatggatgagtatttgtggatggtcattttgggtttcatcatagctttcatcttggccttttctgttggtgcaaacgatg

SEQ ID NO: 183191 - DNA, 2143 bp, Homo sapiens
  Payload ID: 16088
  Gene Symbol: SLC22A6
  Gene Name: solute carrier family 22 (organic anion transporter), member 6
  Uniprot ID: Q4U2R8
  ENST ID: ENST00000360421
  CDS Start-End: 294-1946
caagggtcaggtctccagcagaccctgaaagctgagctgccctgacccccaaagtgaggagaagctgcaagggaaaagggagggacagatcagggagaccggggaagaaggaggagcagccaaggaggctgctgtccccccacagagcagctcggactcagctcccggagcaacccagctgcggaggcaacggcagtgctgctcctccagcgaaggacagcaggcaggcagacagacagaggtcctgggactggaaggcctcagcccccagccactgggctgggcctggcccaatggcctttaatgacctcctgcagcaggtggggggtgtcggccgcttccagcagatccaggtcaccctggtggtcctccccctgctcctgatggcttctcacaacaccctgcagaacttcactgctgccatccctacccaccactgccgcccgcctgccgatgccaacctcagcaagaacggggggctggaggtctggctgccccgggacaggcaggggcagcctgagtcctgcctccgcttcacctccccgcagtggggactgccctttctcaatggcacagaagccaatggcacaggggccacagagccctgcaccgatggctggatctatgacaacagcaccttcccatctaccatcgtgactgagtgggaccttgtgtgctctcacagggccctacgccagctggcccagtccttgtacatggtgggggtgctgctcggagccatggtgttcggctaccttgcagacaggctaggccgccggaaggtactcatcttgaactacctgcagacagctgtgtcagggacctgcgcagccttcgcacccaacttccccatctactgcgccttccggctcctctcgggcatggctctggctggcatctccctcaactgcatgacactgaatgtggagtggatgcccattcacacacgggcctgcgtgggcaccttgattggctatgtctacagcctgggccagttcctcctggctggtgtggcctacgctgtgccccactggcgccacctgcagctactggtctctgcgcctttttttgccttcttcatctactcctggttcttcattgagtcggcccgctggcactcctcctccgggaggctggacctcaccctgagggccctgcagagagtcgcccggatcaatgggaagcgggaagaaggagccaaattgagtatggaggtactccgggccagtctgcagaaggagctgaccatgggcaaaggccaggcatcggccatggagctgctgcgctgccccaccctccgccacctcttcctctgcctctccatgctgtggtttgccactagctttgcatactatgggctggtcatggacctgcagggctttggagtcagcatctacctaatccaggtgatctttggtgctgtggacctgcctgccaagcttgtgggcttccttgtcatcaactccctgggtcgccggcctgcccagatggctgcactgctgctggcaggcatctgcatcctgctcaatggggtgataccccaggaccagtccattgtccgaacctctcttgctgtgctggggaagggttgtctggctgcctccttcaactgcatcttcctgtatactggggaactgtatcccacaatgatccggcagacaggcatgggaatgggcagcaccatggcccgagtgggcagcatcgtgagcccactggtgagcatgactgccgagctctacccctccatgcctctcttcatctacggtgctgttcctgtggccgccagcgctgtcactgtcctcctgccagagaccctgggccagccactgccagacacggtgcaggacctggagagcaggaaagggaaacagacgcgacagcaacaagagcaccagaagtatatggtcccactgcaggcctcagcacaagagaagaatggactctgaggactgagaaggggccttacagaaccctaaagggagggaaggtcctacaggtctccggccacccacacaaggaggaggaagaggaaatggtgacccaagtgtgggggttgtggttcaggaaagcatcttcccaggggtccacctccctttataaaccccaccagaaccacatcattaaaaggtttgactgcgcacca

SEQ ID NO: 183192 - DNA, 2151 bp, Homo sapiens
  Payload ID: 16088
  Gene Symbol: SLC22A6
  Gene Name: solute carrier family 22 (organic anion transporter), member 6
  Uniprot ID: Q4U2R8
  ENST ID: ENST00000377871
  CDS Start-End: 268-1959
gaaagctgagctgccctgacccccaaagtgaggagaagctgcaagggaaaagggagggacagatcagggagaccggggaagaaggaggagcagccaaggaggctgctgtccccccacagagcagctcggactcagctcccggagcaacccagctgcggaggcaacggcagtgctgctcctccagcgaaggacagcaggcaggcagacagacagaggtcctgggactggaaggcctcagcccccagccactgggctgggcctggcccaatggcctttaatgacctcctgcagcaggtggggggtgtcggccgcttccagcagatccaggtcaccctggtggtcctccccctgctcctgatggcttctcacaacaccctgcagaacttcactgctgccatccctacccaccactgccgcccgcctgccgatgccaacctcagcaagaacggggggctggaggtctggctgccccgggacaggcaggggcagcctgagtcctgcctccgcttcacctccccgcagtggggactgccctttctcaatggcacagaagccaatggcacaggggccacagagccctgcaccgatggctggatctatgacaacagcaccttcccatctaccatcgtgactgagtgggaccttgtgtgctctcacagggccctacgccagctggcccagtccttgtacatggtgggggtgctgctcggagccatggtgttcggctaccttgcagacaggctaggccgccggaaggtactcatcttgaactacctgcagacagctgtgtcagggacctgcgcagccttcgcacccaacttccccatctactgcgccttccggctcctctcgggcatggctctggctggcatctccctcaactgcatgacactgaatgtggagtggatgcccattcacacacgggcctgcgtgggcaccttgattggctatgtctacagcctgggccagttcctcctggctggtgtggcctacgctgtgccccactggcgccacctgcagctactggtctctgcgcctttttttgccttcttcatctactcctggttcttcattgagtcggcccgctggcactcctcctccgggaggctggacctcaccctgagggccctgcagagagtcgcccggatcaatgggaagcgggaagaaggagccaaattgagtatggaggtactccgggccagtctgcagaaggagctgaccatgggcaaaggccaggcatcggccatggagctgctgcgctgccccaccctccgccacctcttcctctgcctctccatgctgtggtttgccactagctttgcatactatgggctggtcatggacctgcagggctttggagtcagcatctacctaatccaggtgatctttggtgctgtggacctgcctgccaagcttgtgggcttccttgtcatcaactccctgggtcgccggcctgcccagatggctgcactgctgctggcaggcatctgcatcctgctcaatggggtgataccccaggaccagtccattgtccgaacctctcttgctgtgctggggaagggttgtctggctgcctccttcaactgcatcttcctgtatactggggaactgtatcccacaatgatccggcagacaggcatgggaatgggcagcaccatggcccgagtgggcagcatcgtgagcccactggtgagcatgactgccgagctctacccctccatgcctctcttcatctacggtgctgttcctgtggccgccagcgctgtcactgtcctcctgccagagaccctgggccagccactgccagacacggtgcaggacctggagagcaggtgggcccccactcagaaagaagcagggatatatcccaggaaagggaaacagacgcgacagcaacaagagcaccagaagtatatggtcccactgcaggcctcagcacaagagaagaatggactctgaggactgagaaggggccttacagaaccctaaagggagggaaggtcctacaggtctccggccacccacacaaggaggaggaagaggaaatggtgacccaagtgtgggggttgtggttcaggaaagcatcttcccaggggtccacctccctttataaaccccaccagaaccacatcattaaaaggtttgactgcg

SEQ ID NO: 183193 - DNA, 1521 bp, Homo sapiens
  Payload ID: 16088
  Gene Symbol: SLC22A6
  Gene Name: solute carrier family 22 (organic anion transporter), member 6
  Uniprot ID: Q4U2R8
  ENST ID: ENST00000458333
  CDS Start-End: 1-1521
atggcctttaatgacctcctgcagcaggtggggggtgtcggccgcttccagcagatccaggtcaccctggtggtcctccccctgctcctgatggcttctcacaacaccctgcagaacttcactgctgccatccctacccaccactgccgcccgcctgccgatgccaacctcagcaagaacggggggctggaggtctggctgccccgggacaggcaggggcagcctgagtcctgcctccgcttcacctccccgcagtggggactgccctttctcaatggcacagaagccaatggcacaggggccacagagccctgcaccgatggctggatctatgacaacagcaccttcccatctaccatcgtgactgagtgggaccttgtgtgctctcacagggccctacgccagctggcccagtccttgtacatggtgggggtgctgctcggagccatggtgttcggctaccttgcagacaggctaggccgccggaaggtactcatcttgaactacctgcagacagctgtgtcagggacctgcgcagccttcgcacccaacttccccatctactgcgccttccggctcctctcgggcatggctctggctggcatctccctcaactgcatgacactgaatgtggagtggatgcccattcacacacgggcctgcgtgggcaccttgattggctatgtctacagcctgggccagttcctcctggctggtgtggcctacgctgtgccccactggcgccacctgcagctactggtctctgcgcctttttttgccttcttcatctactcctggttcttcattgagtcggcccgctggcactcctcctccgggaggctggacctcaccctgagggccctgcagagagtcgcccggatcaatgggaagcgggaagaaggagccaaattgagtatggaggtactccgggccagtctgcagaaggagctgaccatgggcaaaggccaggcatcggccatggagctgctgcgctgccccaccctccgccacctcttcctctgcctctccatgctgtggtttgccactagctttgcatactatgggctggtcatggacctgcagggctttggagtcagcatctacctaatccaggtgatctttggtgctgtggacctgcctgccaagcttgtgggcttccttgtcatcaactccctgggtcgccggcctgcccagatggctgcactgctgctggcaggcatctgcatcctgctcaatggggtgataccccaggaccagtccattgtccgaacctctcttgctgtgctggggaagggttgtctggctgcctccttcaactgcatcttcctgtatactggggaactgtatcccacaatgatccgcgctgtcactgtcctcctgccagagaccctgggccagccactgccagacacggtgcaggacctggagagcaggaaagggaaacagacgcgacagcaacaagagcaccagaagtatatggtcccactgcaggcctcagcacaagagaagaatggactctga

SEQ ID NO: 183194 - DNA, 1560 bp, Homo sapiens
  Payload ID: 16088
  Gene Symbol: SLC22A6
  Gene Name: solute carrier family 22 (organic anion transporter), member 6
  Uniprot ID: Q4U2R8
  ENST ID: ENST00000421062
  CDS Start-End: 1-1560
atggcctttaatgacctcctgcagcaggtggggggtgtcggccgcttccagcagatccaggtcaccctggtggtcctccccctgctcctgatggcttctcacaacaccctgcagaacttcactgctgccatccctacccaccactgccgcccgcctgccgatgccaacctcagcaagaacggggggctggaggtctggctgccccgggacaggcaggggcagcctgagtcctgcctccgcttcacctccccgcagtggggactgccctttctcaatggcacagaagccaatggcacaggggccacagagccctgcaccgatggctggatctatgacaacagcaccttcccatctaccatcgtgactgagtgggaccttgtgtgctctcacagggccctacgccagctggcccagtccttgtacatggtgggggtgctgctcggagccatggtgttcggctaccttgcagacaggctaggccgccggaaggtactcatcttgaactacctgcagacagctgtgtcagggacctgcgcagccttcgcacccaacttccccatctactgcgccttccggctcctctcgggcatggctctggctggcatctccctcaactgcatgacactgaatgtggagtggatgcccattcacacacgggcctgcgtgggcaccttgattggctatgtctacagcctgggccagttcctcctggctggtgtggcctacgctgtgccccactggcgccacctgcagctactggtctctgcgcctttttttgccttcttcatctactcctggttcttcattgagtcggcccgctggcactcctcctccgggaggctggacctcaccctgagggccctgcagagagtcgcccggatcaatgggaagcgggaagaaggagccaaattgagtatggaggtactccgggccagtctgcagaaggagctgaccatgggcaaaggccaggcatcggccatggagctgctgcgctgccccaccctccgccacctcttcctctgcctctccatgctgtggtttgccactagctttgcatactatgggctggtcatggacctgcagggctttggagtcagcatctacctaatccaggtgatctttggtgctgtggacctgcctgccaagcttgtgggcttccttgtcatcaactccctgggtcgccggcctgcccagatggctgcactgctgctggcaggcatctgcatcctgctcaatggggtgataccccaggaccagtccattgtccgaacctctcttgctgtgctggggaagggttgtctggctgcctccttcaactgcatcttcctgtatactggggaactgtatcccacaatgatccgcgctgtcactgtcctcctgccagagaccctgggccagccactgccagacacggtgcaggacctggagagcaggtgggcccccactcagaaagaagcagggatatatcccaggaaagggaaacagacgcgacagcaacaagagcaccagaagtatatggtcccactgcaggcctcagcacaagagaagaatggactctga

SEQ ID NO: 183195 - DNA, 1778 bp, Homo sapiens
  Payload ID: 16088
  Gene Symbol: SLC22A6
  Gene Name: solute carrier family 22 (organic anion transporter), member 6
  ENST ID: ENST00000540654
  CDS Start-End: 135-920
agctcccggagcaacccagctgcggaggcaacggcagtgctgctcctccagcgaaggacagcaggcaggcagacagacagaggtcctgggactggaaggcctcagcccccagccactgggctgggcctggcccaatggcctttaatgacctcctgcagcaggtggggggtgtcggccgcttccagcagatccaggtcaccctggtggtcctccccctgctcctgatggcttctcacaacaccctgcagaacttcactgctgccatccctacccaccactgccgcccgcctgccgatgccaacctcagcaagaacggggggctggaggtctggctgccccgggacaggcaggggcagcctgagtcctgcctccgcttcacctccccgcagtggggactgccctttctcaatggcacagaagccaatggcacaggggccacagagccctgcaccgatggctggatctatgacaacagcaccttcccatctaccatcgtgactgagggccctacgccagctggcccagtccttgtacatggtgggggtgctgctcggagccatggtgttcggctaccttgcagacaggctaggccgccggaaggtactcatcttgaactacctgcagacagctgtgtcagggacctgcgcagccttcgcacccaacttccccatctactgcgccttccggctcctctcgggcatggctctggctggcatctccctcaactgcatgacactgaatgtggagtggatgcccattcacacacgggcctgcgtgggcaccttgattggctatgtctacagcctgggccagttcctcctggctggtgtggcctacgctgtgccccactggcgccacctgcagctactggtctctgcgcctttttttgccttcttcatctactcctggttcttcattgagtcggcccgctggcactcctcctccgggaggctggacctcaccctgagggccctgcagagagtcgcccggatcaatgggaagcgggaagaaggagccaaattgagtatggaggtactccgggccagtctgcagaaggagctgaccatgggcaaaggccaggcatcggccatggagctgctgcgctgccccaccctccgccacctcttcctctgcctctccatgctgtggtttgccactagctttgcatactatgggctggtcatggacctgcagggctttggagtcagcatctacctaatccaggtgatctttggtgctgtggacctgcctgccaagcttgtgggcttccttgtcatcaactccctgggtcgccggcctgcccagatggctgcactgctgctggcaggcatctgcatcctgctcaatggggtgataccccaggaccagtccattgtccgaacctctcttgctgtgctggggaagggttgtctggctgcctccttcaactgcatcttcctgtatactggggaactgtatcccacaatgatccggcagacaggcatgggaatgggcagcaccatggcccgagtgggcagcatcgtgagcccactggtgagcatgactgccgagctctacccctccatgcctctcttcatctacggtgctgttcctgtggccgccagcgctgtcactgtcctcctgccagagaccctgggccagccactgccagacacggtgcaggacctggagagcaggtggaaagagaaactggggcagcagcaacaggaacagcagatggtcccactccaagcctcctgaggactgagaaggagcagagggtggagaggaggagccct

SEQ ID NO: 183196 - DNA, 1822 bp, Homo sapiens
  Payload ID: 16089
  Gene Symbol: SLC22A7
  Gene Name: solute carrier family 22 (organic anion transporter), member 7
  Uniprot ID: Q9Y694
  ENST ID: ENST00000372574
  CDS Start-End: 1-1620
atgggctttgaggagctgctggagcaggtgggcggctttgggcccttccaactgcggaatgtggcactgctggccctgccccgagtgctgctaccactgcacttcctcctgcccatcttcctggctgccgtgcctgcccaccgatgtgccctgccgggtgcccctgccaacttcagccatcaggatgtgtggctggaggcccatcttccccgggagcctgatggcacgctcagctcctgcctccgctttgcctatccccaggctctccccaacaccacgttgggggaagaaaggcagagccgtggggagctggaggatgaacctgccacagtgccctgctctcagggctgggagtacgaccactcagaattctcctctaccattgcaactgagtgggatctggtgtgtgagcagaaaggtctgaacagagctgcgtccactttcttcttcgccggtgtgctggtgggggctgtggcctttggatatctgtccgacaggtttgggcggcggcgtctgctgctggtagcctacgtgagtaccctggtgctgggcctggcatctgcagcctccgtcagctatgtaatgtttgccatcacccgcacccttactggctcagccctggctggttttaccatcatcgtgatgccactggagctggagtggctggatgtggagcaccgcaccgtggctggagtcctgagcagcaccttctggacagggggcgtgatgctgctggcactggttgggtacctgatacgggactggcgatggcttctgctagctgtcaccctgccttgtgccccaggcatcctcagcctctggtgggtgcctgagtctgcacgctggcttctgacccaaggccatgtgaaagaggcccacaggtacttgctccactgtgccaggctcaatgggcggccagtgtgtgaggacagcttcagccaggaggctgtgagcaaagtggccgccggggaacgggtggtccgaagaccttcatacctagacctgttccgcacaccacggctccgacacatctcactgtgctgcgtggtggtgtggttcggagtgaacttctcctattacggcctgagtctggatgtgtcggggctggggctgaacgtgtaccagacacagctgttgttcggggctgtggaactgccctccaagctgctggtctacttgtcggtgcgctacgcaggacgccgcctcacgcaagccgggacactgctgggcacggccctggcgttcggcactagactgctagtgtcctccgatatgaagtcctggagcactgtcctggcagtgatggggaaagctttttctgaagctgccttcaccactgcctacctgttcacttcagagttgtaccctacggtgctcagacagacagggatggggctgactgcactggtgggccggctggggggctctttggccccactggcggccttgctggatggagtgtggctgtcactgcccaagcttacttatggggggatcgccctgctggctgccggcaccgccctcctgctgccagagacgaggcaggcacagctgccagagaccatccaggacgtggagagaaagaggtgtgtgcacaggactgtgtctgtgtacgtgtgataacatgcatatggatgcaggtgctcagatacctgacaccttaggattcagacaggaaactatatctgcacatgtgtacttggtgcatgtatgtgtgcgtgcacaggtgagtgtttcagggtgcatgattgggggcatgtaaactgcaagcataaatgtgtacatgagtgtatgaacacaaatacataaggttgttcaggaa

SEQ ID NO: 183197 - DNA, 2555 bp, Homo sapiens
  Payload ID: 16089
  Gene Symbol: SLC22A7
  Gene Name: solute carrier family 22 (organic anion transporter), member 7
  Uniprot ID: Q9Y694
  ENST ID: ENST00000372585
  CDS Start-End: 96-1742
ccacctccagagtccaagggtctatgtggtgggcagtttgagctggctggatactagagggaggctgcacctgaagcatttggtgggtgagcagcatgggctttgaggagctgctggagcaggtgggcggctttgggcccttccaactgcggaatgtggcactgctggccctgccccgagtgctgctaccactgcacttcctcctgcccatcttcctggctgccgtgcctgcccaccgatgtgccctgccgggtgcccctgccaacttcagccatcaggatgtgtggctggaggcccatcttccccgggagcctgatggcacgctcagctcctgcctccgctttgcctatccccaggctctccccaacaccacgttgggggaagaaaggcagagccgtggggagctggaggatgaacctgccacagtgccctgctctcagggctgggagtacgaccactcagaattctcctctaccattgcaactgagtcccagtgggatctggtgtgtgagcagaaaggtctgaacagagctgcgtccactttcttcttcgccggtgtgctggtgggggctgtggcctttggatatctgtccgacaggtttgggcggcggcgtctgctgctggtagcctacgtgagtaccctggtgctgggcctggcatctgcagcctccgtcagctatgtaatgtttgccatcacccgcacccttactggctcagccctggctggttttaccatcatcgtgatgccactggagctggagtggctggatgtggagcaccgcaccgtggctggagtcctgagcagcaccttctggacagggggcgtgatgctgctggcactggttgggtacctgatacgggactggcgatggcttctgctagctgtcaccctgccttgtgccccaggcatcctcagcctctggtgggtgcctgagtctgcacgctggcttctgacccaaggccatgtgaaagaggcccacaggtacttgctccactgtgccaggctcaatgggcggccagtgtgtgaggacagcttcagccaggaggctgtgagcaaagtggccgccggggaacgggtggtccgaagaccttcatacctagacctgttccgcacaccacggctccgacacatctcactgtgctgcgtggtggtgtggttcggagtgaacttctcctattacggcctgagtctggatgtgtcggggctggggctgaacgtgtaccagacacagctgttgttcggggctgtggaactgccctccaagctgctggtctacttgtcggtgcgctacgcaggacgccgcctcacgcaagccgggacactgctgggcacggccctggcgttcggcactagactgctagtgtcctccgatatgaagtcctggagcactgtcctggcagtgatggggaaagctttttctgaagctgccttcaccactgcctacctgttcacttcagagttgtaccctacggtgctcagacagacagggatggggctgactgcactggtgggccggctggggggctctttggccccactggcggccttgctggatggagtgtggctgtcactgcccaagcttacttatggggggatcgccctgctggctgccggcaccgccctcctgctgccagagacgaggcaggcacagctgccagagaccatccaggacgtggagagaaagagtgccccaaccagtcttcaggaggaagagatgcccatgaagcaggtccagaactaagtgggagtggaggcaggccctccacagaagctctgcagcaggggctgggagagcagaagggcaggccctgcaactcaggctgggagtatcgaaccctctgcctagggccggagttgctgccagtacccgctccctctgctcatccatccttgattatttggcttctaggaacagttgacttcccagaatgcagtgggctgctgggcacccctctcacggttggggaggattctgtaaataaaggtgccccttgggttggggcagtggtgacgagctgtgggaagagccctggataggaagccactgagtctgccctgggctctgataaaaccttcaccattaacttgctgtgtgaccttgggcatgtggctttccctctctgggcctcagtctgttcatctcccaaatggataatgaagcctcttgggaggccctaccataggatctgttgccatgctcaaatgagttactgaataaggtgcttctgcttcttctagagatggtgctaaagaaaggactagcatatgagacttctggtaccaatggggctggtgggcatgctgtccactgtgtggtgctaggactgccaatgccaggcccaagggacaaaaagaacagagctttttgttctcatggctggccctgctacctccgaggcaccctgcagggcaatgcatgtcatcccaacccccacactccccatcctccaacccactggtctcatgcccaaagaagagttgaaggcatgggagccaacattttattgaagaagccacagaggctgaaattcaataaacacaagttttatgagta

SEQ ID NO: 183198 - DNA, 2549 bp, Homo sapiens
  Payload ID: 16089
  Gene Symbol: SLC22A7
  Gene Name: solute carrier family 22 (organic anion transporter), member 7
  Uniprot ID: Q9Y694
  ENST ID: ENST00000372589
  CDS Start-End: 96-1736
ccacctccagagtccaagggtctatgtggtgggcagtttgagctggctggatactagagggaggctgcacctgaagcatttggtgggtgagcagcatgggctttgaggagctgctggagcaggtgggcggctttgggcccttccaactgcggaatgtggcactgctggccctgccccgagtgctgctaccactgcacttcctcctgcccatcttcctggctgccgtgcctgcccaccgatgtgccctgccgggtgcccctgccaacttcagccatcaggatgtgtggctggaggcccatcttccccgggagcctgatggcacgctcagctcctgcctccgctttgcctatccccaggctctccccaacaccacgttgggggaagaaaggcagagccgtggggagctggaggatgaacctgccacagtgccctgctctcagggctgggagtacgaccactcagaattctcctctaccattgcaactgagtgggatctggtgtgtgagcagaaaggtctgaacagagctgcgtccactttcttcttcgccggtgtgctggtgggggctgtggcctttggatatctgtccgacaggtttgggcggcggcgtctgctgctggtagcctacgtgagtaccctggtgctgggcctggcatctgcagcctccgtcagctatgtaatgtttgccatcacccgcacccttactggctcagccctggctggttttaccatcatcgtgatgccactggagctggagtggctggatgtggagcaccgcaccgtggctggagtcctgagcagcaccttctggacagggggcgtgatgctgctggcactggttgggtacctgatacgggactggcgatggcttctgctagctgtcaccctgccttgtgccccaggcatcctcagcctctggtgggtgcctgagtctgcacgctggcttctgacccaaggccatgtgaaagaggcccacaggtacttgctccactgtgccaggctcaatgggcggccagtgtgtgaggacagcttcagccaggaggctgtgagcaaagtggccgccggggaacgggtggtccgaagaccttcatacctagacctgttccgcacaccacggctccgacacatctcactgtgctgcgtggtggtgtggttcggagtgaacttctcctattacggcctgagtctggatgtgtcggggctggggctgaacgtgtaccagacacagctgttgttcggggctgtggaactgccctccaagctgctggtctacttgtcggtgcgctacgcaggacgccgcctcacgcaagccgggacactgctgggcacggccctggcgttcggcactagactgctagtgtcctccgatatgaagtcctggagcactgtcctggcagtgatggggaaagctttttctgaagctgccttcaccactgcctacctgttcacttcagagttgtaccctacggtgctcagacagacagggatggggctgactgcactggtgggccggctggggggctctttggccccactggcggccttgctggatggagtgtggctgtcactgcccaagcttacttatggggggatcgccctgctggctgccggcaccgccctcctgctgccagagacgaggcaggcacagctgccagagaccatccaggacgtggagagaaagagtgccccaaccagtcttcaggaggaagagatgcccatgaagcaggtccagaactaagtgggagtggaggcaggccctccacagaagctctgcagcaggggctgggagagcagaagggcaggccctgcaactcaggctgggagtatcgaaccctctgcctagggccggagttgctgccagtacccgctccctctgctcatccatccttgattatttggcttctaggaacagttgacttcccagaatgcagtgggctgctgggcacccctctcacggttggggaggattctgtaaataaaggtgccccttgggttggggcagtggtgacgagctgtgggaagagccctggataggaagccactgagtctgccctgggctctgataaaaccttcaccattaacttgctgtgtgaccttgggcatgtggctttccctctctgggcctcagtctgttcatctcccaaatggataatgaagcctcttgggaggccctaccataggatctgttgccatgctcaaatgagttactgaataaggtgcttctgcttcttctagagatggtgctaaagaaaggactagcatatgagacttctggtaccaatggggctggtgggcatgctgtccactgtgtggtgctaggactgccaatgccaggcccaagggacaaaaagaacagagctttttgttctcatggctggccctgctacctccgaggcaccctgcagggcaatgcatgtcatcccaacccccacactccccatcctccaacccactggtctcatgcccaaagaagagttgaaggcatgggagccaacattttattgaagaagccacagaggctgaaattcaataaacacaagttttatgagta

SEQ ID NO: 183199 - DNA, 658 bp, Homo sapiens
  Payload ID: 16089
  Gene Symbol: SLC22A7
  Gene Name: solute carrier family 22 (organic anion transporter), member 7
  ENST ID: ENST00000436107
  CDS Start-End: 25-658
attgagatcacatagccaactctgatgttacaacctcacctccttccctaccaggctgtgagcaaagtggccgccggggaacgggtggtccgaagaccttcatacctagacctgttccgcacaccacggctccgacacatctcactgtgctgcgtggtggtgtggttcggagtgaacttctcctattacggcctgagtctggatgtgtcggggctggggctgaacgtgtaccagacacagctgttgttcggggctgtggaactgccctccaagctgctggtctacttgtcggtgcgctacgcaggacgccgcctcacgcaagccgggacactgctgggcacggccctggcgttcggcactagactgctagtgtcctccgatatgaagtcctggagcactgtcctggcagtgatggggaaagctttttctgaagctgccttcaccactgcctacctgttcacttcagagttgtaccctacggtgctcagacagacagggatggggctgactgcactggtgggccggctggggggctctttggccccactggcggccttgctggatggagtgtggctgtcactgcccaagcttacttatggggggatcgccctgctggctgccggcaccgccctcctgctgccagagacgaggcaggcac

SEQ ID NO: 183200 - DNA, 933 bp, Homo sapiens
  Payload ID: 16089
  Gene Symbol: SLC22A7
  Gene Name: solute carrier family 22 (organic anion transporter), member 7
  ENST ID: ENST00000449231
  CDS Start-End: 99-933
ctcccacctccagagtccaagggtctatgtggtgggcagtttgagctggctggatactagagggaggctgcacctgaagcatttggtgggtgagcagcatgggctttgaggagctgctggagcaggtgggcggctttgggcccttccaactgcggaatgtggcactgctggccctgccccgagtgctgctaccactgcacttcctcctgcccatcttcctggctgccgtgcctgcccaccgatgtgccctgccgggtgcccctgccaacttcagccatcaggatgtgtggctggaggcccatcttccccgggagcctgatggcacgctcagctcctgcctccgctttgcctatccccaggctctccccaacaccacgttgggggaagaaaggcagagccgtggggagctggaggatgaacctgccacagtgccctgctctcagggctgggagtacgaccactcagaattctcctctaccattgcaactgagtcccaggtcggtatttacataatccatctggaggtggaatgtcggtggaggcagtctccctgggaggcagcaggtcgaggccttccttgggaagaagctgaggctgcaggactggggagggacaaagtttcctattccccaagctggcgtgaatcgttgggaggtttattatctggcatggagtgggatctggtgtgtgagcagaaaggtctgaacagagctgcgtccactttcttcttcgccggtgtgctggtgggggctgtggcctttggatatctgtccgacaggtttgggcggcggcgtctgctgctggtagcctacgtgagtaccctggtgctgggcctggcatctgcagcctccgtcagctatgtaatgtttgccatcacccgcacccttactggctcagccctggctggttttaccatcatcgtgatgccactgg

SEQ ID NO: 183201 - DNA, 846 bp, Homo sapiens
  Payload ID: 16089
  Gene Symbol: SLC22A7
  Gene Name: solute carrier family 22 (organic anion transporter), member 7
  ENST ID: ENST00000451757
  CDS Start-End: 404-846
tgggagctctgctgaccaaggggctaggggctcacctcctatgccatcacccagctacctcatcatggtagccttggtccctgaacactaatgggctctccccaacaccacgttgggggaagaaaggcagagccgtggggagctggaggatgaacctgccacagtgccctgctctcagggctgggagtacgaccactcagaattctcctctaccattgcaactgagtcccaggtcggtatttacataatccatctggaggtggaatgtcggtggaggcagtctccctgggaggcagcaggtcgaggccttccttgggaagaagctgaggctgcaggactggggagggacaaagtttcctattccccaagctggcgtgaatcgttgggaggtttattatctggcatggagtgggatctggtgtgtgagcagaaaggtctgaacagagctgcgtccactttcttcttcgccggtgtgctggtgggggctgtggcctttggatatctgtccgacaggtttgggcggcggcgtctgctgctggtagcctacgtgagtaccctggtgctgggcctggcatctgcagcctccgtcagctatgtaatgtttgccatcacccgcacccttactggctcagccctggctggttttaccatcatcgtgatgccactgggtgaggcagagctggagtggctggatgtggagcaccgcaccgtggctggagtcctgagcagcaccttctggacagggggcgtgatgctgctggcactggttgggtacctgatacgggactggcgatggcttctgctagctgtcaccctgccttgtgccccaggcatcctcagcctctg

SEQ ID NO: 183202 - DNA, 1339 bp, Homo sapiens
  Payload ID: 16089
  Gene Symbol: SLC22A7
  Gene Name: solute carrier family 22 (organic anion transporter), member 7
  ENST ID: ENST00000498232
  CDS Start-End: 99-806
ctcccacctccagagtccaagggtctatgtggtgggcagtttgagctggctggatactagagggaggctgcacctgaagcatttggtgggtgagcagcatgggctttgaggagctgctggagcaggtgggcggctttgggcccttccaactgcggaatgtggcactgctggccctgccccgagtgctgctaccactgcacttcctcctgcccatcttcctggctgccgtgcctgcccaccgatgtgccctgccgggtgcccctgccaacttcagccatcaggatgtgtggctggaggcccatcttccccgggagcctgatggcacgctcagctcctgcctccgctttgcctatccccaggctctccccaacaccacgttgggggaagaaaggcagagccgtggggagctggaggatgaacctgccacagtgccctgctctcagggctgggagtacgaccactcagaattctcctctaccattgcaactgagtcccaggtcggtatttacataatccatctggaggtggaatgtcggtggaggcagtctccctgggaggcagcaggtcgaggccttccttgggaagaagctgaggctgcaggactggggagggacaaagtttcctattccccaagctggcgtgaatcgttgggaggtttattatctggcatggaggtaccagaatggcagagttcgcctcagaaggctccagggtctggagaggaggagctggtgcctgctggagaggggctgatgttcataggaggtccctttctgcctgtccttgcagtgggatctggtgtgtgagcagaaaggtctgaacagagctgcgtccactttcttcttcgccggtgtgctggtgggggctgtggcctttggatatctgtccgacaggtttgggcggcggcgtctgctgctggtagcctacgtgagtaccctggtgctgggcctggcatctgcagcctccgtcagctatgtaatgtttgccatcacccgcacccttactggctcagccctggctggttttaccatcatcgtgatgccactggagctggagtggctggatgtggagcaccgcaccgtggctggagtcctgagcagcaccttctggacagggggcgtgatgctgctggcactggttgggtacctgatacgggactggcgatggcttctgctagctgtcaccctgccttgtgccccaggcatcctcagcctctggtgaggactgcaggcagctggggagcgggagatacaggaagtgaaagatgagattaatcagagcctgagatttgaggatagagagattgagagatgaagggaaagagaaacgaagtgaccaa

SEQ ID NO: 183203 - DNA, 1716 bp, Homo sapiens
  Payload ID: 16090
  Gene Symbol: SLC22A8
  Gene Name: solute carrier family 22 (organic anion transporter), member 8
  ENST ID: ENST00000311438
  CDS Start-End: 1-1602
atgaccttctcggagatcctggaccgtgtgggaagcatgggccatttccagttcctgcatgtagccatactgggcctcccgatcctcaacatggccaaccacaacctgctgcagatcttcacagccgccacccctgtccaccactgtcgcccgccccacaatgcctccacagggccttgggtgctccccatgggcccaaatgggaagcctgagaggtgcctccgttttgtacatccgcccaatgccagcctgcccaatgacacccagagggccatggagccatgcctggatggctgggtctacaacagcaccaaggactccattgtgacagagtgggacttggtgtgcaactccaacaaactgaaggagatggcccagtctatcttcatggcaggtatactgattggagggctcgtgcttggagacctgtctgacaggtttggccgcaggcccatcctgacctgcagctacctgctgctggcagccagcggctccggtgcagccttcagccccaccttccccatctacatggtcttccgcttcctgtgtggctttggcatctcaggcattaccctgagcaccgtcatcttgaatgtggaatgggtgcctacccggatgcgggccatcatgtcgacagcactcgggtactgctacacctttggccagttcattctgcccggcctggcctacgccatcccccagtggcgttggctgcagttaactgtgtccattcccttcttcgtcttcttcctatcatcctggtggacaccagagtccatacgctggttggtcttgtctggaaagtcctcgaaggccctgaagatactccggcgggtggctgtcttcaatggcaagaaggaagagggagaaaggctcagcttggaggagctcaaactcaacctgcagaaggagatctccttggccaaggccaagtacaccgcaagtgacctgttccggatacccatgctgcgccgcatgaccttctgtctttccctggcctggtttgctaccggttttgcctactatagtttggctatgggtgtggaagaatttggagtcaacctctacatcctccagatcatctttggtggggtcgatgtcccagccaagttcatcaccatcctctccttaagctacctgggccggcataccactcaggccgctgccctgctcctggcaggaggggccatcttggctctcacctttgtgcccttggacttgcagaccgtgaggacagtattggctgtgtttgggaagggatgcctatccagctccttcagctgcctcttcctctacacaagtgaattataccccacagtcatcaggcaaacaggtatgggcgtaagtaacctgtggacccgcgtgggaagcatggtgtccccgctggtgaaaatcacgggtgaggtacagcccttcatccccaatatcatctacgggatcaccgccctcctcgggggcagtgctgccctcttcctgcctgagaccctgaatcagcccttgccagagactatcgaagacctggaaaactggtcagtcactgcctctggccccatcagtgctcctccctggggaagcaggtctgggcccagggcttttccttagctctctgtccctaggtccctgcgggcaaagaagccaaagcaggagccagaggtggaaaaggcctcccagaggatccctctacagcctcacggaccaggcctgggctccagctga

SEQ ID NO: 183204 - DNA, 2178 bp, Homo sapiens
  Payload ID: 16090
  Gene Symbol: SLC22A8
  Gene Name: solute carrier family 22 (organic anion transporter), member 8
  Uniprot ID: Q8TCC7
  ENST ID: ENST00000336232
  CDS Start-End: 137-1765
agcttgttagagctgagctgccctactacagcagctgccggcccctaggacagagcagggacctcaactacactgatcaccagccccatcggatccagacccggccaccagctctggctcgtcttgccccagtgccatgaccttctcggagatcctggaccgtgtgggaagcatgggccatttccagttcctgcatgtagccatactgggcctcccgatcctcaacatggccaaccacaacctgctgcagatcttcacagccgccacccctgtccaccactgtcgcccgccccacaatgcctccacagggccttgggtgctccccatgggcccaaatgggaagcctgagaggtgcctccgttttgtacatccgcccaatgccagcctgcccaatgacacccagagggccatggagccatgcctggatggctgggtctacaacagcaccaaggactccattgtgacagagtgggacttggtgtgcaactccaacaaactgaaggagatggcccagtctatcttcatggcaggtatactgattggagggctcgtgcttggagacctgtctgacaggtttggccgcaggcccatcctgacctgcagctacctgctgctggcagccagcggctccggtgcagccttcagccccaccttccccatctacatggtcttccgcttcctgtgtggctttggcatctcaggcattaccctgagcaccgtcatcttgaatgtggaatgggtgcctacccggatgcgggccatcatgtcgacagcactcgggtactgctacacctttggccagttcattctgcccggcctggcctacgccatcccccagtggcgttggctgcagttaactgtgtccattcccttcttcgtcttcttcctatcatcctggtggacaccagagtccatacgctggttggtcttgtctggaaagtcctcgaaggccctgaagatactccggcgggtggctgtcttcaatggcaagaaggaagagggagaaaggctcagcttggaggagctcaaactcaacctgcagaaggagatctccttggccaaggccaagtacaccgcaagtgacctgttccggatacccatgctgcgccgcatgaccttctgtctttccctggcctggtttgctaccggttttgcctactatagtttggctatgggtgtggaagaatttggagtcaacctctacatcctccagatcatctttggtggggtcgatgtcccagccaagttcatcaccatcctctccttaagctacctgggccggcataccactcaggccgctgccctgctcctggcaggaggggccatcttggctctcacctttgtgcccttggacttgcagaccgtgaggacagtattggctgtgtttgggaagggatgcctatccagctccttcagctgcctcttcctctacacaagtgaattataccccacagtcatcaggcaaacaggtatgggcgtaagtaacctgtggacccgcgtgggaagcatggtgtccccgctggtgaaaatcacgggtgaggtacagcccttcatccccaatatcatctacgggatcaccgccctcctcgggggcagtgctgccctcttcctgcctgagaccctgaatcagcccttgccagagactatcgaagacctggaaaactggtccctgcgggcaaagaagccaaagcaggagccagaggtggaaaaggcctcccagaggatccctctacagcctcacggaccaggcctgggctccagctgaggacaacggaaccccctttccctgccctccagagactgatcctagccaggcaccttaggagtatagggaggccccatataggtccatcctcctaggatgaagccttctgagagcttggtgaaggtgtctccatcaccaccaccagagcctcctgcccagccctggccagttcaaaggttcagccatccctgcccttgttctccctgcaacccaggccctgccattcttctgtctagcccttccccactggccaccttcccccactgtcccggtcctcttcccctgaggtcccctgatatcccctggctcagtcctaacaagactgagtcttaacaagatgagaagtcctccccttcttgcctcccacacttttctttgatgggaggtttcaataaacagcgataagaactcta

SEQ ID NO: 183205 - DNA, 1744 bp, Homo sapiens
  Payload ID: 16090
  Gene Symbol: SLC22A8
  Gene Name: solute carrier family 22 (organic anion transporter), member 8
  Uniprot ID: Q8TCC7
  ENST ID: ENST00000430500
  CDS Start-End: 116-1744
agcttgttagagctgagctgccctactacagcagctgccggcccctaggacagagcagggacctcaactacactgatcaccagccccatcggatccagacccggccaccagtgccatgaccttctcggagatcctggaccgtgtgggaagcatgggccatttccagttcctgcatgtagccatactgggcctcccgatcctcaacatggccaaccacaacctgctgcagatcttcacagccgccacccctgtccaccactgtcgcccgccccacaatgcctccacagggccttgggtgctccccatgggcccaaatgggaagcctgagaggtgcctccgttttgtacatccgcccaatgccagcctgcccaatgacacccagagggccatggagccatgcctggatggctgggtctacaacagcaccaaggactccattgtgacagagtgggacttggtgtgcaactccaacaaactgaaggagatggcccagtctatcttcatggcaggtatactgattggagggctcgtgcttggagacctgtctgacaggtttggccgcaggcccatcctgacctgcagctacctgctgctggcagccagcggctccggtgcagccttcagccccaccttccccatctacatggtcttccgcttcctgtgtggctttggcatctcaggcattaccctgagcaccgtcatcttgaatgtggaatgggtgcctacccggatgcgggccatcatgtcgacagcactcgggtactgctacacctttggccagttcattctgcccggcctggcctacgccatcccccagtggcgttggctgcagttaactgtgtccattcccttcttcgtcttcttcctatcatcctggtggacaccagagtccatacgctggttggtcttgtctggaaagtcctcgaaggccctgaagatactccggcgggtggctgtcttcaatggcaagaaggaagagggagaaaggctcagcttggaggagctcaaactcaacctgcagaaggagatctccttggccaaggccaagtacaccgcaagtgacctgttccggatacccatgctgcgccgcatgaccttctgtctttccctggcctggtttgctaccggttttgcctactatagtttggctatgggtgtggaagaatttggagtcaacctctacatcctccagatcatctttggtggggtcgatgtcccagccaagttcatcaccatcctctccttaagctacctgggccggcataccactcaggccgctgccctgctcctggcaggaggggccatcttggctctcacctttgtgcccttggacttgcagaccgtgaggacagtattggctgtgtttgggaagggatgcctatccagctccttcagctgcctcttcctctacacaagtgaattataccccacagtcatcaggcaaacaggtatgggcgtaagtaacctgtggacccgcgtgggaagcatggtgtccccgctggtgaaaatcacgggtgaggtacagcccttcatccccaatatcatctacgggatcaccgccctcctcgggggcagtgctgccctcttcctgcctgagaccctgaatcagcccttgccagagactatcgaagacctggaaaactggtccctgcgggcaaagaagccaaagcaggagccagaggtggaaaaggcctcccagaggatccctctacagcctcacggaccaggcctgggctccagctga

SEQ ID NO: 183206 - DNA, 1622 bp, Homo sapiens
  Payload ID: 16090
  Gene Symbol: SLC22A8
  Gene Name: solute carrier family 22 (organic anion transporter), member 8
  Uniprot ID: Q8TCC7
  ENST ID: ENST00000545207
  CDS Start-End: 113-1468
actacagcagctgccggcccctaggacagagcagggacctcaactacactgatcaccagccccatcggatccagacccggccaccagcctgcccaatgacacccagagggccatggagccatgcctggatggctgggtctacaacagcaccaaggactccattgtgacagagtgggacttggtgtgcaactccaacaaactgaaggagatggcccagtctatcttcatggcaggtatactgattggagggctcgtgcttggagacctgtctgacaggtttggccgcaggcccatcctgacctgcagctacctgctgctggcagccagcggctccggtgcagccttcagccccaccttccccatctacatggtcttccgcttcctgtgtggctttggcatctcaggcattaccctgagcaccgtcatcttgaatgtggaatgggtgcctacccggatgcgggccatcatgtcgacagcactcgggtactgctacacctttggccagttcattctgcccggcctggcctacgccatcccccagtggcgttggctgcagttaactgtgtccattcccttcttcgtcttcttcctatcatcctggtggacaccagagtccatacgctggttggtcttgtctggaaagtcctcgaaggccctgaagatactccggcgggtggctgtcttcaatggcaagaaggaagagggagaaaggctcagcttggaggagctcaaactcaacctgcagaaggagatctccttggccaaggccaagtacaccgcaagtgacctgttccggatacccatgctgcgccgcatgaccttctgtctttccctggcctggtttgctaccggttttgcctactatagtttggctatgggtgtggaagaatttggagtcaacctctacatcctccagatcatctttggtggggtcgatgtcccagccaagttcatcaccatcctctccttaagctacctgggccggcataccactcaggccgctgccctgctcctggcaggaggggccatcttggctctcacctttgtgcccttggacttgcagaccgtgaggacagtattggctgtgtttgggaagggatgcctatccagctccttcagctgcctcttcctctacacaagtgaattataccccacagtcatcaggcaaacaggtatgggcgtaagtaacctgtggacccgcgtgggaagcatggtgtccccgctggtgaaaatcacgggtgaggtacagcccttcatccccaatatcatctacgggatcaccgccctcctcgggggcagtgctgccctcttcctgcctgagaccctgaatcagcccttgccagagactatcgaagacctggaaaactggtccctgcgggcaaagaagccaaagcaggagccagaggtggaaaaggcctcccagaggatccctctacagcctcacggaccaggcctgggctccagctgaggacaacggaaccccctttccctgccctccagagactgatcctagccaggcaccttaggagtatagggaggccccatataggtccatcctcctaggatgaagccttctgagagcttggtgaaggtgtctccatcaccaccaccagagcctcctg

SEQ ID NO: 183207 - DNA, 1387 bp, Homo sapiens
  Payload ID: 16090
  Gene Symbol: SLC22A8
  Gene Name: solute carrier family 22 (organic anion transporter), member 8
  Uniprot ID: Q8TCC7
  ENST ID: ENST00000535878
  CDS Start-End: 119-1378
agcagctgccggcccctaggacagagcagggacctcaactacactgatcaccagccccatcggatccagacccggccaccagtgggacttggtgtgcaactccaacaaactgaaggagatggcccagtctatcttcatggcaggtatactgattggagggctcgtgcttggagacctgtctgacaggtttggccgcaggcccatcctgacctgcagctacctgctgctggcagccagcggctccggtgcagccttcagccccaccttccccatctacatggtcttccgcttcctgtgtggctttggcatctcaggcattaccctgagcaccgtcatcttgaatgtggaatgggtgcctacccggatgcgggccatcatgtcgacagcactcgggtactgctacacctttggccagttcattctgcccggcctggcctacgccatcccccagtggcgttggctgcagttaactgtgtccattcccttcttcgtcttcttcctatcatcctggtggacaccagagtccatacgctggttggtcttgtctggaaagtcctcgaaggccctgaagatactccggcgggtggctgtcttcaatggcaagaaggaagagggagaaaggctcagcttggaggagctcaaactcaacctgcagaaggagatctccttggccaaggccaagtacaccgcaagtgacctgttccggatacccatgctgcgccgcatgaccttctgtctttccctggcctggtttgctaccggttttgcctactatagtttggctatgggtgtggaagaatttggagtcaacctctacatcctccagatcatctttggtggggtcgatgtcccagccaagttcatcaccatcctctccttaagctacctgggccggcataccactcaggccgctgccctgctcctggcaggaggggccatcttggctctcacctttgtgcccttggacttgcagaccgtgaggacagtattggctgtgtttgggaagggatgcctatccagctccttcagctgcctcttcctctacacaagtgaattataccccacagtcatcaggcaaacaggtatgggcgtaagtaacctgtggacccgcgtgggaagcatggtgtccccgctggtgaaaatcacgggtgaggtacagcccttcatccccaatatcatctacgggatcaccgccctcctcgggggcagtgctgccctcttcctgcctgagaccctgaatcagcccttgccagagactatcgaagacctggaaaactggtccctgcgggcaaagaagccaaagcaggagccagaggtggaaaaggcctcccagaggatccctctacagcctcacggaccaggcctgggctccagctgaggacaacgg

SEQ ID NO: 183208 - DNA, 2343 bp, Homo sapiens
  Payload ID: 16091
  Gene Symbol: SLC22A9
  Gene Name: solute carrier family 22 (organic anion transporter), member 9
  Uniprot ID: Q8IVM8
  ENST ID: ENST00000279178
  CDS Start-End: 250-1911
tgggagtatctgagcaaattatttcttacgtgactttagagaaaacggctacctatctgaccccaaaacgacttgaggaaactgtttccacggtcctgctgcagaggggaagcacagtcgtcaagaagagagtggggtcaggatcaaaacacatttagtgtgacttagggaaagaaaacattttccctctttgaacctctctggatacagtcattttgcctctacttgaggatcaactgttcaacctcaatggcctttcaggacctcctgggtcacgctggtgacctgtggagattccagatccttcagactgtttttctctcaatctttgctgttgctacataccttcattttatgctggagaacttcactgcattcatacctggccatcgctgctgggtccacatcctggacaatgacactgtctctgacaatgacactggggccctcagccaagatgcactcttgagaatctccatcccactggactcaaacatgaggccagagaagtgtcgtcgctttgttcatcctcagtggcagctccttcacctgaatgggaccttccccaacacaagtgacgcagacatggagccctgtgtggatggctgggtgtatgacagaatctccttctcatccaccatcgtgactgagtgggatctggtatgtgactctcaatcactgacttcagtggctaaatttgtattcatggctggaatgatggtgggaggcatcctaggcggtcatttatcagacaggtttgggagaaggttcgtgctcagatggtgttacctccaggttgccattgttggcacctgtgcagccttggctcccaccttcctcatttactgctcactacgcttcttgtctgggattgctgcaatgagcctcataacaaatactattatgttaatagccgagtgggcaacacacagattccaggccatgggaattacattgggaatgtgcccttctggtattgcatttatgaccctggcaggcctggcttttgccattcgagactggcatatcctccagctggtggtgtctgtaccatactttgtgatctttctgacctcaagttggctgctagagtctgctcggtggctcattatcaacaataaaccagaggaaggcttaaaggaacttagaaaagctgcacacaggagtggaatgaagaatgccagagacaccctaaccctggagattttgaaatccaccatgaaaaaagaactggaggcagcacaaaaaaaaaaaccttctctgtgtgaaatgctccacatgcccaacatatgtaaaaggatctccctcctgtcctttacgagatttgcaaactttatggcctattttggccttaatctccatgtccagcatctggggaacaatgttttcctgttgcagactctctttggtgcagtcatcctcctggccaactgtgttgcaccttgggcactgaaatacatgaaccgtcgagcaagccagatgcttctcatgttcctactggcaatctgccttctggccatcatatttgtgccacaagaaatgcagacgctgcgtgaggttttggcaacactgggcttaggagcgtctgctcttgccaatacccttgcttttgcccatggaaatgaagtaattcccaccataatcagggcaagagctatggggatcaatgcaacctttgctaatatagcaggagccctggctcccctcatgatgatcctaagtgtgtattctccacccctgccctggatcatctatggagtcttccccttcatctctggctttgctttcctcctccttcctgaaaccaggaacaagcctctgtttgacaccatccaggatgagaaaaatgagagaaaagaccccagagaaccaaagcaagaggatccgagagtggaagtgacgcagttttaaggaattccaggagctgactgccgatcaatgagccagatgaagggaacaatcaggactattcctagacactagcaaaatctagaaaataaataacaaggctgggtgcggtggctcacgcctgtaatcccagcaccttgggaggctgaggcgggcagatcatgaggtcagaagataaagaccaccctggccaacatggtgaaaccctgtctctactaaaacaaatacaaaacttcgctgggcacagtggcacaggcctttaattccagctacttgggaggctgaggcaggagaattacttgaacccaggaggtggaaattgcaatgagccaagattgggccactgcattccagcctggtgacagagcgagactgtctcaaaaaaaaaaaaaaaaaaaaaagaaagaaggaaagaaagaaagaaaagaaaagaaa

SEQ ID NO: 183209 - DNA, 1558 bp, Homo sapiens
  Payload ID: 16091
  Gene Symbol: SLC22A9
  Gene Name: solute carrier family 22 (organic anion transporter), member 9
  Uniprot ID: Q8IVM8
  ENST ID: ENST00000536333
  CDS Start-End: 269-985
acatttcattgtaaacgactgggagtatctgagcaaattatttcttacgtgactttagagaaaacggctacctatctgaccccaaaacgacttgaggaaactgtttccacggtcctgctgcagaggggaagcacagtcgtcaagaagagagtggggtcaggatcaaaacacatttagtgtgacttagggaaagaaaacattttccctctttgaacctctctggatacagtcattttgcctctacttgaggatcaactgttcaacctcaatggcctttcaggacctcctgggtcacgctggtgacctgtggagattccagatccttcagactgtttttctctcaatctttgctgttgctacataccttcattttatgctggagaacttcactgcattcatacctggccatcgctgctgggtccacatcctggacaatgacactgtctctgacaatgacactggggccctcagccaagatgcactcttgagaatctccatcccactggactcaaacatgaggccagagaagtgtcgtcgctttgttcatcctcagtggcagctccttcacctgaatgggaccttccccaacacaagtgacgcagacatggagccctgtgtggatggctgggtgtatgacagaatctccttctcatccaccatcgtgactgagtgggatctggtatgtgactctcaatcactgacttcagtggctaaatttgtattcatggctggaatgatggtgggaggcatcctaggcggtcatttatcagacagtagccgagtgggcaacacacagattccaggccatgggaattacattgggaatgtgcccttctggtattgcatttatgaccctggcaggcctggcttttgccattcgagactggcatatcctccagctggtggtgtctgtaccatactttgtgatctttctgacctcaagttggctgctagagtctgctcggtggctcattatcaacaataaaccagaggaaggcttaaaggaacttagaaaagctgcacacaggagtggaatgaagaatgccagagacaccctaaccctggagattttgaaatccaccatgaaaaaagaactggaggcagcacaaaaaaaaaaaccttctctgtgtgaaatgctccacatgcccaacatatgtaaaaggatctccctcctgtcctttacgagatttgcaaactttatggcctattttggccttaatctccatgtccagcatctggggaacaatgttttcctgttgcagactctctttggtgcagtcatcctcctggccaactgtgttgcaccttgggcactgaaatacatgaaccgtcgagcaagccagatgcttctcatgttcctactggcaatctgccttctggccatcatatttgtgccacaaggagaaaagaccccagagaaccaaagcaagaggatccgagagtggaagtgacgcagttttaaggaattccaggagctgactgccgatcaatgagccagatgaagggaacaatcaggactattcctagacactagcaaaatctagaaaataaataacaa

SEQ ID NO: 183210 - DNA, 3860 bp, Homo sapiens
  Payload ID: 16092
  Gene Symbol: SLC22A11
  Gene Name: solute carrier family 22 (organic anion/urate transporter), member 11
  Uniprot ID: Q9NSA0
  ENST ID: ENST00000301891
  CDS Start-End: 375-2027
atctgcctgactttcacttttggtgctggagaactcagaaggtggctcagccctctggtccacacttggtgggcagctcggatgccccaggcagcccgggcacagtgagcttagtccccttcaccccctccgcagagctctggggcatccgcacagtcactcctggacacaagataaggaggagtttccccgaggcatcacagggcttcccgggactgagggactgactcaactggttattggacagtgccccacccccaatccggctgaggggcaggaaggcagaaggtcttggtggccctggatcttgtggctgcaatcggttccaaacagcagttaggtcagcagtccgctcagccgaggcagctctgttcatggcgttctcgaagctcttggagcaagccggaggcgtgggcctcttccagaccctgcaggtgctcaccttcatcctcccctgcctcatgataccttcccagatgctcctggagaacttctcagccgccatcccaggccaccgatgctggacacacatgctggacaatggctctgcggtttccacaaacatgacccccaaggcccttctgaccatctccatcccgccaggccccaaccaggggccccaccagtgccgccgcttccgccagccacagtggcagctcttggaccccaatgccacggccaccagctggagcgaagctgacacggagccgtgtgtggacggctgggtctatgaccgcagcgtcttcacctccaccatcgtggccaagtgggacctggtgtgcagctcccagggcttgaagcccctaagccagtccatcttcatgtccgggatcctggtgggctcctttatctggggcctcctctcctaccggtttgggaggaagccgatgctgagctggtgctgcctgcagttggccgtggcgggcaccagcaccatcttcgccccaacattcgtcatctactgcggcctgcggttcgtggccgcttttgggatggccggcatctttctgagttcactgacactgatggtggagtggaccacgaccagcaggagggcggtcaccatgacggtggtgggatgtgccttcagcgcaggccaggcggcgctgggcggcctggcctttgccctgcgggactggaggactctccagctggcagcatcagtgcccttctttgccatctccctgatatcctggtggctgccagaatccgcccggtggctgattattaagggcaaaccagaccaagcacttcaggagctcagaaaggtggccaggataaatggccacaaggaggccaagaacctgaccatagaggtgctgatgtccagcgtgaaggaggaggtggcctctgcaaaggagccgcggtcggtgctggacctgttctgcgtgcccgtgctccgctggaggagctgcgccatgctggtggtgaatttctctctattgatctcctactatgggctggtcttcgacctgcagagcctgggccgtgacatcttcctcctccaggccctcttcggggccgtggacttcctgggccgggccaccactgccctcttgctcagtttccttggccgccgcaccatccaggcgggttcccaggccatggccggcctcgccattctagccaacatgctggtgccgcaagatttgcagaccctgcgtgtggtctttgctgtgctgggaaagggatgttttgggataagcctaacctgcctcaccatctacaaggctgaactctttccaacgccagtgcggatgacagcagatggcattctgcatacagtgggccggctgggggctatgatgggtcccctgatcctgatgagccgccaagccctgcccctgctgcctcctctcctctatggcgttatctccattgcttccagcctggttgtgctgttcttcctcccggagacccagggacttccgctccctgacactatccaggacctggagagccagaaatcaacagcagcccagggcaaccggcaagaggccgtcactgtggaaagtacctcgctctagaaattgtgcctgcatggagcccctttagtcaaagactcctggaaaggagttgcctcttctccaatcagagcgtggaggcgagttgggcgacttcaagggcctggcatggcagaggccaggcagccgtggccgagtggacagcgtggccgtctgctgtggctgaaggcagcttccacagctcactcctcttctccctgccctgatcagattccccaccttacccgggccctacaggagcctgtgcagatggccatgcccaaccaataacgagacggttcccctccctttccctgccaggctcatgtctttacaccttcactcagccacgccaaccagagactgggttccaatctcaccccaccacatacagagccctcatctgtgaaatgagaatgatcacgtgacccaccccccagggcaggtatcagggtgaactgatcttagcaccggccaaataaatggaacctgctgagagagctgccagatacaggtgtccaggttgtgcactggcccgaggcacgcagccaaggaggcgtgtggggtctgaaactcagccccggctacactggccccaccacccaccctagcaaaggctgtgtcctctccaaaaaaaggagctgttttaatcacttttcatttactcatcagtgagggagggcttccagccctatggttacgaagacggccaaacacaccaccaaacaccagacagaggaggctggcagcaggttaccacacacgtgcgcagagcccacgaagatgacgctgcactgaggcatggggcggggtgcactgaggatccgagcgagcagccagggctgcaggaaggcagctttggagcacaaagggggtggggcaactcctggcttctgcgggaaggtgtaatcagcttgtttcatcatgctgcaggctggcgagaaacggagccttacaagcgtagggataagaggaacccctcttggtcccctcgatgagggttgttgggccggggagcctcatccacagggcggagtgaaaggggagaaggggagctcacaggcaggcctgccaaggccttctggctttgccagatgtcaagggcagcacctaatactgaaccttaactttcggctttcaaccaaacggcacccttttgctgtttgttttctggaggggacaccttttcttgattcatgcccagacctcccttgtccaggccatgaaaactctgggatggtcgaggccggctgcccatctcagatgggcaaggaagcaaaagtgcagagtggtggaggggccagcttgcagaaacacggccgaacccggccctgatcctagcccagggctctttccagcacaggaggctcctagccctcgtctccaaccctccatgccactgatatctgtggccctgccacaaagttaccctcatgcccttccctggagaccccactctgggccacctcaatctcaggcccctcaactcacctctttcaccctgtgtacactgggtcaatcactcctgcctcctcacagctcccaaatccacctacttcccttcactctggctacaccctggttcacaccacggttgtagctccaaactggtccctgatgtctacattgcactctgcacaacagccaccatgcttattaagaaacgcaatccaaaccaaatccctccctgctgaaagccctccagtggctcacaataaggatcacacttctccccctgcctggtcaggcagccatgggaccccagcctttcctcccacttcggtaaattttaaaggattcggatcatacaaagaatgttcttgaaccagcatggaattaaattagaaatcaattatg

SEQ ID NO: 183211 - DNA, 1975 bp, Homo sapiens
  Payload ID: 16092
  Gene Symbol: SLC22A11
  Gene Name: solute carrier family 22 (organic anion/urate transporter), member 11
  ENST ID: ENST00000377581
  CDS Start-End: 45-1490
cagcagttaggtcagcagtccgctcagccgaggcagctctgttcatggcgttctcgaagctcttggagcaagccggaggcgtgggcctcttccagaccctgcaggtgctcaccttcatcctcccctgcctcatgataccttcccagatgctcctggagaacttctcagccgccatcccaggccaccgatgctggacacacatgctggacaatggctctgcggtttccacaaacatgacccccaaggcccttctgaccatctccatcccgccaggccccaaccaggggccccaccagtgccgccgcttccgccagccacagtggcagctcttggaccccaatgccacggccaccagctggagcgaagctgacacggagccgtgtgtggacggctgggtctatgaccgcagcgtcttcacctccaccatcgtggccaagtgggacctggtgtgcagctcccagggcttgaagcccctaagccagtccatcttcatgtccgggatcctggtgggctcctttatctggggcctcctctcctaccggtttgggaggaagccgatgctgagctggtgctgcctgcagttggccgtggcgggcaccagcaccatcttcgccccaacattcgtcatctactgcggcctgcggttcgtggccgcttttgggatggccggcatctttctgagttcactgacactgatggtggagtggaccacgaccagcaggagggcggtcaccatgacggtggtgggatgtgccttcagcgcaggccaggcggcgctgggcggcctggcctttgccctgcgggactggaggactctccagctggcagcatcagtgcccttctttgccatctccctgatatcctggtggctgccagaatccgcccggtggctgattattaagggcaaaccagaccaagcacttcaggagctcagaaaggtggccaggataaatggccacaaggaggccaagaacctgaccatagaggtgctgatgtccagcgtgaaggaggaggtggcctctgcaaaggagccgcggtcggtgctggacctgttctgcgtgcccgtgctccgctggaggagctgcgccatgctggtggtgaatttctctctattgatctcctactatgggctggtcttcgacctgcagagcctgggccgtgacatcttcctcctccaggccctcttcggggccgtggacttcctgggccgggccaccactgccctcttgctcagtttccttggccgccgcaccatccaggcgggttcccaggccatggccggcctcgccattctagccaacatgctggtgccgcaagatttgcagaccctgcgtgtggtctttgctgtgctgggaaagggatgttttgggataagcctaacctgcctcaccatctacaaggctgaactctttccaacgccagtgcggaaatcaacagcagcccagggcaaccggcaagaggccgtcactgtggaaagtacctcgctctagaaattgtgcctgcatggagcccctttagtcaaagactcctggaaaggagttgcctcttctccaatcagagcgtggaggcgagttgggcgacttcaagggcctggcatggcagaggccaggcagccgtggccgagtggacagcgtggccgtctgctgtggctgaaggcagcttccacagctcactcctcttctccctgccctgatcagattccccaccttacccgggccctacaggagcctgtgcagatggccatgcccaaccaataacgagacggttcccctccctttccctgccaggctcatgtctttacaccttcactcagccacgccaaccagagactgggttccaatctcaccccaccacatacagagccctcatctgtgaaatgagaatgatcacgtgacccaccccccagggcaggtatcagggtgaactgatcttagcaccggccaaataaatggaacctgctgagagagctgccaga

SEQ ID NO: 183212 - DNA, 2124 bp, Homo sapiens
  Payload ID: 16092
  Gene Symbol: SLC22A11
  Gene Name: solute carrier family 22 (organic anion/urate transporter), member 11
  Uniprot ID: Q9NSA0
  ENST ID: ENST00000377585
  CDS Start-End: 311-1639
cttggtgggcagctcggatgccccaggcagcccgggcacagtgagcttagtccccttcaccccctccgcagagctctggggcatccgcacagtcactcctggacacaagataaggaggagtttccccgaggcatcacagggcttcccgggactgagggactgactcaactggttattggacagtgccccacccccaatccggctgaggggcaggaaggcagaaggtcttggtggccctggatcttgtggctgcaatcggttccaaacagcagttaggtcagcagtccgctcagccgaggcagctctgttcatggcgttctcgaagctcttggagcaagccggaggcgtgggcctcttccagaccctgcaggtgctcaccttcatcctcccctgcctcatgataccttcccagatgctcctggagaacttctcagccgccatcccaggccaccgatgctggacacacatgctggacaatggctctgcggtttccacaaacatgacccccaaggcccttctgaccatctccatcccgccaggccccaaccaggggccccaccagtgccgccgcttccgccagccacagtggcagctcttggaccccaatgccacggccaccagctggagcgaagctgacacggagccgtgtgtggacggctgggtctatgaccgcagcgtcttcacctccaccatcgtggccaagtgggacctggtgtgcagctcccagggcttgaagcccctaagccagtccatcttcatgtccgggatcctggtgggctcctttatctggggcctcctctcctaccggtttgggaggaagccgatgctgagctggtgctgcctgcagttggccgtggcgggcaccagcaccatcttcgccccaacattcgtcatctactgcggcctgcggttcgtggccgcttttgggatggccggcatctttctgagttcactgacactgatggtggagtggaccacgaccagcaggagggcggtcaccatgacggtggtgggatgtgccttcagcgcaggccaggcggcgctgggcggcctggcctttgccctgcgggactggaggactctccagctggcagcatcagtgcccttctttgccatctccctgatatcctggtggctgccagaatccgcccggtggctgattattaagggcaaaccagaccaagcacttcaggagctcagaaaggtggccaggataaatggccacaaggaggccaagaacctgaccatagaggtgctgatgtccagcgtgaaggaggaggtggcctctgcaaaggagccgcggtcggtgctggacctgttctgcgtgcccgtgctccgctggaggagctgcgccatgctggtggtgaagatgacagcagatggcattctgcatacagtgggccggctgggggctatgatgggtcccctgatcctgatgagccgccaagccctgcccctgctgcctcctctcctctatggcgttatctccattgcttccagcctggttgtgctgttcttcctcccggagacccagggacttccgctccctgacactatccaggacctggagagccagaaatcaacagcagcccagggcaaccggcaagaggccgtcactgtggaaagtacctcgctctagaaattgtgcctgcatggagcccctttagtcaaagactcctggaaaggagttgcctcttctccaatcagagcgtggaggcgagttgggcgacttcaagggcctggcatggcagaggccaggcagccgtggccgagtggacagcgtggccgtctgctgtggctgaaggcagcttccacagctcactcctcttctccctgccctgatcagattccccaccttacccgggccctacaggagcctgtgcagatggccatgcccaaccaataacgagacggttcccctccctttccctgccaggctcatgtctttacaccttcactcagccacgccaaccagagactgggttccaatctcaccccaccacatacagagccctcatctgtgaaatgagaatgatcacgtgacccaccccccagggcaggtatcagggtgaactgatcttagcaccggccaaataaatggaacctgctgagagagctgccaga

SEQ ID NO: 183213 - DNA, 971 bp, Homo sapiens
  Payload ID: 16092
  Gene Symbol: SLC22A11
  Gene Name: solute carrier family 22 (organic anion/urate transporter), member 11
  ENST ID: ENST00000428570
  CDS Start-End: 1-220
tttctctctattgatctcctactatgggctggtcttcgacctgcagagcctgggccgtgacatcttcctcctccaggccctcttcggggccgtggacttcctgggccgggccaccactgccctcttgctcagtttccttggccgccgcaccatccaggcgggttcccaggccatggccggcctcgccattctagccaacatgctggtgccgcaaggatgacagcagatggcattctgcatacagtgggccggctgggggctatgatgggtcccctgatcctgatgagccgccaagccctgcccctgctgcctcctctcctctatggcgttatctccattgcttccagcctggttgtgctgttcttcctcccggagacccagggacttccgctccctgacactatccaggacctggagagccagaaatcaacagcagcccagggcaaccggcaagaggccgtcactgtggaaagtacctcgctctagaaattgtgcctgcatggagcccctttagtcaaagactcctggaaaggagttgcctcttctccaatcagagcgtggaggcgagttgggcgacttcaagggcctggcatggcagaggccaggcagccgtggccgagtggacagcgtggccgtctgctgtggctgaaggcagcttccacagctcactcctcttctccctgccctgatcagattccccaccttacccgggccctacaggagcctgtgcagatggccatgcccaaccaataacgagacggttcccctccctttccctgccaggctcatgtctttacaccttcactcagccacgccaaccagagactgggttccaatctcaccccaccacatacagagccctcatctgtgaaatgagaatgatcacgtgacccaccccccagggcaggtatcagggtgaactgatcttagcaccggccaaataaatggaacctgctgagagagctgccaga

SEQ ID NO: 183214 - DNA, 947 bp, Homo sapiens
  Payload ID: 16092
  Gene Symbol: SLC22A11
  Gene Name: solute carrier family 22 (organic anion/urate transporter), member 11
  ENST ID: ENST00000416590
  CDS Start-End: 1-462
ttctctctattgatctcctactatgggctggtcttcgacctgcagagcctgggccgtgacatcttcctcctccaggccctcttcggggccgtggacttcctgggccgggccaccactgccctcttgctcagtttccttggccgccgcaccatccaggcgggttcccaggccatggccggcctcgccattctagccaacatgctggtgccgcaagatttgcagaccctgcgtgtggtctttgctgtgctgggaaagggatgttttgggataagcctaacctgcctcaccatctacaaggctgaactctttccaacgccagtgcgcctggttgtgctgttcttcctcccggagacccagggacttccgctccctgacactatccaggacctggagagccagaaatcaacagcagcccagggcaaccggcaagaggccgtcactgtggaaagtacctcgctctagaaattgtgcctgcatggagcccctttagtcaaagactcctggaaaggagttgcctcttctccaatcagagcgtggaggcgagttgggcgacttcaagggcctggcatggcagaggccaggcagccgtggccgagtggacagcgtggccgtctgctgtggctgaaggcagcttccacagctcactcctcttctccctgccctgatcagattccccaccttacccgggccctacaggagcctgtgcagatggccatgcccaaccaataacgagacggttcccctccctttccctgccaggctcatgtctttacaccttcactcagccacgccaaccagagactgggttccaatctcaccccaccacatacagagccctcatctgtgaaatgagaatgatcacgtgacccaccccccagggcaggtatcagggtgaactgatcttagcaccggccaaataaatggaacctgctgagagagctgccaga

SEQ ID NO: 183215 - DNA, 1854 bp, Homo sapiens
  Payload ID: 16093
  Gene Symbol: SLC22A12
  Gene Name: solute carrier family 22 (organic anion/urate transporter), member 12
  Uniprot ID: Q96S37
  ENST ID: ENST00000336464
  CDS Start-End: 295-1854
aaattcagctttcccgggaggtctggagcagctgcctctctggggagatgctggaggtctcggaatcacctcacgcggcctcagggcccagttggagccaccccaagtgacaccagcaggcagatgaccagagagcctgagcctccggccccgagtctgtgaagcctagccgctgggctggagaagccactgtgggcaccaccgtgggggaaacaggcccgttgccctggcctctttgccctgggccagcctttgtgaagtgggcccctcttctgggccccttgagtaggttccatggcattttctgaactcctggacctcgtgggtggcctgggcaggttccaggttctccagacgatggctctgatggtctccatcatgtggctgtgtacccagagcatgctggagaacttctcggccgccgtgcccagccaccgctgctgggcacccctcctggacaacagcacggctcaggccagcatcctagggagcttgagtcctgaggccctcctggctatttccatcccgccgggccccaaccagaggccccaccagtgccgccgcttccgccagccacagtggcagctcttggaccccaatgccacggccaccagctggagcgaggccgacacggagccgtgtgtggatggctgggtctatgaccgcagcatcttcacctccacaatcgtggccaagtggaacctcgtgtgtgactctcatgctctgaagcccatggcccagtccatctacctggctgggattctggtgggagctgctgcgtgcggccctgcctcagacaggtttgggcgcaggctggtgctaacctggagctaccttcagatggctgtgatggtgatggagtggacggcggcacgggcccgacccttggtgatgaccttgaactctctgggcttcagcttcggccatggcctgacagctgcagtggcctacggtgtgcgggactggacactgctgcagctggtggtctcggtccccttcttcctctgctttttgtactcctggtggctggcagagtcggcacgatggctcctcaccacaggcaggctggattggggcctgcaggagctgtggagggtggctgccatcaacggaaagggggcagtgcaggacaccctgacccctgaggtcttgctttcagccatgcgggaggagctgagcatgggccagcctcctgccagcctgggcaccctgctccgcatgcccggactgcgcttccggacctgtatctccacgttgtgctggttcgcctttggcttcaccttcttcggcctggccctggacctgcaggccctgggcagcaacatcttcctgctccaaatgttcattggtgtcgtggacatcccagccaagatgggcgccctgctgctgctgagccacctgggccgccgccccacgctggccgcatccctgttgctggcagggctctgcattctggccaacacgctggtgccccacgaaatgggggctctgcgctcagccttggccgtgctggggctgggcggggtgggggctgccttcacctgcatcaccatctacagcagcgagctcttccccactgtgctcaggatgacggcagtgggcttgggccagatggcagcccgtggaggagccatcctggggcctctggtccggctgctgggtgtccatggcccctggctgcccttgctggtgtatgggacggtgccagtgctgagtggcctggccgcactgcttctgcccgagacccagagcttgccgctgcccgacaccatccaagatgtgcagaaccaggcagtaaagaaggcaacacatggcacgctggggaactctgtcctaaaatccacacagttttag

SEQ ID NO: 183216 - DNA, 2599 bp, Homo sapiens
  Payload ID: 16093
  Gene Symbol: SLC22A12
  Gene Name: solute carrier family 22 (organic anion/urate transporter), member 12
  Uniprot ID: Q96S37
  ENST ID: ENST00000377567
  CDS Start-End: 465-1802
atagctgaggtggggctctgcaggaggcatagatttggggaggggacagagatctcagggtggcattgggcacaccgaacctggggagtctgtggggtgtctgttgatgctgggaagctccaccgaggactcaggacagggtaacagcaaagcgggcacaggacgccaaccacagcagctttcccgggaggtctggagcagctgcctctctggggagatgctggaggtctcggaatcacctcacgcggcctcagggcccagttggagccaccccaagtgacaccagcaggcagatgaccagagagcctgagcctccggccccgagtctgtgaagcctagccgctgggctggagaagccactgtgggcaccaccgtgggggaaacaggcccgttgccctggcctctttgccctgggccagcctttgtgaagtgggcccctcttctgggccccttgagtaggttccatggcattttctgaactcctggacctcgtgggtggcctgggcaggttccaggttctccagacgatggctctgatggtctccatcatgtggctgtgtacccagagcatgctggagaacttctcggccgccgtgcccagccaccgctgctgggcacccctcctggacaacagcacggctcaggccagcatcctagggagcttgagtcctgaggccctcctggctatttccatcccgccgggccccaaccagaggccccaccagtgccgccgcttccgccagccacagtggcagctcttggaccccaatgccacggccaccagctggagcgaggccgacacggagccgtgtgtggatggctgggtctatgaccgcagcatcttcacctccacaatcgtggccaagtggaacctcgtgtgtgactctcatgctctgaagcccatggcccagtccatctacctggctgggattctggtgggagctgctgcgtgcggccctgcctcagacaggtggctggcagagtcggcacgatggctcctcaccacaggcaggctggattggggcctgcaggagctgtggagggtggctgccatcaacggaaagggggcagtgcaggacaccctgacccctgaggtcttgctttcagccatgcgggaggagctgagcatgggccagcctcctgccagcctgggcaccctgctccgcatgcccggactgcgcttccggacctgtatctccacgttgtgctggttcgcctttggcttcaccttcttcggcctggccctggacctgcaggccctgggcagcaacatcttcctgctccaaatgttcattggtgtcgtggacatcccagccaagatgggcgccctgctgctgctgagccacctgggccgccgccccacgctggccgcatccctgttgctggcagggctctgcattctggccaacacgctggtgccccacgaaatgggggctctgcgctcagccttggccgtgctggggctgggcggggtgggggctgccttcacctgcatcaccatctacagcagcgagctcttccccactgtgctcaggatgacggcagtgggcttgggccagatggcagcccgtggaggagccatcctggggcctctggtccggctgctgggtgtccatggcccctggctgcccttgctggtgtatgggacggtgccagtgctgagtggcctggccgcactgcttctgcccgagacccagagcttgccgctgcccgacaccatccaagatgtgcagaaccaggcagtaaagaaggcaacacatggcacgctggggaactctgtcctaaaatccacacagttttagcctcctggggaacctgcgatgggacggtcagaggaagagacttcttctgttctctggagaaggcaggaggaaagcaaagacctccatttccagaggcccagaggctgccctctgaggtccccactctcccccagggctgcccctccaggtgagccctgcccctctcacagtccaaggggcccccttcaatactgaaggggaaaaggacagtttgattggcaggaggtgacccagtgcaccatcaccctgccctgccctcgtggcttcggagagcagaggggtcaggcccaggggaacgagctggccttgccaaccctctgcttgactccgcactgccacttgtccccccacacccgtccacctgcccagagctcagagctaaccaccatccatggtcaagacctctcctagctccacacaagcagtagagtctcagctccacagctttacccagaagccctgtaagcctggcccctggcccctccccatgtccctccaggcctcagccacctgcccgccacatcctctgcctgctgtccccttcccaccctcatccctgaccgactccacttaacccccaaacccagccccccttccaggggtccagggccagcctgagatgcccgtgaaactcctacccacagttacagccacaagcctgcctcctcccaccctgccagcctatgagttcccagagggttggggcagtcccatgaccccatgtcccagctccccacacagcgctgggccagagaggcattggtgcgagggattgaataaagaaacaaatgaatggc

SEQ ID NO: 183217 - DNA, 2887 bp, Homo sapiens
  Payload ID: 16093
  Gene Symbol: SLC22A12
  Gene Name: solute carrier family 22 (organic anion/urate transporter), member 12
  Uniprot ID: Q96S37
  ENST ID: ENST00000377572
  CDS Start-End: 748-2085
ccacagcaggtgagtggaggcaggagccacgggtggggccaggccacacagcctgggaggcgcaggggctgggcagctgccagtgacccaagcccacacagagacttgcacagctgccccagccccaaattagggggatcccctggcccaccttctcttggctcagccactctgggaggtgggcacacaggggcaccgaagggagcaggcagccctggcatcccacagccgccaggagaaaaacttaggcctccccaagacctggcacagagcaggccggccctggcccccaagcagaggaggctgcacctccctcgcgtctgtgcctgcctcaacgcgggttaaactttgaccaaggaaatgattgctaaactcgattccataagtgtcaccggtcacactttaattccagtctaaaattaaagtcttcagtctccacattccctactttccaaattcagctttcccgggaggtctggagcagctgcctctctggggagatgctggaggtctcggaatcacctcacgcggcctcagggcccagttggagccaccccaagtgacaccagcaggcagatgaccagagagcctgagcctccggccccgagtctgtgaagcctagccgctgggctggagaagccactgtgggcaccaccgtgggggaaacaggcccgttgccctggcctctttgccctgggccagcctttgtgaagtgggcccctcttctgggccccttgagtaggttccatggcattttctgaactcctggacctcgtgggtggcctgggcaggttccaggttctccagacgatggctctgatggtctccatcatgtggctgtgtacccagagcatgctggagaacttctcggccgccgtgcccagccaccgctgctgggcacccctcctggacaacagcacggctcaggccagcatcctagggagcttgagtcctgaggccctcctggctatttccatcccgccgggccccaaccagaggccccaccagtgccgccgcttccgccagccacagtggcagctcttggaccccaatgccacggccaccagctggagcgaggccgacacggagccgtgtgtggatggctgggtctatgaccgcagcatcttcacctccacaatcgtggccaagtggaacctcgtgtgtgactctcatgctctgaagcccatggcccagtccatctacctggctgggattctggtgggagctgctgcgtgcggccctgcctcagacaggtggctggcagagtcggcacgatggctcctcaccacaggcaggctggattggggcctgcaggagctgtggagggtggctgccatcaacggaaagggggcagtgcaggacaccctgacccctgaggtcttgctttcagccatgcgggaggagctgagcatgggccagcctcctgccagcctgggcaccctgctccgcatgcccggactgcgcttccggacctgtatctccacgttgtgctggttcgcctttggcttcaccttcttcggcctggccctggacctgcaggccctgggcagcaacatcttcctgctccaaatgttcattggtgtcgtggacatcccagccaagatgggcgccctgctgctgctgagccacctgggccgccgccccacgctggccgcatccctgttgctggcagggctctgcattctggccaacacgctggtgccccacgaaatgggggctctgcgctcagccttggccgtgctggggctgggcggggtgggggctgccttcacctgcatcaccatctacagcagcgagctcttccccactgtgctcaggatgacggcagtgggcttgggccagatggcagcccgtggaggagccatcctggggcctctggtccggctgctgggtgtccatggcccctggctgcccttgctggtgtatgggacggtgccagtgctgagtggcctggccgcactgcttctgcccgagacccagagcttgccgctgcccgacaccatccaagatgtgcagaaccaggcagtaaagaaggcaacacatggcacgctggggaactctgtcctaaaatccacacagttttagcctcctggggaacctgcgatgggacggtcagaggaagagacttcttctgttctctggagaaggcaggaggaaagcaaagacctccatttccagaggcccagaggctgccctctgaggtccccactctcccccagggctgcccctccaggtgagccctgcccctctcacagtccaaggggcccccttcaatactgaaggggaaaaggacagtttgattggcaggaggtgacccagtgcaccatcaccctgccctgccctcgtggcttcggagagcagaggggtcaggcccaggggaacgagctggccttgccaaccctctgcttgactccgcactgccacttgtccccccacacccgtccacctgcccagagctcagagctaaccaccatccatggtcaagacctctcctagctccacacaagcagtagagtctcagctccacagctttacccagaagccctgtaagcctggcccctggcccctccccatgtccctccaggcctcagccacctgcccgccacatcctctgcctgctgtccccttcccaccctcatccctgaccgactccacttaacccccaaacccagccccccttccaggggtccagggccagcctgagatgcccgtgaaactcctacccacagttacagccacaagcctgcctcctcccaccctgccagcctatgagttcccagagggttggggcagtcccatgaccccatgtcccagctccccacacagcgctgggccagagaggcattggtgcgagggattgaataaagaaacaaatgaatggctgccc

SEQ ID NO: 183218 - DNA, 3206 bp, Homo sapiens
  Payload ID: 16093
  Gene Symbol: SLC22A12
  Gene Name: solute carrier family 22 (organic anion/urate transporter), member 12
  Uniprot ID: Q96S37
  ENST ID: ENST00000377574
  CDS Start-End: 748-2409
ccacagcaggtgagtggaggcaggagccacgggtggggccaggccacacagcctgggaggcgcaggggctgggcagctgccagtgacccaagcccacacagagacttgcacagctgccccagccccaaattagggggatcccctggcccaccttctcttggctcagccactctgggaggtgggcacacaggggcaccgaagggagcaggcagccctggcatcccacagccgccaggagaaaaacttaggcctccccaagacctggcacagagcaggccggccctggcccccaagcagaggaggctgcacctccctcgcgtctgtgcctgcctcaacgcgggttaaactttgaccaaggaaatgattgctaaactcgattccataagtgtcaccggtcacactttaattccagtctaaaattaaagtcttcagtctccacattccctactttccaaattcagctttcccgggaggtctggagcagctgcctctctggggagatgctggaggtctcggaatcacctcacgcggcctcagggcccagttggagccaccccaagtgacaccagcaggcagatgaccagagagcctgagcctccggccccgagtctgtgaagcctagccgctgggctggagaagccactgtgggcaccaccgtgggggaaacaggcccgttgccctggcctctttgccctgggccagcctttgtgaagtgggcccctcttctgggccccttgagtaggttccatggcattttctgaactcctggacctcgtgggtggcctgggcaggttccaggttctccagacgatggctctgatggtctccatcatgtggctgtgtacccagagcatgctggagaacttctcggccgccgtgcccagccaccgctgctgggcacccctcctggacaacagcacggctcaggccagcatcctagggagcttgagtcctgaggccctcctggctatttccatcccgccgggccccaaccagaggccccaccagtgccgccgcttccgccagccacagtggcagctcttggaccccaatgccacggccaccagctggagcgaggccgacacggagccgtgtgtggatggctgggtctatgaccgcagcatcttcacctccacaatcgtggccaagtggaacctcgtgtgtgactctcatgctctgaagcccatggcccagtccatctacctggctgggattctggtgggagctgctgcgtgcggccctgcctcagacaggtttgggcgcaggctggtgctaacctggagctaccttcagatggctgtgatgggtacggcagctgccttcgcccctgccttccccgtgtactgcctgttccgcttcctgttggcctttgccgtggcaggcgtcatgatgaacacgggcactctcctgatggagtggacggcggcacgggcccgacccttggtgatgaccttgaactctctgggcttcagcttcggccatggcctgacagctgcagtggcctacggtgtgcgggactggacactgctgcagctggtggtctcggtccccttcttcctctgctttttgtactcctggtggctggcagagtcggcacgatggctcctcaccacaggcaggctggattggggcctgcaggagctgtggagggtggctgccatcaacggaaagggggcagtgcaggacaccctgacccctgaggtcttgctttcagccatgcgggaggagctgagcatgggccagcctcctgccagcctgggcaccctgctccgcatgcccggactgcgcttccggacctgtatctccacgttgtgctggttcgcctttggcttcaccttcttcggcctggccctggacctgcaggccctgggcagcaacatcttcctgctccaaatgttcattggtgtcgtggacatcccagccaagatgggcgccctgctgctgctgagccacctgggccgccgccccacgctggccgcatccctgttgctggcagggctctgcattctggccaacacgctggtgccccacgaaatgggggctctgcgctcagccttggccgtgctggggctgggcggggtgggggctgccttcacctgcatcaccatctacagcagcgagctcttccccactgtgctcaggatgacggcagtgggcttgggccagatggcagcccgtggaggagccatcctggggcctctggtccggctgctgggtgtccatggcccctggctgcccttgctggtgtatgggacggtgccagtgctgagtggcctggccgcactgcttctgcccgagacccagagcttgccgctgcccgacaccatccaagatgtgcagaaccaggcagtaaagaaggcaacacatggcacgctggggaactctgtcctaaaatccacacagttttagcctcctggggaacctgcgatgggacggtcagaggaagagacttcttctgttctctggagaaggcaggaggaaagcaaagacctccatttccagaggcccagaggctgccctctgaggtccccactctcccccagggctgcccctccaggtgagccctgcccctctcacagtccaaggggcccccttcaatactgaaggggaaaaggacagtttgattggcaggaggtgacccagtgcaccatcaccctgccctgccctcgtggcttcggagagcagaggggtcaggcccaggggaacgagctggccttgccaaccctctgcttgactccgcactgccacttgtccccccacacccgtccacctgcccagagctcagagctaaccaccatccatggtcaagacctctcctagctccacacaagcagtagagtctcagctccacagctttacccagaagccctgtaagcctggcccctggcccctccccatgtccctccaggcctcagccacctgcccgccacatcctctgcctgctgtccccttcccaccctcatccctgaccgactccacttaacccccaaacccagccccccttccaggggtccagggccagcctgagatgcccgtgaaactcctacccacagttacagccacaagcctgcctcctcccaccctgccagcctatgagttcccagagggttggggcagtcccatgaccccatgtcccagctccccacacagcgctgggccagagaggcattggtgcgagggattgaataaagaaacaaatgaatggc

SEQ ID NO: 183219 - DNA, 2522 bp, Homo sapiens
  Payload ID: 16093
  Gene Symbol: SLC22A12
  Gene Name: solute carrier family 22 (organic anion/urate transporter), member 12
  Uniprot ID: Q96S37
  ENST ID: ENST00000473690
  CDS Start-End: 727-1725
attaaagtcttcagtctccacattccctactttccaaattcagctttcccgggaggtctggagcagctgcctctctggggagatgctggaggtctcggaatcacctcacgcggcctcagggcccagttggagccaccccaagtgacaccagcaggcagatgaccagagagcctgagcctccggccccgagtctgtgaagcctagccgctgggctggagaagccactgtgggcaccaccgtgggggaaacaggcccgttgccctggcctctttgccctgggccagcctttgtgaagtgggcccctcttctgggccccttgaagcatgctggagaacttctcggccgccgtgcccagccaccgctgctgggcacccctcctggacaacagcacggctcaggccagcatcctagggagcttgagtcctgaggccctcctggctatttccatcccgccgggccccaaccagaggccccaccagtgccgccgcttccgccagccacagtggcagctcttggaccccaatgccacggccaccagctggagcgaggccgacacggagccgtgtgtggatggctgggtctatgaccgcagcatcttcacctccacaatcgtggccaagtggaacctcgtgtgtgactctcatgctctgaagcccatggcccagtccatctacctggctgggattctggtgggagctgctgcgtgcggccctgcctcagacagtgatggagtggacggcggcacgggcccgacccttggtgatgaccttgaactctctgggcttcagcttcggccatggcctgacagctgcagtggcctacggtgtgcgggactggacactgctgcagctggtggtctcggtccccttcttcctctgctttttgtactcctggtggctggcagagtcggcacgatggctcctcaccacaggcaggctggattggggcctgcaggagctgtggagggtggctgccatcaacggaaagggggcagtgcaggacaccctgacccctgaggtcttgctttcagccatgcgggaggagctgagcatgggccagcctcctgccagcctgggcaccctgctccgcatgcccggactgcgcttccggacctgtatctccacgttgtgctggttcgcctttggcttcaccttcttcggcctggccctggacctgcaggccctgggcagcaacatcttcctgctccaaatgttcattggtgtcgtggacatcccagccaagatgggcgccctgctgctgctgagccacctgggccgccgccccacgctggccgcatccctgttgctggcagggctctgcattctggccaacacgctggtgccccacgaaatgggggctctgcgctcagccttggccgtgctggggctgggcggggtgggggctgccttcacctgcatcaccatctacagcagcgagctcttccccactgtgctcaggatgacggcagtgggcttgggccagatggcagcccgtggaggagccatcctggggcctctggtccggctgctgggtgtccatggcccctggctgcccttgctggtgtatgggacggtgccagtgctgagtggcctggccgcactgcttctgcccgagacccagagcttgccgctgcccgacaccatccaagatgtgcagaaccaggcagtaaagaaggcaacacatggcacgctggggaactctgtcctaaaatccacacagttttagcctcctggggaacctgcgatgggacggtcagaggaagagacttcttctgttctctggagaaggcaggaggaaagcaaagacctccatttccagaggcccagaggctgccctctgaggtccccactctcccccagggctgcccctccaggtgagccctgcccctctcacagtccaaggggcccccttcaatactgaaggggaaaaggacagtttgattggcaggaggtgacccagtgcaccatcaccctgccctgccctcgtggcttcggagagcagaggggtcaggcccaggggaacgagctggccttgccaaccctctgcttgactccgcactgccacttgtccccccacacccgtccacctgcccagagctcagagctaaccaccatccatggtcaagacctctcctagctccacacaagcagtagagtctcagctccacagctttacccagaagccctgtaagcctggcccctggcccctccccatgtccctccaggcctcagccacctgcccgccacatcctctgcctgctgtccccttcccaccctcatccctgaccgactccacttaacccccaaacccagccccccttccaggggtccagggccagcctgagatgcccgtgaaactcctacccacagttacagccacaagcctgcctcctcccaccctgccagcctatgagttcccagagggttggggcagtcccatgaccccatgtcccagctccccacacagcgctgggccagagaggcattggtgcgagggattgaataaagaaacaaatgaatggc

SEQ ID NO: 183220 - DNA, 2555 bp, Homo sapiens
  Payload ID: 16094
  Gene Symbol: SLC22A13
  Gene Name: solute carrier family 22 (organic anion/urate transporter), member 13
  Uniprot ID: Q9Y226
  ENST ID: ENST00000311856
  CDS Start-End: 50-1705
acagagctaccctagtgtccccaggctgaggaggtagtgactggcatacatggctcagtttgtccaggtcctggctgaaataggtgactttggtcgcttccagatacagctattgatcctgctgtgtgttctcaacttcctgtctcccttctacttttttgcccatgtcttcatggtcctagatgagccccaccactgtgcagtggcttgggtgaagaaccacactttcaacctgagtgctgctgaacagctggtactgagcgtgcccctggacactgcaggtcacccagagccctgcctcatgttccggccaccccccgccaatgccagcctgcaggacatcctcagccaccgcttcaatgagacgcagccttgtgatatgggctgggaatatcctgagaacaggctcccatccctgaagaatgagttcaacctggtttgtgatcggaagcacctgaaggacaccacacagtcagtgttcatggctgggctccttgttggcaccctcatgtttgggcccctctgcgaccggattggccgcaaggccacaatcctggcgcagctgctcctcttcaccctcatcggcctggccacagcttttgtgcccagctttgagctctacatggccctgcgctttgctgtggctactgccgtcgctggacttagcttcagcaatgtcaccctactgacagaatgggtggggccctcatggaggacgcaggccgtggtcctggcccagtgcaacttctccctcgggcagatggtgcttgcgggactcgcctacggtttccgcaactggaggctccttcagatcaccggcactgcgcctggcttactgctcttcttctacttctgggctctgccagaatctgcacgttggctcctgacccgtgggaggatggacgaggcgatacaactgatccagaaggcggcctcggtcaataggcggaaactctccccggagctcatgaaccagctggtcccagagaagacaggcccctcagggaatgccctggatctgttcagacacccccagctccggaaggtgaccctgattatcttctgtgtctggtttgtggacagtctggggtactacggcctgagcctccaagtgggggacttcggcctggacgtctatctgacgcagctcatctttggagctgttgaggtgcctgcccgctgttccagcatcttcatgatgcagaggtttggccgcaagtggagccagttggggaccttggtcttgggtggcctgatgtgtatcatcatcatcttcatcccagcagatctgcccgtggtggtcaccatgctggctgtggtggggaagatggccacagctgctgcctttaccatctcctatgtgtactctgccgagcttttccccaccatcctccggcagacaggcatggggctggtgggcatcttctcacggatcgggggcatcctcacaccacttgtgatcctgctgggagagtaccacgctgccctccccatgctcatctacggcagcctccccatcgtggccggcctgctgtgcaccctgctgccagagacgcatggccagggcctgaaagacaccctccaggacctggagctggggcctcacccacggtcccccaaatcagtgccctcagagaaggaaacagaggccaagggaagaacttccagcccgggagtggcctttgtgagcagcacatacttctgattgaggtctctaagagctggaccatcagcagcagggagctgcctaaacacctccttggatatggccaggacccacagggacacagggcaagaccagccttgcttatggaggcaggacaccacaatctggcccatggctgtcacctcctgccgagtccaatcccagactgggaaccaccatctgagacaggacctcccggcctccttcacctttctcatctccagagccctgcccccaatactctgtctgggttaggatcttgggtatgtcttggaattaacttgtcctctaacaatcttcatggggtatggctctcttgatctcctcaatctggagtcccctgccctcaaaacacagtgatgttcagaacagaacacaaggtaagccctttccaatttgtgggaacaggaggggagaggaaacaaatgtgaagttgtggactctacccaggcaggtggatgaaaatgctgtggataaaaggaaggttatgattccttctagcggatggaccagattcctctggctaacgtatggccccataggtcactgggtcatacagagagaagattcagttcagcctaaatcaaaacttccaccttgtgttcacttcaaagatggcccaacccccgccctacactcagctcatgcctaacctatgtgtggctcagggaccagcttggggaaggaaaggaggtttgttctgctccccgcctcaccccgcctcctcctgctcatgctcagctgcttctggaccttccagggcccatgcagggtgagggaaagggtagaggtcttttcaccgagctgctgctggttgcagttctttctggtgcacattggctaatgccag

SEQ ID NO: 183221 - DNA, 1079 bp, Homo sapiens
  Payload ID: 16094
  Gene Symbol: SLC22A13
  Gene Name: solute carrier family 22 (organic anion/urate transporter), member 13
  ENST ID: ENST00000415844
  CDS Start-End: 1-696
cgcttccagatacagctattgatcctgctgtgtgttctcaacttcctgtctcccttctacttttttgcccatgtcttcatggtcctagatgagccccaccactgtgcagtggcttgggtgaagaaccacactttcaacctgagtgctgctgaacagctggtactgagcgtgcccctggacactgcaggtcacccagagccctgcctcatgttccggccaccccccgccaatgccagcctgcaggacatcctcagccaccgcttcaatgagacgcagccttgtgatatgggctgggaatatcctgagaacaggctcccatccctgaagaatgagttcaacctggtttgtgatcggaagcacctgaaggacaccacacagtcagtgttcatggctgggctccttgttggcaccctcatgtttgggcccctctgcgaccgtgacagaatgggtggggccctcatggaggacgcaggccgtggtcctggcccagtgcaacttctccctcgggcagatggtgcttgcgggactcgcctacggtttccgcaactggaggctccttcagatcaccggcactgcgcctggcttactgctcttcttctacttctgggctctgccagaatctgcacgttggctcctgacccgtgggaggatggacgaggcgatacaactgatccagaaggcggcctcggtcaataggcggaaactctccccggagctcatgaaccagctggtcccagagaagacaggcccctcagggaatgccctggatctgttcagacacccccagctccggaaggtgaccctgattatcttctgtgtctggtttgtggacagtctggggtactacggcctgagcctccaagtgggggacttcggcctggacgtctatctgacgcagctcatctttggagctgttgaggtgcctgcccgctgttccagcatcttcatgatgcagaggtttggccgcaagtggagccagttggggaccttggtcttgggtggcctgatgtgtatcatcatcatcttcatcccagcagatctgcccgtggtggtcaccatgctggctgtggtggggaaga

SEQ ID NO: 183222 - DNA, 1521 bp, Homo sapiens
  Payload ID: 16095
  Gene Symbol: SLC22A1
  Gene Name: solute carrier family 22 (organic cation transporter), member 1
  Uniprot ID: O15245
  ENST ID: ENST00000324965
  CDS Start-End: 1-1521
atgcccaccgtggatgacattctggagcaggttggggagtctggctggttccagaagcaagccttcctcatcttatgcctgctgtcggctgcctttgcgcccatctgtgtgggcatcgtcttcctgggtttcacacctgaccaccactgccagagtcctggggtggctgagctgagccagcgctgtggctggagccctgcggaggagctgaactatacagtgccaggcctggggcccgcgggcgaggccttccttggccagtgcaggcgctatgaagtggactggaaccagagcgccctcagctgtgtagaccccctggctagcctggccaccaacaggagccacctgccgctgggtccctgccaggatggctgggtgtatgacacgcccggctcttccatcgtcactgagttcaacctggtgtgtgctgactcctggaagctggacctctttcagtcctgtttgaatgcgggcttcttgtttggctctctcggtgttggctactttgcagacaggtttggccgtaagctgtgtctcctgggaactgtgctggtcaacgcggtgtcgggcgtgctcatggccttctcgcccaactacatgtccatgctgctcttccgcctgctgcagggcctggtcagcaagggcaactggatggctggctacaccctaatcacagaatttgttggctcgggctccagaagaacggtggcgatcatgtaccagatggccttcacggtggggctggtggcgcttaccgggctggcctacgccctgcctcactggcgctggctgcagctggcagtctccctgcccaccttcctcttcctgctctactactggtgtgtgccggagtcccctcggtggctgttatcacaaaaaagaaacactgaagcaataaagataatggaccacatcgctcaaaagaatgggaagttgcctcctgctgatttaaagatgctttccctcgaagaggatgtcaccgaaaagctgagcccttcatttgcagacctgttccgcacgccgcgcctgaggaagcgcaccttcatcctgatgtacctgtggttcacggactctgtgctctatcaggggctcatcctgcacatgggcgccaccagcgggaacctctacctggatttcctttactccgctctggtcgaaatcccgggggccttcatagccctcatcaccattgaccgcgtgggccgcatctaccccatggccatgtcaaatttgttggcgggggcagcctgcctcgtcatgatttttatctcacctgacctgcactggttaaacatcataatcatgtgtgttggccgaatgggaatcaccattgcaatacaaatgatctgcctggtgaatgctgagctgtaccccacattcgtcagcggtgttgggcctgcttgccgcgggagtgacgctacttcttccagagaccaagggggtcgctttgccagagaccatgaaggacgccgagaaccttgggagaaaagcaaagcccaaagaaaacacgatttaccttaa

SEQ ID NO: 183223 - DNA, 1948 bp, Homo sapiens
  Payload ID: 16095
  Gene Symbol: SLC22A1
  Gene Name: solute carrier family 22 (organic cation transporter), member 1
  Uniprot ID: O15245
  ENST ID: ENST00000366963
  CDS Start-End: 148-1812
ctacttggttgccttccagatgtttcacacttggacagcaaactgatttcaaaccactccttttcaaagatctctgagggagacattgcacctggccactgcagcccagagcaggtctggccacggccatgagcatgctgagccatcatgcccaccgtggatgacattctggagcaggttggggagtctggctggttccagaagcaagccttcctcatcttatgcctgctgtcggctgcctttgcgcccatctgtgtgggcatcgtcttcctgggtttcacacctgaccaccactgccagagtcctggggtggctgagctgagccagcgctgtggctggagccctgcggaggagctgaactatacagtgccaggcctggggcccgcgggcgaggccttccttggccagtgcaggcgctatgaagtggactggaaccagagcgccctcagctgtgtagaccccctggctagcctggccaccaacaggagccacctgccgctgggtccctgccaggatggctgggtgtatgacacgcccggctcttccatcgtcactgagttcaacctggtgtgtgctgactcctggaagctggacctctttcagtcctgtttgaatgcgggcttcttgtttggctctctcggtgttggctactttgcagacaggtttggccgtaagctgtgtctcctgggaactgtgctggtcaacgcggtgtcgggcgtgctcatggccttctcgcccaactacatgtccatgctgctcttccgcctgctgcagggcctggtcagcaagggcaactggatggctggctacaccctaatcacagaatttgttggctcgggctccagaagaacggtggcgatcatgtaccagatggccttcacggtggggctggtggcgcttaccgggctggcctacgccctgcctcactggcgctggctgcagctggcagtctccctgcccaccttcctcttcctgctctactactggtgtgtgccggagtcccctcggtggctgttatcacaaaaaagaaacactgaagcaataaagataatggaccacatcgctcaaaagaatgggaagttgcctcctgctgatttaaagatgctttccctcgaagaggatgtcaccgaaaagctgagcccttcatttgcagacctgttccgcacgccgcgcctgaggaagcgcaccttcatcctgatgtacctgtggttcacggactctgtgctctatcaggggctcatcctgcacatgggcgccaccagcgggaacctctacctggatttcctttactccgctctggtcgaaatcccgggggccttcatagccctcatcaccattgaccgcgtgggccgcatctaccccatggccatgtcaaatttgttggcgggggcagcctgcctcgtcatgatttttatctcacctgacctgcactggttaaacatcataatcatgtgtgttggccgaatgggaatcaccattgcaatacaaatgatctgcctggtgaatgctgagctgtaccccacattcgtcaggaacctcggagtgatggtgtgttcctccctgtgtgacataggtgggataatcacccccttcatagtcttcaggctgagggaggtctggcaagccttgcccctcattttgtttgcggtgttgggcctgcttgccgcgggagtgacgctacttcttccagagaccaagggggtcgctttgccagagaccatgaaggacgccgagaaccttgggagaaaagcaaagcccaaagaaaacacgatttaccttaaggtccaaacctcagaaccctcgggcacctgagagagatgttttgcggcgatgtcgtgttggagggatgaagatggagttatcctctgcagaaattcctagacgccttcacttctctgtattcttcctcatacttgcctacccccaaattaatatcagtcctaaagaa

SEQ ID NO: 183224 - DNA, 1452 bp, Homo sapiens
  Payload ID: 16095
  Gene Symbol: SLC22A1
  Gene Name: solute carrier family 22 (organic cation transporter), member 1
  Uniprot ID: O15245
  ENST ID: ENST00000457470
  CDS Start-End: 1-1452
atgcccaccgtggatgacattctggagcaggttggggagtctggctggttccagaagcaagccttcctcatcttatgcctgctgtcggctgcctttgcgcccatctgtgtgggcatcgtcttcctgggtttcacacctgaccaccactgccagagtcctggggtggctgagctgagccagcgctgtggctggagccctgcggaggagctgaactatacagtgccaggcctggggcccgcgggcgaggccttccttggccagtgcaggcgctatgaagtggactggaaccagagcgccctcagctgtgtagaccccctggctagcctggccaccaacaggagccacctgccgctgggtccctgccaggatggctgggtgtatgacacgcccggctcttccatcgtcactgagttcaacctggtgtgtgctgactcctggaagctggacctctttcagtcctgtttgaatgcgggcttcttgtttggctctctcggtgttggctactttgcagacaggtttggccgtaagctgtgtctcctgggaactgtgctggtcaacgcggtgtcgggcgtgctcatggccttctcgcccaactacatgtccatgctgctcttccgcctgctgcagggcctggtcagcaagggcaactggatggctggctacaccctaatcacagaatttgttggctcgggctccagaagaacggtggcgatcatgtaccagatggccttcacggtggggctggtggcgcttaccgggctggcctacgccctgcctcactggcgctggctgcagctggcagtctccctgcccaccttcctcttcctgctctactactggtgtgtgccggagtcccctcggtggctgttatcacaaaaaagaaacactgaagcaataaagataatggaccacatcgctcaaaagaatgggaagttgcctcctgctgatttaaagatgctttccctcgaagaggatgtcaccgaaaagctgagcccttcatttgcagacctgttccgcacgccgcgcctgaggaagcgcaccttcatcctgatgtacctgtggttcacggactctgtgctctatcaggggctcatcctgcacatgggcgccaccagcgggaacctctacctggatttcctttactccgctctggtcgaaatcccgggggccttcatagccctcatcaccattgaccgcgtgggccgcatctaccccatggccatgtcaaatttgttggcgggggcagcctgcctcgtcatgatttttatctcacctgacctgcactggttaaacatcataatcatgtgtgttggccgaatgggaatcaccattgcaatacaaatgatctgcctggtgaatgctgagctgtaccccacattcgtcagaaaagcaaagcccaaagaaaacacgatttaccttaaggtccaaacctcagaaccctcgggcacctga

SEQ ID NO: 183225 - DNA, 1484 bp, Homo sapiens
  Payload ID: 16095
  Gene Symbol: SLC22A1
  Gene Name: solute carrier family 22 (organic cation transporter), member 1
  Uniprot ID: O15245
  ENST ID: ENST00000460902
  CDS Start-End: 1-1062
atgcccaccgtggatgacattctggagcaggttggggagtctggctggttccagaagcaagccttcctcatcttatgcctgctgtcggctgcctttgcgcccatctgtgtgggcatcgtcttcctgggtttcacacctgaccaccactgccagagtcctggggtggctgagctgagccagcgctgtggctggagccctgcggaggagctgaactatacagtgccaggcctggggcccgcgggcgaggccttccttggccagtgcaggcgctatgaagtggactggaaccagagcgccctcagctgtgtagaccccctggctagcctggccaccaacaggagccacctgccgctgggtccctgccaggatggctgggtgtatgacacgcccggctcttccatcgtcactgagttcaacctggtgtgtgctgactcctggaagctggacctctttcagtcctgtttgaatgcgggcttcttgtttggctctctcggtgttggctactttgcagacaggtttggccgtaagctgtgtctcctgggaactgtgctggtcaacgcggtgtcgggcgtgctcatggccttctcgcccaactacatgtccatgctgctcttccgcctgctgcagggcctggtcagcaagggcaactggatggctggctacaccctaatcacagaatttgttggctcgggctccagaagaacggtggcgatcatgtaccagatggccttcacggtggggctggtggcgcttaccgggctggcctacgccctgcctcactggcgctggctgcagctggcagtctccctgcccaccttcctcttcctgctctactactggtgtgtgccggagtcccctcggtggctgttatcacaaaaaagaaacactgaagcaataaagataatggaccacatcgctcaaaagaatgggaagttgcctcctgctgatttaaagatgctttccctcgaagaggatgtcaccgaaaagctgagcccttcatttgcagacctgttccgcacgccgcgcctgaggaagcgcaccttcatcctgatgtacctgtgacctgcactggttaaacatcataatcatgtgtgttggccgaatgggaatcaccattgcaatacaaatgatctgcctggtgaatgctgagctgtaccccacattcgtcaggaacctcggagtgatggtgtgttcctccctgtgtgacataggtgggataatcacccccttcatagtcttcaggctgagggaggtctggcaagccttgcccctcattttgtttgaaaagcaaagcccaaagaaaacacgatttaccttaaggtccaaacctcagaaccctcgggcacctgagagagatgttttgcggcgatgtcgtgttggagggatgaagatggagttatcctctgcagaaattcctagacgccttcacttctctgtattcttcctcatacttgcctacccccaaattaatatcagtcctaaag

SEQ ID NO: 183226 - DNA, 653 bp, Homo sapiens
  Payload ID: 16095
  Gene Symbol: SLC22A1
  Gene Name: solute carrier family 22 (organic cation transporter), member 1
  ENST ID: ENST00000540443
  CDS Start-End: 509-653
ctgtcctggagggcagaggcagaaaaggtggaagaggtagaagaagagacaggcacactcggtgtaaattttattgaaaaaaaaaaatctgtaagtggacccgcgcagttcaaacccatgttgttcgagggttagttgcatttgatatttgctgagtgattcatcagaaactttgaatttgtcttatgaaaatgtagtaggagaaaactctgtgaaacagcccagggataccgagtttgatgaactgcatttgctttgctgaagagaggatggaagggtgtagtcctgactcacacatggttctgtgcttttcgtcctcctcttgccgtggtatgactggcagttcaacctggtgtgtgctgactcctggaagctggacctctttcagtcctgtttgaatgcgggcttcttgtttggctctctcggtgttggctactttgcagacaggtttggccgtaagctgtgtctcctgggaactgtgctggtcaacgcggtgtcgggcgtgctcatggccttctcgcccaactacatgtccatgctgctcttccgcctgctgcagggcctggtcagcaagggcaactggatggctggctacaccctaatcacagaatttgttggctcgggctccagaagaacggtggcgatcatgtacc

SEQ ID NO: 183227 - DNA, 1598 bp, Homo sapiens
  Payload ID: 16095
  Gene Symbol: SLC22A1
  Gene Name: solute carrier family 22 (organic cation transporter), member 1
  ENST ID: ENST00000539263
  CDS Start-End: 38-460
gcaggtctggccacggccatgagcatgctgagccatcatgcccaccgtggatgacattctggagcaggttggggagtctggctggttccagaagcaagccttcctcatcttatgcctgctgtcggctgcctttgcgcccatctgtgtgggcatcgtcttcctgggtttcacacctgaccaccactgccagagtcctggggtggctgagctgagccagcgctgtggctggagccctgcggaggagctgaactatacagtgccaggcctggggcccgcgggcgaggccttccttggccagtgcaggcgctatgaagtggactggaaccagagcgccctcagctgtgtagaccccctggctagcctggccaccaacaggagccacctgccgctgggtccctgccaggatggctgggtgtatgacacgcccggctcttccatcgtcactgaggtttggccgtaagctgtgtctcctgggaactgtgctggtcaacgcggtgtcgggcgtgctcatggccttctcgcccaactacatgtccatgctgctcttccgcctgctgcagggcctggtcagcaagggcaactggatggctggctacaccctaatcacagaatttgttggctcgggctccagaagaacggtggcgatcatgtaccagatggccttcacggtggggctggtggcgcttaccgggctggcctacgccctgcctcactggcgctggctgcagctggcagtctccctgcccaccttcctcttcctgctctactactggtgtgtgccggagtcccctcggtggctgttatcacaaaaaagaaacactgaagcaataaagataatggaccacatcgctcaaaagaatgggaagttgcctcctgctgatttaaagatgctttccctcgaagaggatgtcaccgaaaagctgagcccttcatttgcagacctgttccgcacgccgcgcctgaggaagcgcaccttcatcctgatgtacctgtggttcacggactctgtgctctatcaggggctcatcctgcacatgggcgccaccagcgggaacctctacctggatttcctttactccgctctggtcgaaatcccgggggccttcatagccctcatcaccattgaccgcgtgggccgcatctaccccatggccatgtcaaatttgttggcgggggcagcctgcctcgtcatgatttttatctcacctgacctgcactggttaaacatcataatcatgtgtgttggccgaatgggaatcaccattgcaatacaaatgatctgcctggtgaatgctgagctgtaccccacattcgtcaggaacctcggagtgatggtgtgttcctccctgtgtgacataggtgggataatcacccccttcatagtcttcaggctgagggaggtctggcaagccttgcccctcattttgtttgcggtgttgggcctgcttgccgcgggagtgacgctacttcttccagagaccaagggggtcgctttgccagagaccatgaaggacgccgagaaccttgggagaaaagcaaagcccaaagaaaacacgatttaccttaaggtccaaacctcagaaccctcgggcacctga

SEQ ID NO: 183228 - DNA, 664 bp, Homo sapiens
  Payload ID: 16096
  Gene Symbol: SLC22A18AS
  Gene Name: solute carrier family 22 (organic cation transporter), member 18 antisense
  Uniprot ID: Q8N1D0
  ENST ID: ENST00000526203
  CDS Start-End: 127-579
catggcttcctgggcctaccctcgttctgctactcatggaccagtgtgtttgcctctggaagcctctgtctcctcggctgtaaagcgggcctacgacattgaccgaccacccatgaggttgtggcaatgcggtgtgcagagggtgcttggtggttctctcctgatggccccgcagggtctgcagcctccatctggccagcagagggcgcagaaggactgcctgggcagctcggacgtgaccgcctggaagtggtgtacagcgttcctgacaacgttcccggccaaaacgggtcccgccgcccacttgtgtgcaagataactggaaaatgtctttctgtgtgctccgaggagaatgcaaaggctggtggatgtagtgcctttcctctactgctctctcagctgggggcaagaatgacaggacgtgaacatgcacacaagggcccggaactcacgacccccgacagcggtctcccccgcccccccaaccccgcgcttgcaggatttagggcactagcacagcacagtccaccccttgggactagcaccccctccgcagttctgctctctgcagcaacatagagtacaaatattgttccttttgtttcttttttccctttggatacatttttaattacaaaaatagagcttgattgttgcacctaga

SEQ ID NO: 183229 - DNA, 1659 bp, Homo sapiens
  Payload ID: 16096
  Gene Symbol: SLC22A18AS
  Gene Name: solute carrier family 22 (organic cation transporter), member 18 antisense
  Uniprot ID: Q8N1D0
  ENST ID: ENST00000625099
  CDS Start-End: 498-1259
agggaagtggggtggctccccatggcttctcccggggctggcactgaagctggagcacaggatgtgctgacgggggtccagaggcagagtccttaacttactcagcttaagcgtggcatgagtcccaactgggaggggccctggcagcatgaaacccccacccccactctctgcgacggcccagatggagggcaggaggaacagcggttcagccctggctggggctgcaggggctggggtgtgttactcactggcacgatggagaactgcatgaagaggcagcggagtgctgtctgtccccacccttccccgcccggcctccaactggtgggaactggattttgcggctgcagaggacttccccaaattttgccacattaacagctgactgcacatctgagccccgaggtgaagcagggcctcaggtagccagggaactggttgagcagaggaaatcggagagacctttttttttgtcatgaacaggctcagtgtgaatgggggaacttcctggttctgagggaatgtgggaaaattgccctttaggctgggtgaagaagaaagcaagtggaaccctggcacccctggacttcctcctccagaggaagcggctttggttgtgggccagcgagcctgtgcgtccccagccccagggcattcaccgcttcagagaagcaaggcgacagttctgccggatgagaggatccaggctgactggaggaaggaagggctttggctcatctgggctcaggtttgggagaggtggcttctcagaggaggtgatgcctcagccagtcttaaaggcaatgcggtgtgcagagggtgcttggtggttctctcctgatggccccgcagggtctgcagcctccatctggccagcagagggcgcagaaggactgcctgggcagctcggacgtgaccgcctggaagtggtgtacagcgttcctgacaacgttcccggccaaaacgggtcccgccgcccacttgtgtgcaagataactggaaaatgtctttctgtgtgctccgaggagaatgcaaaggctggtggatgtagtgcctttcctctactgctctctcagctgggggcaagaatgacaggacgtgaacatgcacacaagggcccggaactcacgacccccgacagcggtctcccccgcccccccaaccccgcgcttgcaggatttagggcactagcacagcacagtccaccccttgggactagcaccccctccgcagttctgctctctgcagcaacatagagtacaaatattgttccttttgtttcttttttccctttggatacatttttaattacaaaaatagagcttgattgttgcacctagacagatgtttgcttgcttctgggcccattgggcctcctctcagagcctggaactcccagcccccagctcctggggtgccttcctccaggtgtgtccctggcttgggctggggggacacagccccgctcctgggacgtgcaggtttaaaatgctattgggtaccatctttgatcgaattcagagtgacagacttagagcaggtcacctctcagcttctaacgaggccaagacggaggaatccccacagcactgggtttgactctgtaattaagctggtaaagtggaaaaataaaagtaggaaacctaagtggaaacc

SEQ ID NO: 183230 - DNA, 697 bp, Homo sapiens
  Payload ID: 16096
  Gene Symbol: SLC22A18AS
  Gene Name: solute carrier family 22 (organic cation transporter), member 18 antisense
  Uniprot ID: Q8N1D0
  ENST ID: ENST00000455942
  CDS Start-End: 162-614
ctggcacgatggagaactgcatgaagaggcagcggagtgctgtctgtccccacccttccccgcccggcctccaactggtgggaactggattttgcggctgcagaggacttccccaaattttgccacattaacagctgactgcacatctgagccccgaggcaatgcggtgtgcagagggtgcttggtggttctctcctgatggccccgcagggtctgcagcctccatctggccagcagagggcgcagaaggactgcctgggcagctcggacgtgaccgcctggaagtggtgtacagcgttcctgacaacgttcccggccaaaacgggtcccgccgcccacttgtgtgcaagataactggaaaatgtctttctgtgtgctccgaggagaatgcaaaggctggtggatgtagtgcctttcctctactgctctctcagctgggggcaagaatgacaggacgtgaacatgcacacaagggcccggaactcacgacccccgacagcggtctcccccgcccccccaaccccgcgcttgcaggatttagggcactagcacagcacagtccaccccttgggactagcaccccctccgcagttctgctctctgcagcaacatagagtacaaatattgttccttttgtttcttttttccctttggatacatttttaattacaaaaatagagcttgattgttgcaccta

SEQ ID NO: 183231 - DNA, 3737 bp, Homo sapiens
  Payload ID: 16097
  Gene Symbol: SLC22A2
  Gene Name: solute carrier family 22 (organic cation transporter), member 2
  ENST ID: ENST00000366952
  CDS Start-End: 1483-2487
gctgaacagtgctctcgctgaggtcagggggagaagatggcaggggtgaatccttgacgatcacggagtaaggacgagaatgcagtttgcttcccacaggcccctccctcaacatgccaagattcctacctggggcatcaagactgcaggtggggccaagaaaagacatggacactcaaagtcaagctctttgacggggaacaggtgcagacagagcagccttggcttccggctcatgcactcacgatgctggctgcgaatgggaagtccctaaacagaactgagccccctcattcagctcagagcaaacggggctggcagcagcccagggcaccacgaagcagagtgcctctgtgtgcccaacacagccgcagtggaggtcaatggatgtccttgccggcgccctgctttttgcttttttaagaaaataagaagcctgcagctgcggcaaggagaaagaccccgtgggtcgctccttttagactacgctattacacctgctgactatccaatagaaaaaagaaggagaaggaaaatcgggttaactttctggtatttagtttgcagatatgtcagcaggccaccttctctacttggcaggatcacgatgtattaagaatccttttgtccaccaggaaagacaaatttcctgtttgtcttgcatttagatgcaacaacatcatcctaaagagatgcccctgatgtgtgagagcagaaaggggtgatccctttcttccttatcctaaggctcacggccaacacccctataacaaaagacaggttaacaagagaaaagcatgacaaatttatttgatcacgttttacatgacacaggagccttcattcagaatgaagacccacagatacagggaaaactggatggcagtatagaactgtagttggacaaaaagggcagcagcccatgttcgcaggctgaggggaaaacccagcaaggcctgtctgttcagatccgtcttggcccctctgtgcagcactccttcctccaggcaccggggacaagactcctctggaatgcgggtctggatttctttacggcccactgttacacagaaaggcagcggggaagttacagtggtatttctaggctttctggctggctttggggagaaaagagtctggtttccacgagctgctttgaggaagaaggattctcagttctatggcttgccccgggggagaatgatgggtgagagaagagacaggagggcaggagaaggtcagagagagagactttgcttctgaggcctccaccttggggcatggatttctgagccccaacagaccttgacagaaaaatctaggacacaaagatagtggcttggacacacctgcctgcatttacacttgacctgtctgcgacgtaaacactttcctctttccctccagatgggttaaggggaaggacacttcagggttgaaacgcaggaataccagattggatttcactttttccagaagcaaatgtttttcctcttggctctgctctcggctaccttcgcgcccatctacgtgggcatcgtcttcctgggcttcacccctgaccaccgctgccggagccccggagtggccgagctgagtctgcgctgcggctggagtcctgcagaggaactgaactacacggtgccgggcccaggacctgcgggcgaagcctccccaagacagtgtaggcgctacgaggtggactggaaccagagcaccttcgactgcgtggaccccctggccagcctggacaccaacaggagccgcctgccactgggcccctgccgggacggctgggtgtacgagacgcctggctcgtccatcgtcaccgagtttaacctggtatgtgccaactcctggatgttggacctattccagtcatcagtgaatgtaggattctttattggctctatgagtatcggctacatagcagacaggtttggccgtaagctctgcctcctaactacagtcctcataaatgctgcagctggagttctcatggccatttccccaacctatacgtggatgttaatttttcgcttaatccaaggactggtcagcaaagcaggctggttaataggctacatcctgattacagaatttgttgggcggagatatcggagaacagtggggattttttaccaagttgcctatacagttgggctcctggtgctagctggggtggcttacgcacttcctcactggaggtggttgcagttcacagtttctctgcccaacttcttcttcttgctctattactggtgcatacctgagtctcccaggtggctgatctcccagaataagaatgctgaagccatgagaatcattaagcacatcgcaaagaaaaatggaaaatctctacccgcctcccttcagcgcctgagacttgaagaggaaactggcaagaaattgaacccttcatttcttgacttggtcagaactcctcagataaggaaacatactatgatattgatgtacaactggtaaggaatatttttcactttgaaatgcctccaaattgttttaatcacagtcatccatagtaaggaagggaagaaaacatgacctcatcccggtattagcgctgacggtgggcagcaatgtgggttgtgtctggtaggttttcctgatcgtgtttttcttgggcaaatattaagatcggtgtagcccctaagcacagatcaaggcaatggcaacctcggcttcacattggaatcacctgggagcttacaaaataccaaagccaaaacccccagaaatactgatttaattgttctagggtagggcttggaaaccaatagttttttaattctccaggtgattcaaatgcatagcccaactagagaactattggtataacttaattgatgatgcatgtagatctctattgtagtacagaactggcaaaaaacaaacaaacaaaaaacagggttgtggggggattgccttttctttcctttttttcttttctacctggagaaaaaataaatttctgaacaagaataattccagtggcttcacagcccagtgacttgatctttattgtgtttgctacctacaggctgctctcagagcttcaagccatgctttctctagtggggaatgcatcttttcagggcacattggatctccacccaggcaaatggagatttacaatcactgacaaaagcaaagctcatgaggaattactttagcaacctttacaatagtgcacaggagaggcagctttgaaatttggcctcattatccttctttccttttctgagtaatcgtgacttttgttgattatcctcatattttccattacatgtaatgactatgtttagttaataaactagaaacattgtccaaatgttgttcgtaacaggccaggagagaagtcaccaagaagggaggccgtactcacttggtcttctggtttcctaaaatttgaattaagtagtcagttctttcgatcccaattgcactagaataccccaaagagagaaataactcacaaccactaataacttgatatagttttactaaataaatcattccattggccaggcacagtggctcacacctggaatcccagcatttcgggaggctgaggcaggcagatcacatgaagccaggagttcaagaccagcctggttaacatggcaaaaccccatgtctactaaaagcacaaaaattagcaggtggtacacgtctgtaatcccaactactagggaggctgaggcaggggaataact

SEQ ID NO: 183232 - DNA, 2597 bp, Homo sapiens
  Payload ID: 16097
  Gene Symbol: SLC22A2
  Gene Name: solute carrier family 22 (organic cation transporter), member 2
  Uniprot ID: O15244
  ENST ID: ENST00000366953
  CDS Start-End: 260-1927
gttataataaacacgacaggcatcctgggagtgagctcagggcatttgggaagtgcagaaggacatgcacccccgctggaggggtgcacctttgaagtcagctggaccaaggaaaggccctgccctgaaggctggtcacttgcagaggtaaactcccctctttgacttctggccagggtttgtgctgagctggctgcagccgctctcagcctcgctccgggcacgtcgggcagcctcgggccctcctgcctgcaggatcatgcccaccaccgtggacgatgtcctggagcatggaggggagtttcactttttccagaagcaaatgtttttcctcttggctctgctctcggctaccttcgcgcccatctacgtgggcatcgtcttcctgggcttcacccctgaccaccgctgccggagccccggagtggccgagctgagtctgcgctgcggctggagtcctgcagaggaactgaactacacggtgccgggcccaggacctgcgggcgaagcctccccaagacagtgtaggcgctacgaggtggactggaaccagagcaccttcgactgcgtggaccccctggccagcctggacaccaacaggagccgcctgccactgggcccctgccgggacggctgggtgtacgagacgcctggctcgtccatcgtcaccgagtttaacctggtatgtgccaactcctggatgttggacctattccagtcatcagtgaatgtaggattctttattggctctatgagtatcggctacatagcagacaggtttggccgtaagctctgcctcctaactacagtcctcataaatgctgcagctggagttctcatggccatttccccaacctatacgtggatgttaatttttcgcttaatccaaggactggtcagcaaagcaggctggttaataggctacatcctgattacagaatttgttgggcggagatatcggagaacagtggggattttttaccaagttgcctatacagttgggctcctggtgctagctggggtggcttacgcacttcctcactggaggtggttgcagttcacagtttctctgcccaacttcttcttcttgctctattactggtgcatacctgagtctcccaggtggctgatctcccagaataagaatgctgaagccatgagaatcattaagcacatcgcaaagaaaaatggaaaatctctacccgcctcccttcagcgcctgagacttgaagaggaaactggcaagaaattgaacccttcatttcttgacttggtcagaactcctcagataaggaaacatactatgatattgatgtacaactggttcacgagctctgtgctctaccagggcctcatcatgcacatgggccttgcaggtgacaatatctacctggatttcttctactctgccctggttgaattcccagctgccttcatgatcatcctcaccatcgaccgcatcggacgccgttacccttgggctgcatcaaatatggttgcaggggcagcctgtctggcctcagtttttatacctggtgatctacaatggctaaaaattattatctcatgcttgggaagaatggggatcacaatggcctatgagatagtctgcctggtcaatgctgagctgtaccccacattcattaggaatcttggcgtccacatctgttcctcaatgtgtgacattggtggcatcatcacgccattcctggtctaccggctcactaacatctggcttgagctcccgctgatggttttcggcgtgcttggcttggttgctggaggtctggtgctgttgcttccagaaactaaagggaaagctttgcctgagaccatcgaggaagccgaaaatatgcaaagaccaagaaaaaataaagaaaagatgatttacctccaagttcagaaactagacattccattgaactaagaagagagaccgttgctgctgtcatgacctagctttgatggcagcaagaccaaaagtagaaatccctgcactcatcacaaagcccatacaactcaaccaaacttacccctgagccctatcaacctaggtctacagccagtggagtctattgtacactgtggaaaaatacccatgggaccagatcctgccaaattcttccagctcactttattctcagcattcctaggacattggacattggttttctggagggttttttttccatctttgtatttttttaaatttgattcttttctttgcaatgctatctaaccagaatacataggggaactgtgggctaggcaaacaaaatagaaaaaagtgtgaaaaacagtaaagttgggagaggagcatctattttcttaaagaaataaaacacccaaaacaatataaagttgtccagaatgtatgtcaagaattttagataggcctttcagtaacacaggtgaagaaatttttaaaaatacattgattattatctaggttagacttaaagtgaatctcaaataaaagaatcaggaatacaacttaagtgatcatgaggtccttccatatttagattgggtaagcatgaatgtgtattttctacaaaagaccttgagaagagttcaataaaaaatgttagcattat

SEQ ID NO: 183233 - DNA, 3348 bp, Homo sapiens
  Payload ID: 16098
  Gene Symbol: SLC22A3
  Gene Name: solute carrier family 22 (organic cation transporter), member 3
  Uniprot ID: O75751
  ENST ID: ENST00000275300
  CDS Start-End: 153-1823
gcggggggcaggaggagcggctgcggccggcacagcgccagggcgagtgaggcgggtggcgcgggggaggcggcggagtaaagagaggccgccggctgggtccgcgggtcactccgaggcgcgggctgcgggcggcgggcggcgggcgcaccatgccctccttcgacgaggcgctgcagcgggtgggcgagttcgggcgcttccagaggcgcgtgtttttgctgctgtgcctgacgggcgtcaccttcgccttcctcttcgtcggcgtggtcttcctgggcacgcagcccgaccactactggtgccgcgggccaagtgccgcggcgctggccgagcgctgcggctggagcccggaggaggagtggaaccgcacggcgcccgcctcccgcggcccagagccccccgagcgccgcggccgctgccagcgctacctcctggaggcggccaacgacagcgcctccgccactagcgctctcagctgcgcggacccactcgccgccttccccaaccgctcggctccccttgtgccgtgccgcggcggctggcgctacgcccaggcccactccaccatcgtcagcgagtttgaccttgtctgtgtcaatgcgtggatgctggacctcacccaagccatcctgaacctcggcttcctgactggagcattcaccttaggctatgcagcagacaggtatggcaggatcgtcatttacttgctatcctgccttggtgttggcgtcactggggttgtggtggcctttgcaccaaacttccctgtgtttgtgatcttccgcttcctgcaaggtgtatttggaaaggggacgtggatgacttgctacgtgattgtgacagaaatagtaggttcgaaacaaaggaggattgtgggaatcgtgattcaaatgttctttacccttggaatcataattctccctggaattgcctacttcatccccaactggcaaggaatccagttagccatcacgctgcccagctttctcttcctcctttattactgggtggtccctgagtctccccgttggctgattactcggaagaaaggagataaagcattacagatcctgagacgcattgctaagtgcaatgggaaatacctctcatcaaattactcagagatcactgttacagatgaggaagttagtaatccatcctttttagatctggtgagaactccccaaatgaggaaatgcacacttattcttatgtttgcttggttcacaagcgcagtggtgtatcaaggacttgtcatgcgcctgggaattatagggggcaacctctatatagactttttcatctcgggcgtggtggaactgccaggagctctcttgatcttactaaccattgagcgccttggacgacgcctcccctttgcggcaagcaatatagtggcaggggtggcatgccttgtcactgcgttcttaccagaaggaatagcatggttgaggaccacagtggctacattgggaagactagggataaccatggcctttgaaattgtttatttggtaaattcagaattgtacccaacaacattacgaaatttcggagtttcgctctgttcaggtctgtgtgattttgggggaatcatagccccatttctgctctttcggctagcagccgtgtggctagaactacctctgatcatctttggtatcctggcatccatctgtggtggccttgtgatgcttttgcctgaaaccaagggtattgccttgccagagacagtggatgatgtagaaaaacttggcagtccacattcctgtaaatgtggcaggaataagaaaaccccagtttcccgctctcacctttgaggcccccgacaaagacagaaagaaggagctatccaggagctgatcctccttgcaaagctgtgccttgcagagatgcacgtgtgcatttcagctacatcatgccgcgctgttgtaatactgtataaagacctcaatctatccagagtatttttatataatgttggatgagttaggatttgtaatgctgttgaagtttctgggaacacataatatgtagccagtttaacaaagaagctgtcaggtgcacagcccttcctgggtttttttcttgtgttccctgtggtctctgacccattaggctaaagagagacaagagaagcccccaacctgattctcatgacagctccatcaagaatgtgggatgtgccgaccaaggatttgagaaagttgtacagaaatgtgttcatcaaatctggtcaagggactaagctcctagctgaccattcattctgaagattgcatggaggatgaacatctgggaatcctgttaatgagaaggctgaatcacaggcacctgggccaaagggtgtgagcattcatgttctctgctcaccttggtttccgcacaccttcgcaatgtgaacaggtcaggagtccctcccgtccacctcctctgtaacagctggggttccaggcatggtttaggccctgttccagcaataagaaccaatctgctgtacaatctgaggacttggctctgttatttacaaaatgatgctgtggttctgagattatttgggacatttttggctctcctttagtggacacctagagccacagattcccttctttactaaacaaatcccatggattctgatttctgggtcttaggattttaaaagtgaagggatatttttcttatatttgtgagttcagttccgatggtgcccgtggtcaaaagcgaaaaacatggacaattcctattcattcttagcactttgacatgtcttggggaaaagcttacattttaatttaaaagaaagatcaattatatccatgcttaacaggatcagcaggagctttataaatgactttacagagactaataagggatttgatctttctttttttgttatcgaggcttttgaaatgtggaacttgtgtgttctgctttatatgttatattcaatatcttttcagatgcagtctatattttatgctgagttttaaaaatgaaatactttatgcaaacaggcaaaattggtaccaaagggaaacattaaccatgaggaagagcatttttctaaggagaacaggtgacaatatacacatgtgcgctaatcgtaaaatgagcatcttagtctttaaaacacatcagaattgaatacgaataatctatttgtcgatgaaataaacacaactctttgaggatttgagactacattcaccctttattcacagtcacttgcagttttgcttttctctgcatttctctgctgtaagatgactgttgcattgttgaattgtattttgagtggatatttttgtttggtaacaattaaaattttaaatcgtaaaaaatgta

SEQ ID NO: 183234 - DNA, 2033 bp, Homo sapiens
  Payload ID: 16099
  Gene Symbol: SLC22A16
  Gene Name: solute carrier family 22 (organic cation/carnitine transporter), member 16
  Uniprot ID: Q86VW1
  ENST ID: ENST00000330550
  CDS Start-End: 285-1916
tcgaggggccagatctcactcgtagggggtgcctgtgcctggccgcccgtttctctaatccgccgccacttccctagacggctgctgcccagttctgccctgcgcctccgtagggcctccctctgtgcctggcaggtgttccccagggacaaccgttagtcagagttggttgccgtttattaaaacctaatacgtgccaggtacactgtacctggcgcttacacatagttcttcatttgatgttcaccgggaccctgcaaaggaggagtagtgaaaatgtgtatatgaggactctgcatgcagtttctcatccttacagtaactcaatgagattccagagagtcctctatttcatatgtgccttccagaacatctcttgtggtattcactacttggcttctgtgttcatgggagtcacccctcatcatgtctgcaggcccccaggcaatttgcagaatggtgagatctgggagctctcaaggtgtagcaggaataagagggagaacacatcgagtttgggctatgaatacactggcagtaagaaagagtttccttgtgtggatggctacatatatgaccagaacacatggaaaagcactgcggtgacccagtggaacctggtctgtgaccgaaaatggcttgcaatgctgatccagcccctatttatgtttggagtcctactgggatcggtgacttttggctacttttctgacaggctaggacgccgggtggtcttgtgggccacaagcagtagcatgtttttgtttggaatagcagcggcgtttgcagttgattattacaccttcatggctgctcgcttttttcttgccatggttgcaagtggctatcttgtggtggggtttgtctatgtgatggaattcattggcatgaagtctcggacatgggcgtctgtccatttgcattccttttttgcagttggaaccctgctggtggctttgacaggatacttggtcaggacctggtggctttaccagatgatcctctccacagtgactgtcccctttatcctgtgctgttgggtgctcccagagacacctttttggcttctctcagagggacgatatgaagaagcacaaaaaatagttgacatcatggccaagtggaacagggcaagctcctgtaaactgtcagaacttttatcactggacctacaaggtcctgttagtaatagccccactgaagttcagaagcacaacctatcatatctgttttataactggagcattacgaaaaggacacttaccgtttggctaatctggttcactggaagtttgggattctactcgttttccttgaattctgttaacttaggaggcaatgaatacttaaacctcttcctcctgggtgtagtggaaattcccgcctacaccttcgtgtgcatcgccatggacaaggtcgggaggagaacagtcctggcctactctcttttctgcagtgcactggcctgtggtgtcgttatggtgatcccccagaaacattatattttgggtgtggtgacagctatggttggaaaatttgccatcggggcagcatttggcctcatttatctttatacagctgagctgtatccaaccattgtaagatcgctggctgtgggaagcggcagcatggtgtgtcgcctggccagcatcctggcgccgttctctgtggacctcagcagcatttggatcttcataccacagttgtttgttgggactatggccctcctgagtggagtgttaacactaaagcttccagaaacccttgggaaacggctagcaactacttgggaggaggctgcaaaactggagtcagagaatgaaagcaagtcaagcaaattacttctcacaactaataatagtgggctggaaaaaacggaagcgattacccccagggattctggtcttggtgaataaatgtgccatgcctgctgtctagcacctgaaatattatttaccctaatgcctttgtattagaggaatcttattctcatctcccatatgttgtttgtatgtctttttaataaattttgt

SEQ ID NO: 183235 - DNA, 1987 bp, Homo sapiens
  Payload ID: 16099
  Gene Symbol: SLC22A16
  Gene Name: solute carrier family 22 (organic cation/carnitine transporter), member 16
  Uniprot ID: Q86VW1
  ENST ID: ENST00000368919
  CDS Start-End: 68-1801
ggggcggggcgcgctacccgcagtccccggagctcggctaactcggcgcccagtgcacggccgcaccatggggtcccgccacttcgaggggatttatgaccacgtggggcacttcggcagattccagagagtcctctatttcatatgtgccttccagaacatctcttgtggtattcactacttggcttctgtgttcatgggagtcacccctcatcatgtctgcaggcccccaggcaatgtgagtcaggttgttttccataatcactctaattggagtttggaggacaccggggccctgttgtcttcaggccagaaagattatgttacggtgcagttgcagaatggtgagatctgggagctctcaaggtgtagcaggaataagagggagaacacatcgagtttgggctatgaatacactggcagtaagaaagagtttccttgtgtggatggctacatatatgaccagaacacatggaaaagcactgcggtgacccagtggaacctggtctgtgaccgaaaatggcttgcaatgctgatccagcccctatttatgtttggagtcctactgggatcggtgacttttggctacttttctgacaggctaggacgccgggtggtcttgtgggccacaagcagtagcatgtttttgtttggaatagcagcggcgtttgcagttgattattacaccttcatggctgctcgcttttttcttgccatggttgcaagtggctatcttgtggtggggtttgtctatgtgatggaattcattggcatgaagtctcggacatgggcgtctgtccatttgcattccttttttgcagttggaaccctgctggtggctttgacaggatacttggtcaggacctggtggctttaccagatgatcctctccacagtgactgtcccctttatcctgtgctgttgggtgctcccagagacacctttttggcttctctcagagggacgatatgaagaagcacaaaaaatagttgacatcatggccaagtggaacagggcaagctcctgtaaactgtcagaacttttatcactggacctacaaggtcctgttagtaatagccccactgaagttcagaagcacaacctatcatatctgttttataactggagcattacgaaaaggacacttaccgtttggctaatctggttcactggaagtttgggattctactcgttttccttgaattctgttaacttaggaggcaatgaatacttaaacctcttcctcctgggtgtagtggaaattcccgcctacaccttcgtgtgcatcgccatggacaaggtcgggaggagaacagtcctggcctactctcttttctgcagtgcactggcctgtggtgtcgttatggtgatcccccagaaacattatattttgggtgtggtgacagctatggttggaaaatttgccatcggggcagcatttggcctcatttatctttatacagctgagctgtatccaaccattgtaagatcgctggctgtgggaagcggcagcatggtgtgtcgcctggccagcatcctggcgccgttctctgtggacctcagcagcatttggatcttcataccacagttgtttgttgggactatggccctcctgagtggagtgttaacactaaagcttccagaaacccttgggaaacggctagcaactacttgggaggaggctgcaaaactggagtcagagaatgaaagcaagtcaagcaaattacttctcacaactaataatagtgggctggaaaaaacggaagcgattacccccagggattctggtcttggtgaataaatgtgccatgcctgctgtctagcacctgaaatattatttaccctaatgcctttgtattagaggaatcttattctcatctcccatatgttgtttgtatgtctttttaataaattttgtaagaaaattttaaagcaaatatgttataaaagaaataaaaactaagatgaaaattctcagttttaaaaa

SEQ ID NO: 183236 - DNA, 1968 bp, Homo sapiens
  Payload ID: 16099
  Gene Symbol: SLC22A16
  Gene Name: solute carrier family 22 (organic cation/carnitine transporter), member 16
  ENST ID: ENST00000451557
  CDS Start-End: 1-1299
gattatgttacggtgcagttgcagaatggtgagatctgggagctctcaaggtgtagcaggaataagagggagaacacatcgagtttgggctatgaatacactggcagtaagaaagagtttccttgtgtggatggctacatatatgaccagaacacatggaaaagcactgcggtgacccagtggaacctggtctgtgaccgaaaatggcttgcaatgctgatccagcccctatttatgtttggagtcctactgggatcggtgacttttggctacttttctgacaggctaggacgccgggtggtcttgtgggccacaagcagtagcatgtttttgtttggaatagcagcggcgtttgcagttgattattacaccttcatggctgctcgcttttttcttgccatggttgcaagtggctatcttgtggtggggtttgtctatgtgatggaattcattggcatgaagtctcggacatgggcgtctgtccatttgcattccttttttgcagttggaaccctgctggtggctttgacaggatacttggtcaggacctggtggctttaccagatgatcctctccacagtgactgtcccctttatcctgtgctgttgggtgctcccagagacacctttttggcttctctcagagggacgatatgaagaagcacaaaaaatagttgacatcatggccaagtggaacagggcaagctcctgtaaactgtcagaacttttatcactggacctacaaggtcctgttagtaatagccccactgaagttcagaagcacaacctatcatatctgttttataactggagcattacgaaaaggacacttaccgtttggctaatctggttcactggaagtttgggattctactcgttttccttgaattctgttaacttaggaggcaatgaatacttaaacctcttcctcctgggtgtagtggaaattcccgcctacaccttcgtgtgcatcgccatggacaaggtcgggaggagaacagtcctggcctactctcttttctgcagtgcactggcctgtggtgtcgttatggtgatcccccagaaacattatattttgggtgtggtgacagctatggttggaaaatttgccatcggggcagcatttggcctcatttatctttatacagctgagctgtatccaaccattgtaagatcgctggctgtgggaagcggcagcatggtgtgtcgcctggccagcatcctggcgccgttctctgtggacctcagcagcatttggatcttcataccacagctcctaggacagcaccttcaggagtaataatgcaggcagtagctggcaattaaggaggcactccatggtgggtcatgaaggaatgaatgagtgagtgatgagattaaacctcgttgatgaggaaaagaactcgaagtccagcacaagtaaccaaagatctcaccgagtaatcacagtgacaactgttatgtcaaattcaaatccattaccctctgaaaacagttaggaaattctattctccgaagggttcgttcctttcttgatgtgtcacttatcattatttttaattccttctagttgtttgttgggactatggccctcctgagtggagtgttaacactaaagcttccagaaacccttgggaaacggctagcaactacttgggaggaggctgcaaaactggagtcagagaatgaaagcaagtcaagcaaattacttctcacaactaataatagtgggctggaaaaaacggaagcgattacccccagggattctggtcttggtgaataaatgtgccatgcctgctgtctagcacctgaaatattatttaccctaatgcctttgtattagaggaatcttattctcatctcccatatgttgtttgtatgtctttttaataaattttgtaagaaaattttaaagcaaatatgttataaaagaaataaaaactaagatgaaaattctcagttttaaaaa

SEQ ID NO: 183237 - DNA, 737 bp, Homo sapiens
  Payload ID: 16099
  Gene Symbol: SLC22A16
  Gene Name: solute carrier family 22 (organic cation/carnitine transporter), member 16
  ENST ID: ENST00000424139
  CDS Start-End: 216-737
gcgcagtcgggacacgggcgtccagacgccggcccctagctgggcttctcctctaggcctctggcagcgggacctggcatggtgagcagaggcgctgggctcgctcggagtgcgcctgttgccgggcaggagggacctgattccagagagtcctctatttcatatgtgccttccagaacatctcttgtggtattcactacttggcttctgtgttcatgggagtcacccctcatcatgtctgcaggcccccaggcaatgtgagtcaggttgttttccataatcactctaattggagtttggaggacaccggggccctgttgtcttcaggccagaaagattatgttacggtgcagttgcagaatggtgagatctgggagctctcaaggtgtagcaggaataagagggagaacacatcgagtttgggctatgaatacactggcagtaagaaagagtttccttgtgtggatggctacatatatgaccagaacacatggaaaagcactgcggtgacccagtggaacctggtctgtgaccgaaaatggcttgcaatgctgatccagcccctatttatgtttggagtcctactgggatcggtgacttttggctacttttctgacaggctaggacgccgggtggtcttgtgggccacaagcagtagcatgtttttgtttggaatagcagcggcgtttgcagttgattattacaccttcatggctgctcgcttttttcttgccatg

SEQ ID NO: 183238 - DNA, 1021 bp, Homo sapiens
  Payload ID: 16099
  Gene Symbol: SLC22A16
  Gene Name: solute carrier family 22 (organic cation/carnitine transporter), member 16
  ENST ID: ENST00000434949
  CDS Start-End: 221-1021
gcggcgctcgcgatccgaaaacatctccacttcctcctcaccccgcgcagtcgggacacgggcgtccagacgccggcccctagctgggcttctcctctaggcctctggcagcgggacctggcatgattccagagagtcctctatttcatatgtgccttccagaacatctcttgtggtattcactacttggcttctgtgttcatgggagtcacccctcatcatgtctgcaggcccccaggcaatgctaggacgccgggtggtcttgtgggccacaagcagtagcatgtttttgtttggaatagcagcggcgtttgcagttgattattacaccttcatggctgctcgcttttttcttgccatggttgcaagtggctatcttgtggtggggtttgtctatgtgatggaattcattggcatgaagtctcggacatgggcgtctgtccatttgcattccttttttgcagttggaaccctgctggtggctttgacaggatacttggtcaggacctggtggctttaccagatgatcctctccacagtgactgtcccctttatcctgtgctgttgggtgctcccagagacacctttttggcttctctcagagggacgatatgaagaagcacaaaaaatagttgacatcatggccaagtggaacagggcaagctcctgtaaactgtcagaacttttatcactggacctacaaggtcctgttagtaatagccccactgaagttcagaagcacaacctatcatatctgttttataactggagcattacgaaaaggacacttaccgtttggctaatctggttcactggaagtttgggattctactcgttttccttgaattctgttaacttaggaggcaatgaatacttaaacctcttcctcctgggtgtagtggaaattcccgcctacaccttcgtgtgcatcgccatggacaaggtcgggaggagaacagtcctggcctactctcttttctgcagtgcactggcctgtggtgtcgttatggtgatcccccag

SEQ ID NO: 183239 - DNA, 1213 bp, Homo sapiens
  Payload ID: 16099
  Gene Symbol: SLC22A16
  Gene Name: solute carrier family 22 (organic cation/carnitine transporter), member 16
  ENST ID: ENST00000437378
  CDS Start-End: 160-1213
ccgcgcagtcgggacacgggcgtccagacgccggcccctagctgggcttctcctctaggcctctggcagcgggacctggcatgattccagagagtcctctatttcatatgtgccttccagaacatctcttgtggtattcactacttggcttctgtgttcatgggagtcacccctcatcatgtctgcaggcccccaggcaatgtgagtcaggttgttttccataatcactctaattggagtttggaggacaccggggccctgttgtcttcaggccagaaagattatgttacggtgcagttgcagaatggtgagatctgggagctctcaaggtgtagcaggaataagagggagaacacatcgagtttgggctatgaatacactggcagtaagaaagagtttccttgtgtggatggctacatatatgaccagaacacatggaaaagcactgcggtgacccagtggaacctggtctgtgaccgaaaatggcttgcaatgctgatccagcccctatttatgtttggagtcctactgggatcggtgacttttggctacttttctgacaggctaggacgccgggtggtcttgtgggccacaagcagtagcatgtttttgtttggaatagcagcggcgtttgcagttgattattacaccttcatggctgctcgcttttttcttgccatggttgcaagtggctatcttgtggtggggtttgtctatgtgatggaattcattggcatgaagtctcggacatgggcgtctgtccatttgcattccttttttgcagttggaaccctgctggtggctttgacaggatacttggtcaggacctggtggctttaccagatgatcctctccacagtgactgtcccctttatcctgtgctgttgggtgctcccagagacacctttttggcttctctcagagggacgatatgaagaagcacaaaaaatagttgacatcatggccaagtggaacagggcaagctcctgtaaactgtcagaacttttatcactggacctacaaggtcctgttagtaatagccccactgaagttcagaagcacaacctatcatatctgttttataactggagcattacgaaaaggacacttaccgtttggctaatctggttcactggaagtttgggattctactcgttttccttgaattctgttaacttaggaggcaatgaatacttaaacctcttcctcctgg

SEQ ID NO: 183240 - DNA, 3237 bp, Homo sapiens
  Payload ID: 16100
  Gene Symbol: SLC22A5
  Gene Name: solute carrier family 22 (organic cation/carnitine transporter), member 5
  Uniprot ID: O76082
  ENST ID: ENST00000245407
  CDS Start-End: 222-1895
gcggcccaggcccgcaaccttccctggtcgtgcgccctatgtaaggccagccgcggcaggaccaaggcggcggtgtcagctcgcgagcctaccctccgcggacggtcttgggtcgcctgctgcctggcttgcctggtcggcggcgggtgccccgcgcgcacgcgcaaagcccgccgcgttccccgaccccaggccgcgctctgtgggcctctgagggcggcatgcgggactacgacgaggtgaccgccttcctgggcgagtgggggcccttccagcgcctcatcttcttcctgctcagcgccagcatcatccccaatggcttcaccggcctgtcctccgtgttcctgatagcgaccccggagcaccgctgccgggtgccggacgccgcgaacctgagcagcgcctggcgcaaccacactgtcccactgcggctgcgggacggccgcgaggtgccccacagctgccgccgctaccggctcgccaccatcgccaacttctcggcgcttgggctggagccggggcgcgacgtggacctggggcagctggagcaggagagctgtctggatggctgggagttcagtcaggacgtctacctgtccaccattgtgaccgagtggaacctggtgtgtgaggacgactggaaggccccactcacaatctccttgttcttcgtgggtgtgctgttgggctccttcatttcagggcagctgtcagacaggtttggccggaagaatgtgctgttcgtgaccatgggcatgcagacaggcttcagcttcctgcagatcttctcgaagaattttgagatgtttgtcgtgctgtttgtccttgtaggcatgggccagatctccaactatgtggcagcatttgtcctggggacagaaattcttggcaagtcagttcgtataatattctctacgttaggagtgtgcatattttatgcatttggctacatggtgctgccactgtttgcttacttcatccgagactggcggatgctgctggtggcgctgacgatgccgggggtgctatgcgtggcactctggtggttcatccctgagtccccccgatggctcatctctcagggacgatttgaagaggcagaggtgatcatccgcaaggctgccaaagccaatgggattgttgtgccttccactatctttgacccgagtgagttacaagacctaagttccaagaagcagcagtcccacaacattctggatctgcttcgaacctggaatatccggatggtcaccatcatgtccataatgctgtggatgaccatatcagtgggctattttgggctttcgcttgatactcctaacttgcatggggacatctttgtgaactgcttcctttcagcgatggttgaagtcccagcatatgtgttggcctggctgctgctgcaatatttgccccggcgctattccatggccactgccctcttcctgggtggcagtgtccttctcttcatgcagctggtacccccagacttgtattatttggctacagtcctggtgatggtgggcaagtttggagtcacggctgccttttccatggtctacgtgtacacagccgagctgtatcccacagtggtgagaaacatgggtgtgggagtcagctccacagcatcccgcctgggcagcatcctgtctccctacttcgtttaccttggtgcctacgaccgcttcctgccctacattctcatgggaagtctgaccatcctgacagccatcctcaccttgtttctcccagagagcttcggtaccccactcccagacaccattgaccagatgctaagagtcaaaggaatgaaacacagaaaaactccaagtcacacaaggatgttaaaagatggtcaagaaaggcccacaatccttaaaagcacagccttctaacatcgcttccagtaagggagaaactgaagaggaaagactgtcttgccagaaatggccagcttgtgcagactccgagtccttcagtgacaaaaggcctttgctgtttgtcctcttgacctgtgtctgacttgctcctggatgggcacccacactcagaggctacatatggccctagagcaccaccttcctctagggacactggggctacctacagacaacttcatctaagtcctaactattacaatgatggactcagcacctccaaagcagttaatttttcactagaaccagtgagatctggaggaatgtgagaagcatatgctaaatgtacattttaattttagactacttgaaaaggcccctaataaggctagaggtctaagtcccccacccctttccccactcccctctagtggtgaactttagaggaaaaggaagtaattgcacaaggagtttgattcttaccttttctcagttacagaggacattaactggatcattgcttccccagggcaggagagcgcagagctagggaaagtgaaaggtaatgaagatggagcagaatgagcagatgcagatcaccagcaaagtgcactgatgtgtgagctcttaagaccactcagcatgacgactgagtagacttgtttacatctgatcaaagcactgggcttgtccaggctcataataaatgctccattgaatctactattcttgttttccactgctgtggaaacctccttgctactatagcgtcttatgtatggtttaaaggaaatttatcaggtgagagagatgagcaacgttgtcttttctctcaaagctgtaatgtgggttttgttttattgtttatttgtttgttgttgtatccttttctccttgttatttgcccttcagaatgcacttgggaaaggctggttccttagcctcctggtttgtgtctttttttttttttttttaaaacagaatcactctggcaattgtctgcagctgccactggtgcaaggccttaccagccctagcctctagcacttctctaagtgccaaaaacagtgtcattgtgtgtgttcctttcttgatacttagtcatgggaggatattacaaaaaagaaatttaaattgtgttcatagtctttcagagtagctcactttagtcctgtaactttattgggtgatattttgtgttcagtgtaattgtcttctctttgctgattatgttaccatggtactcctaaagcatatgcctcacctggttaaaaaagaacaaacatgtttttgtgaaagctactgaagtgccttgggaaatgagaaagttttaataagtaaaatgattttttaaataaca

SEQ ID NO: 183241 - DNA, 720 bp, Homo sapiens
  Payload ID: 16100
  Gene Symbol: SLC22A5
  Gene Name: solute carrier family 22 (organic cation/carnitine transporter), member 5
  ENST ID: ENST00000415928
  CDS Start-End: 1-720
gacgtggacctggggcagctggagcaggagagctgtctggatggctgggagttcagtcaggacgtctacctgtccaccattgtgaccgagcaagacagtggggcctacaatgctatgaaaaacaggatgggaaagaagcctgctctctgccttcctgcccagtggaacctggtgtgtgaggacgactggaaggccccactcacaatctccttgttcttcgtgggtgtgctgttgggctccttcatttcagggcagctgtcagacaggtttggccggaagaatgtgctgttcgtgaccatgggcatgcagacaggcttcagcttcctgcagatcttctcgaagaattttgagatgtttgtcgtgctgtttgtccttgtaggcatgggccagatctccaactatgtggcagcatttgtcctggggacagaaattcttggcaagtcagttcgtataatattctctacgttaggagtgtgcatattttatgcatttggctacatggtgctgccactgtttgcttacttcatccgagactggcggatgctgctggtggcgctgacgatgccgggggtgctatgcgtggcactctggtggttcatccctgagtccccccgatggctcatctctcagggacgatttgaagaggcagaggtgatcatccgcaaggctgccaaagccaatgggattgttgtgccttccactatctttgacccgagtgag

SEQ ID NO: 183242 - DNA, 998 bp, Homo sapiens
  Payload ID: 16100
  Gene Symbol: SLC22A5
  Gene Name: solute carrier family 22 (organic cation/carnitine transporter), member 5
  ENST ID: ENST00000447841
  CDS Start-End: 1-112
gttcctgcagttacaagacctaagttccaagaagcagcagtcccacaacattctggatctgcttcgaacctggaatatccggatggtcaccatcatgtccataatgctgtgacttgtattatttggctacagtcctggtgatggtgggcaagtttggagtcacggctgccttttccatggtctacgtgtacacagccgagctgtatcccacagtggtgagaaacatgggtgtgggagtcagctccacagcatcccgcctgggcagcatcctgtctccctacttcgtttaccttggtgcctacgaccgcttcctgccctacattctcatgggaagtctgaccatcctgacagccatcctcaccttgtttctcccagagagcttcggtaccccactcccagacaccattgaccagatgctaagagtcaaaggaatgaaacacagaaaaactccaagtcacacaaggatgttaaaagatggtcaagaaaggcccacaatccttaaaagcacagccttctaacatcgcttccagtaagggagaaactgaagaggaaagactgtcttgccagaaatggccagcttgtgcagactccgagtccttcagtgacaaaaggcctttgctgtttgtcctcttgacctgtgtctgacttgctcctggatgggcacccacactcagaggctacatatggccctagagcaccaccttcctctagggacactggggctacctacagacaacttcatctaagtcctaactattacaatgatggactcagcacctccaaagcagttaatttttcactagaaccagtgagatctggaggaatgtgagaagcatatgctaaatgtacattttaattttagactacttgaaaaggcccctaataaggctagaggtctaagtcccccacccctttccccactcccctctagtggtgaactttagaggaaaaggaagtaattgcacaaggagtttgattcttaccttttctcagttaca

SEQ ID NO: 183243 - DNA, 850 bp, Homo sapiens
  Payload ID: 16100
  Gene Symbol: SLC22A5
  Gene Name: solute carrier family 22 (organic cation/carnitine transporter), member 5
  ENST ID: ENST00000437841
  CDS Start-End: 74-499
gccccgcgcgcacgcgcaaagcccgccgcgttccccgaccccaggccgcgctctgtgggcctctgagggcggcatgcgggactacgacgaggtgaccgccttcctgggcgagtgggggcccttccagcgcctcatcttcttcctgctcagcgccagcatcatccccaatggcttcaccggcctgtcctccgtgttcctgatagcgaccccggagcaccgctgccgggtgccggacgccgcgaacctgagcagcgcctggcgcaaccacactgtcccactgcggctgcgggacggccgcgaggtgccccacagctgccgccgctaccggctcgccaccatcgccaacttctcggcgcttgggctggagccggggcgcgacgtggacctggggcagctggagcaggagagctgtctggatggctgggagttcagtcaggacgtctacctgtccaccattgtgaccgagggacagaaattcttggcaagtcagttcgtataatattctctacgttaggagtgtgcatattttatgcatttggctacatggtgctgccactgtttgcttacttcatccgagactggcggatgctgctggtggcgctgacgatgccgggggtgctatgcgtggcactctggtggttcatccctgagtccccccgatggctcatctctcagggacgatttgaagaggcagaggtgatcatccgcaaggctgccaaagccaatgggattgttgtgccttccactatctttgacccgagtgagttacaagacctaagttccaagaagcagcagtcccacaacattctggatctgcttcgaacctggaatatccggatggtcaccatca

SEQ ID NO: 183244 - DNA, 852 bp, Homo sapiens
  Payload ID: 16100
  Gene Symbol: SLC22A5
  Gene Name: solute carrier family 22 (organic cation/carnitine transporter), member 5
  ENST ID: ENST00000448810
  CDS Start-End: 1-410
ggacagaaattcttggcaagtcagttcgtataatattctctacgttaggagtgtgcatattttatgcatttggctacatggtgctgccactgtttgcttacttcatccgagactggcggatgctgctggtggcgctgacgatgccgggggtgctatgcgtggcactctggtggttcatccctgagtccccccgatggctcatctctcagggacgatttgaagaggcagaggtgatcatccgcaaggctgccaaagccaatgggattgttgtgccttccactatctttgacccgagtgagttacaagacctaagttccaagaagcagcagtcccacaacattctggatctgcttcgaacctggaatatccggatggtcaccatcatgtccataatgctgtgcgatggttgaagtcccagcatatgtgttggcctggctgctgctgcaatatttgccccggcgctattccatggccactgccctcttcctgggtggcagtgtccttctcttcatgcagctggtacccccagacttgtattatttggctacagtcctggtgatggtgggcaagtttggagtcacggctgccttttccatggtctacgtgtacacagccgagctgtatcccacagtggtgagaaacatgggtgtgggagtcagctccacagcatcccgcctgggcagcatcctgtctccctacttcgtttaccttggtgcctacgaccgcttcctgccctacattctcatgggaagtctgaccatcctgacagccatcctcaccttgtttctcccagagagcttcggtaccccactcccagacaccattgaccagatgctaagagtcaaagggtaa

SEQ ID NO: 183245 - DNA, 1746 bp, Homo sapiens
  Payload ID: 16100
  Gene Symbol: SLC22A5
  Gene Name: solute carrier family 22 (organic cation/carnitine transporter), member 5
  Uniprot ID: O76082
  ENST ID: ENST00000435065
  CDS Start-End: 1-1746
atgcgggactacgacgaggtgaccgccttcctgggcgagtgggggcccttccagcgcctcatcttcttcctgctcagcgccagcatcatccccaatggcttcaccggcctgtcctccgtgttcctgatagcgaccccggagcaccgctgccgggtgccggacgccgcgaacctgagcagcgcctggcgcaaccacactgtcccactgcggctgcgggacggccgcgaggtgccccacagctgccgccgctaccggctcgccaccatcgccaacttctcggcgcttgggctggagccggggcgcgacgtggacctggggcagctggagcaggagagctgtctggatggctgggagttcagtcaggacgtctacctgtccaccattgtgaccgagcaagacagtggggcctacaatgctatgaaaaacaggatgggaaagaagcctgctctctgccttcctgcccagtggaacctggtgtgtgaggacgactggaaggccccactcacaatctccttgttcttcgtgggtgtgctgttgggctccttcatttcagggcagctgtcagacaggtttggccggaagaatgtgctgttcgtgaccatgggcatgcagacaggcttcagcttcctgcagatcttctcgaagaattttgagatgtttgtcgtgctgtttgtccttgtaggcatgggccagatctccaactatgtggcagcatttgtcctggggacagaaattcttggcaagtcagttcgtataatattctctacgttaggagtgtgcatattttatgcatttggctacatggtgctgccactgtttgcttacttcatccgagactggcggatgctgctggtggcgctgacgatgccgggggtgctatgcgtggcactctggtggttcatccctgagtccccccgatggctcatctctcagggacgatttgaagaggcagaggtgatcatccgcaaggctgccaaagccaatgggattgttgtgccttccactatctttgacccgagtgagttacaagacctaagttccaagaagcagcagtcccacaacattctggatctgcttcgaacctggaatatccggatggtcaccatcatgtccataatgctgtggatgaccatatcagtgggctattttgggctttcgcttgatactcctaacttgcatggggacatctttgtgaactgcttcctttcagcgatggttgaagtcccagcatatgtgttggcctggctgctgctgcaatatttgccccggcgctattccatggccactgccctcttcctgggtggcagtgtccttctcttcatgcagctggtacccccagacttgtattatttggctacagtcctggtgatggtgggcaagtttggagtcacggctgccttttccatggtctacgtgtacacagccgagctgtatcccacagtggtgagaaacatgggtgtgggagtcagctccacagcatcccgcctgggcagcatcctgtctccctacttcgtttaccttggtgcctacgaccgcttcctgccctacattctcatgggaagtctgaccatcctgacagccatcctcaccttgtttctcccagagagcttcggtaccccactcccagacaccattgaccagatgctaagagtcaaaggaatgaaacacagaaaaactccaagtcacacaaggatgttaaaagatggtcaagaaaggcccacaatccttaaaagcacagccttctaa

SEQ ID NO: 183246 - DNA, 2201 bp, Homo sapiens
  Payload ID: 16101
  Gene Symbol: SLC22A4
  Gene Name: solute carrier family 22 (organic cation/zwitterion transporter), member 4
  Uniprot ID: Q9H015
  ENST ID: ENST00000200652
  CDS Start-End: 175-1830
cgccttcagcctgtttcccaggaacggtccccggcttcgcgccccaatttctaacagcctgcctgtcccccgggaacgttctaacatccttggggagcgccccagctacaagacactgtcctgagaacgctgtcatcacccgtagttgcaagtttcggagcggcagtgggaagcatgcgggactacgacgaggtgatcgccttcctgggcgagtgggggcccttccagcgcctcatcttcttcctgctcagcgccagcatcatccccaatggcttcaatggtatgtcagtcgtgttcctggcggggaccccggagcaccgctgtcgagtgccggacgccgcgaacctgagcagcgcctggcgcaacaacagtgtcccgctgcggctgcgggacggccgcgaggtgccccacagctgcagccgctaccggctcgccaccatcgccaacttctcggcgctcgggctggagccggggcgcgacgtggacctggggcagctggagcaggagagctgcctggatggctgggagttcagccaggacgtctacctgtccaccgtcgtgaccgagtggaatctggtgtgtgaggacaactggaaggtgcccctcaccacctccctgttcttcgtaggcgtgctcctcggctccttcgtgtccgggcagctgtcagacaggtttggcaggaagaacgttctcttcgcaaccatggctgtacagactggcttcagcttcctgcagattttctccatcagctgggagatgttcactgtgttatttgtcatcgtgggcatgggccagatctccaactatgtggtagccttcatactaggaacagaaattcttggcaagtcagttcgtattatattctctacattaggagtgtgcacattttttgcagttggctatatgctgctgccactgtttgcttacttcatcagagactggcggatgctgctgctggcgctgacggtgccgggagtgctgtgtgtcccgctgtggtggttcattcctgaatctccccgatggctgatatcccagagaagatttagagaggctgaagatatcatccaaaaagctgcaaaaatgaacaacatagctgtaccagcagtgatatttgattctgtggaggagctaaatcccctgaagcagcagaaagctttcattctggacctgttcaggactcggaatattgccataatgaccattatgtctttgctgctatggatgctgacctcagtgggttactttgctctgtctctggatgctcctaatttacatggagatgcctacctgaactgtttcctctctgccttgattgaaattccagcttacattacagcctggctgctattgcgaaccctgcccaggcgttatatcatagctgcagtactgttctggggaggaggtgtgcttctcttcattcaactggtacctgtggattattacttcttatccattggtctggtcatgctgggaaaatttgggatcacctctgctttctccatgctgtatgtcttcactgctgagctctacccaaccctggtcaggaacatggcggtgggggtcacatccacggcctccagagtgggcagcatcattgccccctactttgtttacctcggtgcttacaacagaatgctgccctacatcgtcatgggtagtctgactgtcctgattggaatcctcaccctttttttccctgaaagtttgggaatgactcttccagaaaccttagagcagatgcagaaagtgaaatggttcagatctgggaaaaaaacaagagactcaatggagacagaagaaaatcccaaggttctaataactgcattctgaaaaaatatctaccccatttggtgaagtgaaaaacagaaaaataagaccctgtggagaaattcgttgttcccactgaaatggactgactgtaacgattgacaccaaaatgaaccttgctatcaagaaatgctcgtcatacagtaaactctggatgattcttccagataatgtccttgctttacaaaccaaccatttctagagagtctccttactcattaattcaatgaaatggattggtaagatgtcttgaaaacatgttagtcaaggactggtaaaatacatataaagattaacactcatttccaatcatacaaatactatccaaataaaaataacatcattgtattaacgcaaatattaggtgacaacaa

SEQ ID NO: 183247 - DNA, 2026 bp, Homo sapiens
  Payload ID: 16102
  Gene Symbol: SLC22A10
  Gene Name: solute carrier family 22, member 10
  Uniprot ID: Q63ZE4
  ENST ID: ENST00000332793
  CDS Start-End: 3-1628
caatggcctttgaggagctcttgagtcaagttggaggccttgggagatttcagatgcttcatctggtttttattcttccctctctcatgttattaatccctcatatactgctagagaactttgctgcagccattcctggtcatcgttgctgggtccacatgctggacaataatactggatctggtaatgaaactggaatcctcagtgaagatgccctcttgagaatctctatcccactagactcaaatctgaggccagagaagtgtcgtcgctttgtccatccccagtggcagcttcttcacctgaatgggactatccacagcacaagtgaggcagacacagaaccctgtgtggatggctgggtatatgatcaaagctacttcccttcgaccattgtgactaagtgggacctggtatgtgattatcagtcactgaaatcagtggttcaattcctacttctgactggaatgctggtgggaggcatcataggtggccatgtctcagacaggtttgggcgaagatttattctcagatggtgtttgctccagcttgccattactgacacctgcgctgccttcgctcccaccttccctgtttactgtgtactacgcttcttggcaggtttttcttccatgatcattatatcaaataattctttgcccattactgagtggataaggcccaactctaaagccctggtagtaatattgtcatctggtgcccttagtattggacagataatcctgggaggcttggcttatgtcttccgagactggcaaaccctgcacgtggtggcgtctgtacctttctttgtcttctttcttctttcaaggtggctggtggaatctgctcggtggttgataatcaccaataaactagatgagggcttaaaggcacttagaaaagttgcacgcacaaatggaataaagaatgctgaagaaaccctgaacatagaggttgtaagatccaccatgcaggaggagctggatgcagcacagaccaaaactactgtgtgtgacttgttccgcaaccccagtatgcgtaaaaggatctgtatcctggtatttttgagatttgcaaacacaatacctttttatggtaccatggtcaatcttcagcatgtggggagcaacattttcctgttgcaggtactttatggagctgtcgctctcatagttcgatgtcttgctcttttgacactaaatcatatgggccgtcgaataagccagatattgttcatgttcctggtgggcctttccattttggccaacacgtttgtgcccaaagaaatgcagaccctgcgtgtggctttggcatgtctgggaatcggctgttctgctgctactttttccagtgttgctgttcacttcattgaactcatccccactgttctcagggcaagagcttcaggaatagatttaacggctagtaggattggagcagcactggctcccctcttgatgaccttaacggtattttttaccactttgccatggatcatttatggaatcttccccatcattggtggccttattgtcttcctcctaccagaaaccaagaatctgcctttgcctgacaccatcaaggatgtggaaaatcaaaaaaaaaatctcaaggaaaaggcataaaaatgattgctacacaaaagtgaccaaattttaagaagccttcatgagctgattggtggggaaattcagaaaaaaaaatacaggaaaagaacacaccagaagggtttttttccctacaaccagcaagaacatatattagatacatgaatctcaattataattatggcattaatttgcattttatttcaaaattaacttgtggggacatgtaatctcttgagcaatctgatatttttgggaagtcctttaaaaagttacaaatttatcaataaattactagtagataagatgattcagaaacaaaagaaaatcacagaattaggatgtggctggctggtgtatgaagcaccatgtgatgaattcataaagttgcaaaagtcaaaacaatactgtacatg

SEQ ID NO: 183248 - DNA, 2234 bp, Homo sapiens
  Payload ID: 16102
  Gene Symbol: SLC22A10
  Gene Name: solute carrier family 22, member 10
  ENST ID: ENST00000533483
  CDS Start-End: 167-1285
tttattgtcaacagctagaagtatctctatgaaataatgatctctatgactacaaaataacatctacctcctgatagcaaaagaactgaggaagctctttccactacggctgtattgcactgagaactttgctgcagccattcctggtcatcgttgctgggtccacatgctggacaataatactggatctggtaatgaaactggaatcctcagtgaagatgccctcttgagaatctctatcccactagactcaaatctgaggccagagaagtgtcgtcgctttgtccatccccagtggcagcttcttcacctgaatgggactatccacagcacaagtgaggcagacacagaaccctgtgtggatggctgggtatatgatcaaagctacttcccttcgaccattgtgactaagtgggacctggtatgtgattatcagtcactgaaatcagtggttcaattcctacttctgactggaatgctggtgggaggcatcataggtggccatgtctcagacaggtttgggcgaagatttattctcagatggtgtttgctccagcttgccattactgacacctgcgctgccttcgctcccaccttccctgtttactgtgtactacgcttcttggcaggtttttcttccatgatcattatatcaaataattctttgcccattactgagtggataaggcccaactctaaagccctggtagtaatattgtcatctggtgcccttagtattggacagataatcctgggaggcttggcttatgtcttccgagactggcaaaccctgcacgtggtggcgtctgtacctttctttgtcttctttcttctttcaaggtggctggtggaatctgctcggtggttgataatcaccaataaactagatgagggcttaaaggcacttagaaaagttgcacgcacaaatggaataaagaatgctgaagaaaccctgaacatagaggttgtaagatccaccatgcaggaggagctggatgcagcacagaccaaaactactgtgtgtgacttgttccgcaaccccagtatgcgtaaaaggatctgtatcctggtatttttgagatttgcaaacacaatacctttttatggtaccatggtcaatcttcagcatgtggggagcaacattttcctgttgcagaaatgcagaccctgcgtgtggctttggcatgtctgggaatcggctgttctgctgctactttttccagtgttgctgttcacttcattgaactcatccccactgttctcagggcaagagcttcaggaatagatttaacggctagtaggattggagcagcactggctcccctcttgatgaccttaacggtattttttaccactttgccatggatcatttatggaatcttccccatcattggtggccttattgtcttcctcctaccagaaaccaagaatctgcctttgcctgacaccatcaaggatgtggaaaatcaaaaaaaaaatctcaaggaaaaggcataaaaatgattgctacacaaaagtgaccaaattttaagaagccttcatgagctgattggtggggaaattcagaaaaaaaaatacaggaaaagaacacaccagaagggtttttttccctacaaccagcaagaacatatattagatacatgaatctcaattataattatggcattaatttgcattttatttcaaaattaacttgtggggacatgtaatctcttgagcaatctgatatttttgggaagtcctttaaaaagttacaaatttatcaataaattactagtagataagatgattcagaaacaaaagaaaatcacagaattaggatgtggctggctggtgtatgaagcaccatgtgatgaattcataaagttgcaaaagtcaaaacaatactgtacatgcaaccagaaatcaaaataaatccagaaatagagacctatataaatgcatttaatacatgatacttttgacataataagccattggaaaacggaaagattagatactaaataacattgactatctctttgtaaatacagtcactaaatgatgttagttacttttccatggtggaattttaattactttttctttgtaatttttctctctgtatattttaaacaaatagctggtatagtttacaatattataaagatattgttcaaattgaagggcaaaggccaggttcagcaattttcaaactgtatgtacatttaataaaataactataaattaaaaaa

SEQ ID NO: 183249 - DNA, 864 bp, Homo sapiens
  Payload ID: 16102
  Gene Symbol: SLC22A10
  Gene Name: solute carrier family 22, member 10
  ENST ID: ENST00000532724
  CDS Start-End: 24-818
ctggtcatcgttgctgggtccacatgctggacaataatactggatctggtaatgaaactggaatcctcagtgaagatgccctcttgagaatctctatcccactagactcaaatctgaggccagagaagtgtcgtcgctttgtccatccccagtggcagcttcttcacctgaatgggactatccacagcacaagtgaggcagacacagaaccctgtgtggatggctgggtatatgatcaaagctacttcccttcgaccattgtgactaagtgggacctggtatgtgattatcagtcactgaaatcagtggttcaattcctacttctgactggaatgctggtgggaggcatcataggtggccatgtctcagacaggtggctggtggaatctgctcggtggttgataatcaccaataaactagatgagggcttaaaggcacttagaaaagttgcacgcacaaatggaataaagaatgctgaagaaaccctgaacatagaggttgtaagatccaccatgcaggaggagctggatgcagcacagaccaaaactactgtgtgtgacttgttccgcaaccccagtatgcgtaaaaggatctgtatcctggtatttttgagatttgcaaacacaatacctttttatggtaccatggtcaatcttcagcatgtggggagcaacattttcctgttgcagaaatgcagaccctgcgtgtggctttggcatgtctgggaatcggctgttctgctgctactttttccagtgttgctgttcacttcattgaactcatccccactgttctcagggcaagagcttcaggaatagatttaacggctagtaggattggagcagcactggctcccctcttgat

SEQ ID NO: 183250 - DNA, 699 bp, Homo sapiens
  Payload ID: 16102
  Gene Symbol: SLC22A10
  Gene Name: solute carrier family 22, member 10
  ENST ID: ENST00000526800
  CDS Start-End: 15-632
gttgctgggtccacatgctggacaataatactggatctggtaatgaaactggaatcctcagtgaagatgccctcttgagaatctctatcccactagactcaaatctgaggccagagaagtgtcgtcgctttgtccatccccagtggcagcttcttcacctgaatgggactatccacagcacaagtgaggcagacacagaaccctgtgtggatggctgggtatatgatcaaagctacttcccttcgaccattgtgactaagtgggacctggtatgtgattatcagtcactgaaatcagtggttcaattcctacttctgactggaatgctggtgggaggcatcataggtggccatgtctcagacaggtggctggtggaatctgctcggtggttgataatcaccaataaactagatgagggcttaaaggcacttagaaaagttgcacgcacaaatggaataaagaatgctgaagaaaccctgaacatagaggttgtaagatccaccatgcaggaggagctggatgcagcacagaccaaaactactgtgtgtgacttgttccgcaaccccagtatgcgtaaaaggatctgtatcctggtatttttgagaaaaaaaaatctcaaggaaaaggcataaaaatgattgctacacaaaagtgaccaaattttaagaagccttcatgagctgattggtggggaaattc

SEQ ID NO: 183251 - DNA, 2202 bp, Homo sapiens
  Payload ID: 16103
  Gene Symbol: SLC22A14
  Gene Name: solute carrier family 22, member 14
  Uniprot ID: Q9Y267
  ENST ID: ENST00000273173
  CDS Start-End: 92-1876
ggccagttcctagtcggtggctcccatgctggtctctgatgtttaggaagtggtgtcagcagagactgagctgcaccctttctttggacagatggcaggagaggagaacttcaaggaagagctcagatcccaggatgcttccaggaacttgaaccagcatgaggtagcaggacatccacattcctggtctctggagatgctgttacgcagattgagggctgtccacaccaagcaggatgacaagtttgccaacctcctggatgcggtgggggagtttggcacattccagcagaggctagtagccctcacctttatccccagcatcatgtcggccttcttcatgtttgctgaccacttcgtgttcacagcccagaagccctattgcaataccagctggatcctggcagtgggcccccacctgtccaaagctgagcagctgaatctgaccataccccaagcacccaatggcagtttcctgacatgcttcatgtaccttcctgtgccttggaatctggattctatcatccagtttggcctcaatgacacagacacatgccaagatgggtggatctatcctgacgctaagaagcgatcgctgatcaatgagtttgacttggtatgtggcatggagacgaagaaggacactgcacagatcatgttcatggcagggctcccgataggctctctcatcttcaggctcataactgacaagatgggccgctaccctgccatcctgctgtcactgctggggctgatcatcttcggctttgggacagccttcatgaacagctttcacctgtatttgttctttcgctttggcatctcgcagtcagtggtgggctacgccatcagcagcatttctttggccactgagtggttagtgggtgagcaccgggcccatgccattatcctgggacactgctttttcgctgttggggccgtgttgctgacagggatcgcctacagtcttccccactggcagctgctgtttctggtgggtgggatacttgtgatccccttcatctcctatatctggattctcccggagtccccgcggtggctgatgatgaaagggaaggtgaaggaggccaagcaggtgctgtgctacgccgcaagtgtgaacaagaagaccattccttcaaatctgctggacgagctgcagctgcccagaaagaaggtgactcgggcctctgtcctggacttctgtaagaataggcagctctgcaaggtgaccttggtgatgagctgtgtgtggtttaccgtcagttacacctattttacgttgagcctgagaatgagagagctgggcgtgagcgtccacttcagacacgtggtccccagcatcatggaggtgcctgcccggctgtgctgcatctttctcctccagcagattgggaggaagtggagcctggctgtgactctcctccaagccatcatctggtgcttgcttctccttttcctccctgaaggggaggatggcctcagactcaagtggccacgttgtccggccacagagctgaaatccatgacgatcttggtgctcatgctcagagagttcagcctggccgccactgtcactgtgttcttcctctacaccgctgagctcctccccactgtgctcagggcgacaggtctggggctggtgtctctggcctcggtggctggagccatcttgtccctgacaatcatcagccagaccccctccctcctgcccatctttctctgctgcgtcttagccatcgtggccttttccctctcctccctgctgccggaaacgcgagatcagcccctctccgagagcctgaaccactcctcacagataaggaataaggtcaaggacatgaagactaaggaaacatcatctgatgatgtctgaggaagcggccaagaatgtcattctcaatgcccagatcctgagattggacccataccctgtctccaaccctgccttgaagcaattcaataaagaggaagcaaacagccaggctccctgagggccaggcccccagaccatcttgggttggaattgagtggccaagtatggggtcatggattccaggccacaaattccaggcctagttcagtctgggggcagggtcagtccttctcccaggccagcccttgacattaaaaaaaatgccccctccttctgcaggagctctgctgtgattcattccaataaaggtacaatgttggtcttga

SEQ ID NO: 183252 - DNA, 1827 bp, Homo sapiens
  Payload ID: 16103
  Gene Symbol: SLC22A14
  Gene Name: solute carrier family 22, member 14
  Uniprot ID: Q9Y267
  ENST ID: ENST00000448498
  CDS Start-End: 43-1827
gttctgcttccaagggtctggctgggcctggattgtggtcagatggcaggagaggagaacttcaaggaagagctcagatcccaggatgcttccaggaacttgaaccagcatgaggtagcaggacatccacattcctggtctctggagatgctgttacgcagattgagggctgtccacaccaagcaggatgacaagtttgccaacctcctggatgcggtgggggagtttggcacattccagcagaggctagtagccctcacctttatccccagcatcatgtcggccttcttcatgtttgctgaccacttcgtgttcacagcccagaagccctattgcaataccagctggatcctggcagtgggcccccacctgtccaaagctgagcagctgaatctgaccataccccaagcacccaatggcagtttcctgacatgcttcatgtaccttcctgtgccttggaatctggattctatcatccagtttggcctcaatgacacagacacatgccaagatgggtggatctatcctgacgctaagaagcgatcgctgatcaatgagtttgacttggtatgtggcatggagacgaagaaggacactgcacagatcatgttcatggcagggctcccgataggctctctcatcttcaggctcataactgacaagatgggccgctaccctgccatcctgctgtcactgctggggctgatcatcttcggctttgggacagccttcatgaacagctttcacctgtatttgttctttcgctttggcatctcgcagtcagtggtgggctacgccatcagcagcatttctttggccactgagtggttagtgggtgagcaccgggcccatgccattatcctgggacactgctttttcgctgttggggccgtgttgctgacagggatcgcctacagtcttccccactggcagctgctgtttctggtgggtgggatacttgtgatccccttcatctcctatatctggattctcccggagtccccgcggtggctgatgatgaaagggaaggtgaaggaggccaagcaggtgctgtgctacgccgcaagtgtgaacaagaagaccattccttcaaatctgctggacgagctgcagctgcccagaaagaaggtgactcgggcctctgtcctggacttctgtaagaataggcagctctgcaaggtgaccttggtgatgagctgtgtgtggtttaccgtcagttacacctattttacgttgagcctgagaatgagagagctgggcgtgagcgtccacttcagacacgtggtccccagcatcatggaggtgcctgcccggctgtgctgcatctttctcctccagcagattgggaggaagtggagcctggctgtgactctcctccaagccatcatctggtgcttgcttctccttttcctccctgaaggggaggatggcctcagactcaagtggccacgttgtccggccacagagctgaaatccatgacgatcttggtgctcatgctcagagagttcagcctggccgccactgtcactgtgttcttcctctacaccgctgagctcctccccactgtgctcagggcgacaggtctggggctggtgtctctggcctcggtggctggagccatcttgtccctgacaatcatcagccagaccccctccctcctgcccatctttctctgctgcgtcttagccatcgtggccttttccctctcctccctgctgccggaaacgcgagatcagcccctctccgagagcctgaaccactcctcacagataaggaataaggtcaaggacatgaagactaaggaaacatcatctgatgatgtctga

SEQ ID NO: 183253 - DNA, 523 bp, Homo sapiens
  Payload ID: 16103
  Gene Symbol: SLC22A14
  Gene Name: solute carrier family 22, member 14
  ENST ID: ENST00000466887
  CDS Start-End: 166-523
aaaggttctgcttccaagggtctggctgggcctggattgtggtcagcccagaagccctattgcaataccagctggatcctggcagtgggcccccacctgtccaaagctgagcagctgaatctgaccataccccaagcacccaatggcagtttcctgacatgcttcatgtaccttcctgtgccttggaatctggattctatcatccagtttggcctcaatgacacagacacatgccaagatgggtggatctatcctgacgctaagaagcgatcgctgatcaatgagtttgacttggtatgtggcatggagacgaagaaggacactgcacagatcatgttcatggcagggctcccgataggctctctcatcttcaggctcataactgacaagatgggccgctaccctgccatcctgctgtcactgctggggctgatcatcttcggctttgggacagccttcatgaacagctttcacctgtatttgttctttcgctttggcatctcgcagtcagtggtgggctacg

SEQ ID NO: 183254 - DNA, 1230 bp, Homo sapiens
  Payload ID: 16104
  Gene Symbol: SLC22A15
  Gene Name: solute carrier family 22, member 15
  Uniprot ID: Q8IZD6
  ENST ID: ENST00000369502
  CDS Start-End: 15-752
gcgcgcggcccgccatggaggtggaggaggcgttccaggcggtgggggagatgggcatctaccagatgtacttgtgcttcctgctggccgtgctgctgcagctctacgtggccacggaggccatcctcattgcactggttggggccacgccatcctaccactgggacctggcagagctcctgccaaatcagagccacggtaaccagtcagctggtgaagaccaggcctttggggactggctcctgacagccaacggcagtgagatccataagcacgtgcatttcagcagcagcttcacctccatcgcctcggagtggtttttaattgccaacagatcctacaaagtcagtgcagcaagctcttttttcttcagtggtgtatttgttggagttatctcttttggtcagctttcagatcgcttcggaaggaaaaaagtctatctcacaggttttgctcttgacatcttatttgcaattgcaaatggattttccccctcatatgagttctttgcagtaactcgcttcctggtgggcatgatgaatggagggatgtcgctggtggcctttgtcttgcttaatgaatgtgtgggcaccgcctactgggcacttgcaggatcgattggcggcctgttctttgcagttggcattgcccaatatgccctgttaggatacttcatccgctcctggaggaccctagccattctggttaacctgcagggaacggtggtctttctcttatctttggtcgactgagtgaggctgaagaggcgctgtacctcattgccaagaggaaccgcaaactcaagtgcacgttctcactaacacacccagccaacaggagctgcagggagactggaagtttcctggatctctttcgttaccgggtcctgttaggacacactttgatcctgatgttcatctggtaattatactaaggcgtgttctgttgctctttaactaaggttgctcgagcttctcttgatatcctgctccttcttcagggtacagggaattttacctcttttgttagcttgaggttgttttctcaacagcaagtctcctgatccttagcgcctggttttctgcttgcgcagccccgtctttctcaagtagcagatgatagtgcctgatgggcaggtccactgagcttgagtaagtagacatcagaagcacatctttgcttttgaggtatttatcataaatatttaagccttcctgccccttcccctgc

SEQ ID NO: 183255 - DNA, 4720 bp, Homo sapiens
  Payload ID: 16104
  Gene Symbol: SLC22A15
  Gene Name: solute carrier family 22, member 15
  Uniprot ID: Q8IZD6
  ENST ID: ENST00000369503
  CDS Start-End: 131-1774
gccgccagcgcttccatccccgccccggcgggtccaagccggtgccgggcgcccaggggttgccgcgctgggcgggagggcagcgcctgagagggcggtggggtggcggggttcctgcgcgcggcccgccatggaggtggaggaggcgttccaggcggtgggggagatgggcatctaccagatgtacttgtgcttcctgctggccgtgctgctgcagctctacgtggccacggaggccatcctcattgcactggttggggccacgccatcctaccactgggacctggcagagctcctgccaaatcagagccacggtaaccagtcagctggtgaagaccaggcctttggggactggctcctgacagccaacggcagtgagatccataagcacgtgcatttcagcagcagcttcacctccatcgcctcggagtggtttttaattgccaacagatcctacaaagtcagtgcagcaagctcttttttcttcagtggtgtatttgttggagttatctcttttggtcagctttcagatcgcttcggaaggaaaaaagtctatctcacaggttttgctcttgacatcttatttgcaattgcaaatggattttccccctcatatgagttctttgcagtaactcgcttcctggtgggcatgatgaatggagggatgtcgctggtggcctttgtcttgcttaatgaatgtgtgggcaccgcctactgggcacttgcaggatcgattggcggcctgttctttgcagttggcattgcccaatatgccctgttaggatacttcatccgctcctggaggaccctagccattctggttaacctgcagggaacggtggtctttctcttatctttattcattcctgaatcacctcgttggttatactcccagggtcgactgagtgaggctgaagaggcgctgtacctcattgccaagaggaaccgcaaactcaagtgcacgttctcactaacacacccagccaacaggagctgcagggagactggaagtttcctggatctctttcgttaccgggtcctgttaggacacactttgatcctgatgttcatctggtttgtgtgcagcttggtgtattatggcctaactctgagtgcgggtgatctaggtggaagtatttatgccaacctggccctgtctggcctcatagagattccatcttaccctctctgtatctacttgattaaccaaaaatggtttggtcggaagcgaacattatcagcatttctgtgcctaggaggactggcttgtcttattgtaatgtttcttccagaaaagaaagacacaggtgtgtttgcagtggtgaacagccattccttgtccttgctggggaagctgaccatcagtgctgcctttaacattgtttatatctacacctctgagctttaccctacagtcatcaggaatgttgggcttggaacttgttccatgttctcccgagttggtgggattattgctcccttcatcccctcactgaaatatgtgcaatggtctttaccattcattgtcttcggagccacgggtctgacctccggcctcctgagtttgttattgccggagacccttaacagtccgctgctagaaacattctccgaccttcaggtgtattcgtatcgcaggctgggagaagaagcattatctttacaggctttggacccccaacagtgtgtggacaaggagagctctttagggagtgagagtgaggaagaggaagaattttatgatgcagatgaagagactcagatgatcaagtgaagagccccagattccccctaagaagcaaaggatcgtcttttatgcctctggctaaggcaggttcttccatgactcctaagagagttgtaaaaatagaggcttggcttgaatgtacatagatggtacctggcatggactgatgtttttaggcacagaagttggagaagagatttcatgaaagacaacatcactgcattgagagaatagttgttaatttgtttagaatttaagttctactcagaatcataacatctggcagaacagcccaaacccacattccaaagtggtaggctcatttgtttctagagatttcatcatgtcgcttttccttcatcatgatctaaataaaggcagatatgtaaaatttctcaccattttggtggggtaagataagctattattaagatttaatccttataccatgttggacatttgcccctatcagttgctcctcaggaatcttctggtacaggttaacatcagcattttcattttgtgtccagggaaaagcacccagaggtcatctgtgtgtcccgagaccctccagctttttcttagctgatgaaatatgagtcctcagcttggttcccagcctgctgattgacttgggctgctggtgccttgagtcccacagatgattcattaggaaaagccagatataccaaagcggtttactcagagtcaggggtgtagctctggctgcctgtcagctcccttggatactatattgtatgatttcttcctttcccactaatatgcacatccagaaaaatttccatctgagattctagtacttcaaaatcatgcatagtaaatgagaaagctttaagtagagggcagttaaacagtgacatgttgagcacctggaggaaaaaaaaggtgcagtttttaataagagagaaaatgaaattatctttgataaatttttgtttgttttgctttcagcattgtgccatgagggatttggacaatatttaagaacttcttgtcctagatcagccccaatctgtttaatcaaaatggaaggttcagtaatttcatgggaaaccttggtttttcattaagtgctaccaactttcaagtgaatcttgtatttgatttcctaaaatcatgtcttgaaaacatgttttctcatgaaacttgaatactatctcaaataggaatataaacctggagtcaacaagcttaggcagcattgatttaggtcactttcccagtgaggaaaatttctgtgttttcagaatttccatttctactaacctcttggagaaaaagaaattgaattagaggtaaatagaagacgtcactgtggctgcttctggaagtgctggaagcatcaccccaattggctccaaatactgtcatgttttcttgcacactgacttctggtttccactgtatcagtatgtacctttgtaattgttatttttatgtcttttatgcccttgattattagttgggctcttcataaacagaggccatctctactactgtttatttttccctgctgtgcccagaacattggcgtagacacagtaagaacctagtaaatattactgtttctagccatcagggagattgtggaactcctcccagtataatttttacaaactccaagcaaatctgacccaaactcccaaattgtcaagtcctgcttaactttctctggaaaatagaccccttctcaacatcagaataggaagagaggaagaacttacaaagacacttaaaagttattcttaaatggtggttgggcatttaaaacagtgaactaacatatatataatttttgattagttggagctttctttgtattataagagtaatatatctcattacagaaaatttggaaactataaatttagaaacgtatcacccatacgtccaacatcgaaagaaaaccagtgttatgactttgttccatttgaagactaattgggagtccatctctctattggcactgggttcgattgcctctggctaatagagttcaattagttctatccctgggtttcctttcttagctatggggtggaagataggagggggagatctacaatttgaatatgtgttacttaataaggctaggctggccatcagttgcttatttcagatgtgtcactaaattttccttctagatggtccttgagcaaaacttaataattactgttttttatttccactgcctttataaaatcaaaattttctccttttgataaaaactgttgaatactattgatgtagagaatgtgtatatgtgtatatttgcattgattaaattattggaaaacttttcattgacaggtaatgtattttggttgtgcggatggtttgtaaaaagtatcctgtttttttaattctattcaaaattaaaaattttttttcctaaaataaagcaagaaaaataaatgtaagatatataagaaaccccagagtttccagggtgaaagttcacattagcagcttgtccaaaatatttacacctcacaaatattttgaaagaaaccatgttgaaattttctgattttgtgagttacaaccacagcccagtaaaaccaatacttgttatttggctactttcaagcaatgcagatattctttagtatttaaaaatgagcaaataaacaaaatgaggcaaataaatgaagaaaatgagtttctgagacactgtttaggtaaccataaatcagacagatatttttatggtgggcaaattgatgaagatacttttagtaggtgatttatattcataacaaatacatattgaaataattgtcactactgtatcagaattaaaaaccagcttcacattaggacttctccatacaaatgctttatcattggttcttaaattggaaaaatatctataaatgattacatttttaagctaaataaaatgcagatattttggcttcttgtgaatgtaataaagaatcataaaacata

SEQ ID NO: 183256 - DNA, 2284 bp, Homo sapiens
  Payload ID: 16105
  Gene Symbol: SLC22A17
  Gene Name: solute carrier family 22, member 17
  Uniprot ID: Q8WUG5
  ENST ID: ENST00000206544
  CDS Start-End: 338-1954
cctgactgccttcctagccctccctcccacctgccccctgcccttgctctgcggtttcctccgcttcacccttctcctgccaccccctgccccccaacagcaggtcgggaccctcggagatgcggtgcccacggagcagctgcagggtgagcgggagcgcgagcgggagggggagggagacgcgggcggcgacggactgggcagcagcctgtcgctggccgtgcccccaggccccctcagctttgaggcgctgctcgcccaggtgggggcgctgggcggcggccagcagctgcagctcggcctctgctgcctgccggtgctcttcgtggctctgggcatggcctcggaccccatcttcacgctggcgcccccgctgcattgccactacggggccttcccccctaatgcctctggctgggagcagcctcccaatgccagcggcgtcagcgtcgccagcgctgccctagcagccagcgccgccagccgtgtcgccaccagtaccgacccctcgtgcagcggcttcgccccgccggacttcaaccattgcctcaaggattgggactataatggccttcctgtgctcaccaccaacgccatcggccagtgggatctggtgtgtgacctgggctggcaggtgatcctggagcagatcctcttcatcttgggctttgcctccggctacctgttcctgggttaccccgcagacagatttggccgtcgcgggattgtgctgctgaccttggggctggtgggcccctgtggagtaggaggggctgctgcaggctcctccacaggcgtcatggccctccgattcctcttgggctttctgcttgccggtgttgacctgggtgtctacctgatgcgcctggagctgtgcgacccaacccagaggcttcgggtggccctggcaggggagttggtgggggtgggagggcacttcctgttcctgggcctggcccttgtctctaaggattggcgattcctacagcgaatgatcaccgctccctgcatcctcttcctgttttatggctggcctggtttgttcctggagtccgcacggtggctgatagtgaagcggcagattgaggaggctcagtctgtgctgaggatcctggctgagcgaaaccggccccatgggcagatgctgggggaggaggcccaggaggccctgcaggacctggagaatacctgccctctccctgcaacatcctccttttcctttgcttccctcctcaactaccgcaacatctggaaaaatctgcttatcctgggcttcaccaacttcattgcccatgccattcgccactgctaccagcctgtgggaggaggagggagcccatcggacttctacctgtgctctctgctggccagcggcaccgcagccctggcctgtgtcttcctgggggtcaccgtggaccgatttggccgccggggcatccttcttctctccatgacccttaccggcattgcttccctggtcctgctgggcctgtgggattgtgagcatcctatcttccccacagtgtgggctcaacaagggaaccccaacagagatctgaacgaggctgccatcaccactttctctgtccttgggctcttctcctcccaagctgccgccatcctcagcaccctccttgctgctgaggtcatccccaccactgtccggggccgtggcctgggcctgatcatggctctaggggcgcttggaggactgagcggcccggcccagcgcctccacatgggccatggagccttcctgcagcacgtggtgctggcggcctgcgccctcctctgcattctcagcattatgctgctgccggagaccaagcgcaagctcctgcccgaggtgctccgggacggggagctgtgtcgccggccttccctgctgcggcagccaccccctacccgctgtgaccacgtcccgctgcttgccacccccaaccctgccctctgagcggcctctgagtaccctggcgggaggctggcccacacagaaaggtggcaagaagatcgggaagactgagtagggaaggcagggctgcccagaagtctcagaggcacctcacgccagccatcgcggagagctcagagggccgtccccaccctgcctcctccctgctgctttgcattcacttccttggccagagtcaggggacagggagagagctccacactgtaaccactgggtctgggctccatcctgcgcccaaagacatccacccagacctcattatttcttgctctatcattctgtttcaataaagacatttggaataaacgagca

SEQ ID NO: 183257 - DNA, 2409 bp, Homo sapiens
  Payload ID: 16105
  Gene Symbol: SLC22A17
  Gene Name: solute carrier family 22, member 17
  Uniprot ID: Q8WUG5
  ENST ID: ENST00000354772
  CDS Start-End: 505-2067
gggaggggaaagcagcgcagagatcgcagagaccaaggaggcgcccgcggctgcagagctgcagagcgggatctcttcgagctgtctgtgtccgggcagccggcgcgcaactgagccagaggacagcgcatcctttcggcgcgggccggcagggcccctgcggtcggcaagctggctccccgggtggccaccgggacccccgagcccaatggcgggggcggcggcaaaatcgacaacactgtagagatcacccccacctccaacggacaggtcgggaccctcggagatgcggtgcccacggagcagctgcagggtgagcgggagcgcgagcgggagggggagggagacgcgggcggcgacggactgggcagcagcctgtcgctggccgtgcccccaggccccctcagctttgaggcgctgctcgcccaggtgggggcgctgggcggcggccagcagctgcagctcggcctctgctgcctgccggtgctcttcgtggctctgggcatggcctcggaccccatcttcacgctggcgcccccgctgcattgccactacggggccttcccccctaatgcctctggctgggagcagcctcccaatgccagcggcgtcagcgtcgccagcgctgccctagcagccagcgccgccagccgtgtcgccaccagtaccgacccctcgtgcagcggcttcgccccgccggacttcaaccattgcctcaaggattgggactataatggccttcctgtgctcaccaccaacgccatcggccagtgggatctggtgtgtgacctgggctggcaggtgatcctggagcagatcctcttcatcttgggctttgcctccggctacctgttcctgggttaccccgcagacagatttggccgtcgcgggattgtgctgctgaccttggggctggtgggcccctgtggagtaggaggggctgctgcaggctcctccacaggcgtcatggccctccgattcctcttgggctttctgcttgccggtgttgacctgggtgtctacctgatgcgcctggagctgtgcgacccaacccagaggcttcgggtggccctggcaggggagttggtgggggtgggagggcacttcctgttcctgggcctggcccttgtctctaaggattggcgattcctacagcgaatgatcaccgctccctgcatcctcttcctgttttatggctggcctggtttgttcctggagtccgcacggtggctgatagtgaagcggcagattgaggaggctcagtctgtgctgaggatcctggctgagcgaaaccggccccatgggcagatgctgggggaggaggcccaggaggccctgcaggacctggagaatacctgccctctccctgcaacatcctccttttcctttgcttccctcctcaactaccgcaacatctggaaaaatctgcttatcctgggcttcaccaacttcattgcccatgccattcgccactgctaccagcctgtgggaggaggagggagcccatcggacttctacctgtgctctctgctggccagcggcaccgcagccctggcctgtgtcttcctgggggtcaccgtggaccgatttggccgccggggcatccttcttctctccatgacccttaccggcattgcttccctggtcctgctgggcctgtgggattatctgaacgaggctgccatcaccactttctctgtccttgggctcttctcctcccaagctgccgccatcctcagcaccctccttgctgctgaggtcatccccaccactgtccggggccgtggcctgggcctgatcatggctctaggggcgcttggaggactgagcggcccggcccagcgcctccacatgggccatggagccttcctgcagcacgtggtgctggcggcctgcgccctcctctgcattctcagcattatgctgctgccggagaccaagcgcaagctcctgcccgaggtgctccgggacggggagctgtgtcgccggccttccctgctgcggcagccaccccctacccgctgtgaccacgtcccgctgcttgccacccccaaccctgccctctgagcggcctctgagtaccctggcgggaggctggcccacacagaaaggtggcaagaagatcgggaagactgagtagggaaggcagggctgcccagaagtctcagaggcacctcacgccagccatcgcggagagctcagagggccgtccccaccctgcctcctccctgctgctttgcattcacttccttggccagagtcaggggacagggagagagctccacactgtaaccactgggtctgggctccatcctgcgcccaaagacatccacccagacctcattatttcttgctctatcattctgtttcaataaagacatttggaataaacgagcatatcatagcctg

SEQ ID NO: 183258 - DNA, 2245 bp, Homo sapiens
  Payload ID: 16105
  Gene Symbol: SLC22A17
  Gene Name: solute carrier family 22, member 17
  ENST ID: ENST00000397260
  CDS Start-End: 682-1911
gcagagctgcagagcgggatctcttcgagctgtctgtgtccgggcagccggcgcgcaactgagccagaggacagcgcatcctttcggcgcgggccggcagggcccctgcggtcggcaagctggctccccgggtggccaccgggacccccgagcccaatggcgggggcggcggcaaaatcgacaacactgtagagatcacccccacctccaacggacaggtcgggaccctcggagatgcggtgcccacggagcagctgcagggtgagcgggagcgcgagcgggagggggagggagacgcgggcggcgacggactgggcagcagcctgtcgctggccgtgcccccaggccccctcagctttgaggcgctgctcgcccaggtgggggcgctgggcggcggccagcagctgcagctcggcctctgctgcctgccggtgctcttcgtggctctgggcatggcctcggaccccatcttcacgctggcgcccccgctgcattgccactacggggccttcccccctaatgcctctggctgggagcagcctcccaatgccagcggcgtcagcgtcgccagcgctgccctagcagccagcgccgccagccgtgtcgccaccagtaccgacccctcgtgcagcggcttcgccccgccggacttcaaccattgcctcaaggattgggactataatggccttcctgtgctcaccaccaacgccatcggccagatttggccgtcgcgggattgtgctgctgaccttggggctggtgggcccctgtggagtaggaggggctgctgcaggctcctccacaggcgtcatggccctccgattcctcttgggctttctgcttgccggtgttgacctgggtgtctacctgatgcgcctggagctgtgcgacccaacccagaggcttcgggtggccctggcaggggagttggtgggggtgggagggcacttcctgttcctgggcctggcccttgtctctaaggattggcgattcctacagcgaatgatcaccgctccctgcatcctcttcctgttttatggctggcctggtttgttcctggagtccgcacggtggctgatagtgaagcggcagattgaggaggctcagtctgtgctgaggatcctggctgagcgaaaccggccccatgggcagatgctgggggaggaggcccaggaggccctgcaggacctggagaatacctgccctctccctgcaacatcctccttttcctttgcttccctcctcaactaccgcaacatctggaaaaatctgcttatcctgggcttcaccaacttcattgcccatgccattcgccactgctaccagcctgtgggaggaggagggagcccatcggacttctacctgtgctctctgctggccagcggcaccgcagccctggcctgtgtcttcctgggggtcaccgtggaccgatttggccgccggggcatccttcttctctccatgacccttaccggcattgcttccctggtcctgctgggcctgtgggattatctgaacgaggctgccatcaccactttctctgtccttgggctcttctcctcccaagctgccgccatcctcagcaccctccttgctgctgaggtcatccccaccactgtccggggccgtggcctgggcctgatcatggctctaggggcgcttggaggactgagcggcccggcccagcgcctccacatgggccatggagccttcctgcagcacgtggtgctggcggcctgcgccctcctctgcattctcagcattatgctgctgccggagaccaagcgcaagctcctgcccgaggtgctccgggacggggagctgtgtcgccggccttccctgctgcggcagccaccccctacccgctgtgaccacgtcccgctgcttgccacccccaaccctgccctctgagcggcctctgagtaccctggcgggaggctggcccacacagaaaggtggcaagaagatcgggaagactgagtagggaaggcagggctgcccagaagtctcagaggcacctcacgccagccatcgcggagagctcagagggccgtccccaccctgcctcctccctgctgctttgcattcacttccttggccagagtcaggggacagggagagagctccacactgtaaccactgggtctgggctccatcctgcgcccaaagacatccacccagacctcattatttcttgctctatcattctgtttcaataaagacatttggaataaacgagcatatc

SEQ ID NO: 183259 - DNA, 2455 bp, Homo sapiens
  Payload ID: 16105
  Gene Symbol: SLC22A17
  Gene Name: solute carrier family 22, member 17
  Uniprot ID: Q8WUG5
  ENST ID: ENST00000397267
  CDS Start-End: 505-2121
gggaggggaaagcagcgcagagatcgcagagaccaaggaggcgcccgcggctgcagagctgcagagcgggatctcttcgagctgtctgtgtccgggcagccggcgcgcaactgagccagaggacagcgcatcctttcggcgcgggccggcagggcccctgcggtcggcaagctggctccccgggtggccaccgggacccccgagcccaatggcgggggcggcggcaaaatcgacaacactgtagagatcacccccacctccaacggacaggtcgggaccctcggagatgcggtgcccacggagcagctgcagggtgagcgggagcgcgagcgggagggggagggagacgcgggcggcgacggactgggcagcagcctgtcgctggccgtgcccccaggccccctcagctttgaggcgctgctcgcccaggtgggggcgctgggcggcggccagcagctgcagctcggcctctgctgcctgccggtgctcttcgtggctctgggcatggcctcggaccccatcttcacgctggcgcccccgctgcattgccactacggggccttcccccctaatgcctctggctgggagcagcctcccaatgccagcggcgtcagcgtcgccagcgctgccctagcagccagcgccgccagccgtgtcgccaccagtaccgacccctcgtgcagcggcttcgccccgccggacttcaaccattgcctcaaggattgggactataatggccttcctgtgctcaccaccaacgccatcggccagtgggatctggtgtgtgacctgggctggcaggtgatcctggagcagatcctcttcatcttgggctttgcctccggctacctgttcctgggttaccccgcagacagatttggccgtcgcgggattgtgctgctgaccttggggctggtgggcccctgtggagtaggaggggctgctgcaggctcctccacaggcgtcatggccctccgattcctcttgggctttctgcttgccggtgttgacctgggtgtctacctgatgcgcctggagctgtgcgacccaacccagaggcttcgggtggccctggcaggggagttggtgggggtgggagggcacttcctgttcctgggcctggcccttgtctctaaggattggcgattcctacagcgaatgatcaccgctccctgcatcctcttcctgttttatggctggcctggtttgttcctggagtccgcacggtggctgatagtgaagcggcagattgaggaggctcagtctgtgctgaggatcctggctgagcgaaaccggccccatgggcagatgctgggggaggaggcccaggaggccctgcaggacctggagaatacctgccctctccctgcaacatcctccttttcctttgcttccctcctcaactaccgcaacatctggaaaaatctgcttatcctgggcttcaccaacttcattgcccatgccattcgccactgctaccagcctgtgggaggaggagggagcccatcggacttctacctgtgctctctgctggccagcggcaccgcagccctggcctgtgtcttcctgggggtcaccgtggaccgatttggccgccggggcatccttcttctctccatgacccttaccggcattgcttccctggtcctgctgggcctgtgggattgtgagcatcctatcttccccacagtgtgggctcaacaagggaaccccaacagagatctgaacgaggctgccatcaccactttctctgtccttgggctcttctcctcccaagctgccgccatcctcagcaccctccttgctgctgaggtcatccccaccactgtccggggccgtggcctgggcctgatcatggctctaggggcgcttggaggactgagcggcccggcccagcgcctccacatgggccatggagccttcctgcagcacgtggtgctggcggcctgcgccctcctctgcattctcagcattatgctgctgccggagaccaagcgcaagctcctgcccgaggtgctccgggacggggagctgtgtcgccggccttccctgctgcggcagccaccccctacccgctgtgaccacgtcccgctgcttgccacccccaaccctgccctctgagcggcctctgagtaccctggcgggaggctggcccacacagaaaggtggcaagaagatcgggaagactgagtagggaaggcagggctgcccagaagtctcagaggcacctcacgccagccatcgcggagagctcagagggccgtccccaccctgcctcctccctgctgctttgcattcacttccttggccagagtcaggggacagggagagagctccacactgtaaccactgggtctgggctccatcctgcgcccaaagacatccacccagacctcattatttcttgctctatcattctgtttcaataaagacatttggaataaacgagcatatc

SEQ ID NO: 183260 - DNA, 1542 bp, Homo sapiens
  Payload ID: 16106
  Gene Symbol: SLC22A18
  Gene Name: solute carrier family 22, member 18
  Uniprot ID: Q96BI1
  ENST ID: ENST00000347936
  CDS Start-End: 219-1493
gacaaaaaaaaaggtctctccgatttcctctgctcaaccagttccctggctacctgaggccctgcttcacctggaggaagacagtggcaaggccaggcgggtgctgcctgggacccagtgactcagcacccctgcccggatcaactggacttttgccccctgctccgccagcctcctgcttggatctctcctgggtctccctgctgcgcctgtccaggatgcagggagctcgggctcccagggaccagggccggtcccccggcaggatgagcgctctaggccggtcctcggtcatcttgcttacctacgtgctggccgccacagaacttacctgcctcttcatgcagttctccatcgtgccatacctgtctcggaaactgggcctggattccattgccttcggctacctgcaaaccaccttcggggtgctgcagctgctgggcgggccggtatttggcaggttcgcagaccagcgcggggcgcgggcggcgctcacgctctccttcctggctgccttggcgctctacctgctcctggcggccgcctccagcccggccctgcccggggtctacctgctcttcgcctcgcgcctgcccggagcgctcatgcacacgctgccagccgcccagatggtcatcacggacctgtcggcacccgaggagcggcccgcggccctgggccggctgggcctctgcttcggcgtcggagtcatcctcggctccctgctgggcgggaccctggtctccgcgtacgggattcagtgcccggccatcctggctgccctggccaccctcctgggagctgtcctcagcttcacctgcatccccgccagcaccaaaggggccaaaactgacgcccaggctccactgccaggcggcccccgggccagtgtgttcgacctgaaggccatcgcctccctgctgcggctgccagacgtcccgaggatcttcctggtgaaggtggcctccaactgccccacagggctcttcatggtcatgttctccatcatctccatggacttcttccagctggaggccgcccaagctggctacctcatgtccttcttcgggctcctccagatggtgacccagggcctggtcatcgggcagctgagcagccacttctcggaggaggtgctgctccgggccagcgtgctggtcttcatcgtggtgggcctggccatggcctggatgtccagcgtcttccacttctgcctcctggtgcccggcctggtgttcagcctctgcaccctcaacgtggtcaccgacagcatgctgatcaaggctgtctccacctcggacacagggaccatgctgggcctctgcgcctctgtacaaccactgctccgaactctgggacccacggtcggcggcctcctgtaccgcagctttggcgtccccgtcttcggccacgtgcaggttgctatcaatacccttgtcctcctggtcctctggaggaaacctatgccccagaggaaggacaaagtccggtgaccgctgcccagacacagactggcaataaactcctactaaatccctccga

SEQ ID NO: 183261 - DNA, 1628 bp, Homo sapiens
  Payload ID: 16106
  Gene Symbol: SLC22A18
  Gene Name: solute carrier family 22, member 18
  Uniprot ID: Q96BI1
  ENST ID: ENST00000312221
  CDS Start-End: 305-1579
ggcgattgcaaagcgcgagggctggaactcagacccagaggggcggtccctgttgcaagtcatctcccgaaagggcggggccggggctcatcccggaaggaccggtgtctaggtcaccctggagcgctcaccccaccggcacccgtgcccaagcccgcccctgcaaaggcaggcaaggccaggcgggtgctgcctgggacccagtgactcagcacccctgcccggatcaactggacttttgccccctgctccgccagcctcctgcttggatctctcctgggtctccctgctgcgcctgtccaggatgcagggagctcgggctcccagggaccagggccggtcccccggcaggatgagcgctctaggccggtcctcggtcatcttgcttacctacgtgctggccgccacagaacttacctgcctcttcatgcagttctccatcgtgccatacctgtctcggaaactgggcctggattccattgccttcggctacctgcaaaccaccttcggggtgctgcagctgctgggcgggccggtatttggcaggttcgcagaccagcgcggggcgcgggcggcgctcacgctctccttcctggctgccttggcgctctacctgctcctggcggccgcctccagcccggccctgcccggggtctacctgctcttcgcctcgcgcctgcccggagcgctcatgcacacgctgccagccgcccagatggtcatcacggacctgtcggcacccgaggagcggcccgcggccctgggccggctgggcctctgcttcggcgtcggagtcatcctcggctccctgctgggcgggaccctggtctccgcgtacgggattcagtgcccggccatcctggctgccctggccaccctcctgggagctgtcctcagcttcacctgcatccccgccagcaccaaaggggccaaaactgacgcccaggctccactgccaggcggcccccgggccagtgtgttcgacctgaaggccatcgcctccctgctgcggctgccagacgtcccgaggatcttcctggtgaaggtggcctccaactgccccacagggctcttcatggtcatgttctccatcatctccatggacttcttccagctggaggccgcccaagctggctacctcatgtccttcttcgggctcctccagatggtgacccagggcctggtcatcgggcagctgagcagccacttctcggaggaggtgctgctccgggccagcgtgctggtcttcatcgtggtgggcctggccatggcctggatgtccagcgtcttccacttctgcctcctggtgcccggcctggtgttcagcctctgcaccctcaacgtggtcaccgacagcatgctgatcaaggctgtctccacctcggacacagggaccatgctgggcctctgcgcctctgtacaaccactgctccgaactctgggacccacggtcggcggcctcctgtaccgcagctttggcgtccccgtcttcggccacgtgcaggttgctatcaatacccttgtcctcctggtcctctggaggaaacctatgccccagaggaaggacaaagtccggtgaccgctgcccagacacagactggcaataaactcctactaaatccctccga

SEQ ID NO: 183262 - DNA, 1755 bp, Homo sapiens
  Payload ID: 16106
  Gene Symbol: SLC22A18
  Gene Name: solute carrier family 22, member 18
  Uniprot ID: Q96BI1
  ENST ID: ENST00000380574
  CDS Start-End: 432-1706
gcgcagcgtcgcacctctgcccaatgaggtgcccctgacgtgcctgctgcggctgccctgctccccccagcctccctgcatcccgggatgggggagggcgccaggcgcagctcccggaccctcaggggtctccccgccctaccccaccagcctgggttcggtacctcggggctcagatgtgcagtcagctgttaatgtggcaaaatttggggaagtcctctgcagccgcaaaatccagttcccaccagttggaggccgggcggggaagggtggggacagacagcactccgctgtgggaggcaaggccaggcgggtgctgcctgggacccagtgactcagcacccctgcccggatcaactggacttttgccccctgctccgccagcctcctgcttggatctctcctgggtctccctgctgcgcctgtccaggatgcagggagctcgggctcccagggaccagggccggtcccccggcaggatgagcgctctaggccggtcctcggtcatcttgcttacctacgtgctggccgccacagaacttacctgcctcttcatgcagttctccatcgtgccatacctgtctcggaaactgggcctggattccattgccttcggctacctgcaaaccaccttcggggtgctgcagctgctgggcgggccggtatttggcaggttcgcagaccagcgcggggcgcgggcggcgctcacgctctccttcctggctgccttggcgctctacctgctcctggcggccgcctccagcccggccctgcccggggtctacctgctcttcgcctcgcgcctgcccggagcgctcatgcacacgctgccagccgcccagatggtcatcacggacctgtcggcacccgaggagcggcccgcggccctgggccggctgggcctctgcttcggcgtcggagtcatcctcggctccctgctgggcgggaccctggtctccgcgtacgggattcagtgcccggccatcctggctgccctggccaccctcctgggagctgtcctcagcttcacctgcatccccgccagcaccaaaggggccaaaactgacgcccaggctccactgccaggcggcccccgggccagtgtgttcgacctgaaggccatcgcctccctgctgcggctgccagacgtcccgaggatcttcctggtgaaggtggcctccaactgccccacagggctcttcatggtcatgttctccatcatctccatggacttcttccagctggaggccgcccaagctggctacctcatgtccttcttcgggctcctccagatggtgacccagggcctggtcatcgggcagctgagcagccacttctcggaggaggtgctgctccgggccagcgtgctggtcttcatcgtggtgggcctggccatggcctggatgtccagcgtcttccacttctgcctcctggtgcccggcctggtgttcagcctctgcaccctcaacgtggtcaccgacagcatgctgatcaaggctgtctccacctcggacacagggaccatgctgggcctctgcgcctctgtacaaccactgctccgaactctgggacccacggtcggcggcctcctgtaccgcagctttggcgtccccgtcttcggccacgtgcaggttgctatcaatacccttgtcctcctggtcctctggaggaaacctatgccccagaggaaggacaaagtccggtgaccgctgcccagacacagactggcaataaactcctactaaatccctccga

SEQ ID NO: 183263 - DNA, 1225 bp, Homo sapiens
  Payload ID: 16106
  Gene Symbol: SLC22A18
  Gene Name: solute carrier family 22, member 18
  ENST ID: ENST00000449793
  CDS Start-End: 215-1195
tcccggaaggaccggtgtctaggtcaccctggagcgctcaccccaccggcacccgtgcccaagcccgcccctgcaaaggcaggcaaggccaggcgggtgctgcctgggacccagtgactcagcacccctgcccggatcaactggacttttgccccctgctccgccagcctcctgcttggatctctcctgggtctccctgctgcgcctgtccaggatgcagggagctcgggctcccagggaccagggccggtcccccggcaggatgagcgctctaggccggtcctcggtcatcttgcttacctacgtgctggccgccacagaacttacctgcctcttcatgcagttctccatcgtgccatacctgtctcggaaactgggcctggattccattgccttcggctacctgcaaaccaccttcggggtgctgcagctgctgggcgggccggtatttggcaggattcagtgcccggccatcctggctgccctggccaccctcctgggagctgtcctcagcttcacctgcatccccgccagcaccaaaggggccaaaactgacgcccaggctccactgccaggcggcccccgggccagtgtgttcgacctgaaggccatcgcctccctgctgcggctgccagacgtcccgaggatcttcctggtgaaggtggcctccaactgccccacagggctcttcatggtcatgttctccatcatctccatggacttcttccagctggaggccgcccaagctggctacctcatgtccttcttcgggctcctccagatggtgacccagggcctggtcatcgggcagctgagcagccacttctcggaggaggtgctgctccgggccagcgtgctggtcttcatcgtggtgggcctggccatggcctggatgtccagcgtcttccacttctgcctcctggtgcccggcctggtgttcagcctctgcaccctcaacgtggtcaccgacagcatgctgatcaaggctgtctccacctcggacacagggaccatgctgggcctctgcgcctctgtacaaccactgctccgaactctgggacccacggtcggcggcctcctgtaccgcagctttggcgtccccgtcttcggccacgtgcaggttgctatcaatacccttgtcctcctggtcctctggaggaaacctatgccccagaggaaggacaaagtccggtgaccgctgcccagacacagactggcaataaac

SEQ ID NO: 183264 - DNA, 635 bp, Homo sapiens
  Payload ID: 16106
  Gene Symbol: SLC22A18
  Gene Name: solute carrier family 22, member 18
  ENST ID: ENST00000485423
  CDS Start-End: 233-635
aaaagtggaggagggggaccccctgatgtgtcctctaaggtccaggtagcaggagagctccactggggagggggtcctgcagtgctgtcctctcttgcaggcaaggccaggcgggtgctgcctgggacccagtgactcagcacccctgcccggatcaactggacttttgccccctgctccgccagcctcctgcttggatctctcctgggtctccctgctgcgcctgtccaggatgcagggagctcgggctcccagggaccagggccggtcccccggcaggatgagcgctctaggccggtcctcggtcatcttgcttacctacgtgctggccgccacagaacttacctgcctcttcatgcagttctccatcgtgccatacctgtctcggaaactgggcctggattccattgccttcggctacctgcaaaccaccttcggggtgctgcagctgctgggcgggccggtatttggcaggttcgcagaccagcgcggggcgcgggcggcgctcacgctctccttcctggctgccttggcgctctacctgctcctggcggccgcctccagcccggccctgcccggggtctacctgctcttcgcctcgcgcctgcccggagcgctcatgcacacgctgccag

SEQ ID NO: 183265 - DNA, 1628 bp, Homo sapiens
  Payload ID: 16106
  Gene Symbol: SLC22A18
  Gene Name: solute carrier family 22, member 18
  ENST ID: ENST00000610526
  CDS Start-End: 305-1579
  modified_base (119)..(119): a, c, t, g, unknown or other
ggcgattgcaaagcgcgagggctggaactcagacccagaggggcggtccctgttgcaagtcatctcccgaaagggcggggccggggctcatcccggaaggaccggtgtttaggtcaccntggagcgctcaccccaccggcaccagtgcccaagcccgcccctgcaaaggcaggcaaggccaggcgggtgctgcctgggacccagtgactcagcacccctgcccggatcaactggacttttgccccctgctccgccagcctcctgcttggatctctcctgggtctccctgctgcgcctgtccaggatgcagggagctcgggctcccagggaccagggccagtcccccggcaggatgagcgctctaggccggtcctcggtcatcttgcttacctacgtgctggccgccacagaacttacctgcctcttcatgcagttctccatcgtgccatacctgtctcggaaactgggcctggattccattgccttcggctacctgcaaaccaccttcggggtgctgcagctgctgggcgggccggtgtttggcaggttcgcagaccagcgcggggcgcgggcggcgctcacgctctccttcctggctgccttggcgctctacctgctcctggcggccgcctccagcccggccctgcccggggtctacctgctcttcgcctcgcgcctgcccggagcgctcatgcacacgctgccagccgcccagatggtcatcacggacctgtcggcacccgaggagcggcccgcggccctgggccggctgggcctctgcttcggcgtcggagtcatcctcggctccctgctgggcgggaccctggtctccgcgtacgggattcagtgcccggccatcctggctgccctggccaccctcctgggagctgtcctcagcttcacctgcatccccgccagcaccaaaggggccaaaactgacgcccaggctccactgccaggcggcccccgggccagtgtgttcgacctgaaggccatcgcctccctgctgcggctgccagacgtcccgaggatcttcctggtgaaggtggcctccaactgccccacagggctcttcatggtcatgttctccatcatctccatggacttcttccagctggaggccgcccaagctggctacctcatgtccttcttcgggctcctccagatggtgacccagggcctggtcatcgggcagctgagcagccacttctcggaggaggtgctgctccgggccagcgtgctggtcttcatcgtggtgggcctggccatggcctggatgtccagcgtcttccacttctgcctcctggtgcccggcctggtgttcagcctctgcaccctcaacgtggtcaccgacagcatgctgatcaaggctgtctccacctcggacacagggaccatgctgggcctctgcgcctctgtacaaccactgctccgaactctgggacccacggtcggcggcctcctgtaccgcagctttggcgtccccgtcttcggccacgtgcaggttgctatcaatacccttgtcctcctggtcctctggaggaaacctatgccccagaggaaggacaaagtccggtgaccgctgcccagacacagactggcaataaactcctactaaatccctccga

SEQ ID NO: 183266 - DNA, 1757 bp, Homo sapiens
  Payload ID: 16106
  Gene Symbol: SLC22A18
  Gene Name: solute carrier family 22, member 18
  ENST ID: ENST00000615661
  CDS Start-End: 434-1708
gcgcagcgtcgcacctctgcccaatgaggtgcccaagacatgcatggtgcgggtgccatgctcccccccagcatccctgcatcccgggatgggggagggcgccaggcgcagctcccggacccttaggggttttcccagccaaacctcaccagcgggggttaggaacctaggggctcaggtgtgcagtcagctgttaatgtggcaaaatatggggaagtcatttgcagcggcaaaatccagttcccaccagttggaggccgggcggggaagggtggggacagacagcactccgctgtgggaggcaaggccaggcgggtgctgcctgggacccagtgactcagcacccctgcccggatcaactggacttttgccccctgctccgccagcctcctgcttggatctctcctgggtctccctgctgcgcctgtccaggatgcagggagctcgggctcccagggaccagggccagtcccccggcaggatgagcgctctaggccggtcctcggtcatcttgcttacctacgtgctggccgccacagaacttacctgcctcttcatgcagttctccatcgtgccatacctgtctcggaaactgggcctggattccattgccttcggctacctgcaaaccaccttcggggtgctgcagctgctgggcgggccggtgtttggcaggttcgcagaccagcgcggggcgcgggcggcgctcacgctctccttcctggctgccttggcgctctacctgctcctggcggccgcctccagcccggccctgcccggggtctacctgctcttcgcctcgcgcctgcccggagcgctcatgcacacgctgccagccgcccagatggtcatcacggacctgtcggcacccgaggagcggcccgcggccctgggccggctgggcctctgcttcggcgtcggagtcatcctcggctccctgctgggcgggaccctggtctccgcgtacgggattcagtgcccggccatcctggctgccctggccaccctcctgggagctgtcctcagcttcacctgcatccccgccagcaccaaaggggccaaaactgacgcccaggctccactgccaggcggcccccgggccagtgtgttcgacctgaaggccatcgcctccctgctgcggctgccagacgtcccgaggatcttcctggtgaaggtggcctccaactgccccacagggctcttcatggtcatgttctccatcatctccatggacttcttccagctggaggccgcccaagctggctacctcatgtccttcttcgggctcctccagatggtgacccagggcctggtcatcgggcagctgagcagccacttctcggaggaggtgctgctccgggccagcgtgctggtcttcatcgtggtgggcctggccatggcctggatgtccagcgtcttccacttctgcctcctggtgcccggcctggtgttcagcctctgcaccctcaacgtggtcaccgacagcatgctgatcaaggctgtctccacctcggacacagggaccatgctgggcctctgcgcctctgtacaaccactgctccgaactctgggacccacggtcggcggcctcctgtaccgcagctttggcgtccccgtcttcggccacgtgcaggttgctatcaatacccttgtcctcctggtcctctggaggaaacctatgccccagaggaaggacaaagtccggtgaccgctgcccagacacagactggcaataaactcctactaaatccctccga

SEQ ID NO: 183267 - DNA, 1542 bp, Homo sapiens
  Payload ID: 16106
  Gene Symbol: SLC22A18
  Gene Name: solute carrier family 22, member 18
  ENST ID: ENST00000622105
  CDS Start-End: 219-1493
gacaaaaaaaaaggtctctccgatttcctctgctcaaccagttccctggctacctgaggccctgcttcacctggaggaagacagtggcaaggccaggcgggtgctgcctgggacccagtgactcagcacccctgcccggatcaactggacttttgccccctgctccgccagcctcctgcttggatctctcctgggtctccctgctgcgcctgtccaggatgcagggagctcgggctcccagggaccagggccagtcccccggcaggatgagcgctctaggccggtcctcggtcatcttgcttacctacgtgctggccgccacagaacttacctgcctcttcatgcagttctccatcgtgccatacctgtctcggaaactgggcctggattccattgccttcggctacctgcaaaccaccttcggggtgctgcagctgctgggcgggccggtgtttggcaggttcgcagaccagcgcggggcgcgggcggcgctcacgctctccttcctggctgccttggcgctctacctgctcctggcggccgcctccagcccggccctgcccggggtctacctgctcttcgcctcgcgcctgcccggagcgctcatgcacacgctgccagccgcccagatggtcatcacggacctgtcggcacccgaggagcggcccgcggccctgggccggctgggcctctgcttcggcgtcggagtcatcctcggctccctgctgggcgggaccctggtctccgcgtacgggattcagtgcccggccatcctggctgccctggccaccctcctgggagctgtcctcagcttcacctgcatccccgccagcaccaaaggggccaaaactgacgcccaggctccactgccaggcggcccccgggccagtgtgttcgacctgaaggccatcgcctccctgctgcggctgccagacgtcccgaggatcttcctggtgaaggtggcctccaactgccccacagggctcttcatggtcatgttctccatcatctccatggacttcttccagctggaggccgcccaagctggctacctcatgtccttcttcgggctcctccagatggtgacccagggcctggtcatcgggcagctgagcagccacttctcggaggaggtgctgctccgggccagcgtgctggtcttcatcgtggtgggcctggccatggcctggatgtccagcgtcttccacttctgcctcctggtgcccggcctggtgttcagcctctgcaccctcaacgtggtcaccgacagcatgctgatcaaggctgtctccacctcggacacagggaccatgctgggcctctgcgcctctgtacaaccactgctccgaactctgggacccacggtcggcggcctcctgtaccgcagctttggcgtccccgtcttcggccacgtgcaggttgctatcaatacccttgtcctcctggtcctctggaggaaacctatgccccagaggaaggacaaagtccggtgaccgctgcccagacacagactggcaataaactcctactaaatccctccga

SEQ ID NO: 183268 - DNA, 1143 bp, Homo sapiens
  Payload ID: 16106
  Gene Symbol: SLC22A18
  Gene Name: solute carrier family 22, member 18
  ENST ID: ENST00000632784
  CDS Start-End: 133-1113
gcaaggccaggcgggtgctgcctgggacccagtgactcagcacccctgcccggatcaactggacttttgccccctgctccgccagcctcctgcttggatctctcctgggtctccctgctgcgcctgtccaggatgcagggagctcgggctcccagggaccagggccagtcccccggcaggatgagcgctctaggccggtcctcggtcatcttgcttacctacgtgctggccgccacagaacttacctgcctcttcatgcagttctccatcgtgccatacctgtctcggaaactgggcctggattccattgccttcggctacctgcaaaccaccttcggggtgctgcagctgctgggcgggccggtgtttggcaggattcagtgcccggccatcctggctgccctggccaccctcctgggagctgtcctcagcttcacctgcatccccgccagcaccaaaggggccaaaactgacgcccaggctccactgccaggcggcccccgggccagtgtgttcgacctgaaggccatcgcctccctgctgcggctgccagacgtcccgaggatcttcctggtgaaggtggcctccaactgccccacagggctcttcatggtcatgttctccatcatctccatggacttcttccagctggaggccgcccaagctggctacctcatgtccttcttcgggctcctccagatggtgacccagggcctggtcatcgggcagctgagcagccacttctcggaggaggtgctgctccgggccagcgtgctggtcttcatcgtggtgggcctggccatggcctggatgtccagcgtcttccacttctgcctcctggtgcccggcctggtgttcagcctctgcaccctcaacgtggtcaccgacagcatgctgatcaaggctgtctccacctcggacacagggaccatgctgggcctctgcgcctctgtacaaccactgctccgaactctgggacccacggtcggcggcctcctgtaccgcagctttggcgtccccgtcttcggccacgtgcaggttgctatcaatacccttgtcctcctggtcctctggaggaaacctatgccccagaggaaggacaaagtccggtgaccgctgcccagacacagactggcaataaac

SEQ ID NO: 183269 - DNA, 635 bp, Homo sapiens
  Payload ID: 16106
  Gene Symbol: SLC22A18
  Gene Name: solute carrier family 22, member 18
  ENST ID: ENST00000631887
  CDS Start-End: 233-635
aaaagtggaggagggggaccccctgatgtgtcctctaaggtccaggtagcaggagagctccactggggagggggtcctgcagtgctgtcctctcttgcaggcaaggccaggcgggtgctgcctgggacccagtgactcagcacccctgcccggatcaactggacttttgccccctgctccgccagcctcctgcttggatctctcctgggtctccctgctgcgcctgtccaggatgcagggagctcgggctcccagggaccagggccagtcccccggcaggatgagcgctctaggccggtcctcggtcatcttgcttacctacgtgctggccgccacagaacttacctgcctcttcatgcagttctccatcgtgccatacctgtctcggaaactgggcctggattccattgccttcggctacctgcaaaccaccttcggggtgctgcagctgctgggcgggccggtgtttggcaggttcgcagaccagcgcggggcgcgggcggcgctcacgctctccttcctggctgccttggcgctctacctgctcctggcggccgcctccagcccggccctgcccggggtctacctgctcttcgcctcgcgcctgcccggagcgctcatgcacacgctgccag

SEQ ID NO: 183270 - DNA, 1574 bp, Homo sapiens
  Payload ID: 16107
  Gene Symbol: SLC22A23
  Gene Name: solute carrier family 22, member 23
  Uniprot ID: A1A5C7
  ENST ID: ENST00000380298
  CDS Start-End: 1-1086
atggccatagaccggcggcgcgaggcggcgggcggcgggcctgggcggcagccggccccggccgaggagaacggctccctgccgcccggggacgcggcggcctcggcgcccctcgggggacgcgcgggccccggcggcggcgcggagatccagccgctgcccccactgcatcctggaggcggcccgcacccgagctgctgctccgcggctgcggccccgagcctcttgttgctggactatgacgggtcggtgctgcccttcctcgggggcctgggcgggggctatcagaagaccctcgtgctgctcacctggatcccggcgctgttcatcggcttcagccagttctcggactcgttcctcctggaccagcccaacttctggtgccgcggggccggcaaaggcaccgagctggcaggggtcaccaccacaggccggggcggggacatgggcaactggaccagcctccccaccacccccttcgccactgccccctgggaggctgcgggcaaccggagcaacagcagcggcgcggacggaggcgacacaccacccctgccatcccctccggacaagggggacaacgcctccaactgtgactgccgcgcatgggactacggcatccgcgccggcctcgtccagaacgtggtcagcaagtgggatcttgtgtgtgataatgcctggaaggtccatatcgctaagttctccttactggttggattaatctttggctacctaataactggatgcattgctgactgggtcggccggcggcctgtgctgctgttttccatcatcttcattctgatctttggactgactgtggcactgtcagtgaatgtgacaatgttcagcacactcaggttctttgaaggattttgcctggctggaatcattctcaccttgtatgctttacgaatagagctgtgcccccctggaaaacggttcatgattacgatggtggcgagcttcgtggccatggcgggccagttcctcatgcctgggctagccgccctgtgccgggattggcaggtgctgcaggccctcatcatctgccccttcctgctcatgctgctctactggtcgtgagtacactctgcacagcgccctgggctggtgcgactgcacatgcttcctgaaggcccggccccgggcaggacacacaatccccacacttcccactagttgcagcttgtggttctgtctgagaaggttttcctctctttttaaaaaattttattgtttaaactttctgtcttggaaaactgttcaaatatacacaaaaatagaagagtggaatgagcccatcacccagctccaaaaatctgcaaatgcactggccagtctggctcaccccttcttgctacccaccccacggggttattctgacatgaatttttatgaatggattgcagggaggtggaggtcttgtgttaggaggggggatttggagatattaaaggagtgatttacaaaagtccccctatctcttctaggcgaggggtgggcaaccttcagcctgtgggccacatcaggcccactgtctgtttttgtaaataaagttttattggaacaca

SEQ ID NO: 183271 - DNA, 2883 bp, Homo sapiens
  Payload ID: 16107
  Gene Symbol: SLC22A23
  Gene Name: solute carrier family 22, member 23
  Uniprot ID: A1A5C7
  ENST ID: ENST00000380302
  CDS Start-End: 385-1602
aaacagcccccaccctggaagcctcaggtgccttccttcctccccttggtggggtgaggacgaccgggatgagtcgtctgagaagcactttgaggggggaggagctgaaggccacacctggaagggcgatttattccttgggcgctgccaggtgtctgccgccttcacccagaaaccgatgatgttcggagccagtgggatcttgtgtgtgataatgcctggaaggtccatatcgctaagttctccttactggttggattaatctttggctacctaataactggatgcattgctgactgggtcggccggcggcctgtgctgctgttttccatcatcttcattctgatctttggactgactgtggcactgtcagtgaatgtgacaatgttcagcacactcaggttctttgaaggattttgcctggctggaatcattctcaccttgtatgctttacgaatagagctgtgcccccctggaaaacggttcatgattacgatggtggcgagcttcgtggccatggcgggccagttcctcatgcctgggctagccgccctgtgccgggattggcaggtgctgcaggccctcatcatctgccccttcctgctcatgctgctctactggtcgatattccccgagtccctccggtggctaatggccacccagcagtttgagtctgcaaagaggctgatcctccacttcacacagaagaatcgcatgaaccctgagggcgacatcaagggtgtgataccagagctggagaaagagctttcccggaggcccaagaaggtctgcatcgtgaaggtggtggggacacggaacctgtggaagaacattgtggtcctgtgtgtgaactcgctgacggggtacgggatccaccactgctttgccaggagcatgatgggccacgaggtgaaggtgccgctcctggagaacttctatgctgactactataccacggccagcatcgcgctggtgtcctgcctggccatgtgcgtggtggtccgattcctcgggcgcaggggagggctgctgctcttcatgatcctcaccgccctggcctcactcctgcagctcggcctcctcaacctgattggaaagtacagccagcacccagactcagggatgagtgacagcgtcaaggacaaattttccatcgcgttttccatcgtgggcatgtttgcctcccatgcggtggggagcctcagcgtgttcttctgtgcggagatcaccccgacggtgataaggtgtggcgggctggggctggtgctggccagcgcgggcttcggcatgctgacggcacccatcatcgagctgcacaaccagaaaggctacttcctgcaccacatcatctttgcctgctgcacgctcatctgcatcatctgcatcctcctgctgcccgagagcagggaccagaacctgcctgagaacatttctaacggggagcactacacgcgccagccgctgctgccgcacaagaagggggagcagccactgctgctcaccaacgccgagctcaaggactactcgggcctccacgatgccgcagccgcgggtgacacactgcccgagggtgccacggccaacggcatgaaggccatgtagcccggcctgcggaacccggggctccagggtctggggcagcttgggcacaggtttacagaccagggaccgaacacgcagccaggggtgggaaagctgcctcagccaagctgagcctctcaactggtgtggggaaatcctgtctttccaaaagtccaaggagcgcgggtcggaggagacaaactctttggaaataaccctttcaagactttcttttctgccgttaaatgtgtgtatttattttggtcatttttacgagaagcactttattccctctccctctcactgatcacaaatggaatcacctccctgggcagcgagacgcagttgctctgggaagatgccacagtgaccagggccatggccggtccctctggggagatgggacacggctcctggcagcacccaggagccccccaggctgcctgcctgcgtgcagaggcaggagaggaccgtggagcgtttccgggactgcattttagacggagtgaaatgtacatgaatttggcttttgctagagtctgtgtatggttttttaaggtcctttttccctttctgtttgtaaggtaagagcttctgttcgtgtgcagggaaagcagctcacagacgccgttaaaaccagcttcatctttccttcaggatcatccttttgtacttgatgctggaagctcttggagaaaaagcttaaacatttcaccagaaatcttaattgagcagcagtcatatcgccacagctttgtgagtacacagctaacagatgcgtcgagacctgagatgtgctcgtttttattcctcctctcccagattggctccagcagaaaagtccctcgtgcacaggcagctcttgtgccggcactacttgaaaacatggctactttctaagctacaaaccattagaaaataactcaaaaagatggcagaggcaaatccacagaaggggggctgccctccacacacacacgcccgtcacccacaccttgagcacacaccatgaagatcaccagcttggatggccgtcacctcagacatcactccagggagcacccgcaggagctgggccccctcacgcctgccttcctgggccagcttcctgcttgcagtcactcgcatagcacagaggtggggcttcgggcagggagcggagattcctcataggtgagtccaaatgacctccagcctctcgaaggcatcaagacaaattgaaagaaagcaataactcaccaaagctcaacgctgcccctgcctcgacctccatgggtctcttcgtgttcctcgtttcacccc

SEQ ID NO: 183272 - DNA, 5658 bp, Homo sapiens
  Payload ID: 16107
  Gene Symbol: SLC22A23
  Gene Name: solute carrier family 22, member 23
  Uniprot ID: A1A5C7
  ENST ID: ENST00000406686
  CDS Start-End: 1-2061
atggccatagaccggcggcgcgaggcggcgggcggcgggcctgggcggcagccggccccggccgaggagaacggctccctgccgcccggggacgcggcggcctcggcgcccctcgggggacgcgcgggccccggcggcggcgcggagatccagccgctgcccccactgcatcctggaggcggcccgcacccgagctgctgctccgcggctgcggccccgagcctcttgttgctggactatgacgggtcggtgctgcccttcctcgggggcctgggcgggggctatcagaagaccctcgtgctgctcacctggatcccggcgctgttcatcggcttcagccagttctcggactcgttcctcctggaccagcccaacttctggtgccgcggggccggcaaaggcaccgagctggcaggggtcaccaccacaggccggggcggggacatgggcaactggaccagcctccccaccacccccttcgccactgccccctgggaggctgcgggcaaccggagcaacagcagcggcgcggacggaggcgacacaccacccctgccatcccctccggacaagggggacaacgcctccaactgtgactgccgcgcatgggactacggcatccgcgccggcctcgtccagaacgtggtcagcaagtgggatcttgtgtgtgataatgcctggaaggtccatatcgctaagttctccttactggttggattaatctttggctacctaataactggatgcattgctgactgggtcggccggcggcctgtgctgctgttttccatcatcttcattctgatctttggactgactgtggcactgtcagtgaatgtgacaatgttcagcacactcaggttctttgaaggattttgcctggctggaatcattctcaccttgtatgctttacgaatagagctgtgcccccctggaaaacggttcatgattacgatggtggcgagcttcgtggccatggcgggccagttcctcatgcctgggctagccgccctgtgccgggattggcaggtgctgcaggccctcatcatctgccccttcctgctcatgctgctctactggtcgatattccccgagtccctccggtggctaatggccacccagcagtttgagtctgcaaagaggctgatcctccacttcacacagaagaatcgcatgaaccctgagggcgacatcaagggtgtgataccagagctggagaaagagctttcccggaggcccaagaaggtctgcatcgtgaaggtggtggggacacggaacctgtggaagaacattgtggtcctgtgtgtgaactcgctgacggggtacgggatccaccactgctttgccaggagcatgatgggccacgaggtgaaggtgccgctcctggagaacttctatgctgactactataccacggccagcatcgcgctggtgtcctgcctggccatgtgcgtggtggtccgattcctcgggcgcaggggagggctgctgctcttcatgatcctcaccgccctggcctcactcctgcagctcggcctcctcaacctgattggaaagtacagccagcacccagactcagggatgagtgacagcgtcaaggacaaattttccatcgcgttttccatcgtgggcatgtttgcctcccatgcggtggggagcctcagcgtgttcttctgtgcggagatcaccccgacggtgataaggtgtggcgggctggggctggtgctggccagcgcgggcttcggcatgctgacggcacccatcatcgagctgcacaaccagaaaggctacttcctgcaccacatcatctttgcctgctgcacgctcatctgcatcatctgcatcctcctgctgcccgagagcagggaccagaacctgcctgagaacatttctaacggggagcactacacgcgccagccgctgctgccgcacaagaagggggagcagccactgctgctcaccaacgccgagctcaaggactactcgggcctccacgatgccgcagccgcgggtgacacactgcccgagggtgccacggccaacggcatgaaggccatgtagcccggcctgcggaacccggggctccagggtctggggcagcttgggcacaggtttacagaccagggaccgaacacgcagccaggggtgggaaagctgcctcagccaagctgagcctctcaactggtgtggggaaatcctgtctttccaaaagtccaaggagcgcgggtcggaggagacaaactctttggaaataaccctttcaagactttcttttctgccgttaaatgtgtgtatttattttggtcatttttacgagaagcactttattccctctccctctcactgatcacaaatggaatcacctccctgggcagcgagacgcagttgctctgggaagatgccacagtgaccagggccatggccggtccctctggggagatgggacacggctcctggcagcacccaggagccccccaggctgcctgcctgcgtgcagaggcaggagaggaccgtggagcgtttccgggactgcattttagacggagtgaaatgtacatgaatttggcttttgctagagtctgtgtatggttttttaaggtcctttttccctttctgtttgtaaggtaagagcttctgttcgtgtgcagggaaagcagctcacagacgccgttaaaaccagcttcatctttccttcaggatcatccttttgtacttgatgctggaagctcttggagaaaaagcttaaacatttcaccagaaatcttaattgagcagcagtcatatcgccacagctttgtgagtacacagctaacagatgcgtcgagacctgagatgtgctcgtttttattcctcctctcccagattggctccagcagaaaagtccctcgtgcacaggcagctcttgtgccggcactacttgaaaacatggctactttctaagctacaaaccattagaaaataactcaaaaagatggcagaggcaaatccacagaaggggggctgccctccacacacacacgcccgtcacccacaccttgagcacacaccatgaagatcaccagcttggatggccgtcacctcagacatcactccagggagcacccgcaggagctgggccccctcacgcctgccttcctgggccagcttcctgcttgcagtcactcgcatagcacagaggtggggcttcgggcagggagcggagattcctcataggtgagtccaaatgacctccagcctctcgaaggcatcaagacaaattgaaagaaagcaataactcaccaaagctcaacgctgcccctgcctcgacctccatgggtctcttcgtgttcctcgtttcaccccagaaagtggaggtttcctcttggcattttcggaggaaacttgtaggacacccaaggcgactaagagacagcctccttggcaagggcaggcaccactttgtagcaacttgggcaccagcttttctggacagcctggcttcttactggcattgtccaactcatcccttctcgaagcatgtctttgccatgggctgtgtccttccagggaaattgtggtctcgggcctgggtgagacaatgaagtgacttccaaccgacagttgctagaattcacagggcagaaaaggggttgaccttctccccttctggctttccacccggcctgctgcttgctgtcgccactcatgtctcctccacatgcggtccacacatcagtaagggcctggagatgtgtaaagacacagcaaggggcaagcagactcttggccacgtgtttccagtggctggaccacgccgacacctgggatcttgagatacccaggaagggaggctgtctggccagcctctccctgcctccacttgctccacgtccagctcctcaccttccctcttttttaaagtcacatttccatgtttcaacattagtttgcattcacctttacaaaggcctttctttagatctgtgcagcctttgcgtgccaaacttgtgaaattccttttaccttttttggagtacttgctataaagccacctgtcaacaaacccccattatgtacagaataggacctatccagtagccaggccagtaggcagttggggaaggtgggaaggatccagcgaggcccctgagcctgcacctggacaggtgtacgtctgcacccatcaccctcagcaccaggccaccctgcagtccacttactgtactgtgttgtggaaggatatgctaagtgatgaaagttgcgagcagtctcactggtcgtgtaaacttttttttttttttggaaattgaagctgtagagtgctgcccgaaatctctaggaagttggtggcaagggacagcactcacactcttctggtcatgatctctgatctccacctcaaatgacaataaaaaactggtccaacgaagacactgctcagcacttcagccatcaggactaatccatcgatgactggaaaagaggctagctttgaggaaaacagcctgggctcttgggagcagagtccagtgggtgtgaggctgacttgccgacggtcggcaggtaatggctctcagccggcgaggcggtcccacagctctcctcccagggcagcctgaggaggaggaggccgggtgcctgtttggtggcagcttcagcctagggatacctgaagctgttgagcaacacctttatgaaatgttgccagagcagcaacacttccctgtgggcacagccccgggaaatccggtaccaagtgagcaaggtggcaggacccacccaagcctgatacgcatctgggcccgccgggctcagcaggggaggctgctacggctgcccacttcccagcaccgtctgtcacgcttgaacccctctgtgctgttcccttcctggctaatagggagacccttcgcaggcacccactgtttcaacttgaccctcccaccccctgctactctcctccacacacccctccgttccgctagcctaccctgtcagcctttcaataaaagttatgcacaaatgtgaacacctgagatggagctgaacatttcttcactttgttctttttctgaagtcaaactcttatcaaatgccctaaaattattaccacccaagagaaacaggaaaaaggttacatgtttttgtttactgagagtaagatcacctgcatctggaagacgggctggtaaattggtttggctacagaacagaaagaaaacaaaaacaaacctcgtaagggaagtatcacactcagacaccaccgcttcctagagccaaatgagcaatcccaaactgcaagtgccataagtgggcctgtgaggtcacaccgcccggcccgaggtatcgcatgtgcgggggaggtccacactacagctgtcctctcgtctagaaggcaccacctcgctttcatgtcccgtgtgttttggaaaagcagtatggtgtgtcatgtctagcggcgaacacttccctccctgtccttgaggttgtaatataaaaactgtgtttctgtacgtgtgggtgggaattctctgacggtgctcgttcatagcacaagcttacgctgagttctgaactgtcgttcacagctgcgtgtctgcatggtgtcgcatctgttgtacctttggggaaaatttgtatgtaaatgtacagaaataaaaacgttgccccattaacaga

SEQ ID NO: 183273 - DNA, 6641 bp, Homo sapiens
  Payload ID: 16107
  Gene Symbol: SLC22A23
  Gene Name: solute carrier family 22, member 23
  ENST ID: ENST00000436008
  CDS Start-End: 464-2548
ggaggcgcccgaagtcggagaaatacagcgcggccaccccgggagcagcagcctttgcccgcaccgccgcccgcagggccctgaaccgccggcaagggcgcgggccgggcgcggcgccggctcctcctcctgccgcgtccggcgcggagcagcggagagcggcgggctcggcagccggcgcccgggccgcggaactgatgagccgcggcggctgagggcccggccggcctctgcccgcctctgcccggcgcccgagcggggccgcagcgcccggggcgcggggtccggcgggtgacatgggggcggcctgacgcacccggagccgccgagcgctctctctcgagccgcgggccctcctcggcggcagcggctgcaggcgcctggcccggcgcgctgtgcccggggcgcccgcggagcctccgccgcgctctatgcgcctctgcgggagccgcgggcccgggccatggccatagaccggcggcgcgaggcggcgggcggcgggcctgggcggcagccggccccggccgaggagaacggctccctgccgcccggggacgcggcggcctcggcgcccctcgggggacgcgcgggccccggcggcggcgcggagatccagccgctgcccccactgcatcctggaggcggcccgcacccgagctgctgctccgcggctgcggccccgagcctcttgttgctggactatgacgggtcggtgctgcccttcctcgggggcctgggcgggggctatcagaagaccctcgtgctgctcacctggatcccggcgctgttcatcggcttcagccagttctcggactcgttcctcctggaccagcccaacttctggtgccgcggggccggcaaaggcaccgagctggcaggggtcaccaccacaggccggggcggggacatgggcaactggaccagcctccccaccacccccttcgccactgccccctgggaggctgcgggcaaccggagcaacagcagcggcgcggacggaggcgacacaccacccctgccatcccctccggacaagggggacaacgcctccaactgtgactgccgcgcatgggactacggcatccgcgccggcctcgtccagaacgtggtcagcaagtgggatcttgtgtgtgataatgcctggaaggtccatatcgctaagttctccttactggttggattaatctttggctacctaataactggatgcattgctgactgggtcggccggcggcctgtgctgctgttttccatcatcttcattctgatctttggactgactgtggcactgtcagtgaatgtgacaatgttcagcacactcaggttctttgaaggattttgcctggctggaatcattctcaccttgtatgctttacgaatagagctgtgcccccctggaaaacggttcatgattacgatggtggcgagcttcgtggccatggcgggccagttcctcatgcctgggctagccgccctgtgccgggattggcaggtgctgcaggccctcatcatctgccccttcctgctcatgctgctctactggtcgatattccccgagtccctccggtggctaatggccacccagcagtttgagtctgcaaagaggctgatcctccacttcacacagaagaatcgcatgaaccctgagggcgacatcaagggtgtgataccagagctggagaaagagctttcccggaggcccaagaaggtctgcatcgtgaaggtggtggggacacggaacctgtggaagaacattgtggtcctgtgtgtgaactcgctgacggggtacgggatccaccactgctttgccaggagcatgatgggccacgaggtgaaggtgccgctcctggagaacttctatgctgactactataccacggccagcatcgcgctggtgtcctgcctggccatgtgcgtggtggtccgattcctcgggcgcaggggagggctgctgctcttcatgatcctcaccgccctggcctcactcctgcagctcggcctcctcaacctgattggaaagtacagccagcacccagactcagaactgcagctgaagttggccgtagggatgagtgacagcgtcaaggacaaattttccatcgcgttttccatcgtgggcatgtttgcctcccatgcggtggggagcctcagcgtgttcttctgtgcggagatcaccccgacggtgataaggtgtggcgggctggggctggtgctggccagcgcgggcttcggcatgctgacggcacccatcatcgagctgcacaaccagaaaggctacttcctgcaccacatcatctttgcctgctgcacgctcatctgcatcatctgcatcctcctgctgcccgagagcagggaccagaacctgcctgagaacatttctaacggggagcactacacgcgccagccgctgctgccgcacaagaagggggagcagccactgctgctcaccaacgccgagctcaaggactactcgggcctccacgatgccgcagccgcgggtgacacactgcccgagggtgccacggccaacggcatgaaggccatgtagcccggcctgcggaacccggggctccagggtctggggcagcttgggcacaggtttacagaccagggaccgaacacgcagccaggggtgggaaagctgcctcagccaagctgagcctctcaactggtgtggggaaatcctgtctttccaaaagtccaaggagcgcgggtcggaggagacaaactctttggaaataaccctttcaagactttcttttctgccgttaaatgtgtgtatttattttggtcatttttacgagaagcactttattccctctccctctcactgatcacaaatggaatcacctccctgggcagcgagacgcagttgctctgggaagatgccacagtgaccagggccatggccggtccctctggggagatgggacacggctcctggcagcacccaggagccccccaggctgcctgcctgcgtgcagaggcaggagaggaccgtggagcgtttccgggactgcattttagacggagtgaaatgtacatgaatttggcttttgctagagtctgtgtatggttttttaaggtcctttttccctttctgtttgtaaggtaagagcttctgttcgtgtgcagggaaagcagctcacagacgccgttaaaaccagcttcatctttccttcaggatcatccttttgtacttgatgctggaagctcttggagaaaaagcttaaacatttcaccagaaatcttaattgagcagcagtcatatcgccacagctttgtgagtacacagctaacagatgcgtcgagacctgagatgtgctcgtttttattcctcctctcccagattggctccagcagaaaagtccctcgtgcacaggcagctcttgtgccggcactacttgaaaacatggctactttctaagctacaaaccattagaaaataactcaaaaagatggcagaggcaaatccacagaaggggggctgccctccacacacacacgcccgtcacccacaccttgagcacacaccatgaagatcaccagcttggatggccgtcacctcagacatcactccagggagcacccgcaggagctgggccccctcacgcctgccttcctgggccagcttcctgcttgcagtcactcgcatagcacagaggtggggcttcgggcagggagcggagattcctcataggtgagtccaaatgacctccagcctctcgaaggcatcaagacaaattgaaagaaagcaataactcaccaaagctcaacgctgcccctgcctcgacctccatgggtctcttcgtgttcctcgtttcaccccagaaagtggaggtttcctcttggcattttcggaggaaacttgtaggacacccaaggcgactaagagacagcctccttggcaagggcaggcaccactttgtagcaacttgggcaccagcttttctggacagcctggcttcttactggcattgtccaactcatcccttctcgaagcatgtctttgccatgggctgtgtccttccagggaaattgtggtctcgggcctgggtgagacaatgaagtgacttccaaccgacagttgctagaattcacagggcagaaaaggggttgaccttctccccttctggctttccacccggcctgctgcttgctgtcgccactcatgtctcctccacatgcggtccacacatcagtaagggcctggagatgtgtaaagacacagcaaggggcaagcagactcttggccacgtgtttccagtggctggaccacgccgacacctgggatcttgagatacccaggaagggaggctgtctggccagcctctccctgcctccacttgctccacgtccagctcctcaccttccctcttttttaaagtcacatttccatgtttcaacattagtttgcattcacctttacaaaggcctttctttagatctgtgcagcctttgcgtgccaaacttgtgaaattccttttaccttttttggagtacttgctataaagccacctgtcaacaaacccccattatgtacagaataggacctatccagtagccaggccagtaggcagttggggaaggtgggaaggatccagcgaggcccctgagcctgcacctggacaggtgtacgtctgcacccatcaccctcagcaccaggccaccctgcagtccacttactgtactgtgttgtggaaggatatgctaagtgatgaaagttgcgagcagtctcactggtcgtgtaaacttttttttttttttggaaattgaagctgtagagtgctgcccgaaatctctaggaagttggtggcaagggacagcactcacactcttctggtcatgatctctgatctccacctcaaatgacaataaaaaactggtccaacgaagacactgctcagcacttcagccatcaggactaatccatcgatgactggaaaagaggctagctttgaggaaaacagcctgggctcttgggagcagagtccagtgggtgtgaggctgacttgccgacggtcggcaggtaatggctctcagccggcgaggcggtcccacagctctcctcccagggcagcctgaggaggaggaggccgggtgcctgtttggtggcagcttcagcctagggatacctgaagctgttgagcaacacctttatgaaatgttgccagagcagcaacacttccctgtgggcacagccccgggaaatccggtaccaagtgagcaaggtggcaggacccacccaagcctgatacgcatctgggcccgccgggctcagcaggggaggctgctacggctgcccacttcccagcaccgtctgtcacgcttgaacccctctgtgctgttcccttcctggctaatagggagacccttcgcaggcacccactgtttcaacttgaccctcccaccccctgctactctcctccacacacccctccgttccgctagcctaccctgtcagcctttcaataaaagttatgcacaaatgtgaacacctgagatggagctgaacatttcttcactttgttctttttctgaagtcaaactcttatcaaatgccctaaaattattaccacccaagagaaacaggaaaaaggttacatgtttttgtttactgagagtaagatcacctgcatctggaagacgggctggtaaattggtttggctacagaacagaaagaaaacaaaaacaaacctcgtaagggaagtatcacactcagacaccaccgcttcctagagccaaatgagcaatcccaaactgcaagtgccataagtgggcctgtgaggtcacaccgcccggcccgaggtatcgcatgtgcgggggaggtccacactacagctgtcctctcgtctagaaggcaccacctcgctttcatgtcccgtgtgttttggaaaagcagtatggtgtgtcatgtctagcggcgaacacttccctccctgtccttgaggttgtaatataaaaactgtgtttctgtacgtgtgggtgggaattctctgacggtgctcgttcatagcacaagcttacgctgagttctgaactgtcgttcacagctgcgtgtctgcatggtgtcgcatctgttgtacctttggggaaaatttgtatgtaaatgtacagaaataaaaacgttgccccattaacagatttcctctggaatgtcttccctacctcacctgatggtatccaccgaagggcatttcactaccattaatggtgagtaataaaatcctccgtgttcattcagacctcactgcgtcactactttgaacgcctctgtaagctgtgtcttcactcgccccgaggtgggtggagggaggcctctcactctgcttcgagtcctggtcttaaaggtagtcagaggcagaggctggattaaacacacactgtttaccaagtgccactctcagaccacctgagagacgggggccatcagtaaaattaagaggaatttttttcccttgttcgtgtatgttctgctgatccgtggcctgaaggttcctagagacgtcaagaaatgaatatcttacactgtgattctgtgaggaaagactggtaacccaaaactctcttctctaatgtattttttaacgaaaatgacaatatttctttaataaagtatttataccaaactcttctctcc

SEQ ID NO: 183274 - DNA, 2555 bp, Homo sapiens
  Payload ID: 16107
  Gene Symbol: SLC22A23
  Gene Name: solute carrier family 22, member 23
  ENST ID: ENST00000497691
  CDS Start-End: 341-619
cttggtggggtgaggacgaccgggatgagtcgtctgagaagcactttgaggggggaggagctgaaggccacacctggaagggcgatttattccttgggcgctgccaggtgtctgccgccttcacccagaaaccgatgatgttcggagccagtgggatcttgtgtgtgataatgcctggaaggtccatatcgctaagttctccttactggttggattaatctttggctacctaataactggatgcattgctgactgggtcggccggcggcctgtgctgctgttttccatcatcttcattctgatctttggactgactgtggcactgtcagtgaatgtgacaatgttcagcacactcaggttctttgaaggattttgcctggctggaatcattctcaccttgtatgctttacgaatagagctgtgcccccctggaaaacggttcatgattacgatggtggcgagcttcgtggccatggcgggccagttcctcatgcctgggctagccgccctgtgccgggattggcaggtgctgcaggccctcatcatctgccccttcctgctcatgctgctctactggtcgtattacctgtggctgctttctggctattcacagagttgagtggatgcagcaggatattccccgagtccctccggtggctaatggccacccagcagtttgagtctgcaaagaggctgatcctccacttcacacagaagaatcgcatgaaccctgagggcgacatcaagggtgtgataccagagctggagaaagagctttcccggaggcccaagaaggtctgcatcgtgaaggtggtggggacacggaacctgtggaagaacattgtggtcctgtgtgtgaactcgctgacggggtacgggatccaccactgctttgccaggagcatgatgggccacgaggtgaaggtgccgctcctggagaacttctatgctgactactataccacggccagcatcgcgctggtgtcctgcctggccatgtgcgtggtggtccgattcctcgggcgcaggggagggctgctgctcttcatgatcctcaccgccctggcctcactcctgcagctcggcctcctcaacctgattggaaagtacagccagcacccagactcagggatgagtgacagcgtcaaggacaaattttccatcgcgttttccatcgtgggcatgtttgcctcccatgcggtggggagcctcagcgtgttcttctgtgcggagatcaccccgacggtgataaggtgtggcgggctggggctggtgctggccagcgcgggcttcggcatgctgacggcacccatcatcgagctgcacaaccagaaaggctacttcctgcaccacatcatctttgcctgctgcacgctcatctgcatcatctgcatcctcctgctgcccgagagcagggaccagaacctgcctgagaacatttctaacggggagcactacacgcgccagccgctgctgccgcacaagaagggggagcagccactgctgctcaccaacgccgagctcaaggactactcgggcctccacgatgccgcagccgcgggtgacacactgcccgagggtgccacggccaacggcatgaaggccatgtagcccggcctgcggaacccggggctccagggtctggggcagcttgggcacaggtttacagaccagggaccgaacacgcagccaggggtgggaaagctgcctcagccaagctgagcctctcaactggtgtggggaaatcctgtctttccaaaagtccaaggagcgcgggtcggaggagacaaactctttggaaataaccctttcaagactttcttttctgccgttaaatgtaagagcttctgttcgtgtgcagggaaagcagctcacagacgccgttaaaaccagcttcatctttccttcaggatcatccttttgtacttgatgctggaagctcttggagaaaaagcttaaacatttcaccagaaatcttaattgagcagcagtcatatcgccacagctttgtgagtacacagctaacagatgcgtcgagacctgagatgtgctcgtttttattcctcctctcccagattggctccagcagaaaagtccctcgtgcacaggcagctcttgtgccggcactacttgaaaacatggctactttctaagctacaaaccattagaaaataactcaaaaagatggcagaggcaaatccacagaaggggggctgccctccacacacacacgcccgtcacccacaccttgagcacacaccatgaagatcaccagcttggatggccgtcacctcagacatcactccagggagcacccgcaggagctgggccccctcacgcctgccttcctgggccagcttcctgcttgcagtcactcgcatagcacagaggtggggcttcgggcagggagcggagattcctcataggtgagtccaaatgacctccagcctctcgaaggcatcaagacaaattgaaagaaagcaataactcaccaaagctcaacgctgcccctgcctcgacctccatgggtctcttcgtgttcctcgtttcacccc

SEQ ID NO: 183275 - DNA, 1574 bp, Homo sapiens
  Payload ID: 16107
  Gene Symbol: SLC22A23
  Gene Name: solute carrier family 22, member 23
  ENST ID: ENST00000485307
  CDS Start-End: 1-1323
aacagcagcggcgcggacggaggcgacacaccacccctgccatcccctccggacaagggggacaacgcctccaactgtgactgccgcgcatgggactacggcatccgcgccggcctcgtccagaacgtggtcagcaagtgggatcttgtgtgtgataatgcctggaaggtccatatcgctaagttctccttactggttggattaatctttggctacctaataactggatgcattgctgactgggtcggccggcggcctgtgctgctgttttccatcatcttcattctgatctttggactgactgtggcactgtcagtgaatgtgacaatgttcagcacactcaggttctttgaaggattttgcctggctggaatcattctcaccttgtatgctttacgaatagagctgtgcccccctggaaaacggttcatgattacgatggtggcgagcttcgtggccatggcgggccagttcctcatgcctgggctagccgccctgtgccgggattggcaggtgctgcaggccctcatcatctgccccttcctgctcatgctgctctactggtcgatattccccgagtccctccggtggctaatggccacccagcagtttgagtctgcaaagaggctgatcctccacttcacacagaagaatcgcatgaaccctgagggcgacatcaagggtgtgataccagagctggagaaagagctttcccggaggcccaagaaggtctgcatcgtgaaggtggtggggacacggaacctgtggaagaacattgtggtcctgtgtgtgaactcgctgacggggtacgggatccaccactgctttgccaggagcatgatgggccacgaggtgaaggtgccgctcctggagaacttctatgctgactactataccacggccagcatcgcgctggtgtcctgcctggccatgtgcgtggtggtccgattcctcgggcgcaggggagggctgctgctcttcatgatcctcaccgccctggcctcactcctgcagctcggcctcctcaacctgattggaaagtacagccagcacccagactcagggatgagtgacagcgtcaaggacaaattttccatcgcgttttccatcgtgggcatgtttgcctcccatgcggtggggagcctcagcgtgttcttctgtgcggagatcaccccgacggtgataaggtgcgtcatgggagacaccccaggggacgccggcttctcggaaatcaaagacgagtccctggctccaggctggtgtgggattaaccagcgtcagctctgtctctggctctggacacatcagcttcgtggttcatagctgaggtggctgttggacccaaccccgaggcgcccaagaggcagtgagaacctggccctggggtcctgtccaggcagcagcaggaggaagggggaacagggagctactctgggcccaggaaatatgtcagtgtctgagcgtctggcaagggggggagtgcagcggatcacttatgccgcacttccaccagaacctgtgctgccaactctgctaagagacctcacggcacagctagtgcaaaatgtttcaca

SEQ ID NO: 183276 - DNA, 1221 bp, Homo sapiens
  Payload ID: 16107
  Gene Symbol: SLC22A23
  Gene Name: solute carrier family 22, member 23
  ENST ID: ENST00000467177
  CDS Start-End: 63-1221
atcttcgtccagggccgcagtggctccggtgcacttagagtcaccctggggaactttcagaaatgcctgtaggaccccagcatccatcgtttaaaagaagttctctggacactttccacgggtgttgtcagcagcaggaaactggagctctcccgtgggacacagacaccaagcgctggaggccggagctgaactgggatcttgtgtgtgataatgcctggaaggtccatatcgctaagttctccttactggttggattaatctttggctacctaataactggatgcattgctgactgggtcggccggcggcctgtgctgctgttttccatcatcttcattctgatctttggactgactgtggcactgtcagtgaatgtgacaatgttcagcacactcaggttctttgaaggattttgcctggctggaatcattctcaccttgtatgctttacgaatagagctgtgcccccctggaaaacggttcatgattacgatggtggcgagcttcgtggccatggcgggccagttcctcatgcctgggctagccgccctgtgccgggattggcaggtgctgcaggccctcatcatctgccccttcctgctcatgctgctctactggtcgatattccccgagtccctccggtggctaatggccacccagcagtttgagtctgcaaagaggctgatcctccacttcacacagaagaatcgcatgaaccctgagggcgacatcaagggtgtgataccagagctggagaaagagctttcccggaggcccaagaaggtctgcatcgtgaaggtggtggggacacggaacctgtggaagaacattgtggtcctgtgtgtgaactcgctgacggggtacgggatccaccactgctttgccaggagcatgatgggccacgaggtgaaggtgccgctcctggagaacttctatgctgactactataccacggccagcatcgcgctggtgtcctgcctggccatgtgcgtggtggtccgattcctcgggcgcaggggagggctgctgctcttcatgatcctcaccgccctggcctcactcctgcagctcggcctcctcaacctgattggaaagtacagccagcacccagactcagggatgagtgacagcgtcaaggacaaattttccatcgcgttttccatcgtgggcatgtttgcctcccatgcggtggggagcctcagcgtgttcttctgtgcgg

SEQ ID NO: 183277 - DNA, 2043 bp, Homo sapiens
  Payload ID: 16107
  Gene Symbol: SLC22A23
  Gene Name: solute carrier family 22, member 23
  Uniprot ID: A1A5C7
  ENST ID: ENST00000490273
  CDS Start-End: 601-1818
gccttccttcctccccttggtggggtgaggacgaccgggatgagtcgtctgagaagcactttgaggggggaggagctgaaggccacacctggaagggcgatttattccttgggcgctgccaggtgtctgccgccttcacccagaaaccgatgatgttcggagccaggcttcttcaaagtctcacagccagcctaccctcaaagcctgagtgattgtggaaggagccagcgttcactcagcagaggaacagagctttcctgccgcaggctctcagtgaagatccagggagcagaggcgtgggcaaggagcactgggctcagatgcaggagaaccggtttgaaccctagcactaccgcctctacactgaggaaccttggggattactcagccccctggaacctaatttccaagtgggatcttgtgtgtgataatgcctggaaggtccatatcgctaagttctccttactggttggattaatctttggctacctaataactggatgcattgctgactgggtcggccggcggcctgtgctgctgttttccatcatcttcattctgatctttggactgactgtggcactgtcagtgaatgtgacaatgttcagcacactcaggttctttgaaggattttgcctggctggaatcattctcaccttgtatgctttacgaatagagctgtgcccccctggaaaacggttcatgattacgatggtggcgagcttcgtggccatggcgggccagttcctcatgcctgggctagccgccctgtgccgggattggcaggtgctgcaggccctcatcatctgccccttcctgctcatgctgctctactggtcgatattccccgagtccctccggtggctaatggccacccagcagtttgagtctgcaaagaggctgatcctccacttcacacagaagaatcgcatgaaccctgagggcgacatcaagggtgtgataccagagctggagaaagagctttcccggaggcccaagaaggtctgcatcgtgaaggtggtggggacacggaacctgtggaagaacattgtggtcctgtgtgtgaactcgctgacggggtacgggatccaccactgctttgccaggagcatgatgggccacgaggtgaaggtgccgctcctggagaacttctatgctgactactataccacggccagcatcgcgctggtgtcctgcctggccatgtgcgtggtggtccgattcctcgggcgcaggggagggctgctgctcttcatgatcctcaccgccctggcctcactcctgcagctcggcctcctcaacctgattggaaagtacagccagcacccagactcagggatgagtgacagcgtcaaggacaaattttccatcgcgttttccatcgtgggcatgtttgcctcccatgcggtggggagcctcagcgtgttcttctgtgcggagatcaccccgacggtgataaggtgtggcgggctggggctggtgctggccagcgcgggcttcggcatgctgacggcacccatcatcgagctgcacaaccagaaaggctacttcctgcaccacatcatctttgcctgctgcacgctcatctgcatcatctgcatcctcctgctgcccgagagcagggaccagaacctgcctgagaacatttctaacggggagcactacacgcgccagccgctgctgccgcacaagaagggggagcagccactgctgctcaccaacgccgagctcaaggactactcgggcctccacgatgccgcagccgcgggtgacacactgcccgagggtgccacggccaacggcatgaaggccatgtagcccggcctgcggaacccggggctccagggtctggggcagcttgggcacaggtttacagaccagggaccgaacacgcagccaggggtgggaaagctgcctcagccaagctgagcctctcaactggtgtggggaaatcctgtctttccaaaagtccaaggagcgcgggtcggaggagacaaactctttggaaataaccctttcaagactttcttttctgccgttaaa

SEQ ID NO: 183278 - DNA, 1663 bp, Homo sapiens
  Payload ID: 16108
  Gene Symbol: SLC22A24
  Gene Name: solute carrier family 22, member 24
  Uniprot ID: Q8N4F4
  ENST ID: ENST00000326192
  CDS Start-End: 443-1411
gcaattcactttggattttctaatatcccatttctaagaagaatggcagactattgaacaggtgtattttaggtcacgtggggactgcatccacctgaaaatccaccgttgacttatcaggaaactcagagatcaggatctttcacagagtagtcttttaagaagattcagttgtcaacagctagcagtctctttgccaaataattatatctgtgacttctgaaactatttggctgcctaaagttaaaggacttggggaaagtccttccactgctcttctgcagtagtgtcacaccactcagtgcagggcccaccaagaagaaagcagtgtcaggatccacatggcactatggtaactttgtgaaaggggacattttctccctctgaacttctcttcataaagtcattgtgcttcctcttggggatcacctgttcagtctcaatgggctttgatgtgctcctggatcaagtgggtggcatggggagattccagatttgtctgatagctttcttttgcatcaccaacatcctactgttccctaatattgtgttggagaacttcactgcattcacccctagtcatcgctgctgggtccccctcctggacaatgacactgtgtctgacaatgataccgggaccctcagcaaggatgacctcctgagaatctccatcccactggactcaaacctgaggccacagaagtgtcagcgctttatccatccccagtggcagctccttcacctgaacgggaccttccccaacacaaatgagccagacacggagccctgtgtggatggctgggtgtacgacagaagctctttcctctccaccatcgtgactgagtgggacctggtatgtgaatctcagtcactaaaatcaatggttcaatccctatttatggctgggtcacttctgggaggtctaatatatggccatctttcagacagggttggacggaagatcatatgcaaattgtgtttcctccagctggccatctctaacacctgtgcggccttcgctcccaccttccttgtttactgcatactgcgcttcttggcagggttctccaccatgactattttgggaaacacttttattctcagcttagagtggacattgccccggtcacgatctatgacaataatggtgctattatgttcctacagtgttgggcagatgctcctaggagggctggcttttgccattcaggactggcacatattgcaactgactgtgtctacacccataattgtcctcttcttgtcctcttggtatgaacaatctccacattctttgcctgtaagcgaggctatggtagacatagaaaggaaaattctgacacctgggatctgttcggtctctggcctagtcctgagccatgatgtccatagtacctattgtgtcacctgagaagcaaacaatggaataggatgacactatatgtggggaggctggcactttgcattcattattttagacatggaattatcatgaaattatttttcttaatagaaaaaatacccacttatttttgaagcaaatgtattatttatctaacttttggaatattatgtgatggagataatttgggggcttttgtcattgtaactgagattgaatataaggaaaacacaataaatttatctacataactatttaaaa

SEQ ID NO: 183279 - DNA, 2098 bp, Homo sapiens
  Payload ID: 16108
  Gene Symbol: SLC22A24
  Gene Name: solute carrier family 22, member 24
  ENST ID: ENST00000417740
  CDS Start-End: 443-2098
gcaattcactttggattttctaatatcccatttctaagaagaatggcagactattgaacaggtgtattttaggtcacgtggggactgcatccacctgaaaatccaccgttgacttatcaggaaactcagagatcaggatctttcacagagtagtcttttaagaagattcagttgtcaacagctagcagtctctttgccaaataattatatctgtgacttctgaaactatttggctgcctaaagttaaaggacttggggaaagtccttccactgctcttctgcagtagtgtcacaccactcagtgcagggcccaccaagaagaaagcagtgtcaggatccacatggcactatggtaactttgtgaaaggggacattttctccctctgaacttctcttcataaagtcattgtgcttcctcttggggatcacctgttcagtctcaatgggctttgatgtgctcctggatcaagtgggtggcatggggagattccagatttgtctgatagctttcttttgcatcaccaacatcctactgttccctaatattgtgttggagaacttcactgcattcacccctagtcatcgctgctgggtccccctcctggacaatgacactgtgtctgacaatgataccgggaccctcagcaaggatgacctcctgagaatctccatcccactggactcaaacctgaggccacagaagtgtcagcgctttatccatccccagtggcagctccttcacctgaacgggaccttccccaacacaaatgagccagacacggagccctgtgtggatggctgggtgtacgacagaagctctttcctctccaccatcgtgactgagtgggacctggtatgtgaatctcagtcactaaaatcaatggttcaatccctatttatggctgggtcacttctgggaggtctaatatatggccatctttcagacagggttggacggaagatcatatgcaaattgtgtttcctccagctggccatctctaacacctgtgcggccttcgctcccaccttccttgtttactgcatactgcgcttcttggcagggttctccaccatgactattttgggaaacacttttattctcagcttagagtggacattgccccggtcacgatctatgacaataatggtgctattatgttcctacagtgttgggcagatgctcctaggagggctggcttttgccattcaggactggcacatattgcaactgactgtgtctacacccataattgtcctcttcttgtcctcttggaagatggtggagtctgctcggtggctgattatcaacaatcagctagatgagggcttaaaggagcttagaagagttgcacacataaatggaaaaaagaatactgaagagacactgaccactgagcttgtgagatccaccatgaagaaggagttggatgcagtccgaattaaaacatccattttttccctgttccgtgcacccaaattgcgaatgagagtcttcggcctgtgctttgtgagattcgcaatcactgtacccttttatggcctgatactcaacttgcagcacttagggagcaatgtctccctgttccagattctctgtggagctgtcacattcacagccagatgtgtttcccttttgacactgaatcatatgggtcgtcgaataagccagatattgttcacgttcccggtgggacttttcattctggtcaacacctttttgccccaagaaatgcagatcctgcgtgtggttttagcaactttgggaattggtagtgtttctgctgctagcaacagtgcttctgtccaccacaacgagctcgtccccaccatattgaggtcaacagttgcaggaatcaatgcagtgtccggtaggactggggcagcactggctcctctgttgatgaccttaatggcgtattctccccacctaccctggatttcctatggagtcttccccatccttgctgtccctgttatcctcctccttccagaaaccagggatctacctcttcctaacaccatccaggatgtggaaaatgaaaaagattcaagaaacataaagcaggaagatacttgcatgaaagtaacacagttttaa

SEQ ID NO: 183280 - DNA, 2101 bp, Homo sapiens
  Payload ID: 16108
  Gene Symbol: SLC22A24
  Gene Name: solute carrier family 22, member 24
  ENST ID: ENST00000612278
  CDS Start-End: 443-2101
gcaattcactttggattttctaatatcccatttctaagaagaatggcagactattgaacaggtgtattttaggtcacgtggggactgcatccacctgaaaatccaccgttgacttatcaggaaactcagagatcaggatctttcacagagtagtcttttaagaagattcagttgtcaacagctagcagtctctttgccaaataattatatctgtgacttctgaaactatttggctgcctaaagttaaaggacttggggaaagtccttccactgctcttctgcagtagtgtcacaccactcagtgcagggcccaccaagaagaaagcagtgtcaggatccacatggcactatggtaactttgtgaaaggggacattttctccctctgaacttctcttcataaagtcattgtgcttcctcttggggatcacctgttcagtctcaatgggctttgatgtgctcctggatcaagtgggtggcatggggagattccagatttgtctgatagctttcttttgcatcaccaacatcctactgttccctaatattgtgttggagaacttcactgcattcacccctagtcatcgctgctgggtccccctcctggacaatgacactgtgtctgacaatgataccgggaccctcagcaaggatgacctcctgagaatctccatcccactggactcaaacctgaggccacagaagtgtcagcgctttatccatccccagtggcagctccttcacctgaacgggaccttccccaacacaaatgagccagacacggagccctgtgtggatggctgggtgtacgacagaagctctttcctctccaccatcgtgactgagtgggacctggtatgtgaatctcagtcactaaaatcaatggttcaatccctatttatggctgggtcacttctgggaggtctaatatatggccatctttcagacagggttggacggaagatcatatgcaaattgtgtttcctccagctggccatctctaacacctgtgcggccttcgctcccaccttccttgtttactgcatactgcgcttcttggcagggttctccaccatgactattttgggaaacacttttattctcagcttagagtggacattgccccggtcacgatctatgacaataatggtgctattatgttcctacagtgttgggcagatgctcctaggagggctggcttttgccattcaggactggcacatattgcaactgactgtgtctacacccataattgtcctcttcttgtcctcttggaagatggtggagtctgctcggtggctgattatcaacaatcagctagatgagggcttaaaggagcttagaagagttgcacacataaatggaaaaaagaatactgaagagacactgaccactgagcttgtgagatccaccatgaagaaggagttggatgcagtccgaattaaaacatccattttttccctgttccgtgcacccaaattgcgaatgagagtcttcggcctgtgctttgtgagattcgcaatcactgtacccttttatggcctgatactcaacttgcagcacttagggagcaatgtctccctgttccagattctctgtggagctgtcacattcacagccagatgtgtttcccttttgacactgaatcatatgggtcgtcgaataagccagatattgttcacgttcccggtgggacttttcattctggtcaacacctttttgccccaagaaatgcagatcctgcgtgtggttttagcaactttgggaattggtagtgtttctgctgctagcaacagtgcttctgtccaccacaacgagctcgtccccaccatattgaggtcaacagttgcaggaatcaatgcagtgtccggtaggactggggcagcactggctcctctgttgatgaccttaatggcgtattctccccacctaccctggatttcctatggagtcttccccatccttgctgtccctgttatcctcctccttccagaaaccagggatctacctcttcctaacaccatccaggatgtggaaaatgacagaaaagattcaagaaacataaagcaggaagatacttgcatgaaagtaacacagttttaa

SEQ ID NO: 183281 - DNA, 1692 bp, Homo sapiens
  Payload ID: 16109
  Gene Symbol: SLC22A25
  Gene Name: solute carrier family 22, member 25
  Uniprot ID: Q6T423
  ENST ID: ENST00000306494
  CDS Start-End: 1-1644
atggcctttcaggacctcctagatcaagttggaggcctggggagattccagatccttcagatggttttccttataatgttcaacgtcatagtataccatcaaactcagctggagaacttcgcagcattcatacttgatcatcgctgctgggttcatatactggacaatgacactatccctgacaatgaccctgggaccctcagccaggatgccctcctgagaatctccatcccattcgactcaaatctgaggccagagaagtgtcgtcgctttgtccatccccagtggaagctcattcatctgaatgggaccttccccaacacgagtgagccagatacagagccctgtgtggatggctgggtatatgaccaaagctccttcccttccaccattgtgactaagtgggatctggtatgcgaatctcaaccactgaattcagtagctaaatttctattcatggctggaatgatggtgggaggcaacctatatggccatttgtcagacaggtttgggagaaagttcgtgctcagatggtcttacctccagctcgccattgtaggcacctgtgcggcctttgctcccaccatcctcgtatactgctccctgcgcttcttggctggggctgctacatttagcatcattgtaaatactgttttgttaattgtagagtggataactcaccaattctgtgccatggcattgacattgacactttgtgctgctagtattggacatataaccctgggaagcctggcttttgtcattcgagaccagtgcatcctccagttggtgatgtctgcaccatgctttgtcttctttctgttctcaaggtggctggcagagtctgctcggtggctcattatcaacaacaaaccagaagagggcttaaaggaacttagaaaagctgcacacaggaatggaatgaagaatgctgaagacatcctaaccatggaggttttgaaatccaccatgaagcaagaactggaggcagcacagaaaaagcattctctttgtgaattgctccgcatacccaacatatgtaaaagaatctgtttcctgtcctttgtgagatttgcaagtaccatccctttttggggccttactttgcacctccagcatctgggaaacaatgttttcctgttgcagactctctttggtgcagtcaccctcctggccaattgtgttgcaccttgggcactgaatcacatgagccgtcgactaagccagatgcttctcatgttcctactggcaacctgccttctggccatcatatttgtgcctcaagaaatgcagaccctgcgtgtggttttggcaaccctgggtgtgggagctgcttctcttggcattacctgttctactgcccaagaaaatgaactaattccttccataatcaggggaagagctactggaatcactggaaactttgctaatattgggggagccctggcttccctcatgatgatcctaagcatatattctcgacccctgccctggatcatctatggagtctttgccatcctctctggccttgttgtcctcctccttcctgaaaccaggaaccagcctcttcttgacagcatccaggatgtggaaaatgagggagtaaatagcctagctgcccctcagaggagctctgtgctataggtctgtgctgaggaaagcaaaacaccatttagggctaccatcccccaa

SEQ ID NO: 183282 - DNA, 3699 bp, Homo sapiens
  Payload ID: 16109
  Gene Symbol: SLC22A25
  Gene Name: solute carrier family 22, member 25
  ENST ID: ENST00000528239
  CDS Start-End: 1-607
ggcctttcaggacctcctagatcaagttggaggcctggggagattccagatccttcagatggttttccttataatgttcaacgtcatagtataccatcaaactcagctggagaacttcgcagcattcatacttgatcatcgctgctgggttcatatactggacaatgacactatccctgacaatgaccctgggaccctcagccaggatgccctcctgagaatctccatcccattcgactcaaatctgaggccagagaagtgtcgtcgctttgtccatccccagtggaagctcattcatctgaatgggaccttccccaacacgagtgagccagatacagagccctgtgtggatggctgggtatatgaccaaagctccttcccttccaccattgtgactaagtgggatctggtatgcgaatctcaaccactgaattcagtagctaaatttctattcatggctggaatgatggtgggaggcaacctatatggccatttgtcagacaggaaaccattatcatcgcccaaccatgtctccactgattgtgacgagggacttgaggtgcccattgccatccaccagcatcacgtcttctggtatctctcctgaaaccctgaatgaaaatggcctccatctgcatccatgttgctgcagaagacatgatttcattcttttttgtggctacatagtattccagtctaccattggtgggcattgaggttattccatgcctttgctactgtgaatagtgcttcaatgaacatgtttgggagaaagttcgtgctcagatggtcttacctccagctcgccattgtaggcacctgtgcggcctttgctcccaccatcctcgtatactgctccctgcgcttcttggctggggctgctacatttagcatcattgtaaatactgttttgttaattgtagagtggataactcaccaattctgtgccatggcattgacattgacactttgtgctgctagtattggacatataaccctgggaagcctggcttttgtcattcgagaccagtgcatcctccagttggtgatgtctgcaccatgctttgtcttctttctgttctcaaggtggctggcagagtctgctcggtggctcattatcaacaacaaaccagaagagggcttaaaggaacttagaaaagctgcacacaggaatggaatgaagaatgctgaagacatcctaaccatggaggttttgaaatccaccatgaagcaagaactggaggcagcacagaaaaagcattctctttgtgaattgctccgcatacccaacatatgtaaaagaatctgtttcctgtcctttgtgaggtctgctggagtttgctggaggtccactccagatcctgtttgcttgggtatcaccagcggaggttgcagaacagcaaagattcctgcctgctccttcctctggaagcttcattttagaggagcacctgcctgatgccagccagagctctcctgtatgaagtgtctgttgacccctgctgggaagtgtctcccagtcaggaggcacaggtgttagtgacccacttaaggaggcagtctatcccttagcagagctcaagcactgtgctgagagatccactgctctcttcagagctggcaagcaagaatgtttaagtccactgaagctgcacccacagccaccccttccccaaagtgctctgtcccaggtgatgggagttttatctataagcccttgactggggctgctgcctttctctcagagatgccctgcccagtgaggaggaatctagagaggcagtctggccacagttgctttgcagcactgcagtaagttccacacagtttgaacttcccaatggcttccttaacactgtgaggggaaaactgcctacacaagcctcagtaatggtggacattcctctcccaccaaggttgatcatcccagttcgacctcagactgatgtgctggcagtgagaatttcaagccagtggttcttagcttgctgggctccatgggagtgggacctgctgagcgagaccacttggctttctggcatcagccccttctccaggagagtgaatggttctgtctcactgaggttccaggtcccactgggggaaaaaaaaaaaactcctgcagctagctcagtgtctccccaaacagccacctagttttgcacttgaaacccagggccctggtagcattggcacacaagggaatctcctggtctgcgtgttgcaaaaactatgggaaaagcataatttctgggctggatagcacagtccctatggcttccttgggtaggtgaggaagttccctggccctttggacttcctgggtgaggtgatgccccaccctgcttcagcttaccctccgtgggctgcacccacccgctgtctaaccagtcccagtgagatgaaccgggtacctcagttggaaatgcagaaatcactcaccttccgcattgctctcgctgggagctgcagaccagagctcttcctattcggccatcttgccagctgtctctatcgactacctcttattccaaaaaataaaaccataatgaagttagacaccattaaatatacataatataaaaataggttttcttattctaatctagatttgctacacaagaccatctacagaatgaatgccatgaatatacaatctgtacccaataagttgtacattttagtaaacattcctgattgtaagggtggcaaatggaaattttggcttcttagatctttactgtgagtttgactgacatcagtacatttttatttttaattgtatattttcattactgtgaatttttttgcagtgatttttgatgccatgtggctacattggttttagaatactaataaaatccattgcttttaaaataaataaataaaccccatagcacatcctccatacaacatctgttgtccctcaagatacaattgttaccactatcatctaaccattattttatgataactttaaaatatcaacttgcaagaaaatattccacaaaacacactctgcctttttactttaaagagtccttggctacctgggccaatattattctcatttgtaggatttaggttccacagattataatatgtgcctttttctgtgttccctgcagatttgcaagtaccatccctttttggggccttactttgcacctccagcatctgggaaacaatgttttcctgttgcagactctctttggtgcagtcaccctcctggccaattgtgttgcaccttgggcactgaatcacatgagccgtcgactaagccagatgcttctcatgttcctactggcaacctgccttctggccatcatatttgtgcctcaagaaatgcagaccctgcgtgtggttttggcaaccctgggtgtgggagctgcttctcttggcattacctgttctactgcccaagaaaatgaactaattccttccataatcaggggaagagctactggaatcactggaaactttgctaatattgggggagccctggcttccctcatgatgatcctaagcatatattctcgacccctgccctggatcatctatggagtctttgccatcctctctggccttgttgtcctcctccttcctgaaaccaggaaccagcctcttcttgacagcatccaggatgtggaaaatgagggagtaaatagcctagctgcccctcagaggagctctgtgcta

SEQ ID NO: 183283 - DNA, 1788 bp, Homo sapiens
  Payload ID: 16109
  Gene Symbol: SLC22A25
  Gene Name: solute carrier family 22, member 25
  ENST ID: ENST00000527057
  CDS Start-End: 1-1198
ctttcaggacctcctagatcaagttggaggcctggggagattccagatccttcagatggttttccttataatgttcaacgtcatagtataccatcaaactcagctggagaacttcgcagcattcatacttgatcatcgctgctgggttcatatactggacaatgacactatccctgacaatgaccctgggaccctcagccaggatgccctcctgagaatctccatcccattcgactcaaatctgaggccagagaagtgtcgtcgctttgtccatccccagtggaagctcattcatctgaatgggaccttccccaacacgagtgagccagatacagagccctgtgtggatggctgggtatatgaccaaagctccttcccttccaccattgtgactaagtgggatctggtatgcgaatctcaaccactgaattcagtagctaaatttctattcatggctggaatgatggtgggaggcaacctatatggccatttgtcagacaggtttgggagaaagttcgtgctcagatggtcttacctccagctcgccattgtaggcacctgtgcggcctttgctcccaccatcctcgtatactgctccctgcgcttcttggctggggctgctacatttagcatcattgtaaatactgttttgttaattgtagagtggataactcaccaattctgtgccatggcattgacattgacactttgtgctgctagtattggacatataaccctgggaagcctggcttttgtcattcgagaccagtgcatcctccagttggtgatgtctgcaccatgctttgtcttctttctgttctcaaggtggctggcagagtctgctcggtggctcattatcaacaacaaaccagaagagggcttaaaggaacttagaaaagctgcacacaggaatggaatgaagaatgctgaagacatcctaaccatggaggttttgaaatccaccatgaagcaagaactggaggcagcacagaaaaagcattctctttgtgaattgctccgcatacccaacatatgtaaaagaatctgtttcctgtcctttgtgaggtctgctggagtttgctggaggtccactccagatcctgtttgcttgggtatcaccagcggaggttgcagaacagcaaagattcctgcctgctccttcctctggaagcttcattttagaggagcacctgcctgatgccagccagagctctcctatttgcaagtaccatccctttttggggccttactttgcacctccagcatctgggaaacaatgttttcctgttgcagactctctttggtgcagtcaccctcctggccaattgtgttgcaccttgggcactgaatcacatgagccgtcgactaagccagatgcttctcatgttcctactggcaacctgccttctggccatcatatttgtgcctcaagaaatgcagaccctgcgtgtggttttggcaaccctgggtgtgggagctgcttctcttggcattacctgttctactgcccaagaaaatgaactaattccttccataatcaggggaagagctactggaatcactggaaactttgctaatattgggggagccctggcttccctcatgatgatcctaagcatatattctcgacccctgccctggatcatctatggagtctttgccatcctctctggccttgttgtcctcctccttcctgaaaccaggaaccagcctcttcttgacagcatccaggatgtggaaaatgagggagtaaatagcctagctgcccctcagaggagctctgtgcta

SEQ ID NO: 183284 - DNA, 1362 bp, Homo sapiens
  Payload ID: 16109
  Gene Symbol: SLC22A25
  Gene Name: solute carrier family 22, member 25
  ENST ID: ENST00000525295
  CDS Start-End: 1-471
atggcctttcaggacctcctagatcaagttggaggcctggggagattccagatccttcagatggttttccttataatgttcaacgtcatagtataccatcaaactcagctggagaacttcgcagcattcatacttgatcatcgctgctgggttcatatactggacaatgacactatccctgacaatgaccctgggaccctcagccaggatgccctcctgagaatctccatcccattcgactcaaatctgaggccagagaagtgtcgtcgctttgtccatccccagtggaagctcattcatctgaatgggaccttccccaacacgagtgagccagatacagagccctgtgtggatggctgggtatatgaccaaagctccttcccttccaccattgtgactaaggtggctggcagagtctgctcggtggctcattatcaacaacaaaccagaagagggcttaaaggaacttagaaaagctgcacacaggaatggaatgaagaatgctgaagacatcctaaccatggaggttttgaaatccaccatgaagcaagaactggaggcagcacagaaaaagcattctctttgtgaattgctccgcatacccaacatatgtaaaagaatctgtttcctgtcctttgtgaggtctgctggagtttgctggaggtccactccagatcctgtttgcttgggtatcaccagcggaggttgcagaacagcaaagattcctgcctgctccttcctctggaagcttcattttagaggagcacctgcctgatgccagccagagctctcctatttgcaagtaccatccctttttggggccttactttgcacctccagcatctgggaaacaatgttttcctgttgcagactctctttggtgcagtcaccctcctggccaattgtgttgcaccttgggcactgaatcacatgagccgtcgactaagccagatgcttctcatgttcctactggcaacctgccttctggccatcatatttgtgcctcaagaaatgcagaccctgcgtgtggttttggcaaccctgggtgtgggagctgcttctcttggcattacctgttctactgcccaagaaaatgaactaattccttccataatcaggggaagagctactggaatcactggaaactttgctaatattgggggagccctggcttccctcatgatgatcctaagcatatattctcgacccctgccctggatcatctatggagtctttgccatcctctctggccttgttgtcctcctccttcctgaaaccaggaaccagcctcttcttgacagcatccaggatgtggaaaatgagggagtaaatagcctagctgcccctcagaggagctctgtg

SEQ ID NO: 183285 - DNA, 1909 bp, Homo sapiens
  Payload ID: 16110
  Gene Symbol: SLC22A31
  Gene Name: solute carrier family 22, member 31
  ENST ID: ENST00000562855
  CDS Start-End: 1-1671
atggagcaggaggcgcgggtgctgagagctgcgggcggctttggccgggcccggcgcctgctggcctccgcctcgtgggtaccctgcatagtgctggggctggtgctgagctccgaggagctgcttaccgcgcagcccgcgccccactgccgaccggaccccacgctgttgcccccagcgctgcgcgccctgcgcggacccgcgctgctggacgccgccatcccgcgcctggggcccacgcgagcccccgccgaggccctgggtgtcctttctccatcctacctggcgcctctgacccgggccccccggccgtcctcctgggcttcctgctccggggcggccgccggcccgacgtggaaccttgtgtgtggagacggctggaaggtcccgctggagcaggtgagccacctcctgggctggctgctgggctgtgtcatcctgggagcaggctgtgaccggtttggacgccgggcagtttttgtggcctccctggtgctgaccacaggcctgggggccagtgaggccctggctgccagcttccctaccctgctggtcctgcgcctactccacgggggcacattggcaggggccctcctcgccctgtatctggctcgcctggagttgtgtgaccctccccaccgcctggccttctccatgggggctggccttttctcggtggtgggcaccctgctgctgcccggcctggctgcgcttgtgcaggactggcgtcttctgcaggggctgggtgccctgatgagtggactcttgctgctcttttgggggttcccggccctgttccccgagtctccctgctggctgctggccacaggtcaggtagctcgagccaggaagatcctgtggcgctttgcagaagccagtggcgtgggccccggggacagttccttggaggagaactccctggctacagagctgaccatgctgtctgcacggagcccccagccccggtaccactccccactggggcttctgcgtacccgagtcacctggagaaacgggcttatcttgggcttcagctcgctggttggtggaggcatcagagctagcttccgccgcagcctggcacctcaggtgccgaccttctacctgccctacttcctggaggccggcctggaggcggcagccttggtcttcctgctcctgacggcagattgctgtggacgccgccccgtgctgctgctgggcaccatggtcacaggcctggcatccctgctgctcctcgctggggcccagtatctgccaggctggactgtgctgttcctctctgtcctggggctcctggcctcccgggctgtgtccgcactcagcagcctcttcgcggccgaggtcttccccacggtgatcaggggggccgggctgggcctggtgctgggggccgggttcctgggccaggcagccggccccctggacaccctgcacggccggcagggcttcttcctgcaacaagtcgtcttcgcctcccttgctgtccttgccctgctgtgtgtcctgctgctgcctgagagccgaagccgggggctgccccagtcactgcaggacgccgaccgcctgcgccgctccccactcctgcggggccgcccccgccaggaccacctgcctctgctgccgccctccaactcctactgggccggccacacccccgagcagcactagtcctgcctggtggccctgggagccaggatgggaccaaagtcaaggcctggggcatggctgagtaccccagacgtctggtccagggcagacacattcctctcagaagcccgtgtctcagtgcaggtggagccgtggggacagcgtgaaggtgtctccagccaggccccaggcactgggaggccctgggtctccccccagccacacccagtaggtgtggaggataaaggcttctgtggaa

SEQ ID NO: 183286 - DNA, 1860 bp, Homo sapiens
  Payload ID: 16110
  Gene Symbol: SLC22A31
  Gene Name: solute carrier family 22, member 31
  ENST ID: ENST00000614943
  CDS Start-End: 606-1622
agagctggccgtgggggaagagcaatggtgtgcggaggtgggggaggccctatctagggacaagcagaaaacttagggtgggcagatccccccgacccctgtgcaggggctgccggagaccagagaggctgctgtgtgacctggaccaagccccttgccctctcatgcctcagtttccccttctctccacggagggattgagcaggacatggagggccccttccagtagccattctgggactccctgcacctgtccccaggggagggtcctgagctggcctccacgtggctgctgttccccatagtggaaccttgtgtgtggagacggctggaaggtcccgctggagcaggtgagccacctcctgggctggctgctgggctgtgtcatcctgggagcaggctgtgaccggtttggacgccgggcagtttttgtggcctccctggtgctgaccacaggcctgggggccagtgaggccctggctgccagcttccctaccctgctggtcctgcgcctactccacgggggcacattggcaggggccctcctcgccctgtatctggctcgcctggagttgtgtgaccctccccaccgcctggccttctccatgggggctggccttttctcggtggtgggcaccctgctgctgcccggcctggctgcgcttgtgcaggactggcgtcttctgcaggggctgggtgccctgatgagtggactcttgctgctcttttgggggttcccggccctgttccccgagtctccctgctggctgctggccacaggtcaggtagctcgagccaggaagatcctgtggcgctttgcagaagccagtggcgtgggccccggggacagttccttggaggagaactccctggctacagagctgaccatgctgtctgcacggagcccccagccccggtaccactccccactggggcttctgcgtacccgagtcacctggagaaacgggcttatcttgggcttcagctcgctggttggtggaggcatcagagctagcttccgccgcagcctggcacctcaggtgccgaccttctacctgccctacttcctggaggccggcctggaggcggcagccttggtcttcctgctcctgacggcagattgctgtggacgccgccccgtgctgctgctgggcaccatggtcacaggcctggcatccctgctgctcctcgctggggcccagtatctgccaggctggactgtgctgttcctctctgtcctggggctcctggcctcccgggctgtgtccgcactcagcagcctcttcgcggccgaggtcttccccacggtgatcaggggggccgggctgggcctggtgctgggggccgggttcctgggccaggcagccggccccctggacaccctgcacggccggcagggcttcttcctgcaacaagtcgtcttcgcctcccttgctgtccttgccctgctgtgtgtcctgctgctgcctgagagccgaagccgggggctgccccagtcactgcaggacgccgaccgcctgcgccgctccccactcctgcggggccgcccccgccaggaccacctgcctctgctgccgccctccaactcctactgggccggccacacccccgagcagcactagtcctgcctggtggccctgggagccaggatgggaccaaagtcaaggcctggggcatggctgagtaccccagacgtctggtccagggcagacacattcctctcagaagcccgtgtctcagtgcaggtggagccgtggggacagcgtgaaggtgtctccagccaggccccaggcactgggaggccctgggtctccccccagccacacccagtaggtgtggaggataaaggcttctgtggaa

SEQ ID NO: 183287 - DNA, 2299 bp, Homo sapiens
  Payload ID: 16111
  Gene Symbol: SLC23A1
  Gene Name: solute carrier family 23 (ascorbic acid transporter), member 1
  Uniprot ID: Q9UHI7
  ENST ID: ENST00000348729
  CDS Start-End: 48-1844
gtcatcccctcttctcctcaggaactgctcaaacctgtgccccaaagatgagggcccaggaggacctcgagggccggacacagcatgaaaccaccagggacccctcgaccccgctacccacagagcctaagtttgacatgttgtacaagatcgaggacgtgccaccttggtacctgtgcatcctgctgggcttccagcactacctgacatgcttcagtggtaccatcgccgtgcccttcctgctggctgaggcgctgtgtgtgggccacgaccagcacatggttagtcagctcatcggcaccatcttcacgtgcgtgggcatcaccactctcatccagaccaccgtgggcatccggctgccgctgttccaggccagtgcctttgcatttctggttccagccaaagccatactggctctggagagatggaaatgccccccggaagaggagatctacggtaactggagtctgcccctgaacacctctcatatttggcacccacggatacgggaggtccagggtgcaatcatggtgtccagcgtggtggaggtggtgattggcctgctggggctgcctggggccctgctcaactacattgggcctctcacagtcacccccactgtctccctcattggcctttctgtcttccaagctgctggcgaccgagctggctcccactggggcatctcagcttgctccattctcctgatcatcctcttctcccagtacctgcgcaacctcaccttcctgctgcctgtctaccgctggggcaagggcctcactctcctccgcatccagatcttcaaaatgtttcctatcatgctggccatcatgaccgtgtggctgctctgctatgtcctgaccttgacagacgtgctgcccacagacccaaaagcctatggcttccaggcacgaaccgatgcccgtggtgacatcatggctattgcaccctggatccgcatcccctacccctgtcagtggggcctgcccacggtgactgcggctgctgtcctgggaatgttcagcgccactctggcaggcatcattgagtccatcggagattactacgcctgtgcccgcctggctggtgcaccaccccctccagtacatgctatcaacaggggcatcttcaccgaaggcatttgctgcatcatcgcggggctattgggcacgggcaacgggtccacctcgtccagtcccaacattggcgtcctgggaattaccaaggtgggcagccggcgcgtggtgcagtatggtgcggctatcatgctggtcctgggcaccatcggcaagttcacggccctcttcgcctcgctccctgaccccatcctggggggcatgttctgcactctctttggcatgattacagctgtggggctgtccaacctgcaatttgtggacatgaactcctctcgcaacctcttcgtgctgggattttccatgttcttcgggctcacgctgcccaattacctggagtccaaccctggcgccatcaatacaggcattcttgaagtggatcagattctgattgtgctgctgaccacggagatgtttgtgggcgggtgccttgctttcatacttgacaacacagtgccagggagcccagaggagcgtggtctgatacagtggaaagctggggctcatgccaacagtgacatgtcttccagcctcaagagctacgatttccccattgggatgggcatagtaaaaagaattacctttctgaaatacattcctatctgcccagtcttcaaaggattttcttcaagttcaaaagatcagattgcaattccagaagacactccagaaaatacagaaactgcatctgtgtgcaccaaggtctgaaaaatgacttccaggaaaggaagcatggtatataacaggaaaagaaaactacatggggaaccagaagacctaagcctgaaatcccagccctgcccctaactaacttctgtgtaaactcagataagtcacctttctctgggattcaaatttttgcatcagttaaaaaaaaaggggtgggggggaatgggccaaagtctgagtcttagagacttgtaccaatgttatgctatgtctctaaatctttactctcctaagtagacttgtcagcatctaggaagaacagctagaaattttcctctgtgatattttagactgcaagttgaaaaaaataaaaagaaatgagggcaggttccagggcctgaaatgtaggtatgctgcaaggcttttacattgaatttgaccctacatcacttcaagactaatgcataatattaaacatcatgttgaagaaataa

SEQ ID NO: 183288 - DNA, 2303 bp, Homo sapiens
  Payload ID: 16111
  Gene Symbol: SLC23A1
  Gene Name: solute carrier family 23 (ascorbic acid transporter), member 1
  Uniprot ID: Q9UHI7
  ENST ID: ENST00000353963
  CDS Start-End: 40-1848
ctcttctcctcaggaactgctcaaacctgtgccccaaagatgagggcccaggaggacctcgagggccggacacagcatgaaaccaccagggacccctcgaccccgctacccacagagcctaagtttgacatgttgtacaagatcgaggacgtgccaccttggtacctgtgcatcctgctgggcttccagcactacctgacatgcttcagtggtaccatcgccgtgcccttcctgctggctgaggcgctgtgtgtgggccacgaccagcacatggttagtcagctcatcggcaccatcttcacgtgcgtgggcatcaccactctcatccagaccaccgtgggcatccggctgccgctgttccaggccagtgcctttgcatttctggttccagccaaagccatactggctctggagagatggaaatgccccccggaagaggagatctacggtaactggagtctgcccctgaacacctctcatatttggcacccacggatacgggaggtgggtttgcatgtccagggtgcaatcatggtgtccagcgtggtggaggtggtgattggcctgctggggctgcctggggccctgctcaactacattgggcctctcacagtcacccccactgtctccctcattggcctttctgtcttccaagctgctggcgaccgagctggctcccactggggcatctcagcttgctccattctcctgatcatcctcttctcccagtacctgcgcaacctcaccttcctgctgcctgtctaccgctggggcaagggcctcactctcctccgcatccagatcttcaaaatgtttcctatcatgctggccatcatgaccgtgtggctgctctgctatgtcctgaccttgacagacgtgctgcccacagacccaaaagcctatggcttccaggcacgaaccgatgcccgtggtgacatcatggctattgcaccctggatccgcatcccctacccctgtcagtggggcctgcccacggtgactgcggctgctgtcctgggaatgttcagcgccactctggcaggcatcattgagtccatcggagattactacgcctgtgcccgcctggctggtgcaccaccccctccagtacatgctatcaacaggggcatcttcaccgaaggcatttgctgcatcatcgcggggctattgggcacgggcaacgggtccacctcgtccagtcccaacattggcgtcctgggaattaccaaggtgggcagccggcgcgtggtgcagtatggtgcggctatcatgctggtcctgggcaccatcggcaagttcacggccctcttcgcctcgctccctgaccccatcctggggggcatgttctgcactctctttggcatgattacagctgtggggctgtccaacctgcaatttgtggacatgaactcctctcgcaacctcttcgtgctgggattttccatgttcttcgggctcacgctgcccaattacctggagtccaaccctggcgccatcaatacaggcattcttgaagtggatcagattctgattgtgctgctgaccacggagatgtttgtgggcgggtgccttgctttcatacttgacaacacagtgccagggagcccagaggagcgtggtctgatacagtggaaagctggggctcatgccaacagtgacatgtcttccagcctcaagagctacgatttccccattgggatgggcatagtaaaaagaattacctttctgaaatacattcctatctgcccagtcttcaaaggattttcttcaagttcaaaagatcagattgcaattccagaagacactccagaaaatacagaaactgcatctgtgtgcaccaaggtctgaaaaatgacttccaggaaaggaagcatggtatataacaggaaaagaaaactacatggggaaccagaagacctaagcctgaaatcccagccctgcccctaactaacttctgtgtaaactcagataagtcacctttctctgggattcaaatttttgcatcagttaaaaaaaaaggggtgggggggaatgggccaaagtctgagtcttagagacttgtaccaatgttatgctatgtctctaaatctttactctcctaagtagacttgtcagcatctaggaagaacagctagaaattttcctctgtgatattttagactgcaagttgaaaaaaataaaaagaaatgagggcaggttccagggcctgaaatgtaggtatgctgcaaggcttttacattgaatttgaccctacatcacttcaagactaatgcataatattaaacatcatgttgaagaaataa

SEQ ID NO: 183289 - DNA, 406 bp, Homo sapiens
  Payload ID: 16111
  Gene Symbol: SLC23A1
  Gene Name: solute carrier family 23 (ascorbic acid transporter), member 1
  ENST ID: ENST00000504513
  CDS Start-End: 1-406
gcccctgaacacctctcatatttggcacccacggatacgggagctccattctcctgatcatcctcttctcccagtacctgcgcaacctcaccttcctgctgcctgtctaccgctggggcaagggcctcactctcctccgcatccagatcttcaaaatgtttcctgtcagtggggcctgcccacggtgactgcggctgctgtcctgggaatgttcagcgccactctggcaggcatcattgagtccatcggagattactacgcctgtgcccgcctggctggtgcaccaccccctccagtacatgctatcaacaggggcatcttcaccgaaggcatttgctgcatcatcgcggggctattgggcacgggcaacgggtccacctcgtccagtcccaacattggcgtcctg

SEQ ID NO: 183290 - DNA, 509 bp, Homo sapiens
  Payload ID: 16111
  Gene Symbol: SLC23A1
  Gene Name: solute carrier family 23 (ascorbic acid transporter), member 1
  ENST ID: ENST00000508270
  CDS Start-End: 1-509
aaactggtccagcaactttggaaattgggagcagtagccaagagggagaggagaggacaggcggacagaggaacagtgtggacaccggcaggcgggcggactcagtgctgtggcatgaagctgctgcccagctggagagcggtgctgccccttggcccttcaggcagggcctggccatgggcacagcgacccagaagaactgctcaaacctgtgccccaaagatgagggcccaggaggacctcgagggccggacacagcatgaaaccaccagggacccctcgaccccgctacccacagagcctaagtttgacatgttgtacaagatcgaggacgtgccaccttggtacctgtgcatcctgctgggcttccagcactacctgacatgcttcagtggtaccatcgccgtgcccttcctgctggctgaggcgctgtgtgtgggccacgaccagcacatggttagtcagctcatcggcaccatcttcacgtgcgtgggcatcaccactctcat

SEQ ID NO: 183291 - DNA, 6944 bp, Homo sapiens
  Payload ID: 16112
  Gene Symbol: SLC23A2
  Gene Name: solute carrier family 23 (ascorbic acid transporter), member 2
  Uniprot ID: Q9UGH3
  ENST ID: ENST00000338244
  CDS Start-End: 376-2328
ggcggctgtcgcggggaccggaggcggaggctgcagcgggcactgcggcgccgaggcgcggcggcaggacgggaaccacgcgagctgcagccagctaggtcttgactccactaacggggacttctcatacggctttgaacttggaccttggtgcataagcaaatgtaactcagcgaattgtaatggaaagcatatggacaggtctacgccacatcacttaggtgctaagagatgccgtttgcaggcctcatctctgcttgagaatcgggggctccaggcactagaagagccggctgatcctgggctcctagcttgaataagccttcacttccagctgctctccccaacggctgtgtaaactactcgtttctcttaatgatgggtattggtaagaataccacatccaaatcaatggaggctggaagttcaacagaaggcaaatacgaagacgaggcaaagcacccagctttcttcactcttccggtggtgataaatggaggcgccacctccagcggtgagcaggacaatgaggacactgagctcatggcgatctacactacggaaaacggcattgcagaaaagagctctctcgctgagaccctggatagcactggcagtctggacccccagcgatcagacatgatttataccatagaagatgttcctccctggtacctgtgtatatttctggggctacagcactacctgacatgcttcagcggcacgatcgcagtgcccttcctgttggccgatgccatgtgtgtggggtacgaccagtgggccaccagccagctcattgggaccattttcttctgtgtgggaatcactactttgctacagacaacgtttggatgcaggttacccctgtttcaggccagtgcttttgcatttttggcccctgctcgagccatcctgtctttagataaatggaaatgtaacaccacagatgtttcagttgccaatggaacagcagagctgttgcacacagaacacatctggtatccccggatccgagagatccagggggccatcatcatgtcctcactgatagaagtagtcatcggcctcctcggcctgcctggggctctactgaagtacatcggtcccttgaccattacacccacggtggccctaattggcctctctggtttccaggcagcgggggagagagccgggaagcactggggcattgccatgctgacaatattcctagtattactgttttctcaatacgccagaaatgttaaatttcctctcccgatttataaatccaagaaaggatggactgcgtacaagttacagctgttcaaaatgttccctatcatcctggccatcctggtatcctggctgctctgcttcatcttcacggtgacagatgtcttccctcccgacagcacaaagtatggcttctatgctcgcacagatgccaggcaaggcgtgcttctggtagccccgtggtttaaggttccatacccatttcagtggggactgcccaccgtgtctgcggccggtgtcatcggcatgctcagtgccgtggtcgccagcatcatcgagtctattggtgactactacgcctgtgcacggctgtcctgtgccccacccccccccatccacgcaataaacaggggaattttcgtggaaggcctctcctgtgttcttgatggcatatttggtactgggaatggctctacttcatccagtcccaacattggagttttgggaattacaaaggtcggcagccgccgcgtgatacagtgcggagcagccctcatgctcgctctgggcatgatcgggaagttcagcgccctctttgcgtcccttccggatcctgtgctgggagccctgttctgcacgctctttggaatgatcacagctgttggcctctctaacctgcagttcattgatttaaattcttcccggaacctctttgtgcttggattttcgatcttctttgggctcgtccttccaagttacctcagacagaaccctctggtcacagggataacaggaatcgatcaagtgttgaacgtccttctcacaactgctatgtttgtagggggctgtgtggcttttatcctggataacaccatcccaggcactccagaggaaagaggaatccggaaatggaagaagggtgtgggcaaagggaacaaatcactcgacggcatggagtcgtacaatttgccatttggcatgaacattataaaaaaatacagatgcttcagctacttacccatcagcccaacctttgtgggctacacatggaaaggcctcaggaagagcgacaacagccggagttcagatgaagactcccaggccacgggatagcctttgctgtgccctgtggcctggccgcagtgaggcatgtatctgtagttccttgctgagtaacaagaagtaaaatacatgtttgtatatctacatttacattctgcgccccagagctaagacagactgcgaatcacttttctgctgtgagggtgatggtgcctgatgcggtgtctcgcctatctccttatttaagcccttaactccttgccctttgagagtgtccattgctggccatggtcactaaatttgaagttccagtcctccctttggagtggacatttaaaatctgcagccattccttgcttcagttcccttccaccacccagggctggctttcctataagccacctccagggtccaggggctttctctctctctccgaagcccctggacctgtttccttgtcatttgaccctcgtctgtgcccgcggagacctcctctgaccaaggggcactagtatgccttgcgctatcatgactgactggcccagtatgattctgttgtcgctgatctcccggaggaggaggctgttgacctgaaaacagtggcgtggctcccctgtgcccagatctggccatgggtgaggcctgcacagatgttgaatgaacatctgtttggggcattggagggaaaaggaaaggaccctgaagccaatatctgattctcggctgcaccttctcttggccaccctggccctgaccgggccagcacgtgcacactggcctcttttcatttcactagtggccgagacaccctctctggcatttatcactgttggccggtgtgatgagtatagagtgccacccaaggcaccagtcacacaagctgatgggcgtcttggctctgccgtcatgtggatgttattgtcgcgcgcgtctataattacaaggttttattcctatttaatgttattgactatagcagattttggaaatcagtgttttccatgtgaccctctttccttgcatccctattccttgtcccccacccactcttccccccatcaagaaaagaaccagcatttgtaaagctgtggacaccatcagggaagcttgttgtaacggcttttgaaggccagtaaccattgttgtggttgtgttttgtattgcttgataccatgaaagtgtaaatactgtaatgcctaatctatttatcaaaactgactactggaccggagcccagaaaccatgggtcaagttacacgtgaatttgttttgtgaagaagggaagctggggcaggtaacacgcagagccgccacgtggaacggtctgtccgccggtctgtcccgcttgccgggcttctgttgcaagtcttggcttaaggagacttcctgtgggttgccatgtcgcacgtccgttagatcttgattttacaggtgagggtggttgccaaaggtgataagaaaagcagccaacaggctccctctcacttaagagagttctaattaataacactaaattcttcctgagaaatgactcctcttggtttggtttgaagtttttcagtgaaggaaaaggcctgagataggaagcagtgccctcgcttcatgaggtggcacatcttcggtggccgttggcctggtcgagctttggtcagctgcgtgggtgcctgtctcctgtctccagcggcagggcatggttcttggcagcctggtgtccacacggtgcattcctgtccccctcggccccaggctggctcagctctccagtgctgcggcgctgtctttgcagcattgccatgtcaccgtagcccccttcactcttggaagtttggggcttcaaggtttattctggcaagaacacctcggagccactgcattgttttgccaaaaacttactgcagattaagtaaagaacttagatgctaaattacatctaattttgtatgtttttttaaatgtgtctttgatgcatactttagaagcacactggctcgcggtttccatccctcttgccttgggacactcttgaggctggcagccctcctgcaatgagttgctctcagttccttctgtttggattttgctcaacatctccagtttctctgctctgaaaaatggggaaaactgctaaacatcccagagatttgcaatcttctagctctccaggtgagcagaaagaccaaatatccaaataaaagcctgaaagccattggtgatccaggggcaccttctcttcagcttgactgggcgtcttccgctgcataacactcaaggtgtctgctctagtcatccagaaacccactcccttctgaagcccctccttgggccgggttgtatcaggaggattcaaccccgctaacatgtggggtgccctctgtaggccttcacacagggaaggaagccctaccctttcaactcctgttggagtgagagtttcctgttctgattccactgtggccaacccaataattctgtccgaggaggggtaagggaataggaggtggggagcaaagagggcagcctgactagatgcccctgctgaatctggtactttctgcacagccttgagtgattggagtcccctaatgactaataaacttgaacatgtaacacacacacacacacacacacacaccattttaggaagtggttctcctactggaaaatatgctacagaatgaaagtttgtaattgaaagaaaaagaatgtattcatctgcttcttgggtttaagcacacacctgaaggggagatattgggggacacggtggccactcgcggtctgtgtcatgacacttcccattcacatcattggcctgcgttgctggggctttgaaccaccaccccgtactttgttttgcctgtagagtgttgtaaaatattttggatgtgaatgtccttgcaggccggttagtctccagtttccacagagaccacctacccaccaccttcccaggtcacctgcctggtccctgaaagaaagcatttgtgtgggcaatcccaacatgaaatgtagacagcgtgaatacggacaggaggtgatgccatattcacagtgggggatggagggcccccacccctgcttcacagaataatgggaagtgactctagtctttgtaagcaattttcattctcattaggaagttaaatgtagattcacagatacatttactttcagaatcctcaagaggatttcaaatgctaacttttagtttcttgggattgatcaaggcaagagaagtggctttaaccatgccagccagaatgaagcatcatgggtcctgatggtttcccgttttcatggtaacaaattcgcacagaggttttgctttatgctgtagaataccgactttcatgatgacaacttggtttatgcatgaatattgcagtatttccatatagcaaaataacatttctacccaggataatagtcacagttttccagggagggaatgatataattttcatgacaatgtcatgtgatgatagaatttctccattgatgaatctctagtatgtgtgtatactttatttacccatacgtatattttatgaccatgagctaagttgttatttctttcattcatatccctgctgaaatattggtactagcaacttaaagttggcaagtctcatcttcagtaatacggatgccatgggagtggccaggccagattgaaggtgaatatggagcagtagcagaagcctcattccagaacccatctggccagagaagcagcagcatcctgggggatggccgtgcatggggtgtacactcgctataggcataggcccggcatggctgtcgctggacgccagctgtgcacacccagccacacctgctgcacgccgcgttagtgtgcggctccgggcctgagcattcgcaaagctcgcttctccagggagcctcctcttggctttggaaaagagcccagggacttaacgtgctgcctgttgtactctgtcccctcatgactttttagacacagggactaggacatcgaccaccctctgcccctcctgcagtcagaacccgagtagtgcaagaacggccacccggttttgccagcgttcagcgtctgcccatggacccataaggcacattagcgttgggggtctcttttcagcagcctcacagacattcccgtcctttctggttggtgttgactgtgtttcagcatcactctaccctcccatgtccttagcattgctgtgcgtgtttccaggcacttaggacacccttccccacgttgccatcttactgacagttcaaatgactctccttttttgttcgttagtaacaatcttcatttgacaccttaatacatttctgactgttcttaaaacagtggggatgcctatattttccttgagtttttgtgactgactttggctatatatacctttctggggttttgtttgttttttatttttattttgattaccgagggtatttggggtggggttgttttttgagatgtgtaattcttttatggagtttttaaaaagaattttcatattgtttttctaacatggcttcattaaacgtttaagtattttaaaaatatgtaatatttggaccagatgttgtgaataatagtagagataaagctattttattctgtatttttaaaactgttccgtacaaataaaagctctcctggacacagt

SEQ ID NO: 183292 - DNA, 6962 bp, Homo sapiens
  Payload ID: 16112
  Gene Symbol: SLC23A2
  Gene Name: solute carrier family 23 (ascorbic acid transporter), member 2
  Uniprot ID: Q9UGH3
  ENST ID: ENST00000379333
  CDS Start-End: 394-2346
cattcatcttctcctgcccttggacatcacagctccaggaactcagatcttcagactcagggtgaaggacaccaccagctttccaggttccccagcttgcagacggcatacgctaggtcttgactccactaacggggacttctcatacggctttgaacttggaccttggtgcataagcaaatgtaactcagcgaattgtaatggaaagcatatggacaggtctacgccacatcacttaggtgctaagagatgccgtttgcaggcctcatctctgcttgagaatcgggggctccaggcactagaagagccggctgatcctgggctcctagcttgaataagccttcacttccagctgctctccccaacggctgtgtaaactactcgtttctcttaatgatgggtattggtaagaataccacatccaaatcaatggaggctggaagttcaacagaaggcaaatacgaagacgaggcaaagcacccagctttcttcactcttccggtggtgataaatggaggcgccacctccagcggtgagcaggacaatgaggacactgagctcatggcgatctacactacggaaaacggcattgcagaaaagagctctctcgctgagaccctggatagcactggcagtctggacccccagcgatcagacatgatttataccatagaagatgttcctccctggtacctgtgtatatttctggggctacagcactacctgacatgcttcagcggcacgatcgcagtgcccttcctgttggccgatgccatgtgtgtggggtacgaccagtgggccaccagccagctcattgggaccattttcttctgtgtgggaatcactactttgctacagacaacgtttggatgcaggttacccctgtttcaggccagtgcttttgcatttttggcccctgctcgagccatcctgtctttagataaatggaaatgtaacaccacagatgtttcagttgccaatggaacagcagagctgttgcacacagaacacatctggtatccccggatccgagagatccagggggccatcatcatgtcctcactgatagaagtagtcatcggcctcctcggcctgcctggggctctactgaagtacatcggtcccttgaccattacacccacggtggccctaattggcctctctggtttccaggcagcgggggagagagccgggaagcactggggcattgccatgctgacaatattcctagtattactgttttctcaatacgccagaaatgttaaatttcctctcccgatttataaatccaagaaaggatggactgcgtacaagttacagctgttcaaaatgttccctatcatcctggccatcctggtatcctggctgctctgcttcatcttcacggtgacagatgtcttccctcccgacagcacaaagtatggcttctatgctcgcacagatgccaggcaaggcgtgcttctggtagccccgtggtttaaggttccatacccatttcagtggggactgcccaccgtgtctgcggccggtgtcatcggcatgctcagtgccgtggtcgccagcatcatcgagtctattggtgactactacgcctgtgcacggctgtcctgtgccccacccccccccatccacgcaataaacaggggaattttcgtggaaggcctctcctgtgttcttgatggcatatttggtactgggaatggctctacttcatccagtcccaacattggagttttgggaattacaaaggtcggcagccgccgcgtgatacagtgcggagcagccctcatgctcgctctgggcatgatcgggaagttcagcgccctctttgcgtcccttccggatcctgtgctgggagccctgttctgcacgctctttggaatgatcacagctgttggcctctctaacctgcagttcattgatttaaattcttcccggaacctctttgtgcttggattttcgatcttctttgggctcgtccttccaagttacctcagacagaaccctctggtcacagggataacaggaatcgatcaagtgttgaacgtccttctcacaactgctatgtttgtagggggctgtgtggcttttatcctggataacaccatcccaggcactccagaggaaagaggaatccggaaatggaagaagggtgtgggcaaagggaacaaatcactcgacggcatggagtcgtacaatttgccatttggcatgaacattataaaaaaatacagatgcttcagctacttacccatcagcccaacctttgtgggctacacatggaaaggcctcaggaagagcgacaacagccggagttcagatgaagactcccaggccacgggatagcctttgctgtgccctgtggcctggccgcagtgaggcatgtatctgtagttccttgctgagtaacaagaagtaaaatacatgtttgtatatctacatttacattctgcgccccagagctaagacagactgcgaatcacttttctgctgtgagggtgatggtgcctgatgcggtgtctcgcctatctccttatttaagcccttaactccttgccctttgagagtgtccattgctggccatggtcactaaatttgaagttccagtcctccctttggagtggacatttaaaatctgcagccattccttgcttcagttcccttccaccacccagggctggctttcctataagccacctccagggtccaggggctttctctctctctccgaagcccctggacctgtttccttgtcatttgaccctcgtctgtgcccgcggagacctcctctgaccaaggggcactagtatgccttgcgctatcatgactgactggcccagtatgattctgttgtcgctgatctcccggaggaggaggctgttgacctgaaaacagtggcgtggctcccctgtgcccagatctggccatgggtgaggcctgcacagatgttgaatgaacatctgtttggggcattggagggaaaaggaaaggaccctgaagccaatatctgattctcggctgcaccttctcttggccaccctggccctgaccgggccagcacgtgcacactggcctcttttcatttcactagtggccgagacaccctctctggcatttatcactgttggccggtgtgatgagtatagagtgccacccaaggcaccagtcacacaagctgatgggcgtcttggctctgccgtcatgtggatgttattgtcgcgcgcgtctataattacaaggttttattcctatttaatgttattgactatagcagattttggaaatcagtgttttccatgtgaccctctttccttgcatccctattccttgtcccccacccactcttccccccatcaagaaaagaaccagcatttgtaaagctgtggacaccatcagggaagcttgttgtaacggcttttgaaggccagtaaccattgttgtggttgtgttttgtattgcttgataccatgaaagtgtaaatactgtaatgcctaatctatttatcaaaactgactactggaccggagcccagaaaccatgggtcaagttacacgtgaatttgttttgtgaagaagggaagctggggcaggtaacacgcagagccgccacgtggaacggtctgtccgccggtctgtcccgcttgccgggcttctgttgcaagtcttggcttaaggagacttcctgtgggttgccatgtcgcacgtccgttagatcttgattttacaggtgagggtggttgccaaaggtgataagaaaagcagccaacaggctccctctcacttaagagagttctaattaataacactaaattcttcctgagaaatgactcctcttggtttggtttgaagtttttcagtgaaggaaaaggcctgagataggaagcagtgccctcgcttcatgaggtggcacatcttcggtggccgttggcctggtcgagctttggtcagctgcgtgggtgcctgtctcctgtctccagcggcagggcatggttcttggcagcctggtgtccacacggtgcattcctgtccccctcggccccaggctggctcagctctccagtgctgcggcgctgtctttgcagcattgccatgtcaccgtagcccccttcactcttggaagtttggggcttcaaggtttattctggcaagaacacctcggagccactgcattgttttgccaaaaacttactgcagattaagtaaagaacttagatgctaaattacatctaattttgtatgtttttttaaatgtgtctttgatgcatactttagaagcacactggctcgcggtttccatccctcttgccttgggacactcttgaggctggcagccctcctgcaatgagttgctctcagttccttctgtttggattttgctcaacatctccagtttctctgctctgaaaaatggggaaaactgctaaacatcccagagatttgcaatcttctagctctccaggtgagcagaaagaccaaatatccaaataaaagcctgaaagccattggtgatccaggggcaccttctcttcagcttgactgggcgtcttccgctgcataacactcaaggtgtctgctctagtcatccagaaacccactcccttctgaagcccctccttgggccgggttgtatcaggaggattcaaccccgctaacatgtggggtgccctctgtaggccttcacacagggaaggaagccctaccctttcaactcctgttggagtgagagtttcctgttctgattccactgtggccaacccaataattctgtccgaggaggggtaagggaataggaggtggggagcaaagagggcagcctgactagatgcccctgctgaatctggtactttctgcacagccttgagtgattggagtcccctaatgactaataaacttgaacatgtaacacacacacacacacacacacacaccattttaggaagtggttctcctactggaaaatatgctacagaatgaaagtttgtaattgaaagaaaaagaatgtattcatctgcttcttgggtttaagcacacacctgaaggggagatattgggggacacggtggccactcgcggtctgtgtcatgacacttcccattcacatcattggcctgcgttgctggggctttgaaccaccaccccgtactttgttttgcctgtagagtgttgtaaaatattttggatgtgaatgtccttgcaggccggttagtctccagtttccacagagaccacctacccaccaccttcccaggtcacctgcctggtccctgaaagaaagcatttgtgtgggcaatcccaacatgaaatgtagacagcgtgaatacggacaggaggtgatgccatattcacagtgggggatggagggcccccacccctgcttcacagaataatgggaagtgactctagtctttgtaagcaattttcattctcattaggaagttaaatgtagattcacagatacatttactttcagaatcctcaagaggatttcaaatgctaacttttagtttcttgggattgatcaaggcaagagaagtggctttaaccatgccagccagaatgaagcatcatgggtcctgatggtttcccgttttcatggtaacaaattcgcacagaggttttgctttatgctgtagaataccgactttcatgatgacaacttggtttatgcatgaatattgcagtatttccatatagcaaaataacatttctacccaggataatagtcacagttttccagggagggaatgatataattttcatgacaatgtcatgtgatgatagaatttctccattgatgaatctctagtatgtgtgtatactttatttacccatacgtatattttatgaccatgagctaagttgttatttctttcattcatatccctgctgaaatattggtactagcaacttaaagttggcaagtctcatcttcagtaatacggatgccatgggagtggccaggccagattgaaggtgaatatggagcagtagcagaagcctcattccagaacccatctggccagagaagcagcagcatcctgggggatggccgtgcatggggtgtacactcgctataggcataggcccggcatggctgtcgctggacgccagctgtgcacacccagccacacctgctgcacgccgcgttagtgtgcggctccgggcctgagcattcgcaaagctcgcttctccagggagcctcctcttggctttggaaaagagcccagggacttaacgtgctgcctgttgtactctgtcccctcatgactttttagacacagggactaggacatcgaccaccctctgcccctcctgcagtcagaacccgagtagtgcaagaacggccacccggttttgccagcgttcagcgtctgcccatggacccataaggcacattagcgttgggggtctcttttcagcagcctcacagacattcccgtcctttctggttggtgttgactgtgtttcagcatcactctaccctcccatgtccttagcattgctgtgcgtgtttccaggcacttaggacacccttccccacgttgccatcttactgacagttcaaatgactctccttttttgttcgttagtaacaatcttcatttgacaccttaatacatttctgactgttcttaaaacagtggggatgcctatattttccttgagtttttgtgactgactttggctatatatacctttctggggttttgtttgttttttatttttattttgattaccgagggtatttggggtggggttgttttttgagatgtgtaattcttttatggagtttttaaaaagaattttcatattgtttttctaacatggcttcattaaacgtttaagtattttaaaaatatgtaatatttggaccagatgttgtgaataatagtagagataaagctattttattctgtatttttaaaactgttccgtacaaataaaagctctcctggacacagt

SEQ ID NO: 183293 - DNA, 911 bp, Homo sapiens
  Payload ID: 16112
  Gene Symbol: SLC23A2
  Gene Name: solute carrier family 23 (ascorbic acid transporter), member 2
  ENST ID: ENST00000423430
  CDS Start-End: 1-911
ggggtacgaccagtgggccaccagccagctcattgggaccattttcttctgtgtgggaatcactactttgctacagacaacgtttggatgcaggacaatattcctagtattactgttttctcaatacgccagaaatgttaaatttcctctcccgatttataaatccaagaaaggatggactgcgtacaagttacagctgttcaaaatgttccctatcatcctggccatcctggtatcctggctgctctgcttcatcttcacggtgacagatgtcttccctcccgacagcacaaagtatggcttctatgctcgcacagatgccaggcaaggcgtgcttctggtagccccgtggtttaaggttccatacccatttcagtggggactgcccaccgtgtctgcggccggtgtcatcggcatgctcagtgccgtggtcgccagcatcatcgagtctattggtgactactacgcctgtgcacggctgtcctgtgccccacccccccccatccacgcaataaacaggggaattttcgtggaaggcctctcctgtgttcttgatggcatatttggtactgggaatggctctacttcatccagtcccaacattggagttttgggaattacaaaggtcggcagccgccgcgtgatacagtgcggagcagccctcatgctcgctctgggcatgatcgggaagttcagcgccctctttgcgtcccttccggatcctgtgctgggagccctgttctgcacgctctttggaatgatcacagctgttggcctctctaacctgcagttcattgatttaaattcttcccggaacctctttgtgcttggattttcgatcttctttgggctcgtccttccaagttacctcagacagaaccctctggtcacagggataacaggaatcgatc

SEQ ID NO: 183294 - DNA, 2037 bp, Homo sapiens
  Payload ID: 16113
  Gene Symbol: SLC23A3
  Gene Name: solute carrier family 23, member 3
  Uniprot ID: Q6PIS1
  ENST ID: ENST00000295738
  CDS Start-End: 112-1593
accctctccccaccttctccccaccccaggcttcacccaaactctgacctcttactctctctacttaactctggtcccgggcagccaagacaaagcgaaaggcaaggcagcatgagccgatcacccctcaatcccagccaactccgatcagtgggctcccaggatgccctggcccccttgcctccacctgctccccagaatccctccacccactcttgggaccctttgtgtggatctctgccttggggcctcagctgtcttctggctctgcagcatgtcttggtcatggcttctctgctctgtgtctcccacctgctcctgctttgcagtctctccccaggaggactctcttactccccttctcagctcctggcctccagcttcttttcatgtggtatgtctaccatcctgcaaacttggatgggcagcaggctgcctcttgtccaggctccatccttagagttccttatccctgctctggtgctgaccagccagaagctaccccgggccatccagacacctggaaactcctccctcatgctgcacctttgtaggggacctagctgccatggcctggggcactggaacacttctctccaggaggtgtccggggcagtggtagtatctgggctgctgcagggcatgatggggctgctggggagtcccggccacgtgttcccccactgtgggcccctggtgctggctcccagcctggttgtggcagggctctctgcccacagggaggtagcccagttctgcttcacacactgggggttggccttgctcacctgggctcctgccagtttcatgtgtgcccctggaggcgagcttcaacgtcatcaactcacactcctctccctgtcttccggctcctttcggaactgtctgcccccaccaaggcaccatggatttggctgcctcacccaggctggatctcagcaagtggctcacttagtggggctactctgcgtggggcttggactctcccccaggttggctcagctcctcaccaccatcccactgcctgttgttggtggggtgctgggggtgacccaggctgtggttttgtctgctggattctccagcttctacctggctgacatagactctgggcgaaatatcttcattgtgggcttctccatcttcatggccttgctgctgccaagatggtttcgggaagccccagtcctgttcagcacaggctggagccccttggatgtattactgcactcactgctgacacagcccatcttcctggctggactctcaggcttcctactagagaacacgattcctggcacacagcttgagcgaggcctaggtcaagggctaccatctcctttcactgcccaagaggctcgaatgcctcagaagcccagggagaaggctgctcaagtgtacagacttcctttccccatccaaaacctctgtccctgcatcccccagcctctccactgcctctgcccactgcctgaagaccctggggatgaggaaggaggctcctctgagccagaagagatggcagacttgctgcctggctcaggggagccatgccctgaatctagcagagaagggtttaggtcccagaaatgaccagaacgcctacttctgccctggttaatttagccctaactctcatctgctggagagtcagctcccaaactgttctttcttgtaggcagaggatatgtgtgtgtgtattacatgggactgtctagaggttccatttcccaatagggtgggttgcctttccttgtcttaattaggcctaactgttccagagcagaggccatgatttagtggaccatgaatgattgagattttgcctgtgtactatcaatgccacttgaaccccagcattcactttaatacttactgagcatctcccatgtgcaaggtcctggaactacagggataagacagggtccatgccgtctcaaggcatttacggtttaaaaagacctttgtaattactaacgaaaatgcaaagcagaaagcagtctgtaataaagattaaaataatgccgtgggagcaaa

SEQ ID NO: 183295 - DNA, 2010 bp, Homo sapiens
  Payload ID: 16113
  Gene Symbol: SLC23A3
  Gene Name: solute carrier family 23, member 3
  Uniprot ID: Q6PIS1
  ENST ID: ENST00000409878
  CDS Start-End: 34-1866
gggcagccaagacaaagcgaaaggcaaggcagcatgagccgatcacccctcaatcccagccaactccgatcagtgggctcccaggatgccctggcccccttgcctccacctgctccccagaatccctccacccactcttgggaccctttgtgtggatctctgccttggggcctcagctgtcttctggctctgcagcatgtcttggtcatggcttctctgctctgtgtctcccacctgctcctgctttgcagtctctccccaggaggactctcttactccccttctcagctcctggcctccagcttcttttcatgtggtatgtctaccatcctgcaaacttggatgggcagcaggctgcctcttgtccaggctccatccttagagttccttatccctgctctggtgctgaccagccagaagctaccccgggccatccagacacctggaaactcctccctcatgctgcacctttgtaggggacctagctgccatggcctggggcactggaacacttctctccaggaggtgtccggggcagtggtagtatctgggctgctgcagggcatgatggggctgctggggagtcccggccacgtgttcccccactgtgggcccctggtgctggctcccagcctggttgtggcagggctctctgcccacagggaggtagcccagttctgcttcacacactgggggttggccttgctggttatcctgctcatggtggtctgttctcagcacctgggctcctgccagtttcatgtgtgcccctggaggcgagcttcaacgtcatcaactcacactcctctccctgtcttccggctcctttcggtgctgatcccagtggcctgtgtgtggattgtttctgcctttgtgggattcagtgttatcccccaggaactgtctgcccccaccaaggcaccatggatttggctgcctcacccaggtgagtggaattggcctttgctgacgcccagagctctggctgcaggcatctccatggccttggcagcctccaccagttccctgggctgctatgccctgtgtggccggctgctgcatttgcctcccccacctccacatgcctgcagtcgagggctgagcctggaggggctgggcagtgtgctggccgggctgctgggaagccccatgggcactgcatccagcttccccaacgtgggcaaagtgggtcttatccaggctggatctcagcaagtggctcacttagtggggctactctgcgtggggcttggactctcccccaggttggctcagctcctcaccaccatcccactgcctgttgttggtggggtgctgggggtgacccaggctgtggttttgtctgctggattctccagcttctacctggctgacatagactctgggcgaaatatcttcattgtgggcttctccatcttcatggccttgctgctgccaagatggtttcgggaagccccagtcctgttcagcacaggctggagccccttggatgtattactgcactcactgctgacacagcccatcttcctggctggactctcaggcttcctactagagaacacgattcctggcacacagcttgagcgaggcctaggtcaagggctaccatctcctttcactgcccaagaggctcgaatgcctcagaagcccagggagaaggctgctcaagtgtacagacttcctttccccatccaaaacctctgtccctgcatcccccagcctctccactgcctctgcccactgcctgaagaccctggggatgaggaaggaggctcctctgagccagaagagatggcagacttgctgcctggctcaggggagccatgccctgaatctagcagagaagggtttaggtcccagaaatgaccagaacgcctacttctgccctggttaatttagccctaactctcatctgctggagagtcagctcccaaactgttctttcttgtaggcagaggatatgtgtgtgtgtattacatgggactgtctagaggttccatttcccaatag

SEQ ID NO: 183296 - DNA, 785 bp, Homo sapiens
  Payload ID: 16113
  Gene Symbol: SLC23A3
  Gene Name: solute carrier family 23, member 3
  ENST ID: ENST00000409370
  CDS Start-End: 7-785
ggcagcatgagccgatcacccctcaatcccagccaactccgatcagtgggctcccaggatgccctggcccccttgcctccacctgctccccagaatccctccacccactcttgggaccctttgtgtggatctctgccttggggcctcagctgtcttctggctctgcagcatgtcttggtcatggcttctctgctctgtgtctcccacctgctcctgctttgcagtctctccccaggaggactctcttactccccttctcagctcctggcctccagcttcttttcatgtggtatgtctaccatcctgcaaacttggatgggcagcaggctgcctcttgtccaggctccatccttagagttccttatccctgctctggtgctgaccagccagaagctaccccgggccatccagacacctggaaactcctccctcatgctgcacctttgtaggggacctagctgccatggcctggggcactggaacacttctctccaggaggtgtccggggcagtggtagtatctgggctgctgcagggcatgatggggctgctggggagtcccggccacgtgttcccccactgtgggcccctggtgctggctcccagcctggttgtggcagggctctctgcccacagggaggtagcccagttctgcttcacacactgggggttggccttgctggttatcctgctcatggtggtctgttctcagcacctgggctcctgccagtttcatgtgtgcccctggaggcgagcttcaacgtcatcaactcacactcctctccc

SEQ ID NO: 183297 - DNA, 559 bp, Homo sapiens
  Payload ID: 16113
  Gene Symbol: SLC23A3
  Gene Name: solute carrier family 23, member 3
  ENST ID: ENST00000430764
  CDS Start-End: 21-559
aaagcgaaaggcaaggcagcatgagccgatcacccctcaatcccagccaactccgatcagtgggctcccaggatgccctggcccccttgcctccacctgctccccagaatccctccacccactcttgggaccctttgtgtggatctctgccttggggcctcagctgtcttctggctctgcagcatgtcttggtcatggcttctctgctctgtgtctcccacctgctcctgctttgcagtctctccccaggaggactctcttactccccttctcagctcctggcctccagcttcttttcatgtgcctccctcatgctgcacctttgtaggggacctagctgccatggcctggggcactggaacacttctctccaggaggtgtccggggcagtggtagtatctgggctgctgcagggcatgatggggctgctggggagtcccggccacgtgttcccccactgtgggcccctggtgctggctcccagcctggttgtggcagggctctctgcccacagggaggtagcccagttctgcttcacacactgggggttggccttgct

SEQ ID NO: 183298 - DNA, 603 bp, Homo sapiens
  Payload ID: 16113
  Gene Symbol: SLC23A3
  Gene Name: solute carrier family 23, member 3
  ENST ID: ENST00000414999
  CDS Start-End: 1-34
atgtggctgcctcttgtccaggctccatccttagagttccttatccctgctctggtgctgaccagccagaagctaccccgggccatccagacacctggaaactcctccctcatgctgcacctttgtaggggacctagctgccatggcctggggcactggaacacttctctccaggaggtgtccggggcagtggtagtatctgggctgctgcagggcatgatggggctgctggggagtcccggccacgtgttcccccactgtgggcccctggtgctggctcccagcctggttgtggcagggctctctgcccacagggaggtagcccagttctgcttcacacactgggggttggccttgctgtacggttatcctgctcatggtggtctgttctcagcacctgggctcctgccagtttcatgtgtgcccctggaggcgagcttcaacgtcatcaactcacactcctctccctgtcttccggctcctttcggtgctgatcccagtggcctgtgtgtggattgtttctgcctttgtgggattcagtgttatcccccaggaactgtctgcccccaccaaggcaccatggatttggctgcctcacccagg

SEQ ID NO: 183299 - DNA, 2048 bp, Homo sapiens
  Payload ID: 16113
  Gene Symbol: SLC23A3
  Gene Name: solute carrier family 23, member 3
  Uniprot ID: Q6PIS1
  ENST ID: ENST00000455516
  CDS Start-End: 49-1905
cttaactctggtcccgggcagccaagacaaagcgaaaggcaaggcagcatgagccgatcacccctcaatcccagccaactccgatcagtgggctcccaggatgccctggcccccttgcctccacctgctccccagaatccctccacccactcttgggaccctttgtgtggatctctgccttggggcctcagctgtcttctggctctgcagcatgtcttggtcatggcttctctgctctgtgtctcccacctgctcctgctttgcagtctctccccaggaggactctcttactccccttctcagctcctggcctccagcttcttttcatgtggtatgtctaccatcctgcaaacttggatgggcagcaggctgcctcttgtccaggctccatccttagagttccttatccctgctctggtgctgaccagccagaagctaccccgggccatccagacacctggaaactgtgagcacagagcaagggcaagggcctccctcatgctgcacctttgtaggggacctagctgccatggcctggggcactggaacacttctctccaggaggtgtccggggcagtggtagtatctgggctgctgcagggcatgatggggctgctggggagtcccggccacgtgttcccccactgtgggcccctggtgctggctcccagcctggttgtggcagggctctctgcccacagggaggtagcccagttctgcttcacacactgggggttggccttgctggttatcctgctcatggtggtctgttctcagcacctgggctcctgccagtttcatgtgtgcccctggaggcgagcttcaacgtcatcaactcacactcctctccctgtcttccggctcctttcggtgctgatcccagtggcctgtgtgtggattgtttctgcctttgtgggattcagtgttatcccccaggaactgtctgcccccaccaaggcaccatggatttggctgcctcacccaggtgagtggaattggcctttgctgacgcccagagctctggctgcaggcatctccatggccttggcagcctccaccagttccctgggctgctatgccctgtgtggccggctgctgcatttgcctcccccacctccacatgcctgcagtcgagggctgagcctggaggggctgggcagtgtgctggccgggctgctgggaagccccatgggcactgcatccagcttccccaacgtgggcaaagtgggtcttatccaggctggatctcagcaagtggctcacttagtggggctactctgcgtggggcttggactctcccccaggttggctcagctcctcaccaccatcccactgcctgttgttggtggggtgctgggggtgacccaggctgtggttttgtctgctggattctccagcttctacctggctgacatagactctgggcgaaatatcttcattgtgggcttctccatcttcatggccttgctgctgccaagatggtttcgggaagccccagtcctgttcagcacaggctggagccccttggatgtattactgcactcactgctgacacagcccatcttcctggctggactctcaggcttcctactagagaacacgattcctggcacacagcttgagcgaggcctaggtcaagggctaccatctcctttcactgcccaagaggctcgaatgcctcagaagcccagggagaaggctgctcaagtgtacagacttcctttccccatccaaaacctctgtccctgcatcccccagcctctccactgcctctgcccactgcctgaagaccctggggatgaggaaggaggctcctctgagccagaagagatggcagacttgctgcctggctcaggggagccatgccctgaatctagcagagaagggtttaggtcccagaaatgaccagaacgcctacttctgccctggttaatttagccctaactctcatctgctggagagtcagctcccaaactgttctttcttgtaggcagaggatatgtgtgtgtgtattacatgggactgtctagaggttccatttcccaata

SEQ ID NO: 183300 - DNA, 5768 bp, Homo sapiens
  Payload ID: 16114
  Gene Symbol: SLC24A1
  Gene Name: solute carrier family 24 (sodium/potassium/calcium exchanger), member 1
  Uniprot ID: O60721
  ENST ID: ENST00000261892
  CDS Start-End: 288-3587
cccttcacacccgaccctgccttgaattaggattccataggagagctgggggcaggagaatggggtgttccctgctgtccagcttcagacccactctttgagatattggattctgacaagtttccagagctgagaagacagccagatgtcaaggtctgaagggttgtggataccccctggctgggcttcatggagaaatcttctctgatcaccaacctgaatcccagagtagcctccatcttaggacagaatgagaggccttctgtaaccagatataactggccagcatggggaaattgatcaggatggggccgcaagagaggtggttactccggacaaagcggcttcattggagtcgcctcctcttcttactgggaatgttgatcatcggttctacttatcagcaccttaggagaccccggggcctttcctcattgtgggcagcagtctcttctcatcagcctataaaactggccagtcgggacctctccagtgaagagatgatgatgatgagcagcagcccttcaaaacctagctccgaaatggggggtaagatgctggtaccccaagcctcagtgggcagtgatgaagcaacactgagcatgacagtggagaatatccccagtatgcctaaaagaacagccaagatgatcccaacaacaaccaagaataattacagcccaacagcagcaggtacagaaagaaggaaggaagacaccccaacatccagtagaacactgacttactacacctcaacttcaagcagacaaatagtaaaaaagtataccccaacacccaggggagaaatgaagagctacagcccaactcaagtgagggaaaaggtgaagtatactccttccccacgtggtagaagagtaggcacttacgtgccgtccacattcatgacaatggaaacaagccatgcgatcacccccaggacaacagtgaaagacagtgacattacagcaacctataaaatactcgaaaccaactctcttaagagaataatggaggaaaccaccccaaccactctcaagggaatgtttgatagcaccccaacttttctgacacatgaggtagaagcaaacgtcttgacttctccaaggagcgtcatggaaaaaaacaacctgtttccccccagaagagtggaaagtaacagctcagcccatccctgggggttagtgggaaagagcaacccgaagactccccagggaacagtcctgttgcataccccagccacctctgaggggcaggtgacaataagcaccatgacaggcagcagcccagcagaaaccaaagccttcactgctgcctggagtcttaggaatccttcacccaggaccagtgtatcagccatcaaaacagccccagccatagtctggaggctggcaaagaaaccttccacagcacccagcacctcaacaacccctacggtcagggcaaagctgaccatgcaggtccatcactgtgtggttgtgaagccaaccccagccatgctcaccactccctccccaagcctcacaacagccctgctcccagaggagctcagtcctagtccctcagtgctgcctcccagcttgccagacctccaccccaagggagagtaccccccagatctgttcagtgtggaggagcggcggcagggctgggtggtcctgcacgtttttggcatgatgtatgtgtttgtggccttggccattgtttgcgacgagtacttcgttccagccctgggtgtcatcacagacaagctgcagatctccgaggatgtggcaggcgccacattcatggctgctggaggctctgctcctgagctcttcacctccctcatcggtgtcttcatttcccacagcaacgtgggcattggtaccattgtgggctctgctgtgttcaacattctctttgtcattggcacttgttccctcttctcccgagagatcctcaacctcacctggtggcccttattccgtgatgtctccttctacatccttgacctgataatgctcatcctcttcttcctggacagcctcattgcctggtgggagagcctgctgctgctgctggcctatgccttctatgtgttcaccatgaagtggaacaagcatatcgaggtctgggtgaaggagcagctcagcaggaggccagtggccaaggtcatggccttagaagacctcagcaagccgggcgatggggccattgcggtggatgagctacaggataacaagaagctgaagctcccgtccttgctgacccgagggagcagctcgacctctctgcacaacagcaccatccgcagcaccatctaccagctcatgctccacagcctggaccccctgagggaagttcgccttgccaaggagaaggaggaggagagcttgaatcaaggggccagagcccaaccccaggccaaagcagaaagcaaaccagaagaggaggagccagccaagctccctgcggtcacggtcacaccagcccctgttccagacatcaagggagatcagaaggagaatccaggcggtcaggaagatgtggctgaggccgagagcacaggtgaaatgccaggcgaagagggcgaaactgctggtgaaggtgaaactgaagagaaaagtggaggtgaaactcaaccagaaggtgaaggtgaaactgaaacacaaggaaaaggagaagaatgtgaagatgaaaatgaagcagaaggaaaaggagacaatgaaggtgaagatgagggtgaaatccacgcagaagatggtgaaatgaaaggtaatgaaggtgaaactgaaagccaggaactcagtgctgaaaatcacggtgaagccaaaaatgatgagaaaggtgtagaagatggagggggaagtgatggaggggatagcgaagaggaggaagaggaggaggaagagcaggaggaagaggaggaggaggaagagcaggaggaagaggaggaggaggaggaggaagaggaggagaagggaaatgaagagcctctgtccctggactggcctgaaaccaggcagaagcaggccatttacctcttccttctgcccatcgtgttcccactgtggctgacagtccccgacgtccgaaggcaggagtctaggaagttttttgttttcaccttcctgggatctatcatgtggatagccatgttctcatacctcatggtgtggtgggctcaccaggttggtgaaacaatagggatttctgaagagatcatgggcctgacaatccttgcagcaggcacatcaattcctgacctcatcaccagtgtgattgtcgctcgaaaaggcctgggagacatggctgtgtcaagctctgtgggcagtaacatatttgatatcactgtgggcttgcctgttccttggttgcttttctctcttatcaatggattacagccagttccagtcagcagcaatggcttgttttgtgcaattgttttgctttttctcatgcttctgtttgtgatctcttcaattgcgtcatgtaaatggagaatgaacaagatcctgggcttcacaatgttcctcctttactttgtattcctgataatcagtgtgatgttagaagatcgaatcatatcctgtcctgtatctgtctgaatcagtcactcttgctcacaatgggcatggatcagaagaccatgcagaagttactgtatctcttgtgaccctaatgaaagaatgtatatgatcctggaaagtgaactgggtgacctaggacctctgatatgaatgtgatctgagactaaagtttgtccttggaaacacctgcagctcattgtggattaagaacctcacccctggaggggtggagtttctacccctgactcatgcagacatctattacatggaggcagtagaaggacccctggagccagagggttttctaaatgagataactgggggcaaaggttgggataggcgcagcagctataagacaagctcctacgctcactgttccctgatcattccaaaggctgctggcccaaaagatgcagatgtggtctacatctcagccttcctgacctctgccccaaacacacgctgcaattttgtctcctccttttctgttcaaattgtgaggttctatcaggtttgtaatcactgtagcttcagttattggtgagtctaaggatccaaggctacagaaaaaaaagaaatataacaggaattaatgatcattccacgttttgtagcccactgcatctggatatataccagtattttctttttttttttttttgagacagagtttggctcttgttgcccaggctggtgtgcaatggcgtgatctcggcacaccacaaccttcacctccccggttcaagcaattctcctgcctcagcctgaagtcgtgatctgcccgcctcggcctcccaaagtgctgggattacaggcgtcagccaccgcgcctggcctataccagtattttctagtttaaaggaggactacattaactcttattgttgtgtttctgaaaagtgaaatttaaaaagcagcctgaaaaataaaaatttataatttgcccttgaattggaaggaatggagattagggaaggaaaactactctagaggccatttaaaagtatgtatttattagaacatgcaaattcatgttgtctccatcagtggtcaccttgagggattagacattctaatggaatgtcctggctccaccctccagcatgttctcacccaacaatgacagttgagtggagtgggaagggaagtcattctaaagagtccaaagtcagtagcgccacatctggtttataaagtaagagatccagtgggacaatgctatttttgtatgccaacctagataggattataaagcaagactgatttcttctgtggtttatgaatggatcttaaggtaattacaaaagggaaattccaagaatgcataacacaatgacaacatggtgagaaaagtgcagtactacttccaaggtagctagtgtaaaggacacttgagtttttaaaactgtggttaaatgttttatgtggaatttgatgagtttgtatattaaataccactgcttgctgcttttactagaatcaagttaagggacacgttagaaatagaacagcttaatatcactggcttcagagcaaaatgagctcgggtgactgcagattatgatggtaaatatggctttaattacaaacatgaggaatgattcactgaagatgaaaagataggacggatgtgatatgaaaaaaacccaaacattttggcattgaatgatggctaaggtgttccaagtattccatcttttaagatgaattgcttaattaattgcctcgctaccccaggattctcattctttggaaataatttttattaaatttcaataaactgtgaatcccaatggtattttactttacaacatggatgggctcatccttatctttaggtcatttggtcagaatcctcccgagaagactgatgaagagtatggaatcatgttccaattctatattcttaattatccttattcctgatgctactgcattgctgggtttccatagccaaggcctaagaacaggaggagaaggcaatgcttgtgggagggaggtcccaataccaaaattctgggcactaacctggtgtctgcagcccgttcccgttagcctcggggatgtcacctcacccacagcctgggatctgacgttcttcctcagactggagtaaggagtgatggaccgtaaaatgctgtgtaatgataaaaggctgaaatatccactgaatgattaaaaccaactctaataatctga

SEQ ID NO: 183301 - DNA, 5678 bp, Homo sapiens
  Payload ID: 16114
  Gene Symbol: SLC24A1
  Gene Name: solute carrier family 24 (sodium/potassium/calcium exchanger), member 1
  Uniprot ID: O60721
  ENST ID: ENST00000339868
  CDS Start-End: 288-3497
cccttcacacccgaccctgccttgaattaggattccataggagagctgggggcaggagaatggggtgttccctgctgtccagcttcagacccactctttgagatattggattctgacaagtttccagagctgagaagacagccagatgtcaaggtctgaagggttgtggataccccctggctgggcttcatggagaaatcttctctgatcaccaacctgaatcccagagtagcctccatcttaggacagaatgagaggccttctgtaaccagatataactggccagcatggggaaattgatcaggatggggccgcaagagaggtggttactccggacaaagcggcttcattggagtcgcctcctcttcttactgggaatgttgatcatcggttctacttatcagcaccttaggagaccccggggcctttcctcattgtgggcagcagtctcttctcatcagcctataaaactggccagtcgggacctctccagtgaagagatgatgatgatgagcagcagcccttcaaaacctagctccgaaatggggggtaagatgctggtaccccaagcctcagtgggcagtgatgaagcaacactgagcatgacagtggagaatatccccagtatgcctaaaagaacagccaagatgatcccaacaacaaccaagaataattacagcccaacagcagcaggtacagaaagaaggaaggaagacaccccaacatccagtagaacactgacttactacacctcaacttcaagcagacaaatagtaaaaaagtataccccaacacccaggggagaaatgaagagctacagcccaactcaagtgagggaaaaggtgaagtatactccttccccacgtggtagaagagtaggcacttacgtgccgtccacattcatgacaatggaaacaagccatgcgatcacccccaggacaacagtgaaagacagtgacattacagcaacctataaaatactcgaaaccaactctcttaagagaataatggaggaaaccaccccaaccactctcaagggaatgtttgatagcaccccaacttttctgacacatgaggtagaagcaaacgtcttgacttctccaaggagcgtcatggaaaaaaacaacctgtttccccccagaagagtggaaagtaacagctcagcccatccctgggggttagtgggaaagagcaacccgaagactccccagggaacagtcctgttgcataccccagccacctctgaggggcaggtgacaataagcaccatgacaggcagcagcccagcagaaaccaaagccttcactgctgcctggagtcttaggaatccttcacccaggaccagtgtatcagccatcaaaacagccccagccatagtctggaggctggcaaagaaaccttccacagcacccagcacctcaacaacccctacggtcagggcaaagctgaccatgcaggtccatcactgtgtggttgtgaagccaaccccagccatgctcaccactccctccccaagcctcacaacagccctgctcccagaggagctcagtcctagtccctcagtgctgcctcccagcttgccagacctccaccccaagggagagtaccccccagatctgttcagtgtggaggagcggcggcagggctgggtggtcctgcacgtttttggcatgatgtatgtgtttgtggccttggccattgtttgcgacgagtacttcgttccagccctgggtgtcatcacagacaagctgcagatctccgaggatgtggcaggcgccacattcatggctgctggaggctctgctcctgagctcttcacctccctcatcggtgtcttcatttcccacagcaacgtgggcattggtaccattgtgggctctgctgtgttcaacattctctttgtcattggcacttgttccctcttctcccgagagatcctcaacctcacctggtggcccttattccgtgatgtctccttctacatccttgacctgataatgctcatcctcttcttcctggacagcctcattgcctggtgggagagcctgctgctgctgctggcctatgccttctatgtgttcaccatgaagtggaacaagcatatcgaggtctgggtgaaggagcagctcagcaggaggccagtggccaaggtcatggccttagaagacctcagcaagccgggcgatggggccattgcggtggatgagctacaggataacaagaagctgaagctcccgtccttgctgacccgagggagcagctcgacctctctgcacaacagcaccatccgcagcaccatctaccagctcatgctccacagcctggaccccctgagggaagttcgccttgccaaggagaaggaggaggagagcttgaatcaaggggccagagcccaaccccaggccaaagcagaaagcaaaccagaagaggaggagccagccaagctccctgcggtcacggtcacaccagcccctgttccagacatcaagggagatcagaaggagaatccaggcggtcaggaagatgtggctgaggccgagagcacaggtgaaatgccaggcgaagagggcgaaactgctggtgaaggtgaaactgaagagaaaagtggaggtgaaactcaaccagaaggtgaaggtgaaactgaaacacaaggaaaaggagaagaatgtgaagatgaaaatgaagcagaaggaaaaggagacaatgaaggtgaagatgagggtgaaatccacgcagaagatggtgaaatgaaaggtaatgaaggtgaaactgaaagccaggaactcagtgctgaaaatcacggtgaagccaaaaatgatgagaaaggtgtagaagatggagggggaagtgatggaggggatagcgaagaggaggaagaggaggaggaagagcaggaggaagaggaggaggaggaagagcaggaggaagaggaggaggaggaggaggaagaggaggagaagggaaatgaagagcctctgtccctggactggcctgaaaccaggcagaagcaggccatttacctcttccttctgcccatcgtgttcccactgtggctgacagtccccgacgtccgaaggcaggttggtgaaacaatagggatttctgaagagatcatgggcctgacaatccttgcagcaggcacatcaattcctgacctcatcaccagtgtgattgtcgctcgaaaaggcctgggagacatggctgtgtcaagctctgtgggcagtaacatatttgatatcactgtgggcttgcctgttccttggttgcttttctctcttatcaatggattacagccagttccagtcagcagcaatggcttgttttgtgcaattgttttgctttttctcatgcttctgtttgtgatctcttcaattgcgtcatgtaaatggagaatgaacaagatcctgggcttcacaatgttcctcctttactttgtattcctgataatcagtgtgatgttagaagatcgaatcatatcctgtcctgtatctgtctgaatcagtcactcttgctcacaatgggcatggatcagaagaccatgcagaagttactgtatctcttgtgaccctaatgaaagaatgtatatgatcctggaaagtgaactgggtgacctaggacctctgatatgaatgtgatctgagactaaagtttgtccttggaaacacctgcagctcattgtggattaagaacctcacccctggaggggtggagtttctacccctgactcatgcagacatctattacatggaggcagtagaaggacccctggagccagagggttttctaaatgagataactgggggcaaaggttgggataggcgcagcagctataagacaagctcctacgctcactgttccctgatcattccaaaggctgctggcccaaaagatgcagatgtggtctacatctcagccttcctgacctctgccccaaacacacgctgcaattttgtctcctccttttctgttcaaattgtgaggttctatcaggtttgtaatcactgtagcttcagttattggtgagtctaaggatccaaggctacagaaaaaaaagaaatataacaggaattaatgatcattccacgttttgtagcccactgcatctggatatataccagtattttctttttttttttttttgagacagagtttggctcttgttgcccaggctggtgtgcaatggcgtgatctcggcacaccacaaccttcacctccccggttcaagcaattctcctgcctcagcctgaagtcgtgatctgcccgcctcggcctcccaaagtgctgggattacaggcgtcagccaccgcgcctggcctataccagtattttctagtttaaaggaggactacattaactcttattgttgtgtttctgaaaagtgaaatttaaaaagcagcctgaaaaataaaaatttataatttgcccttgaattggaaggaatggagattagggaaggaaaactactctagaggccatttaaaagtatgtatttattagaacatgcaaattcatgttgtctccatcagtggtcaccttgagggattagacattctaatggaatgtcctggctccaccctccagcatgttctcacccaacaatgacagttgagtggagtgggaagggaagtcattctaaagagtccaaagtcagtagcgccacatctggtttataaagtaagagatccagtgggacaatgctatttttgtatgccaacctagataggattataaagcaagactgatttcttctgtggtttatgaatggatcttaaggtaattacaaaagggaaattccaagaatgcataacacaatgacaacatggtgagaaaagtgcagtactacttccaaggtagctagtgtaaaggacacttgagtttttaaaactgtggttaaatgttttatgtggaatttgatgagtttgtatattaaataccactgcttgctgcttttactagaatcaagttaagggacacgttagaaatagaacagcttaatatcactggcttcagagcaaaatgagctcgggtgactgcagattatgatggtaaatatggctttaattacaaacatgaggaatgattcactgaagatgaaaagataggacggatgtgatatgaaaaaaacccaaacattttggcattgaatgatggctaaggtgttccaagtattccatcttttaagatgaattgcttaattaattgcctcgctaccccaggattctcattctttggaaataatttttattaaatttcaataaactgtgaatcccaatggtattttactttacaacatggatgggctcatccttatctttaggtcatttggtcagaatcctcccgagaagactgatgaagagtatggaatcatgttccaattctatattcttaattatccttattcctgatgctactgcattgctgggtttccatagccaaggcctaagaacaggaggagaaggcaatgcttgtgggagggaggtcccaataccaaaattctgggcactaacctggtgtctgcagcccgttcccgttagcctcggggatgtcacctcacccacagcctgggatctgacgttcttcctcagactggagtaaggagtgatggaccgtaaaatgctgtgtaatgataaaaggctgaaatatccactgaatgattaaaaccaactctaataatctga

SEQ ID NO: 183302 - DNA, 3323 bp, Homo sapiens
  Payload ID: 16114
  Gene Symbol: SLC24A1
  Gene Name: solute carrier family 24 (sodium/potassium/calcium exchanger), member 1
  Uniprot ID: O60721
  ENST ID: ENST00000399033
  CDS Start-End: 83-3292
tgatcaccaacctgaatcccagagtagcctccatcttaggacagaatgagaggccttctgtaaccagatataactggccagcatggggaaattgatcaggatggggccgcaagagaggtggttactccggacaaagcggcttcattggagtcgcctcctcttcttactgggaatgttgatcatcggttctacttatcagcaccttaggagaccccggggcctttcctcattgtgggcagcagtctcttctcatcagcctataaaactggccagtcgggacctctccagtgaagagatgatgatgatgagcagcagcccttcaaaacctagctccgaaatggggggtaagatgctggtaccccaagcctcagtgggcagtgatgaagcaacactgagcatgacagtggagaatatccccagtatgcctaaaagaacagccaagatgatcccaacaacaaccaagaataattacagcccaacagcagcaggtacagaaagaaggaaggaagacaccccaacatccagtagaacactgacttactacacctcaacttcaagcagacaaatagtaaaaaagtataccccaacacccaggggagaaatgaagagctacagcccaactcaagtgagggaaaaggtgaagtatactccttccccacgtggtagaagagtaggcacttacgtgccgtccacattcatgacaatggaaacaagccatgcgatcacccccaggacaacagtgaaagacagtgacattacagcaacctataaaatactcgaaaccaactctcttaagagaataatggaggaaaccaccccaaccactctcaagggaatgtttgatagcaccccaacttttctgacacatgaggtagaagcaaacgtcttgacttctccaaggagcgtcatggaaaaaaacaacctgtttccccccagaagagtggaaagtaacagctcagcccatccctgggggttagtgggaaagagcaacccgaagactccccagggaacagtcctgttgcataccccagccacctctgaggggcaggtgacaataagcaccatgacaggcagcagcccagcagaaaccaaagccttcactgctgcctggagtcttaggaatccttcacccaggaccagtgtatcagccatcaaaacagccccagccatagtctggaggctggcaaagaaaccttccacagcacccagcacctcaacaacccctacggtcagggcaaagctgaccatgcaggtccatcactgtgtggttgtgaagccaaccccagccatgctcaccactccctccccaagcctcacaacagccctgctcccagaggagctcagtcctagtccctcagtgctgcctcccagcttgccagacctccaccccaagggagagtaccccccagatctgttcagtgtggaggagcggcggcagggctgggtggtcctgcacgtttttggcatgatgtatgtgtttgtggccttggccattgtttgcgacgagtacttcgttccagccctgggtgtcatcacagacaagctgcagatctccgaggatgtggcaggcgccacattcatggctgctggaggctctgctcctgagctcttcacctccctcatcggtgtcttcatttcccacagcaacgtgggcattggtaccattgtgggctctgctgtgttcaacattctctttgtcattggcacttgttccctcttctcccgagagatcctcaacctcacctggtggcccttattccgtgatgtctccttctacatccttgacctgataatgctcatcctcttcttcctggacagcctcattgcctggtgggagagcctgctgctgctgctggcctatgccttctatgtgttcaccatgaagtggaacaagcatatcgaggtctgggtgaaggagcagctcagcaggaggccagtggccaaggtcatggccttagaagacctcagcaagccgggcgatggggccattgcggtggatgagctacaggataacaagaagctgaagctcccgtccttgctgacccgagggagcagctcgacctctctgcacaacagcaccatccgcagcaccatctaccagctcatgctccacagcctggaccccctgagggaagttcgccttgccaaggagaaggaggaggagagcttgaatcaaggggccagagcccaaccccaggccaaagcagaaagcaaaccagaagaggaggagccagccaagctccctgcggtcacggtcacaccagcccctgttccagacatcaagggagatcagaaggagaatccaggcggtcaggaagatgtggctgaggccgagagcacaggtgaaatgccaggcgaagagggcgaaactgctggtgaaggtgaaactgaagagaaaagtggaggtgaaactcaaccagaaggtgaaggtgaaactgaaacacaaggaaaaggagaagaatgtgaagatgaaaatgaagcagaaggaaaaggagacaatgaaggtgaagatgagggtgaaatccacgcagaagatggtgaaatgaaaggtaatgaaggtgaaactgaaagccaggaactcagtgctgaaaatcacggtgaagccaaaaatgatgagaaaggtgtagaagatggagggggaagtgatggaggggatagcgaagaggaggaagaggaggaggaagagcaggaggaagaggaggaggaggaagagcaggaggaagaggaggaggaggaggaggaagaggaggagaagggaaatgaagagcctctgtccctggactggcctgaaaccaggcagaagcaggccatttacctcttccttctgcccatcgtgttcccactgtggctgacagtccccgacgtccgaaggcaggttggtgaaacaatagggatttctgaagagatcatgggcctgacaatccttgcagcaggcacatcaattcctgacctcatcaccagtgtgattgtcgctcgaaaaggcctgggagacatggctgtgtcaagctctgtgggcagtaacatatttgatatcactgtgggcttgcctgttccttggttgcttttctctcttatcaatggattacagccagttccagtcagcagcaatggcttgttttgtgcaattgttttgctttttctcatgcttctgtttgtgatctcttcaattgcgtcatgtaaatggagaatgaacaagatcctgggcttcacaatgttcctcctttactttgtattcctgataatcagtgtgatgttagaagatcgaatcatatcctgtcctgtatctgtctgaatcagtcactcttgctcacaatgggcatgga

SEQ ID NO: 183303 - DNA, 3246 bp, Homo sapiens
  Payload ID: 16114
  Gene Symbol: SLC24A1
  Gene Name: solute carrier family 24 (sodium/potassium/calcium exchanger), member 1
  Uniprot ID: O60721
  ENST ID: ENST00000546330
  CDS Start-End: 1-3246
atggggaaattgatcaggatggggccgcaagagaggtggttactccggacaaagcggcttcattggagtcgcctcctcttcttactgggaatgttgatcatcggttctacttatcagcaccttaggagaccccggggcctttcctcattgtgggcagcagtctcttctcatcagcctataaaactggccagtcgggacctctccagtgaagagatgatgatgatgagcagcagcccttcaaaacctagctccgaaatggggggtaagatgctggtaccccaagcctcagtgggcagtgatgaagcaacactgagcatgacagtggagaatatccccagtatgcctaaaagaacagccaagatgatcccaacaacaaccaagaataattacagcccaacagcagcaggtacagaaagaaggaaggaagacaccccaacatccagtagaacactgacttactacacctcaacttcaagcagacaaatagtaaaaaagtataccccaacacccaggggagaaatgaagagctacagcccaactcaagtgagggaaaaggtgaagtatactccttccccacgtggtagaagagtaggcacttacgtgccgtccacattcatgacaatggaaacaagccatgcgatcacccccaggacaacagtgaaagacagtgacattacagcaacctataaaatactcgaaaccaactctcttaagagaataatggaggaaaccaccccaaccactctcaagggaatgtttgatagcaccccaacttttctgacacatgaggtagaagcaaacgtcttgacttctccaaggagcgtcatggaaaaaaacaacctgtttccccccagaagagtggaaagtaacagctcagcccatccctgggggttagtgggaaagagcaacccgaagactccccagggaacagtcctgttgcataccccagccacctctgaggggcaggtgacaataagcaccatgacaggcagcagcccagcagaaaccaaagccttcactgctgcctggagtcttaggaatccttcacccaggaccagtgtatcagccatcaaaacagccccagccatagtctggaggctggcaaagaaaccttccacagcacccagcacctcaacaacccctacggtcagggcaaagctgaccatgcaggtccatcactgtgtggttgtgaagccaaccccagccatgctcaccactccctccccaagcctcacaacagccctgctcccagaggagctcagtcctagtccctcagtgctgcctcccagcttgccagacctccaccccaagggagagtaccccccagatctgttcagtgtggaggagcggcggcagggctgggtggtcctgcacgtttttggcatgatgtatgtgtttgtggccttggccattgtttgcgacgagtacttcgttccagccctgggtgtcatcacagacaagctgcagatctccgaggatgtggcaggcgccacattcatggctgctggaggctctgctcctgagctcttcacctccctcatcggtgtcttcatttcccacagcaacgtgggcattggtaccattgtgggctctgctgtgttcaacattctctttgtcattggcacttgttccctcttctcccgagagatcctcaacctcacctggtggcccttattccgtgatgtctccttctacatccttgacctgataatgctcatcctcttcttcctggacagcctcattgcctggtgggagagcctgctgctgctgctggcctatgccttctatgtgttcaccatgaagtggaacaagcatatcgaggtctgggtgaaggagcagctcagcaggaggccagtggccaaggtcatggccttagaagacctcagcaagctcccgtccttgctgacccgagggagcagctcgacctctctgcacaacagcaccatccgcagcaccatctaccagctcatgctccacagcctggaccccctgagggaagttcgccttgccaaggagaaggaggaggagagcttgaatcaaggggccagagcccaaccccaggccaaagcagaaagcaaaccagaagaggaggagccagccaagctccctgcggtcacggtcacaccagcccctgttccagacatcaagggagatcagaaggagaatccaggcggtcaggaagatgtggctgaggccgagagcacaggtgaaatgccaggcgaagagggcgaaactgctggtgaaggtgaaactgaagagaaaagtggaggtgaaactcaaccagaaggtgaaggtgaaactgaaacacaaggaaaaggagaagaatgtgaagatgaaaatgaagcagaaggaaaaggagacaatgaaggtgaagatgagggtgaaatccacgcagaagatggtgaaatgaaaggtaatgaaggtgaaactgaaagccaggaactcagtgctgaaaatcacggtgaagccaaaaatgatgagaaaggtgtagaagatggagggggaagtgatggaggggatagcgaagaggaggaagaggaggaggaagagcaggaggaagaggaggaggaggaagagcaggaggaagaggaggaggaggaggaggaagaggaggagaagggaaatgaagagcctctgtccctggactggcctgaaaccaggcagaagcaggccatttacctcttccttctgcccatcgtgttcccactgtggctgacagtccccgacgtccgaaggcaggagtctaggaagttttttgttttcaccttcctgggatctatcatgtggatagccatgttctcatacctcatggtgtggtgggctcaccaggttggtgaaacaatagggatttctgaagagatcatgggcctgacaatccttgcagcaggcacatcaattcctgacctcatcaccagtgtgattgtcgctcgaaaaggcctgggagacatggctgtgtcaagctctgtgggcagtaacatatttgatatcactgtgggcttgcctgttccttggttgcttttctctcttatcaatggattacagccagttccagtcagcagcaatggcttgttttgtgcaattgttttgctttttctcatgcttctgtttgtgatctcttcaattgcgtcatgtaaatggagaatgaacaagatcctgggcttcacaatgttcctcctttactttgtattcctgataatcagtgtgatgttagaagatcgaatcatatcctgtcctgtatctgtctga

SEQ ID NO: 183304 - DNA, 3983 bp, Homo sapiens
  Payload ID: 16114
  Gene Symbol: SLC24A1
  Gene Name: solute carrier family 24 (sodium/potassium/calcium exchanger), member 1
  ENST ID: ENST00000537259
  CDS Start-End: 625-3663
attgccctgaatctctccccattctcgggctctttccttccccttctgccccactgacccatgggcctcacctggcccggtgactctgtgtccgcttcacacttttgtcccctcactcccctgggccccgtcggtgcacgagcccaacccttcctgctattttcctcgtcactctttagccccctctctcgtatcctctgaaccggttgacagaatcctcttcctgttctttttaaactgcaattcctgaactacaaatcctggccgggcgtggtggttcaggcctgtaatcccagcactttgggaggccaaggtgggcggatcgcttcaggtcaggagtttgagaccagcctgggaaacatgacctagttatgcttgagcaggcattgggctccaggcctctggccgctccagaagggcacttgactgtaaggatgaaatcctgtctctgagctgcactcagtgtgaagtgccaccacctgcatccccctgtctcagggttgtggataccccctggctgggcttcatggagaaatcttctctgatcaccaacctgaatcccagagtagcctccatcttaggacagaatgagaggccttctgtaaccagatataactggccagcatggggaaattgatcaggatggggccgcaagagaggtggttactccggacaaagcggcttcattggagtcgcctcctcttcttactgggaatgttgatcatcggttctacttatcagcaccttaggagaccccggggcctttcctcattgtgggcagcagtctcttctcatcagcctataaaactggccagtcgggacctctccagtgaagagatgatgatgatgagcagcagcccttcaaaacctagctccgaaatggggggtaagatgctggtaccccaagcctcagtgggcagtgatgaagcaacactgagcatgacagtggagaatatccccagtatgcctaaaagaacagccaagatgatcccaacaacaaccaagaataattacagcccaacagcagcaggtacagaaagaaggaaggaagacaccccaacatccagtagaacactgacttactacacctcaacttcaagcagacaaatagtaaaaaagtataccccaacacccaggggagaaatgaagagctacagcccaactcaagtgagggaaaaggtgaagtatactccttccccacgtggtagaagagtaggcacttacgtgccgtccacattcatgacaatggaaacaagccatgcgatcacccccaggacaacagtgaaagacagtgacattacagcaacctataaaatactcgaaaccaactctcttaagagaataatggaggaaaccaccccaaccactctcaagggaatgtttgatagcaccccaacttttctgacacatgaggtagaagcaaacgtcttgacttctccaaggagcgtcatggaaaaaaacaacctgtttccccccagaagagtggaaagtaacagctcagcccatccctgggggttagtgggaaagagcaacccgaagactccccagggaacagtcctgttgcataccccagccacctctgaggggcaggtgacaataagcaccatgacaggcagcagcccagcagaaaccaaagccttcactgctgcctggagtcttaggaatccttcacccaggaccagtgtatcagccatcaaaacagccccagccatagtctggaggctggcaaagaaaccttccacagcacccagcacctcaacaacccctacggtcagggcaaagctgaccatgcaggtccatcactgtgtggttgtgaagccaaccccagccatgctcaccactccctccccaagcctcacaacagccctgctcccagaggagctcagtcctagtccctcagtgctgcctcccagcttgccagacctccaccccaagggagagtaccccccagatctgttcagtgtggaggagcggcggcagggctgggtggtcctgcacgtttttggcatgatgtatgtgtttgtggccttggccattgtttgcgacgagtacttcgttccagccctgggtgtcatcacagacaagctgcagatctccgaggatgtggcaggcgccacattcatggctgctggaggctctgctcctgagctcttcacctccctcatcggtgtcttcatttcccacagcaacgtgggcattggtaccattgtgggctctgctgtgttcaacattctctttgtcattggcacttgttccctcttctcccgagagatcctcaacctcacctggtggcccttattccgtgatgtctccttctacatccttgacctgataatgctcatcctcttcttcctggacagcctcattgcctggtgggagagcctgctgctgctgctggcctatgccttctatgtgttcaccatgaagtggaacaagcatatcgaggtctgggtgaaggagcagctcagcaggaggccagtggccaaggtcatggccttagaagacctcagcaagctcccgtccttgctgacccgagggagcagctcgacctctctgcacaacagcaccatccgcagcaccatctaccagctcatgctccacagcctggaccccctgagggaagttcgccttgccaaggagaaggaggaggagagcttgaatcaaggggccagagcccaaccccaggccaaagcagaaagcaaaccagaagaggaggagccagccaagctccctgcggtcacggtcacaccagcccctgttccagacatcaagggagatcagaaggagaatccaggcggtcaggaagatgtggctgaggccgagagcacaggtgaaatgccaggcgaagagggcgaaactgctggtgaaggtgaaactgaagagaaaagtggaggtgaaactcaaccagaaggtgaaggtgaaactgaaacacaaggaaaaggagaagaatgtgaagatgaaaatgaagcagaaggaaaaggagacaatgaaggtgaagatgagggtgaaatccacgcagaagatggtgaaatgaaaggtaatgaaggtgaaactgaaagccaggaactcagtgctgaaaatcacggtgaagccaaaaatgatgagaaaggtgtagaagatggagggggaagtgatggaggggatagcgaagaggaggaagaggaggaggaagagcaggaggaagaggaggaggaggaagagcaggaggaagaggaggaggaggaggaggaagaggaggagaagggaaatgaagagcctctgtccctggactggcctgaaaccaggcagaagcaggccatttacctcttccttctgcccatcgtgttcccactgtggctgacagtccccgacgtccgaaggcaggagtctaggaagttttttgttttcaccttcctgggatctatcatgtggatagccatgttctcatacctcatggtgtggtgggctcaccaggttggtgaaacaatagggatttctgaagagatcatgggcctgacaatccttgcagcaggcacatcaattcctgacctcatcaccagtgtgattgtcgctcgaaaaggcctgggagacatggctgtgtcaagctctgtgggcagtaacatatttgatatcactgtgggagttggaagctgtgaaatgtttcagcatggtgctattcactaatggtgtgaactcaaaagattctacagacttcagattctgaagcttgttgaaaaagctaagttcctcaatatggatgaaaatctatctggctgtacttttagaggggaatttttctacttttgaaaaaaattctgaatatttatatatagtattaacagaataccccagtaagtcatatttcagataaatattctatagtataatttgcatcatacccaatattttagatattaaaataagggtaaaatttggaatataatcacttgtctgcatatttcccaatgtaagttttcatgtagaatattaaaatttaaattgat

SEQ ID NO: 183305 - DNA, 3169 bp, Homo sapiens
  Payload ID: 16114
  Gene Symbol: SLC24A1
  Gene Name: solute carrier family 24 (sodium/potassium/calcium exchanger), member 1
  ENST ID: ENST00000544319
  CDS Start-End: 211-3168
tccagcttcagacccactctttgagatattggattctgacaagtttccagagctgagaagacagccagatgtcaaggtctgaagggttgtggataccccctggctgggcttcatggagaaatcttctctgatcaccaacctgaatcccagagtagcctccatcttaggacagaatgagaggccttctgtaaccagatataactggccagcatggggaaattgatcaggatggggccgcaagagaggtggttactccggacaaagcggcttcattggagtcgcctcctcttcttactgggaatgttgatcatcggttctacttatcagcaccttaggagaccccggggcctttcctcattgtgggcagcagtctcttctcatcagcctataaaactggccagtcgggacctctccagtgaagagatgatgatgatgagcagcagcccttcaaaacctagctccgaaatggggggtaagatgctggtaccccaagcctcagtgggcagtgatgaagcaacactgagcatgacagtggagaatatccccagtatgcctaaaagaacagccaagatgatcccaacaacaaccaagaataattacagcccaacagcagcaggtacagaaagaaggaaggaagacaccccaacatccagtagaacactgacttactacacctcaacttcaagcagacaaatagtaaaaaagtataccccaacacccaggggagaaatgaagagctacagcccaactcaagtgagggaaaaggtgaagtatactccttccccacgtggtagaagagtaggcacttacgtgccgtccacattcatgacaatggaaacaagccatgcgatcacccccaggacaacagtgaaagacagtgacattacagcaacctataaaatactcgaaaccaactctcttaagagaataatggaggaaaccaccccaaccactctcaagggaatgtttgatagcaccccaacttttctgacacatgaggtagaagcaaacgtcttgacttctccaaggagcgtcatggaaaaaaacaacctgtttccccccagaagagtggaaagtaacagctcagcccatccctgggggttagtgggaaagagcaacccgaagactccccagggaacagtcctgttgcataccccagccacctctgaggggcaggtgacaataagcaccatgacaggcagcagcccagcagaaaccaaagccttcactgctgcctggagtcttaggaatccttcacccaggaccagtgtatcagccatcaaaacagccccagccatagtctggaggctggcaaagaaaccttccacagcacccagcacctcaacaacccctacggtcagggcaaagctgaccatgcaggtccatcactgtgtggttgtgaagccaaccccagccatgctcaccactccctccccaagcctcacaacagccctgctcccagaggagctcagtcctagtccctcagtgctgcctcccagcttgccagacctccaccccaagggagagtaccccccagatctgttcagtgtggaggagcggcggcagggctgggtggtcctgcacgtttttggcatgatgtatgtgtttgtggccttggccattgtttgcgacgagtacttcgttccagccctgggtgtcatcacagacaagctgcagatctccgaggatgtggcaggcgccacattcatggctgctggaggctctgctcctgagctcttcacctccctcatcggtgtcttcatttcccacagcaacgtgggcattggtaccattgtgggctctgctgtgttcaacattctctttgtcattggcacttgttccctcttctcccgagagatcctcaacctcacctggtggcccttattccgtgatgtctccttctacatccttgacctgataatgctcatcctcttcttcctggacagcctcattgcctggtgggagagcctgctgctgctgctggcctatgccttctatgtgttcaccatgaagtggaacaagcatatcgaggtctgggtgaaggagcagctcagcaggaggccagtggccaaggtcatggccttagaagacctcagcaaggaagatgtggctgaggccgagagcacaggtgaaatgccaggcgaagagggcgaaactgctggtgaaggtgaaactgaagagaaaagtggaggtgaaactcaaccagaaggtgaaggtgaaactgaaacacaaggaaaaggagaagaatgtgaagatgaaaatgaagcagaaggaaaaggagacaatgaaggtgaagatgagggtgaaatccacgcagaagatggtgaaatgaaaggtaatgaaggtgaaactgaaagccaggaactcagtgctgaaaatcacggtgaagccaaaaatgatgagaaaggtgtagaagatggagggggaagtgatggaggggatagcgaagaggaggaagaggaggaggaagagcaggaggaagaggaggaggaggaagagcaggaggaagaggaggaggaggaggaggaagaggaggagaagggaaatgaagagcctctgtccctggactggcctgaaaccaggcagaagcaggccatttacctcttccttctgcccatcgtgttcccactgtggctgacagtccccgacgtccgaaggcaggagtctaggaagttttttgttttcaccttcctgggatctatcatgtggatagccatgttctcatacctcatggtgtggtgggctcaccaggttggtgaaacaatagggatttctgaagagatcatgggcctgacaatccttgcagcaggcacatcaattcctgacctcatcaccagtgtgattgtcgctcgaaaaggcctgggagacatggctgtgtcaagctctgtgggcagtaacatatttgatatcactgtgggcttgcctgttccttggttgcttttctctcttatcaatggattacagccagttccagtcagcagcaatggcttgttttgtgcaattgttttgctttttctcatgcttctgtttgtgatctcttcaattgcgtcatgtaaatggagaatgaacaagatcctgggcttcacaatgttcctcctttactttgtattcctgataatcagtgtgatgttagaagatcgaatcatatcctgtcctgtatctgtctgaa

SEQ ID NO: 183306 - DNA, 854 bp, Homo sapiens
  Payload ID: 16114
  Gene Symbol: SLC24A1
  Gene Name: solute carrier family 24 (sodium/potassium/calcium exchanger), member 1
  ENST ID: ENST00000505666
  CDS Start-End: 1-170
ctcgaaaaggcctgggagacatggctgtgtcaagctctgtgggcagtaacatatttgatatcactgtgggagtttggctcttgttgcccaggctggtgtgcaatggcgtgatctcggcacaccacaaccttcacctccccggttcaagcaattctcctgcctcagcctgaagtcgtgatctgcccgcctcggcctcccaaagtgctgggattacaggcgtcagccaccgcgcctggcctataccagtattttctagtttaaaggaggactacattaactcttattgttgtgtttctgaaaagtgaaatttaaaaagcagcctgaaaaataaaaatttataatttgcccttgaattggaaggaatggagattagggaaggaaaactactctagaggccatttaaaagtatgtatttattagaacatgcaaattcatgttgtctccatcagtggtcaccttgagggattagacattctaatggaatgtcctggctccaccctccagcatgttctcacccaacaatgacagttgagtggagtgggaagggaagtcattctaaagagtccaaagtcagtagcgccacatctggtttataaagtaagagatccagtgggacaatgctatttttgtatgccaacctagataggattataaagcaagactgatttcttctgtggtttatgaatggatcttaaggtaattacaaaagggaaattccaagaatgcataacacaatgacaacatggtgagaaaagtgcagtactacttccaaggtagctagtgtaaaggacacttgagtttttaaaactgtggttaaatgttttatgtggaatttgatgagtttgtatattaaa

SEQ ID NO: 183307 - DNA, 2170 bp, Homo sapiens
  Payload ID: 16115
  Gene Symbol: SLC24A2
  Gene Name: solute carrier family 24 (sodium/potassium/calcium exchanger), member 2
  Uniprot ID: Q9UI40
  ENST ID: ENST00000286344
  CDS Start-End: 63-1997
tgaaagaaccatctggttgagtctaaagttggaagatcaccatatccaccagaagacccaggatggatctgcaacaaagcaccaccatcacttccctagagaaatggtgtttggatgagtcactgtctggctgcagaagacattatagtgtcaagaaaaaactgaagttaattcgagtcttaggccttttcatgggtctggtagccattagcactgtctcattttcaatcagtgccttttctgagacagatacacagagcacaggagaggccagtgttgtaagtggccctagggtagcacagggttaccatcagagaactctcttagatttaaatgacaagattctggattatactccacagccacctctttctaaggaaggcgagtctgagaatagtacagatcacgcccaaggagactacccgaaagacatcttttcccttgaggagagaagaaaaggtgcgatcattctgcatgtcattggaatgatctacatgttcatagccttagccattgtctgtgatgagttctttgttccttctttgactgtcatcactgaaaaactgggcatctctgatgatgtggctggagccaccttcatggctgcaggagggtcagccccagaacttttcacatctctcataggggtatttatcgctcacagcaacgttggcataggcacaattgtaggttcagcagtattcaacatcctctttgttattggcatgtgtgctctgttttctagagaaatcttaaacctgacatggtggccgctctttcgagatgtgtctttctacattgttgacttgatcatgctgatcatatttttcctggataatgtcatcatgtggtgggaaagcttgcttctcttaacagcttatttttgctatgtggttttcatgaaattcaacgtccaagtagaaaaatgggtgaagcaaatgataaaccgcaataaggtcgtcaaggtgacagcaccagaagcccaagcaaagccatctgcagccagggacaaggatgaaccaactctaccggctaagccgcgtctccagcgaggtggaagctctgcctccctccacaacagtctcatgaggaatagcatcttccaactcatgatacacacccttgacccactcgccgaagggaggttcagagaaaaggcttcaattctccacaagatcgccaagaagaaatgtcatgtggatgagaacgagaggcagaatggggctgccaaccacgtggaaaaaattgagcttccaaacagcaccagcacagatgttgaaatgacaccatccagtgatgcttcagaacctgtacaaaatggaaatctctcccacaacattgaaggtgcagaagcccagaccgctgatgaggaggaggaccagcctctcagccttgcctggccttctgaaacccgcaagcaagtcacgtttctgattgttttccccatagtgtttcctctctggattacgttacctgacgttcgcaaaccttcatcgaggaagttttttcccatcacgttctttggctccattacctggattgcagtattctcttacttgatggtctggtgggcgcaccaggttggagagacaattggcatcagtgaagagattatgggcctgaccatcttggctgctgggacctccatccctgatcttatcaccagtgtcatagtggcccggaaggggttaggggacatggctgtgtccagctctgttggaagcaacatttttgacatcactgtagggctcccactgccctggctcctgtacaccgtcattcacagattccagccagtggctgtcagcagcaatggccttttctgtgccatcgtccttctcttcatcatgctgctcttcgtcatcctctctatcgccctctgcaagtggcgaatgaacaaaatcctgggcttcatcatgtttggcctctactttgtgttcctggtggtgagcgttctcctagaagacagaattcttacatgccccgtctccatctagcaggaaaagccatatcttgcaccagcagcatgaatggtccctccacactctgggctctgggctccttgacctcttgagaagaggcagctggcacacagccctgggtgccaagtgtccctccttggtgaatttgaggagagatggattcacactgggcccattcacttcacagg

SEQ ID NO: 183308 - DNA, 10749 bp, Homo sapiens
  Payload ID: 16115
  Gene Symbol: SLC24A2
  Gene Name: solute carrier family 24 (sodium/potassium/calcium exchanger), member 2
  Uniprot ID: Q9UI40
  ENST ID: ENST00000341998
  CDS Start-End: 63-2048
tgaaagaaccatctggttgagtctaaagttggaagatcaccatatccaccagaagacccaggatggatctgcaacaaagcaccaccatcacttccctagagaaatggtgtttggatgagtcactgtctggctgcagaagacattatagtgtcaagaaaaaactgaagttaattcgagtcttaggccttttcatgggtctggtagccattagcactgtctcattttcaatcagtgccttttctgagacagatacacagagcacaggagaggccagtgttgtaagtggccctagggtagcacagggttaccatcagagaactctcttagatttaaatgacaagattctggattatactccacagccacctctttctaaggaaggcgagtctgagaatagtacagatcacgcccaaggagactacccgaaagacatcttttcccttgaggagagaagaaaaggtgcgatcattctgcatgtcattggaatgatctacatgttcatagccttagccattgtctgtgatgagttctttgttccttctttgactgtcatcactgaaaaactgggcatctctgatgatgtggctggagccaccttcatggctgcaggagggtcagccccagaacttttcacatctctcataggggtatttatcgctcacagcaacgttggcataggcacaattgtaggttcagcagtattcaacatcctctttgttattggcatgtgtgctctgttttctagagaaatcttaaacctgacatggtggccgctctttcgagatgtgtctttctacattgttgacttgatcatgctgatcatatttttcctggataatgtcatcatgtggtgggaaagcttgcttctcttaacagcttatttttgctatgtggttttcatgaaattcaacgtccaagtagaaaaatgggtgaagcaaatgataaaccgcaataaggtcgtcaaggtgacagcaccagaagcccaagcaaagccatctgcagccagggacaaggatgaaccaactctaccggctaagccgcgtctccagcgaggtggaagctctgcctccctccacaacagtctcatgaggaatagcatcttccaactcatgatacacacccttgacccactcgccgaagaacttggatcatatggaaaactaaaatattatgacacaatgactgaagaagggaggttcagagaaaaggcttcaattctccacaagatcgccaagaagaaatgtcatgtggatgagaacgagaggcagaatggggctgccaaccacgtggaaaaaattgagcttccaaacagcaccagcacagatgttgaaatgacaccatccagtgatgcttcagaacctgtacaaaatggaaatctctcccacaacattgaaggtgcagaagcccagaccgctgatgaggaggaggaccagcctctcagccttgcctggccttctgaaacccgcaagcaagtcacgtttctgattgttttccccatagtgtttcctctctggattacgttacctgacgttcgcaaaccttcatcgaggaagttttttcccatcacgttctttggctccattacctggattgcagtattctcttacttgatggtctggtgggcgcaccaggttggagagacaattggcatcagtgaagagattatgggcctgaccatcttggctgctgggacctccatccctgatcttatcaccagtgtcatagtggcccggaaggggttaggggacatggctgtgtccagctctgttggaagcaacatttttgacatcactgtagggctcccactgccctggctcctgtacaccgtcattcacagattccagccagtggctgtcagcagcaatggccttttctgtgccatcgtccttctcttcatcatgctgctcttcgtcatcctctctatcgccctctgcaagtggcgaatgaacaaaatcctgggcttcatcatgtttggcctctactttgtgttcctggtggtgagcgttctcctagaagacagaattcttacatgccccgtctccatctagcaggaaaagccatatcttgcaccagcagcatgaatggtccctccacactctgggctctgggctccttgacctcttgagaagaggcagctggcacacagccctgggtgccaagtgtccctccttggtgaatttgaggagagatggattcacactgggcccattcacttcacaggctgcttccaccctgcctactgaaatgacttcatgtaaaagacaaagagaaccgtcaatacagggcttctccctattcaccactgacaagtacacctcgctggtcggaggtacagtcgatgcaaacaaggacacaggctatatatatctataaatacacatattataaatatacgcacatgaacacacaaatcctgcctgttcctgtactatacctctccttgcatacctatagattagtacatacctgtaaataaagacaaagaaaaattatatatatatatataaaatcagatatatataaaagtacaaatgcatcttttcagggatagctctagtatatttatagtacttatttgaagaggggcatcaacttgcagtctgggctttacctcttaagtacaagaggtgaactaatggaaccaacaagacaaaggtagcattgctgtgaccttcagcctaccttggacttgctgtgatcctgcctagtaaggtagatggtttagggaaatagcttgcagggaggagggcttagtggagaaggtctgtaggggccctgagttgagccttccaaaacattcctacaagccaaacagagagactatctgcccacctccaccagagtaccctgaccaagaaactcagggtacttaggacagaaagaggtaaaaacccaggctgggtggcttggtttggggaagtggggaggtaaccagggttgggttgttttgttttgttcttatattgtcccagcatgcaagtagaaaatatgactacaaaccaaattagtgctttttctaggacagcaagactatataaactgaacctgtatttttccagcgcatgtcccattatcatcaaaagaagaggggtaagtttagctgtgattgtcatgtagatatattttgatgctaagggctgccaagagagcctagatgtgcaataagaagtcatccagtaaaggtgcttagtgggccttgccacctaatgggatgtaagggcatagttctttaaaacgttttccagtgtagtcataaagggctttagtgtctgaagaaatcattattcccaatagcactaacttaactctgatcagcactgcttgggttgaggcaacttagcgatgcttggaaaggcatttgcacactcagtgcaccccaggaaggtttctgagtgccaggtcgagtggtaccaggaccaggctttggttaaagttcttgtaacatctatgtctcttcttccatcaagaccttatctgggattctgtctaagttttagagtacacggtatttgacagcttccttatactggtttcaagctattcactccaacaatttgatttcttgattttgctcaacattacattgaatgcatgaaattaaaatattccacgcccccaagttctgtatgacaccttgtgtgttttctcagatctatgtcagtcgaaaataaagccagcaagggggaaaaaataggcaaactgaatcaatggaaaactatgtagagcacttttcttttctccaagtcatgctttccttaaaatcagttgaaaaattgaatcaaggatggttcattattctgtacccatcctacgtctaagttggtacatatggcatatgggaaatttcaccatatgtgttcctatctccaatctattctgtcattgacgcctgctatgattttgttgtgagcacatacctcttaacataagaggacaggatgcagaactcacagcagaataagaggaaaggtaacctgacagccccagatcaagctcagtattccttccagaaaacctcagctcaccccacagagcatggcaataacaggaaatgcccatcattcctcttcacccagaagtaaaaagcacttcaaacccgaggccccctgggaaaacaagaaatcaagatggctgccagtcggaggctggctttcaagtctctccaactcggcagattggggtcttcagatgtgggacaatgccttccaagacattgaaacaccatccaatagaggcgctgagtggaacctgccacctaatgggaatgaatctcattcatcaaggtcaggactttgtactggggcaagaatttgtcctgcttccttagagagtgaaagaatgaggaagtgaactttacgtttaaaaactccagttgttttccctgtgtatttcttgaagggcaaccaagttggttattgtgtgaattttatattattgactggtgcgttgtttgaaataaggtttaaataggtgactgactcaactgcaaacagaccatgtaaaacagaagttgaaggagacctgatgccgccctcttcttattcctgatcctccctctgcctcctcactccctcccatttattcccagcttacagtgaaggctgatcaaagcagctatggtgccctttgcttgtctcggagctccacttcacaggaagtgttgtggtctttcatgtgaagttgcatttgagaagacaaaatttccaagccccgttcccacatcagtcatgtgcactgagcctgacctacaacagcactgctccctcactggatgggacacaagtgattccacagcctgcccttgctttcccttcatttctgtgtctgtaagtggttatgtgttgagccagggtaaattcagagagatgtgtacagagttcaacaatgggtctttaaaccattcaaatcattggcataattataagaactttccacaccgtggtttccaaaacaggtcatctctaactcgtttcctgcatgcctgtgtatatacatatataaatatatacatatatatatatatacatatatatatatatatatatatctttataccagatctatatgtacacatataatatgacttacatcatcaccctctgaccctatcacattcaggattctaaagcagggagcatcaagtttgccaaagtcaaggaaaaggaaagtcatgcacacaaaccaaagggaacatttcttcctgatttcataaggttgtttgttccatgcacatatatttacaaatatacacatatgtacccatattttcccaccctaagaatatcaatttatagccttaaggaaatcggtcagccatatccctaatgctgatatagaggcaaagaatacacaacagaaaatacaaagcaaaaatttagactgcagatactctctttgcttctctggagcagggtataaaagatatcaacaattcaagagccaacattgtactaatcaatctaaaataaatgagttgcacgcaaatgatttcatttattcacagcaaaccgagcaggtcttgcttgctgtcaccgcctaccctcccccatacttccaaggcagcagagcagcttggctcaaactgacaattcccaaatagaaactcctaaattgcatctgagaatgcccatgccaactccagctgccctctgcacctgaccagatcctgatgaactgaagctgaagatcagatggtgtttatgcagcttcccaggacctaaactgagtcaggcagtgacagagcaatgatatatgcagggactaagggatagggttgtttataccctcggcagatgcagcagaatgtcctaaagccttgcccagaagattataaaaagaggcggagactgttttatattcaggaaaaatgctttgtaaggcttctaacaggtgtcacctgacaagggccatcataatttattttatagggaagacatgaatcaggtggtttggagccctttcagcaaaacgcagctgcctcgctgattagacatttgacaatgttaatgtacatccattcctgggcagggagagagttggcaaactccccaccactgcacatagcttttaaaggcctctggaacagtgagagaagagatgagctacaaagggagcccacccccagaccactttaacaaaaagttgaccaaagaaaagacacctggtagagtggctggccagatagagctgaagaagatggaagttgcattaaatgctctgcagaaattactgcgttggactatctaacatgggtctgatggcaggcatttcagaacatggcagtgtgctttcctccccacatctaccaaacacacacccacacccccacacacacgcgagattatgtggatgctatgcctccttgcacctggacagattgtttttctggtaagtaggtggccctattataggtggcagctgtgttccagaagaaacaaagtgaagctgttctcagggtgatttctggagaaaactactgtctcctgaaagcatgcatagaagtcagtgctcactcttgctaagccacatattccttaacgatccggcttaatatttttaaaagatacctcctcaacccctatacctgtctcaacaatactgtcttcaattattaggtaaggccttgtcattaagagaggggtaggagaaaaaatagaataataaggaaagggaagaaaggagatattaatttcctaggattccaagaaaacaagtgtcacgtggaaatatatccctatgtagtttaaaacagtaacaaatatcaggctatgtttagccaattacaagagcccatatacagttttagatttttttaaaaaataatctcaggaagaccttgggtaagaaaagtaaccctgccctattccaccttctatttactgttagctccctgactctgcctctgcctctgtctttgcgtttcatttttaatctcagagcttcatattttttaaatatatagcaaacaagaaaagcaataagggaactactcacagccagctcaactctattacttatgattacaccatggcaatattcctttttcaccaggagctttggacctgcgcaggttgtggcatgtaatcacccggagcatgtagtcgtctgtagaaatcacaggcacactcatgtttgctctggaaggaatctgttttccacaatgactccccccagctaatgtacacactggcattttgcatgccttcctcacacatggggcaccagccttgctcagaaccacccaaactccacagaggcccttaatatggctagggacagatttcttaagaaagagtaagaagcagctacaaaggacaagcaaatccacaagtcaggcagcattcgagaggcaaaaatgaccctgcaattacgacaggctaggcaactgttttcaaattagcgtacgaacagtgagggactgtgtagagcaccatattatctaagccaaagcacttctaccagatcattcattgacagactggaaaacctaataaaatctttaaaaacagacaaatatctaagtctgaaagaatgccatggagtttgcctaggcttccaccaaagatttaattccattaagagggtttgtctagcctatcacgctaatccaaaggacagtcctcttacgggggagatcccagcatagatgctggtgtgacccagctcaatgattaacaaccatcagcatcaagaaaagcctccctccaagttaacccaaacccatccacttaatgacttaactttttttttttttttttttttttttggcaaaaagtaactgcatctgggcactcttcactctttgccccatagttggaagttaccgctatgtgactctttacctattttcaattaaaattatctttagatttttatttgagtctttaaccctcttaataatttttatagttcctctctactaagcctttttaagttctttatattgttcttaaatgatggaaccttatgactaatgataatcactgtctgaacagtgttgaactatactgggtgcagcatgaccatgaagctctggtgaagtcaaggtcacaaactgcttttaaggtcattaggtcataatctcagactcacaaagaactcaaaattggggagacaccactttagattactccaaaactctgggcctgtacttacccactaatttatcaagaggaatcaatatttttattttaaatatgaaactgggataaatgattggatctccacttattaaccagtactgcagtgtgtttatatccttttgtgtggtaggttggataggatttgtaaagctactgattgatctcatgggccagggttcaccaaaaggatgggaatttgtttctgcattcttacatattgggttgcatattccttcataatggatccataagtaactaaggccttggagactaacagttctccaaaatactcagctaaccaaaagaaaatactaatttttaaaatcatgtcataaaaaacagaaaagtaaaaaaagtctgaaatcctgaataaaattattttaaggatgaaattacatgcataaattaagggtagataacttcttgccatttaattaaacaaatccccaattcttatcagaataaaactgaaggacaatggatgccttttgggttttttaattttttaatattgcactttatagtacttcataagagacaactgtcttaattaaagccataaaataccaataatacatatattcagggcttctgaatatagtcaatcaataagcagtccatgagtcattcctgttttgtattgtttattgtaaattggagtttatctgttctattttttattaactacaattattgttctaggcaatcctaatctacttatacattttagatgtgtgctttaataaaactgtttgaaaatcaaagaaattattcatttcacaaaagcagtcttcgttttcaaaatagcttattacagtttctttagcaagttctaatactacatggaaattattttaaaattgtagatttttttcaggaatccattttgttatataaagcaaagttcacccatatggaaaatgaaatagataattagcaaacatatacctgggaaatgtaggatgtgtttgagcttttatataaatataggatgggtctaagaagttcccttataaaaatgggaaatagaggtatacaatttatcaataattccttatgcctaaattactaaccttccttgggaggacatgtaaagcagcagatttcataatgctttggtggttattttcctcctctccgctaaaatacacaatttctaacctagtatggtacactgtttacacacacatatataaagatgtccccacaactaaaaactttaatgtttcaacttcatcacaaatttttatataattttttttttaacagacagggtcttgctctgtcacccaggctagagtgcagtggtgcaatcatagctcagtgtagcctcaaacacctggactcaagcgatcctcccacttcagcctcttgagtagctgggacctcaggcacatgccaccatgcctggctaattttgttgttgttgttaagagatggagtctcactatgttacccaggctggtctcaaactcctgggctcaagagatcctcctgctttggcctcccaaagtgctgggattaaaggaatgagccaccatacccagcccttttatgtaatttgagtaaaagtaattactaaaaagcacttaatagtctagaaatccaccagaactgggtacctaaattgtccatatagagtaaacatgggtactaaactggacaaccccatcaattttatgcttaagtggccaaattgccctaaagaaagggtatctgaaccaagggccagtgatattcctctgttagaggctgttttgtggtctgaagagtttctctaaagggctgagactctattcggaagagggagcctcagttactgaattgcgctattgaaccctgaacacaaagtacacatatataccctgcatctagccttgatatttcttctgctcaagtcaaaaaactccggaagcaacagcttccaccatcaagcaatccacatacttaaaaagccatcaaagctaagaatagcaaaagctaccttcctgattcagtgaagttgctgctagcactaaaagcaagagaaattatacttttgttcttcagatacggttaaaacaaagaaaatgttgtcaacgttgacgccaacatagacatttgctctataacatataaactgtcttttagacaggttatgttaaaaatatcagaatgccatttttgtaaaggatcttttttaggatagacgtggtctcatgcttcctttgttcgcctccgttttaaaggagcattgtaacccctatcctcatccctacaaaaatccagtggatgcacttccaaattacttctgtcattttgtatgtgttgtgtttattatgcgtaattttcactggatgatgagatacatggtgatactatgtcagtttattctctgtgaatatgtctgtacatagacaggaagctctacttatttgtacataggctgtctgaagtatgtacttctgtcacatggacttcattctgataaagggtgtttcttcttgtttcactgtccatacctttgtgcttctactactgataatcaattcatagaatatcactttatgtaactaagtctcctcagtgtgaaaaataatagtaataaaattattgactcaaagaagta

SEQ ID NO: 183309 - DNA, 3929 bp, Homo sapiens
  Payload ID: 16116
  Gene Symbol: SLC24A3
  Gene Name: solute carrier family 24 (sodium/potassium/calcium exchanger), member 3
  Uniprot ID: Q9HC58
  ENST ID: ENST00000328041
  CDS Start-End: 198-2132
gcgacgaggagggcgacgacgaggagacgggcagcggcgaggaggaggaagaggaggcggaggcggcggccgggtgggagcgcagcgaggacgcgcggctgctgcgcgcagggctgcctcctgccgctgtccccgccgcggccgcccgcgacaggagcggccgccgcccgccgaggccgccgcccggccgcccgaggatgcggccgtccggcgacgaggaccgcgcgcgtcgccgccgccgccgccgccgccggagggaccttctgctgagccagctctgcttcctggcctcggtggcgctgctgctctggtcgctgtcgagcctgcgagagcagaaggagcttgacctcatggacctcgtaggggaagacagaaagtggatgatggcgaggaagctgatgcaggtgaacgacactctgacttccgaagatgccggactccggaacagcaagaactgcaccgaaccagccctgcatgaattccccaatgacatcttcacaaacgaggatagaagacaaggtgcggtggtcctccatgtgctctgtgccatatacatgttctatgcgctggccattgtgtgtgatgacttcttcgtcccttccttggaaaagatctgtgagcgcctgcacctcagtgaagatgtggctggggccacattcatggcagcgggaagttcggccccagagctgttcacatcggtcataggggtcttcatcaccaaaggcgatgtgggagttggcaccatcgtgggctcagcggtattcaacatcctgtgcatcattggtgtctgtgggctctttgctgggcaggttgtggctctttcctcctggtgcctgctgagggattctatttactacacgctgtctgtgatcgcgctcatcgtgtttatttatgatgaaaaagtttcctggtgggagtctttagtccttgtgctgatgtatcttatctacattgtcatcatgaaatataacgcttgcatacatcagtgctttgagaggaggacaaaaggtgccgggaacatggtcaacggattggccaacaatgctgaaattgatgacagcagcaactgcgacgcaactgtggtgctacttaagaaagcaaatttccaccgcaaagcatcagtgatcatggtagacgagctgctgtcagcctacccacaccagctttccttctctgaggctggccttcgaatcatgataaccagccactttccccccaagacccggctctccatggccagtcgcatgttgatcaatgagagacaaagattgataaacagcagggcttataccaacggggaatctgaggtggccatcaaaatcccaattaagcacaccgtggagaatgggacagggcccagcagtgccccagacaggggcgtgaatgggacacggagggacgatgttgtggctgaggctggcaacgaaacagagaatgaaaatgaggacaatgagaatgatgaggaggaagaggaggacgaggatgatgatgaaggaccgtacacaccattcgacaccccctcgggtaaactggaaacagtgaaatgggcgttcacctggccgctgagtttcgtcttatacttcactgtacccaactgcaacaagccgcgctgggagaaatggttcatggtgacgtttgcttcctccacgctgtggatcgcagccttctcctacatgatggtgtggatggtcacaatcattggttacaccctggggattcctgacgtcatcatggggatcaccttcctggctgctgggaccagcgtgcctgactgcatggccagcctcattgtggccagacaagggatgggggacatggctgtgtccaactccattgggagcaacgtgtttgacatcctgattggcctcggtctcccctgggctctgcagaccctggctgtggattacggatcctacatccggctgaatagcagggggctgatctactccgtaggcttgctcctggcctctgtttttgtcacggtgttcggcgtccacctgaacaagtggcagctggacaagaagctgggctgtgggtgcctcctcctgtatggtgtgttcctgtgcttctccatcatgactgagttcaacgtgttcacctttgtgaacctgcccatgtgcggggaccactgagccgccgggtgcccacagaggctcagctccttcttttctgtgcaatacgagacccggccgcaccccgagtcacacaggcccccggggccacggcgttcgtctctcctgtgctgtcctcaggcctccgctcctgttttggtggcccaggctctcccctgacccatcctcgctcccccacctccttgggtcatgcccacccaccctttcctgcctcctccgtgtgaagacatccaacatccacgtgacttttccagctccatttttgaacagtgactgagattctagaaaaactggctgctaactggcctgagccaggcaacactgattccaatccctcctccttttttaagttatttgatggaagactcacctaatttgtgacctgagactgttgaagaaatagagaggagggggcccgttgattacagagagcatttgggattttgtttggtttggagatgatgcctaggttactgggtttggggggattgttttcttttgggggccttccccttttactccttttcttccagagatcaagagcttctcttgcatcttcttccactgggctctggattaatcaattacccaaaggctgcacctgccgtgttgtctgggcttgcatcccagatgtgttggagtatgcatggatgtagtgctttttagaggagccactgggcaaggccaccaagaacaaatgcatgacattttatagccaaggacgcctcgctaaagtcttatgggcgtcccctggggttgggggggcacaaggttttggaggaagaagacaacttccctcattccatcatcaccatctctttctcactaggttctttctagttttcaagcaatagttctagcctgccttggacaagggggccccagttaaacaaactacccatccatgagctgccaggcagtcaaaaacagaagcttccccgacttgtgagtccctgagatgtgctcttgttgtttggcatttggggtgacagggagtgacccagaggccaccactgcttttcatgcaggagttacagacactggtttcttggaaaatggagagaagcgcactttgcacagacgtcgtcaattaagtcccaatttgccacttggtattgagtacactggaccctgaccactggctcttgggcaaacgtccttcctcacggggcgcctccgccaagccggcccagctgcacccctcccttcctggagggatggccagggaaggagaaaacagagaactgacacctttgaaaccacagaatgtgttacatgcagactcgctcaagggcataagttattgtgaacgtttttgccaatcactgctcaacagccctgctagattttgtatgatgctgaattattatgcagactaattccacccagttgagacacaccatgcttgttcacttgtatttattgaaactgtggattcttgcccgtgctgtcccttgtatttactttaagcactgatcacttatcattcattcggtatggttttccctgtcccttgtacacattctggtatgaatttgtaaaaataacctgctacaaattggttgaatgtttctgtctgtggtgcgaaccagcattaacggatggggcacgtgcccaactgaggaacaggagaagaaatcaccaatttgggctctcagagctaagacacacttattgattctgttgcacattttgcactggtttatggcgattgttttcttggacggatagtgtaaaataaacttctctgttctctatccttcccagagcagagtgcattactttctcccctggaaa

SEQ ID NO: 183310 - DNA, 3694 bp, Homo sapiens
  Payload ID: 16116
  Gene Symbol: SLC24A3
  Gene Name: solute carrier family 24 (sodium/potassium/calcium exchanger), member 3
  Uniprot ID: Q9HC58
  ENST ID: ENST00000613834
  CDS Start-End: 1-1935
atgcggccgtccggcgacgaggaccgcgcgcgtcgccgccgccgccgccgccgccggagggaccttctgctgagccagctctgcttcctggcctcggtggcgctgctgctctggtcgctgtcgagcctgcgagagcagaaggagcttgacctcatggacctcgtaggggaagacagaaagtggatgatggcgaggaagctgatgcaggtgaacgacactctgacttccgaagatgccggactccggaacagcaagaactgcaccgaaccggccctgcatgaattccccaatgacatcttcacaaacgaggatagaagacaaggtgcggtggtcctccatgtgctctgtgccatatacatgttctatgcgctggccattgtgtgtgatgacttcttcgtcccttccttggaaaagatctgtgagcgcctgcacctcagtgaagatgtggctggggccacattcatggcagcgggaagttcggccccagagctgttcacatcggtcataggggtcttcatcaccaaaggcgatgtgggagttggcaccatcgtgggctcagcggtattcaacatcctgtgcatcattggtgtctgtgggctctttgctgggcaggttgtggctctttcctcctggtgcctgctgagggattctatttactacacgctgtctgtgatcgcgctcatcgtgtttatttatgatgaaaaagtttcctggtgggagtctttagtccttgtgctgatgtatcttatctacattgtcatcatgaaatataacgcttgcatacatcagtgctttgagaggaggacaaaaggtgccgggaacatggtcaacggattggccaacaatgctgaaattgatgacagcagcaactgcgacgcaactgtggtgctacttaagaaagcaaatttccaccgcaaagcatcagtgatcatggtagacgagctgctgtcagcctacccacaccagctttccttctctgaggctggccttcgaatcatgataaccagccactttccccccaagacccggctctccatggccagtcgcatgttgatcaatgagagacaaagattgataaacagcagggcttataccaacggggaatctgaggtggccatcaaaatcccaattaagcacaccgtggagaatgggacagggcccagcagtgccccagacaggggcgtgaatgggacacggagggacgatgttgtggctgaggctggcaacgaaacagagaatgaaaatgaggacaatgagaatgatgaggaggaagaggaggacgaggatgatgatgaaggaccgtacacaccattcgacaccccctcgggtaaactggaaacagtgaaatgggcgttcacctggccgctgagtttcgtcttatacttcactgtacccaactgcaacaagccgcgctgggagaaatggttcatggtgacgtttgcttcctccacgctgtggatcgcagccttctcctacatgatggtgtggatggtcacaatcattggttacaccctggggattcctgacgtcatcatggggatcaccttcctggctgctgggaccagcgtgcctgactgcatggccagcctcattgtggccagacaagggatgggggacatggctgtgtccaactccattgggagcaacgtgtttgacatcctgattggcctcggtctcccctgggctctgcagaccctggctgtggattacggatcctacatccggctgaatagcagggggctgatctactccgtaggcttgctcctggcctctgtttttgtcacggtgttcggcgtccacctgaacaagtggcagctggacaagaagctgggctgtgggtgcctcctcctgtatggtgtgttcctgtgcttctccatcatgactgagttcaacgtgttcacctttgtgaacctgcccatgtgcggggaccactgagccgccgggtgcccacagaggctcagctccttcttttctgtgcaatacgagacccggccgcaccccgagtcacacaggcccccggggccacggcgttcgtctctcctgtgctgtcctcaggcctccgctcctgttttggtggcccaggctctcccctgacccatcctcgctcccccacctccttgggtcatgcccacccaccctttcctgcctcctccgtgtgaagacatccaacatccacgtgacttttccagctccatttttgaacagtgactgagattctagaaaaactggctgctaactggcctgagccaggcaacactgattccaatccctcctccttttttaagttatttgatggaagactcacctaatttgtgacctgagactgttgaagaaatagagaggagggggcccgttgattacagagagcatttgggattttgtttggtttggagatgatgcctaggttactgggtttggggggattgttttcttttgggggccttccccttttactccttttcttccagagatcaagagcttctcttgcatcttcttccactgggctctggattaatcaattacccaaaggctgcacctgccgtgttgtctgggcttgcatcccagatgtgttggagtatgcatggatgtagtgctttttagaggagccactgggcaaggccaccaagaacaaatgcatgacattttatagccaaggacgcctcgctaaagtcttatgggcgtcccctggggttgggggggcacaaggttttggaggaagaagacaacttccctcattccatcatcaccatctctttctcactaggttctttctagttttcaagcaatagttctagcctgccttggacaagggggccccagttaaacaaactacccatccatgagctgccaggcagtcaaaaacagaagcttccccgacttgtgagtccctgagatgtgctcttgttgtttggcatttggggtgacagggagtgacccagaggccaccactgcttttcatgcaggagttacagacactggtttcttggaaaatggagagaagcgcactttgcacagacgtcgtcaattaagtcccaatttgccacttggtattgagtacactggaccctgaccactggctcttgggcaaacgtccttcctcacggggcgcctccgccaagccggcccagctgcacccctcccttcctggagggatggccagggaaggagaaaacagagaactgacacctttgaaaccacagaatgtgttacatgcagactcgctcaagggcataagttattgtgaacgtttttgccaatcactgctcaacagccctgctagattttgtatgatgctgaattattatgcagactaattccacccagttgagacacaccatgcttgttcacttgtatttattgaaactgtggattcttgcccgtgctgtcccttgtatttactttaagcactgatcacttatcattcattcggtatggttttccctgtcccttgtacacattctggtatgaatttgtaaaaataacctgctacaaattggttgaatgtttctgtctgtggtgcgaaccagcattaacggatggggcacgtgcccaactgaggaacaggagaagaaatcaccaatttgggctctcagagctaagacacacttattgattctgttgcacattttgcactggtttatggcgattgttttcttggacggatagtgtaaaataaacttctctgttctctatc

SEQ ID NO: 183311 - DNA, 4417 bp, Homo sapiens
  Payload ID: 16117
  Gene Symbol: SLC24A4
  Gene Name: solute carrier family 24 (sodium/potassium/calcium exchanger), member 4
  Uniprot ID: Q8NFF2
  ENST ID: ENST00000393265
  CDS Start-End: 118-1794
gggcccgcagatctctctggttcccctctctgccccgtctccagcttttttgcagggcacaaaacagcttctgctagcaaacgtgtcctgccagacacgtggagaaatagaaagttgatggccccagtgaatgggacacagacagccaagaactgcacagatcctgcgattcacgagttccccacagatctgttctccaataaggagcgacagcacggagccgtcctgctgcacatccttggtgctctgtatatgttctatgccttggccatagtgtgcgatgacttctttgttccgtctctagagaagatctgtgagagactccatctgagcgaagatgtggctggagccaccttcatggctgcaggaagctcaacgccagagctgtttgcgtctgttattggggtgttcatcacccatggggacgtcggggtgggcaccatcgtgggctctgctgtgttcaacatcctgtgcataattggagtgtgcggactgtttgctggccaggtggtccgtctgacgtggtgggccgtgtgccgagactccgtgtactacaccatctctgtcatcgtgctcatcgtgttcatatatgatgaacaaattgtgtggtgggaaggcctggtgctcatcatcttgtatgtgttttatattctgatcatgaagtacaatgtgaagatgcaagcctttttcacagtcaaacaaaagagcattgcaaacggtaacccggtcaacagtgagctggaggctggtaatgatttctatgacggtagctatgatgacccttccgtgccattgctggggcaagtgaaggagaagccacagtatggcaagaaccccgtggtgatggtggacgagattatgagctccagccctcccaagttcaccttccctgaagcaggcttacgaatcatgatcaccaataagtttggacccaggacccgactacggatggccagcaggatcatcattaatgagcggcagagactgatcaactcggccaatggtgtgagcagtaagccgcttcaaaacgggaggcacgagaacattgagaacgggaatgttcctgtggaaaaccccgaagaccctcagcagaatcaggagcagcagccgccgccacagccaccaccgccagagccagagccggtggaggctgacttcctgtcccccttctccgtgccggaggccagaggggacaaggtcaagtgggtgttcacctggcccctcatcttcctcctgtgcgtcaccattcccaactgcagcaagccccgctgggagaagttcttcatggtcaccttcatcaccgccacgctgtggatcgctgtgttctcctacatcatggtgtggctggtgactattatcggatacacacttgggatcccggatgtcatcatgggcattactttcctggcagcagggacaagtgttccagactgcatggccagcctaattgtggcgagacaaggccttggggacatggcagtctccaacaccataggaagcaacgtgtttgacatcctggtaggacttggtgtaccgtggggcctgcagaccatggttgttaattatggatcaacagtgaagatcaacagccgggggctggtctattccgtggtcctgttgctgggctctgtcgctctcaccgtcctcggcatccacctaaacaagtggcgactggaccggaagctgggtgtctacgtgctggttctctacgccatcttcttgtgcttctccataatgatagagtttaacgtctttaccttcgtcaacttgccgatgtgccgggaagacgattagcgctgagtcgcggcccctgggagctgatctggacaccctgtgacactggcgttctcctctcccctccttcccccaccacaggtctctcctgcataggcagccactgtccgttctttcacacactggaaggaagagccatcgtggtctttgtctggccacaggccaggctgctgggcatcctcctcctccttggagttccgcccctgcaaggctggatttgggggccattatctgagcagcttcaaagacccctgagctgccaaccacggagatgtgccaagcatctcatctctcctgcacactttagtcagaaggacttctgcatgcagtttgtctttctgttctgcaggcagcttcagaattgaggtcatttgtgagcacaagatctcatagggcaggtgcaaaataggaatgttgttctcaagtgtcacctccagcccagaggtggttccttaggcagcatgtgctcctgggagcctctgacttttgctggaagcagccacagtttggaaggggcaagacctcaacctgttggggtttagggcccatgatggcagacattctaccccttttcctggaaaaactggaagaatgaaaataatttttttctgtggaagagagaaaatgagtgaatattcttctcacttttattgatgcattcagagaataagcaatgaaatattaaaaaatgaaacatcatataggtcatcatacttgaaaattatcattccatatgaaaggatcatgatacacaccaaaaaagtaatgatcgtaaagacacaaatcctctgtatgccatcttgcattggcactgaggtgtttggtttggaatagggaaaaaggtaagagactaacgtggaaaggtgctaactcagagactggagattatagtttacagctgtactttccagatcttctatgtgacacaatgcactgtccttgtgggtttgtcatttattggttaatgctctagtttcaaaaccaccctgttgaaagttccagttatttatatgcccaacaaatttcatagcctgctgaactgaactgagtgtgtcagaagtgctggttaatgacgagaagagattgcctgaaaaacaacaaactgctttctggttagctgaaggcaagtgtgaaaatcagaatttagaatatttagagctaagcttctggaaccacgtagtttctacacgtggcaggccaagaatgggaggctgactcaaaactagatagaaaaatataaaataatcttcgaccacttgatagctctcaaatatatatttaaaagatttatgaatacaaaccatttatggtttatgatttctaaaaagaaagcacaattaattttatagagaggttttttatttttttaatatttctattgcaaaagtctatccgatttgatgcactttgaatattgagatattttgcacggatgaatgtatgggaactacccatgatgatgtaagaggaaagaacatttttttgtgattcaccagacatcactttaaacttggtgatgagtttaaatccagtagctaatcccttcctgagactcaaagatcgtgacgctggttggaatttctgactgtgccctttagggcctcctgagtttcaaaaggaggaagtgttcgtgcttgtgtccctgaagttccctgttgcatgagcctgcgacaggacctcacccccaccaccaggcttctatttgggattcacatcagtattagtatcgtagctacaccaagttcaggcttctctttttgtttttttacctagaaattgggctcagtggtcttcaacttgaggacgagggtgattttcctaagaaatcagcaaagagggaaggcagggcccctgtagattcaccagtataaacttcagctgcagggattccagagccctcgggaccactctgtcaccttaatagccaagttctcctggttcctccgatcttacaggctcatccaggttccaaagtgcttctgtctctgttttgattctccaaactgctctgtgatgtatgtagggattattctccccacttaacagaaagtagtgtcttggagaggtcaagggtctctagttcaatggccagtcatagcagaagggaggccaagcaccagtccatcacccctcccaggccagcctctgtaagttggccacacttggggagtgagtgtgggtatgactttaccctcctggttggttcttactgtttgagtcaaaacctcatcaatatatcattgactcctgggttcctcaggtcatttcctaatatctgtccctatccaatgcctctattttatcttgaaaaaaggaccaaaaattatttttagctatggcaaggcacaggccacatggcccctgatggcgtccctgctggttttcaattctctgaagccttgtgtagctttcagagcacacgtatcctaattaccctcctcttcctcagcagaacccatttgagattctaaatgaatactcttagtctctaaagttgcagttagaaactaaaataatgttttttaatatgtaatatgctcctcttggctaattttcttttgactttaatgtgccaatgtaacttcctttaaaggatctatgcatttattaaatctggaaaact

SEQ ID NO: 183312 - DNA, 9950 bp, Homo sapiens
  Payload ID: 16117
  Gene Symbol: SLC24A4
  Gene Name: solute carrier family 24 (sodium/potassium/calcium exchanger), member 4
  Uniprot ID: Q8NFF2
  ENST ID: ENST00000532405
  CDS Start-End: 227-2095
gcacgcggcgcgcgggactctgagctccggccgcgtcgcgcgtccccaccttcccaaggggctcccccgccgacctcgccctcgggccatgaggctttggcccggagctcctcgcctctgagtcgcgcaccgcctgctccagccccagcgccgctcggccactgattgcactctggccgctgaagctccccatcctctcccagagacggcacccaggcgctccgggatggcgctccgcgggaccctccggccgctcaaagttcgcaggaggcgagagatgctgccgcagcaagtcggcttcgtgtgcgcggtgctggccctggtgtgctgtgcgtccggcctcttcggcagcttggggcacaaaacagcttctgctagcaaacgtgtcctgccagacacgtggagaaatagaaagttgatggccccagtgaatgggacacagacagccaagaactgcacagatcctgcgattcacgagttccccacagatctgttctccaataaggagcgacagcacggagccgtcctgctgcacatccttggtgctctgtatatgttctatgccttggccatagtgtgcgatgacttctttgttccgtctctagagaagatctgtgagagactccatctgagcgaagatgtggctggagccaccttcatggctgcaggaagctcaacgccagagctgtttgcgtctgttattggggtgttcatcacccatggggacgtcggggtgggcaccatcgtgggctctgctgtgttcaacatcctgtgcataattggagtgtgcggactgtttgctggccaggtggtccgtctgacgtggtgggccgtgtgccgagactccgtgtactacaccatctctgtcatcgtgctcatcgtgttcatatatgatgaacaaattgtgtggtgggaaggcctggtgctcatcatcttgtatgtgttttatattctgatcatgaagtacaatgtgaagatgcaagcctttttcacagtcaaacaaaagagcattgcaaacggtaacccggtcaacagtgagctggaggctggtaatgatttctatgacggtagctatgatgacccttccgtgccattgctggggcaagtgaaggagaagccacagtatggcaagaaccccgtggtgatggtggacgagattatgagctccagccctcccaagttcaccttccctgaagcaggcttacgaatcatgatcaccaataagtttggacccaggacccgactacggatggccagcaggatcatcattaatgagcggcagagactgatcaactcggccaatggtgtgagcagtaagccgcttcaaaacgggaggcacgagaacattgagaacgggaatgttcctgtggaaaaccccgaagaccctcagcagaatcaggagcagcagccgccgccacagccaccaccgccagagccagagccggtggaggctgacttcctgtcccccttctccgtgccggaggccagaggggacaaggtcaagtgggtgttcacctggcccctcatcttcctcctgtgcgtcaccattcccaactgcagcaagccccgctgggagaagttcttcatggtcaccttcatcaccgccacgctgtggatcgctgtgttctcctacatcatggtgtggctggtgactattatcggatacacacttgggatcccggatgtcatcatgggcattactttcctggcagcagggacaagtgttccagactgcatggccagcctaattgtggcgagacaaggccttggggacatggcagtctccaacaccataggaagcaacgtgtttgacatcctggtaggacttggtgtaccgtggggcctgcagaccatggttgttaattatggatcaacagtgaagatcaacagccgggggctggtctattccgtggtcctgttgctgggctctgtcgctctcaccgtcctcggcatccacctaaacaagtggcgactggaccggaagctgggtgtctacgtgctggttctctacgccatcttcttgtgcttctccataatgatagagtttaacgtctttaccttcgtcaacttgccgatgtgccgggaagacgattagcgctgagtcgcggcccctgggagctgatctggacaccctgtgacactggcgttctcctctcccctccttcccccaccacaggtctctcctgcataggcagccactgtccgttctttcacacactggaaggaagagccatcgtggtctttgtctggccacaggccaggctgctgggcatcctcctcctccttggagttccgcccctgcaaggctggatttgggggccattatctgagcagcttcaaagacccctgagctgccaaccacggagatgtgccaagcatctcatctctcctgcacactttagtcagaaggacttctgcatgcagtttgtctttctgttctgcaggcagcttcagaattgaggtcatttgtgagcacaagatctcatagggcaggtgcaaaataggaatgttgttctcaagtgtcacctccagcccagaggtggttccttaggcagcatgtgctcctgggagcctctgacttttgctggaagcagccacagtttggaaggggcaagacctcaacctgttggggtttagggcccatgatggcagacattctaccccttttcctggaaaaactggaagaatgaaaataatttttttctgtggaagagagaaaatgagtgaatattcttctcacttttattgatgcattcagagaataagcaatgaaatattaaaaaatgaaacatcatataggtcatcatacttgaaaattatcattccatatgaaaggatcatgatacacaccaaaaaagtaatgatcgtaaagacacaaatcctctgtatgccatcttgcattggcactgaggtgtttggtttggaatagggaaaaaggtaagagactaacgtggaaaggtgctaactcagagactggagattatagtttacagctgtactttccagatcttctatgtgacacaatgcactgtccttgtgggtttgtcatttattggttaatgctctagtttcaaaaccaccctgttgaaagttccagttatttatatgcccaacaaatttcatagcctgctgaactgaactgagtgtgtcagaagtgctggttaatgacgagaagagattgcctgaaaaacaacaaactgctttctggttagctgaaggcaagtgtgaaaatcagaatttagaatatttagagctaagcttctggaaccacgtagtttctacacgtggcaggccaagaatgggaggctgactcaaaactagatagaaaaatataaaataatcttcgaccacttgatagctctcaaatatatatttaaaagatttatgaatacaaaccatttatggtttatgatttctaaaaagaaagcacaattaattttatagagaggttttttatttttttaatatttctattgcaaaagtctatccgatttgatgcactttgaatattgagatattttgcacggatgaatgtatgggaactacccatgatgatgtaagaggaaagaacatttttttgtgattcaccagacatcactttaaacttggtgatgagtttaaatccagtagctaatcccttcctgagactcaaagatcgtgacgctggttggaatttctgactgtgccctttagggcctcctgagtttcaaaaggaggaagtgttcgtgcttgtgtccctgaagttccctgttgcatgagcctgcgacaggacctcacccccaccaccaggcttctatttgggattcacatcagtattagtatcgtagctacaccaagttcaggcttctctttttgtttttttacctagaaattgggctcagtggtcttcaacttgaggacgagggtgattttcctaagaaatcagcaaagagggaaggcagggcccctgtagattcaccagtataaacttcagctgcagggattccagagccctcgggaccactctgtcaccttaatagccaagttctcctggttcctccgatcttacaggctcatccaggttccaaagtgcttctgtctctgttttgattctccaaactgctctgtgatgtatgtagggattattctccccacttaacagaaagtagtgtcttggagaggtcaagggtctctagttcaatggccagtcatagcagaagggaggccaagcaccagtccatcacccctcccaggccagcctctgtaagttggccacacttggggagtgagtgtgggtatgactttaccctcctggttggttcttactgtttgagtcaaaacctcatcaatatatcattgactcctgggttcctcaggtcatttcctaatatctgtccctatccaatgcctctattttatcttgaaaaaaggaccaaaaattatttttagctatggcaaggcacaggccacatggcccctgatggcgtccctgctggttttcaattctctgaagccttgtgtagctttcagagcacacgtatcctaattaccctcctcttcctcagcagaacccatttgagattctaaatgaatactcttagtctctaaagttgcagttagaaactaaaataatgttttttaatatgtaatatgctcctcttggctaattttcttttgactttaatgtgccaatgtaacttcctttaaaggatctatgcatttattaaatctggaaaactatatgtacactgtaggtggaaaattctcttttttaactaaatatttttccatcacaaatttaaagaattgcatgattaattaggctttcatttttaaattacgctttcatcactacgcaggattactttattttattcccaaagctcattagcatgggataattactctgctacagaaataggcaatttaaaaaaatgaatttagctcttctcattgggggcagaaaagaaaaaaaaaaccattgcactcagatggaaaatgcctatagacacaggagcaggtggttcctgtggacttctggtttggaattttgcctcaccaggtcaagcgtggttagggtggaaggtgtccagtatcttgaaaacctggccctggaggaaggttctgggtcagctgcaatgagagactggtgattaagggcaccgtgggcaggacacagtcctcgccttacccaccccatccttcctgttacccacagtctgctggcctccatgcctcttccccttgtcacttgtgtctcctccttatgcacagagctgcctgcctttatgaattttcttttcttttttttttgagacagcgtcttgctgtgtcacccaggctggagtgcagtggtgccatcttggctcactgcaacctccgcctcccaggttcaagcaattcttgtgcctcagcctcctgaggattacaggcgtgcgccaccacacccagctaatttttgtatttttagtagagacgggttttcaccatgttggccaggctggtctcaaactcctgacctcaggtgatccacccacctcggtttcccaaagtgctgggattacaggtgtgagccaccacgcccagcctgcccttgtgaattttcacctgctccttacccctcacctgttaggactgtttcttgcttttgcccctgtcggtcccctgccttaacagacctaagcagctgataatgcaccaagcttccctgaccaggtggggtgtgtctatcacccaagggcagtcctacagaccctgaccaaaggccgttcctgggcggcccaaggtccaggtttcttccacctgctcttccctgtttatggggatttgcaagcctaattgcatcagcaggagcccatctctcagagaacccggactccccaagcagactgggattttgggaagggtgtggggggtgtcattgctggatacccgtctttctgcctgtcctttctcctctctgaatcctggggcccctctccctccttaaagctggagtggacagagggacaggagaggatcagagttcatcccccctgggaaagagcaagagcgaatgaatcccagcgccagcggctgaggctgccttccgtgccttccctccatgggcgacgggtgagtggggcttaggaaactggaacagggaaggttctgttaccacactttggaactttccccctgggattcagcagttgagaagcagagacctttctgccctgggtgaatgggtccttgggggaggggttggtcttttgtctcgcatccccatctttcctttccttctgggccatgctcctccctggctggaaaaaggtggctgtgctgtccctgtgatccactctcagcaaatgcgtgtggctcaaataaacaaagaacttacctgttagagtgaaaatcctcaggagattgtacccaaatgccatgctctaaatattcatggtctctctaatgccctcaagacgtgatttccatgggaaccatcctcccctgggggcagttagcaggagtacgtggggcacgtgaggtggtcctcctttcagcacaccgtgcccatagaaacttctagaaatttctgaaaatgctctgtgggcagctcttgggtggcagtaagtccatcaacccccatctaccccgggcctgaagcgctgcgcttgctctctttatgtgtgtgcacccgaaggatttcctggtctctgtagctgatcctgtgagcccctcaagcatgaagcctcccttggggcttctcaaagcatggagaggggcccttcctgtcctttgggaaaatcttccccactgtgtcagttatatgggaacaagagtgatggggtctttctctaggcctgtgccacaggacagagaacacgggattctgctgttcgctttgagccacagcctttaccagcccggcttgtgtggggggccccttcgccttgctgcaaagagctgttccccaaagggcatatccacagggtacaggttttaaaaaggcttttttttttttttttgagacagggtctcgctctgtcgcctagactcagtgcagtggcgccatgttggctggttgcaacctccacctcctgggttcaagtgattctcccacctcagcctctctggtagctgggactacaggcacgcgccaccatgcccagctaatttttggatttttagtagagaaggagtttcaccatgctgaccaggctggtttcgaactcctgacctcaagtgatccgcccgcctgggcctcccagagtgctgagattacaggcgtgagccaccgcacctggccaaaaaaaggcattttgatttaggttgctgtgtttgcttgttgataaagaaaactcaatcgggacactagttttgtgctcagctttaggccgggtagctaatgggaggatgtccagcctgtcactgtgctcccagcgcaaggaaatgggtgcccacctggaatcaggagaagaggcttttccctcctgttctgcaaccagggtggagctatctttccagggaagccagctgagaggttttagggctttggttattttatgggggttttaaacctcctaacttttcaatgacaaatggctcccaggtgccatagtctctgttaaatcctcaaacattcacaagcacacactgccaggggcacgggttgtctttcacctgcatgtttctaaggctctttattcaatctcacggtgtcagtgtccagttgtcaaagttatgaatcttcctcctgcttctaaacagggctgacagtatactctcgtctagtctaggaacatgtctgctgctgggataccctggtaccaggatttgagggccacgggtggcatctctgagagctgaaaatccacagagtgcctgtgggaaagccaagcccttggctgtgtggcttttctatcccttggatttacaggtctgggaattggctgcttcttagttataaccccagtgacaaatgctggcttaagccacacctgttcccactgttgctagaattcaaacagttgctttttttttttctttttgagaaagggcctcactctgttgcccaggctggagtgcagtggcttgatcacagctcacgaaagcctcaaactcctaggctcaagtgatcctcctgaaaagtaggtaggactacaggcacatgccaccacatacagctaatttgttttcattttttttttttttagagacaggatctcgctgtgttccccaggtaggtcttgaactcctggcctcaagtgatcctcctgccttgacctcccaaagtgctggattacaagcgtgagcccctgcacccggcccaagcagttgcttctttttttctctttttttttttttttgagatggagcctcactctgttgcccaggctggagtgcagtggcgcgatctccactcactgcaagctccgcctcccgggttcatgccattctcctgcctcagcctcccgagtagctgggactacaggcgcctgccaccacacccagctaattttttgtatttttggtacagacagggtttcaccgtgttagccaggatggtcttgatctcctgatctcgtgatccgcccaccccggcctcccaaagtgctggattacaagcgtgagccaccgcgccccgccaagcagttgcttcttatgcaacatgttggttgggacttgtccacgggccaggccaataaaattcttaatcctgcagagagtcagtaccctcatcaccccatcactggaaaacaaatgttttaagctatcaagagagggaatgtgcagcttttggtttctagatgcatggtttggtgtgatctacctttgtgcctaaagggaatgtcccaaacaacagagccttctttgctgtcactccagaattctctacacagaatttcccaagtccattcaggacagacgcgcagtcctctttcaatggaagaagagaggacttttcccctcctgaaaaatgactggagtgtgaacaaggcagctctgtttttctaaataagttgttcttgtgagttttttctggccactgggcatctctgccctcacttttcatccctgccctctaagctgcagaccccatgaccacactgtctgcttccttgagcttcccgcacgaggcttggacctgggggacctggagaccctgcggacagaactgtggctgagccactgtggccaactcttggggagctccacagtgggggttgctggtctgtgaggctgagtctccatttcagagcacacactccctggcagggcgcctctgcctgtgtctcctgcccagcagccgccagcagggaatagttgctggtgtctgagcacaaagagagctttgattacctagagaggaaaaaggctgtcagccagatgcagccaggcccaggggtagatacaggagttgctaaggaaggggccgagccaggagaggccaggcagatccacaaagcccaaggggatgcaggctgggtgtggtttctgagggaacctaccaaatagcaggtagatggaatcagaggactcttgtgtcctgaaagaacctccttaaaaacaactaaaacgaagaacttctggggctgttcacacattgttcaagtcaccccaagatcgttctggcacgctgagctgaacaccaccatctttgttcattctctctctaatgggcaaagcaggatcatcgagttgaaaagttgtaaataatgaggatatttatcccgctatttattttttcaataactgtgacctcctgcactgtgaatgctctgtgacatgagattcttagtttaataaaactgtcattaaatttgaatgaattgatattattggttactgaacactggcatgagtttatttttattgtgaagaaaaaaatctacagcaatctaaactaaacctttctaagaaatctagcagtcagtattgtaatgcaatatatcaaaatctgtacactgtcaataaaataaatgagcacaagt

SEQ ID NO: 183313 - DNA, 4187 bp, Homo sapiens
  Payload ID: 16117
  Gene Symbol: SLC24A4
  Gene Name: solute carrier family 24 (sodium/potassium/calcium exchanger), member 4
  ENST ID: ENST00000525557
  CDS Start-End: 1-1393
agtgtgcgatgacttctttgttccgtctctagagaagatctgtgagagactccatctgagcgaagatgtggctggagccaccttcatggctgcaggaagctcaacgccagagctgtttgcgtctgttattggggtgttcatcacccatggggacgtcggggtgggcaccatcgtgggctctgctgtgttcaacatcctgtgcataattggagtgtgcggactgtttgctggccaggtggtccgtctgacgtggtgggccgtgtgccgagactccgtgtactacaccatctctgtcatcgtgctcatcgtgttcatatatgatgaacaaattgtgtggtgggaaggcctggtgctcatcatcttgtatgtgttttatattctgatcatgaagtacaatgtgaagatgcaagcctttttcacagtcaaacaaaagagcattgcaaacggtaacccggtcaacagtgagctggaggctgtgaaggagaagccacagtatggcaagaaccccgtggtgatggtggacgagattatgagctccagccctcccaagttcaccttccctgaagcaggcttacgaatcatgatcaccaataagtttggacccaggacccgactacggatggccagcaggatcatcattaatgagcggcagagactgatcaactcggccaatggtgtgagcagtaagccgcttcaaaacgggaggcacgagaacattgagaacgggaatgttcctgtggaaaaccccgaagaccctcagcagaatcaggagcagcagccgccgccacagccaccaccgccagagccagagccggtggaggctgacttcctgtcccccttctccgtgccggaggccagaggggacaaggtcaagtgggtgttcacctggcccctcatcttcctcctgtgcgtcaccattcccaactgcagcaagccccgctgggagaagttcttcatggtcaccttcatcaccgccacgctgtggatcgctgtgttctcctacatcatggtgtggctggtgactattatcggatacacacttgggatcccggatgtcatcatgggcattactttcctggcagcagggacaagtgttccagactgcatggccagcctaattgtggcgagacaaggccttggggacatggcagtctccaacaccataggaagcaacgtgtttgacatcctggtaggacttggtgtaccgtggggcctgcagaccatggttgttaattatggatcaacagtgaagatcaacagccgggggctggtctattccgtggtcctgttgctgggctctgtcgctctcacctgctccagtgaggttcctgggatccagccccaggaagccttgatcgagggacaaggaggaaggcagtggaaggaaagatagaaggatcagggaggaatgtcctcggcatccacctaaacaagtggcgactggaccggaagctgggtgtctacgtgctggttctctacgccatcttcttgtgcttctccataatgatagagtttaacgtctttaccttcgtcaacttgccgatgtgccgggaagacgattagcgctgagtcgcggcccctgggagctgatctggacaccctgtgacactggcgttctcctctcccctccttcccccaccacaggtctctcctgcataggcagccactgtccgttctttcacacactggaaggaagagccatcgtggtctttgtctggccacaggccaggctgctgggcatcctcctcctccttggagttccgcccctgcaaggctggatttgggggccattatctgagcagcttcaaagacccctgagctgccaaccacggagatgtgccaagcatctcatctctcctgcacactttagtcagaaggacttctgcatgcagtttgtctttctgttctgcaggcagcttcagaattgaggtcatttgtgagcacaagatctcatagggcaggtgcaaaataggaatgttgttctcaagtgtcacctccagcccagaggtggttccttaggcagcatgtgctcctgggagcctctgacttttgctggaagcagccacagtttggaaggggcaagacctcaacctgttggggtttagggcccatgatggcagacattctaccccttttcctggaaaaactggaagaatgaaaataatttttttctgtggaagagagaaaatgagtgaatattcttctcacttttattgatgcattcagagaataagcaatgaaatattaaaaaatgaaacatcatataggtcatcatacttgaaaattatcattccatatgaaaggatcatgatacacaccaaaaaagtaatgatcgtaaagacacaaatcctctgtatgccatcttgcattggcactgaggtgtttggtttggaatagggaaaaaggtaagagactaacgtggaaaggtgctaactcagagactggagattatagtttacagctgtactttccagatcttctatgtgacacaatgcactgtccttgtgggtttgtcatttattggttaatgctctagtttcaaaaccaccctgttgaaagttccagttatttatatgcccaacaaatttcatagcctgctgaactgaactgagtgtgtcagaagtgctggttaatgacgagaagagattgcctgaaaaacaacaaactgctttctggttagctgaaggcaagtgtgaaaatcagaatttagaatatttagagctaagcttctggaaccacgtagtttctacacgtggcaggccaagaatgggaggctgactcaaaactagatagaaaaatataaaataatcttcgaccacttgatagctctcaaatatatatttaaaagatttatgaatacaaaccatttatggtttatgatttctaaaaagaaagcacaattaattttatagagaggttttttatttttttaatatttctattgcaaaagtctatccgatttgatgcactttgaatattgagatattttgcacggatgaatgtatgggaactacccatgatgatgtaagaggaaagaacatttttttgtgattcaccagacatcactttaaacttggtgatgagtttaaatccagtagctaatcccttcctgagactcaaagatcgtgacgctggttggaatttctgactgtgccctttagggcctcctgagtttcaaaaggaggaagtgttcgtgcttgtgtccctgaagttccctgttgcatgagcctgcgacaggacctcacccccaccaccaggcttctatttgggattcacatcagtattagtatcgtagctacaccaagttcaggcttctctttttgtttttttacctagaaattgggctcagtggtcttcaacttgaggacgagggtgattttcctaagaaatcagcaaagagggaaggcagggcccctgtagattcaccagtataaacttcagctgcagggattccagagccctcgggaccactctgtcaccttaatagccaagttctcctggttcctccgatcttacaggctcatccaggttccaaagtgcttctgtctctgttttgattctccaaactgctctgtgatgtatgtagggattattctccccacttaacagaaagtagtgtcttggagaggtcaagggtctctagttcaatggccagtcatagcagaagggaggccaagcaccagtccatcacccctcccaggccagcctctgtaagttggccacacttggggagtgagtgtgggtatgactttaccctcctggttggttcttactgtttgagtcaaaacctcatcaatatatcattgactcctgggttcctcaggtcatttcctaatatctgtccctatccaatgcctctattttatcttgaaaaaaggaccaaaaattatttttagctatggcaaggcacaggccacatggcccctgatggcgtccctgctggttttcaattctctgaagccttgtgtagctttcagagcacacgtatcctaattaccctcctcttcctcagcagaacccatttgagattctaaatgaatactcttagtctctaaagttgcagttagaaactaaaataatgttttttaatatgtaatatgctcctcttggctaattttcttttgactttaatgtgccaatgtaacttcctttaaaggatctatgcatttattaaatctggaaaacta

SEQ ID NO: 183314 - DNA, 4531 bp, Homo sapiens
  Payload ID: 16117
  Gene Symbol: SLC24A4
  Gene Name: solute carrier family 24 (sodium/potassium/calcium exchanger), member 4
  Uniprot ID: Q8NFF2
  ENST ID: ENST00000531433
  CDS Start-End: 97-1908
agagagaaagttcccggggagagctcgcccctgggagggccgacgtcgagcctgctcgccgcgagggtctcagagacggcacccaggcgctccgggatggcgctccgcgggaccctccggccgctcaaagttcgcaggaggcgagagatgctgccgcagcaagtcggcttcgtgtgcgcggtgctggccctggtgtgctgtgcgtccggcctcttcggcagcttggggcacaaaacagcttctgctagcaaacgtgtcctgccagacacgtggagaaatagaaagttgatggccccagtgaatgggacacagacagccaagaactgcacagatcctgcgattcacgagttccccacagatctgttctccaataaggagcgacagcacggagccgtcctgctgcacatccttggtgctctgtatatgttctatgccttggccatagtgtgcgatgacttctttgttccgtctctagagaagatctgtgagagactccatctgagcgaagatgtggctggagccaccttcatggctgcaggaagctcaacgccagagctgtttgcgtctgttattggggtgttcatcacccatggggacgtcggggtgggcaccatcgtgggctctgctgtgttcaacatcctgtgcataattggagtgtgcggactgtttgctggccaggtggtccgtctgacgtggtgggccgtgtgccgagactccgtgtactacaccatctctgtcatcgtgctcatcgtgttcatatatgatgaacaaattgtgtggtgggaaggcctggtgctcatcatcttgtatgtgttttatattctgatcatgaagtacaatgtgaagatgcaagcctttttcacagtcaaacaaaagagcattgcaaacggtaacccggtcaacagtgagctggaggctgtgaaggagaagccacagtatggcaagaaccccgtggtgatggtggacgagattatgagctccagccctcccaagttcaccttccctgaagcaggcttacgaatcatgatcaccaataagtttggacccaggacccgactacggatggccagcaggatcatcattaatgagcggcagagactgatcaactcggccaatggtgtgagcagtaagccgcttcaaaacgggaggcacgagaacattgagaacgggaatgttcctgtggaaaaccccgaagaccctcagcagaatcaggagcagcagccgccgccacagccaccaccgccagagccagagccggtggaggctgacttcctgtcccccttctccgtgccggaggccagaggggacaaggtcaagtgggtgttcacctggcccctcatcttcctcctgtgcgtcaccattcccaactgcagcaagccccgctgggagaagttcttcatggtcaccttcatcaccgccacgctgtggatcgctgtgttctcctacatcatggtgtggctggtgactattatcggatacacacttgggatcccggatgtcatcatgggcattactttcctggcagcagggacaagtgttccagactgcatggccagcctaattgtggcgagacaaggccttggggacatggcagtctccaacaccataggaagcaacgtgtttgacatcctggtaggacttggtgtaccgtggggcctgcagaccatggttgttaattatggatcaacagtgaagatcaacagccgggggctggtctattccgtggtcctgttgctgggctctgtcgctctcaccgtcctcggcatccacctaaacaagtggcgactggaccggaagctgggtgtctacgtgctggttctctacgccatcttcttgtgcttctccataatgatagagtttaacgtctttaccttcgtcaacttgccgatgtgccgggaagacgattagcgctgagtcgcggcccctgggagctgatctggacaccctgtgacactggcgttctcctctcccctccttcccccaccacaggtctctcctgcataggcagccactgtccgttctttcacacactggaaggaagagccatcgtggtctttgtctggccacaggccaggctgctgggcatcctcctcctccttggagttccgcccctgcaaggctggatttgggggccattatctgagcagcttcaaagacccctgagctgccaaccacggagatgtgccaagcatctcatctctcctgcacactttagtcagaaggacttctgcatgcagtttgtctttctgttctgcaggcagcttcagaattgaggtcatttgtgagcacaagatctcatagggcaggtgcaaaataggaatgttgttctcaagtgtcacctccagcccagaggtggttccttaggcagcatgtgctcctgggagcctctgacttttgctggaagcagccacagtttggaaggggcaagacctcaacctgttggggtttagggcccatgatggcagacattctaccccttttcctggaaaaactggaagaatgaaaataatttttttctgtggaagagagaaaatgagtgaatattcttctcacttttattgatgcattcagagaataagcaatgaaatattaaaaaatgaaacatcatataggtcatcatacttgaaaattatcattccatatgaaaggatcatgatacacaccaaaaaagtaatgatcgtaaagacacaaatcctctgtatgccatcttgcattggcactgaggtgtttggtttggaatagggaaaaaggtaagagactaacgtggaaaggtgctaactcagagactggagattatagtttacagctgtactttccagatcttctatgtgacacaatgcactgtccttgtgggtttgtcatttattggttaatgctctagtttcaaaaccaccctgttgaaagttccagttatttatatgcccaacaaatttcatagcctgctgaactgaactgagtgtgtcagaagtgctggttaatgacgagaagagattgcctgaaaaacaacaaactgctttctggttagctgaaggcaagtgtgaaaatcagaatttagaatatttagagctaagcttctggaaccacgtagtttctacacgtggcaggccaagaatgggaggctgactcaaaactagatagaaaaatataaaataatcttcgaccacttgatagctctcaaatatatatttaaaagatttatgaatacaaaccatttatggtttatgatttctaaaaagaaagcacaattaattttatagagaggttttttatttttttaatatttctattgcaaaagtctatccgatttgatgcactttgaatattgagatattttgcacggatgaatgtatgggaactacccatgatgatgtaagaggaaagaacatttttttgtgattcaccagacatcactttaaacttggtgatgagtttaaatccagtagctaatcccttcctgagactcaaagatcgtgacgctggttggaatttctgactgtgccctttagggcctcctgagtttcaaaaggaggaagtgttcgtgcttgtgtccctgaagttccctgttgcatgagcctgcgacaggacctcacccccaccaccaggcttctatttgggattcacatcagtattagtatcgtagctacaccaagttcaggcttctctttttgtttttttacctagaaattgggctcagtggtcttcaacttgaggacgagggtgattttcctaagaaatcagcaaagagggaaggcagggcccctgtagattcaccagtataaacttcagctgcagggattccagagccctcgggaccactctgtcaccttaatagccaagttctcctggttcctccgatcttacaggctcatccaggttccaaagtgcttctgtctctgttttgattctccaaactgctctgtgatgtatgtagggattattctccccacttaacagaaagtagtgtcttggagaggtcaagggtctctagttcaatggccagtcatagcagaagggaggccaagcaccagtccatcacccctcccaggccagcctctgtaagttggccacacttggggagtgagtgtgggtatgactttaccctcctggttggttcttactgtttgagtcaaaacctcatcaatatatcattgactcctgggttcctcaggtcatttcctaatatctgtccctatccaatgcctctattttatcttgaaaaaaggaccaaaaattatttttagctatggcaaggcacaggccacatggcccctgatggcgtccctgctggttttcaattctctgaagccttgtgtagctttcagagcacacgtatcctaattaccctcctcttcctcagcagaacccatttgagattctaaatgaatactcttagtctctaaagttgcagttagaaactaaaataatgttttttaatatgtaatatgctcctcttggctaattttcttttgactttaatgtgccaatgtaacttcctttaaaggatctatgcatttattaaatctggaaaact

SEQ ID NO: 183315 - DNA, 334 bp, Homo sapiens
  Payload ID: 16117
  Gene Symbol: SLC24A4
  Gene Name: solute carrier family 24 (sodium/potassium/calcium exchanger), member 4
  ENST ID: ENST00000554461
  CDS Start-End: 143-334
aataagtgcctgtgtgttggcaactgcagctaaagctctcctatctctgcaaacatcgattcacgagttccccacagatctgttctccaataaggagcgacagcacggagccgtcctgctgcacatccttggtgctctgtatatgttctatgccttggccatagtgtgcgatgacttctttgttccgtctctagagaagatctgtgagagactccatctgagcgaagatgtggctggagccaccttcatggctgcaggaagctcaacgccagagctgtttgcgtctgttattggggtgttcatcacccatggggacgtcggggtgggcaccatc

SEQ ID NO: 183316 - DNA, 1897 bp, Homo sapiens
  Payload ID: 16118
  Gene Symbol: SLC24A5
  Gene Name: solute carrier family 24 (sodium/potassium/calcium exchanger), member 5
  Uniprot ID: Q71RS6
  ENST ID: ENST00000341459
  CDS Start-End: 74-1576
cctcacatgatccagtttaatcctcctcttctcccttcctgaagctgcacgctgcagtaagagcacagcagaaatgcagacaaaagggggccaaacatgggcgagaagggctctgttgctcggcatcctgtgggccactgcacatctgcctctctcagggacctccctgccccaacgtctcccaagggccacaggaaatagcacccaatgtgttatttctccatcatcggagtttcccgaagggtttttcacgagacaggagcgcagagatggaggcatcataatctatttcctaattatcgtttacatgttcatggccatatctattgtctgtgatgaatacttcctaccctccctggaaatcatcagtgaatcccttggattgtctcaggatgttgcaggcacaactttcatggcagcgggcagttcagctcctgaattagttactgctttcctaggtgtatttatcacaaagggagatattggcattagcaccatccttggatctgcaatttataatctccttggcatctgtgctgcctgtggtttgctatctaatacggtctcaacactatcatgttggcccctattcagagactgtgcagcgtacacaattagtgcagcagcagttcttggtataatatatgacaaccaagtttactggtatgaaggggctttactgcttttgatatatggattgtatgttttggtgctgtgttttgacattaaaattaaccaatatattataaagaaatgcagtccttgctgcgcctgtcttgccaaagctatggagagaagtgaacaacagccactgatgggctgggaagatgaaggtcaaccattcattcgtcggcaatcaagaactgatagtggaatattttatgaagattctggctactctcagctctctataagtttacatggccttagtcaggtttctgaagatccaccaagtgttttcaacatgcctgaagcagacttaaaaagaattttttgggtattatcccttcctattattacattactttttctaaccacaccagattgtagaaaaaagttttggaaaaactactttgtgataacctttttcatgtctgcaatatggatatccgcatttacatatatcctggtttggatggtcacaataactggggaaacactagaaattcccgatacagtaatgggccttactttattagcagcaggaacaagcataccagacacaattgcaagtgtgttggttgcaagaaaagggaaaggagatatggctatgtctaacatcgtgggatccaatgtgtttgatatgttgtgccttggtattccatggtttattaaaactgcatttataaatggatcagctcctgcagaagtaaacagcagaggactaacttacataaccatctctctcaacatttcaattatttttctttttttagcagttcacttcaatggctggaaactagacagaaagttgggaatagtctgcctattatcatacttggggcttgctacattatcagttctatatgaacttggaattattggaaataataaaataaggggctgtggaggttgatattattaatagtgttatgcagaaaatatgaatggcagggaggggcagagagaaaaatccatttcttcatttaaatcaaattttaaaaatcttgaaccttagaatctaaaacttacagtaatttaaaaccaaccaaaatcacatcctaatttttctgagccctttcttttcatgaaaaattacatattataaaacagaagtttggggggaaaaaatctatgttttaccatacaataagttgacaaaaactggagaaactagaacaaacaaatccaactatgtagtactgaaaacaacaagaaaatggcttatttcattaaa

SEQ ID NO: 183317 - DNA, 1388 bp, Homo sapiens
  Payload ID: 16118
  Gene Symbol: SLC24A5
  Gene Name: solute carrier family 24 (sodium/potassium/calcium exchanger), member 5
  Uniprot ID: Q71RS6
  ENST ID: ENST00000449382
  CDS Start-End: 22-1344
tgcagtaagagcacagcagaaatgcagacaaaagggggccaaacatgggcgagaagggctctgttgctcggcatcctgtgggccactgcacatctgcctctctcagggacctccctgccccaacgtctcccaagggccacagcccttggattgtctcaggatgttgcaggcacaactttcatggcagcgggcagttcagctcctgaattagttactgctttcctaggtgtatttatcacaaagggagatattggcattagcaccatccttggatctgcaatttataatctccttggcatctgtgctgcctgtggtttgctatctaatacggtctcaacactatcatgttggcccctattcagagactgtgcagcgtacacaattagtgcagcagcagttcttggtataatatatgacaaccaagtttactggtatgaaggggctttactgcttttgatatatggattgtatgttttggtgctgtgttttgacattaaaattaaccaatatattataaagaaatgcagtccttgctgcgcctgtcttgccaaagctatggagagaagtgaacaacagccactgatgggctgggaagatgaaggtcaaccattcattcgtcggcaatcaagaactgatagtggaatattttatgaagattctggctactctcagctctctataagtttacatggccttagtcaggtttctgaagatccaccaagtgttttcaacatgcctgaagcagacttaaaaagaattttttgggtattatcccttcctattattacattactttttctaaccacaccagattgtagaaaaaagttttggaaaaactactttgtgataacctttttcatgtctgcaatatggatatccgcatttacatatatcctggtttggatggtcacaataactggggaaacactagaaattcccgatacagtaatgggccttactttattagcagcaggaacaagcataccagacacaattgcaagtgtgttggttgcaagaaaagggaaaggagatatggctatgtctaacatcgtgggatccaatgtgtttgatatgttgtgccttggtattccatggtttattaaaactgcatttataaatggatcagctcctgcagaagtaaacagcagaggactaacttacataaccatctctctcaacatttcaattatttttctttttttagcagttcacttcaatggctggaaactagacagaaagttgggaatagtctgcctattatcatacttggggcttgctacattatcagttctatatgaacttggaattattggaaataataaaataaggggctgtggaggttgatattattaatagtgttatgcagaaaatatgaatggcagggaggg

SEQ ID NO: 183318 - DNA, 2984 bp, Homo sapiens
  Payload ID: 16118
  Gene Symbol: SLC24A5
  Gene Name: solute carrier family 24 (sodium/potassium/calcium exchanger), member 5
  ENST ID: ENST00000482911
  CDS Start-End: 42-410
cccttcctgaagctgcacgctgcagtaagagcacagcagaaatgcagacaaaagggggccaaacatgggcgagaagggctctgttgctcggcatcctgtgggccactgcacatctgcctctctcagggacctccctgccccaacgtctcccaagggccacaggaaatagcacccaatgtgttatttctccatcatcggagtttcccgaagggtttttcacgagacaggagcgcagagatggaggcatcataatctatttcctaattatcgtttacatgttcatggccatatctattgtctgtgatgaatacttcctaccctccctggaaatcatcagtgaatgtaagtggctggaaagttgccctgtaaccttctgggagagtgtgccacacagatatgactgtctttgaaatagctcagcagctgtcctgtacttctcaactggttgcagagcaccagcttcttgttgtggggtcccgtgtcttaaggaactggtcgagtgtggtttctcttggtagttaatgtgaatcagagtttcttcaagttagaacccggcagttattatttttctgcctatttccagaaatctctagtttgtctactgcctggatgtttgttataagaactgttccaagatttcacttgtatgtactttgtgtgcgctcctaatacaatgaaactcctaatatttgccattttatgcttcaaaaaacttttttttatttttactctaagctcgctataactttgattataaaaagtgataaacaaatgcaattaaggaccaccctccccatcttcctttcccagcatcctaccattaaggaaattaattgatatttaagaaccaataaacagatagatgaataagtcctgtatcctaagtgaccttagacatcagatgactgtaaaatcagttattaaaaattaagagctccatttattggtttctgaaaataagatcagccggtccaagcctctgagctctgttccttcagcagtatatgttgcccagaattctgagcatagaccttcactggtgcactggtccctaaacaccaggatagcagttatgttctgtgccatatgagcaaaagtgtgtttctagacttggtctcatgtttggttatttatttggctgagcatgcccacattacagcaaaaagcaatgtcaaaattaaggattgggtttcctattgcatattcacaagactgcacagtaacagcagcgtcctcaacctccacccaccgcccccgacacacacacattgctgccatttctttataaagggaaagagcatgaatgtaaactctcccttttcccatcaccccacccccaacccctgctgaaatgcaaagcgaattatttcctcccttgttcactgcagtataccagaatctgtaggctctaaaacagtaactggtgatagcagaggcactcaacacctatctgtttaatgaaaatatataatatatatatatatgatagattagcctaatttattacaatttttcttaagtagatacaaacatatgcttttatcttgacgttacatcttatatataattgatattttctttaataaagattaaattatttaacagttttacttagattaatgaaatacaagaaaaatagaagagaaagataaaatcacctgtatttccatctacacagttaccatttggtatatttcctttaaatcttttgaatcttgctttatatacagtttgggatctttcctttttttcacacaatattttatagtgcacattttccaatattattaaacattcttcaaaaacattatttttaatgatatcatgatagtccatgattctataaatgatttgagcgtctgacactggtttttacacatagtaggcacccagtagaaatttatcataaaatttaaaactattactctcattggacatttggcctgttttaagttttttgtgttaatgtcatgcccataattgtataaaatctttgcacacctctctgatcatttcctgattaagaggcagagatgtggatattttaagtcttatgatatatatttgcaaaaggcatcccacaaaaggtgtgcctacttatacctccttaagcatccattccagaaaaccatgaaaaatatgtgaaatatccttggttgctttaacctcccattattttataaaatttgtgtttatcttattatccatgagggtgaatattttatatgtttattttattttatggttttccttttgtgtttttttgcccatattatatcaggggtattctgtctctttcttattgattttcaagactttaaaaatatataaggatattaaccctttttctagtattacttcatatcatatgctttttcatggtttgtttgattttgcattttgtgtttatcacattgaagtttgaagtttaaatattttaagtaaatttgtaaatctttttctttatggttctccttttggttttataactagaaaggcatttttatccataggtcacaacaatcatcatattttattctacatgcaggattttttaaaatttatttattttttccactaagaatctgtcttgctataggatgtaatgttcttttttccaacagttgatcaattttcatatactaagttcttatatagatgtagatctgtctctatgctcccaactctgttctaataacctttttgtacattcttatgccaatactgcacttttaattagaaaaatgtaaaaaactaaaaattgaaaaattaaaaatgttaatcatataaaacacagaaatttaaattgtaaggaataatttccatttctaatgacttaactgaacaatgacatgactgaaaaaataaatctatcaagaattttattataaaaattatcttaggagaagtgaaaaataaataaaaaacctttctagccctgtagaagacactactgcattaaaatttagattatgacttcaaaa

SEQ ID NO: 183319 - DNA, 2429 bp, Homo sapiens
  Payload ID: 16119
  Gene Symbol: SLC25A12
  Gene Name: solute carrier family 25 (aspartate/glutamate carrier), member 12
  ENST ID: ENST00000263812
  CDS Start-End: 10-273
gagcacagcatggcggtcaaggtgcagacaactaagcgaggggatcctcatgagttaagaaacatatttctacagtatgccagtactgaggttgatggagagcgttatatgaccccagaagactttgttcagcgctatcttggactgtataatgatccaaatagtaacccaaagatcgtgcagctcttggcaggagtagctgatcaaaccaaggatggaaaatgtcaaagaaatttttggacagactattattcatcatcatatcccttttaactgggattgtgaatttatccgactgcattttgggcataaccggaagaagcatcttaactacacagaattcacgcagtttctccaggagctgcaattggaacatgcaagacaagcctttgcactcaaagacaaaagcaaaagtggcatgatttctggtctggatttcagtgacatcatggttaccattagatctcacatgcttactccttttgtggaggagaacttagtttcagcagctggaggaagtatctcacaccaggttagcttctcctacttcaatgcatttaactcgttactgaataacatggagcttgttcgtaagatatatagcactctagctggcacaaggaaagatgttgaagtcacaaaggaggaatttgcccagagtgccatacgctatggacaagtcacaccactagaaattgatattctatatcagcttgcagacttatataatgcttcagggcgcttgactttggcagatattgagagaatagccccattggctgagggggccttaccttacaacctggcagaacttcagagacagcagtctcctgggttaggcaggcctatctggctccagattgccgagtctgcttacagattcactctgggctcagttgctggagctgtgggagccactgcagtgtatcctatagatctggtgaagacccgaatgcaaaaccagcgtggctctggctctgttgttggggagctaatgtacaaaaacagctttgactgttttaagaaagtcttgcgttatgagggcttctttggactctacaggggtctgataccacaacttataggggttgctccagaaaaggccattaaactgactgttaatgattttgttcgggacaaatttaccagaagagatggctctgttccacttccagcagaagttcttgctggaggctgtgctggaggctctcaggtcatttttaccaacccattggagatagtgaagattcgtctgcaagtagctggagagatcaccacgggacccagagtcagcgccctgaatgtgctccgggacttgggaatttttggtctgtataagggtgccaaagcgtgtttcctccgagacattcccttctctgcaatctattttcctgtttatgctcattgcaaactacttctggctgatgaaaatggacacgtgggaggtttaaatcttcttgcagctggagccatggcaggtgtcccagctgcatctctggtgacccctgctgatgtcatcaagacaagactgcaggtggctgcccgcgctggccagacgacatacagtggtgtcatcgactgtttcaggaagattctccgggaagaagggccctcagcattttggaaagggactgcagctcgagtgtttcgatcctctccccagtttggtgttaccttggtcacttatgaacttctccagcggtggttttacattgattttggaggcctcaaacccgctggttcagaaccaacacctaagtcacgcattgcagaccttcctcctgccaaccctgatcacatcggtggatacagactcgccacagccacgtttgcaggcatcgaaaacaaatttggcctttatctcccgaaatttaagtctcctagtgttgctgtggttcagccaaaggcagcagtggcagccactcagtgatgagacaactgttgagtgtggcaaaatggcgccttgaagaaagaggcctaggagagcagccctgtaatgtatccagtcagctgcatggtactgactgagctgaggagtcaaactcttctttctgtatgacatatacatatacttgtttataaaataatcatttgcccagggaaaaaaccacaacgctgtttcaagctttagtcttatgtgttgaaatgtttttgtaagccttggcatgaattagtgttctagactctgctttgcacagcttgcacttacagtgattgtacatattgtacatctttgtacagagacatcttggcacctcatcccaacaaatcacatttgtagaaatgtaatgcggttctgagtggcttgaaatgtacagaatgttttgaaagtgttttattaagaatcacacaaaaataaatgtattaaaattaaattcattctcttattggtgacttatggaaataaagcatcaatattggatgtattt

SEQ ID NO: 183320 - DNA, 2979 bp, Homo sapiens
  Payload ID: 16119
  Gene Symbol: SLC25A12
  Gene Name: solute carrier family 25 (aspartate/glutamate carrier), member 12
  Uniprot ID: O75746
  ENST ID: ENST00000422440
  CDS Start-End: 39-2075
gctcgctcactcgctcgtccccggcttccgagcacagcatggcggtcaaggtgcagacaactaagcgaggggatcctcatgagttaagaaacatatttctacagtatgccagtactgaggttgatggagagcgttatatgaccccagaagactttgttcagcgctatcttggactgtataatgatccaaatagtaacccaaagatcgtgcagctcttggcaggagtagctgatcaaaccaaggatgggttgatctcctatcaagagtttttggcatttgaatctgttttatgtgctccagattccatgttcatagtggctttccagttgtttgacaagagtggaaatggagaggtgacatttgaaaatgtcaaagaaatttttggacagactattattcatcatcatatcccttttaactgggattgtgaatttatccgactgcattttgggcataaccggaagaagcatcttaactacacagaattcacgcagtttctccaggagctgcaattggaacatgcaagacaagcctttgcactcaaagacaaaagcaaaagtggcatgatttctggtctggatttcagtgacatcatggttaccattagatctcacatgcttactccttttgtggaggagaacttagtttcagcagctggaggaagtatctcacaccaggttagcttctcctacttcaatgcatttaactcgttactgaataacatggagcttgttcgtaagatatatagcactctagctggcacaaggaaagatgttgaagtcacaaaggaggaatttgcccagagtgccatacgctatggacaagtcacaccactagaaattgatattctatatcagcttgcagacttatataatgcttcagggcgcttgactttggcagatattgagagaatagccccattggctgagggggccttaccttacaacctggcagaacttcagagacagcagtctcctgggttaggcaggcctatctggctccagattgccgagtctgcttacagattcactctgggctcagttgctggagctgtgggagccactgcagtgtatcctatagatctggtgaagacccgaatgcaaaaccagcgtggctctggctctgttgttggggagctaatgtacaaaaacagctttgactgttttaagaaagtcttgcgttatgagggcttctttggactctacaggggtctgataccacaacttataggggttgctccagaaaaggccattaaactgactgttaatgattttgttcgggacaaatttaccagaagagatggctctgttccacttccagcagaagttcttgctggaggctgtgctggaggctctcaggtcatttttaccaacccattggagatagtgaagattcgtctgcaagtagctggagagatcaccacgggacccagagtcagcgccctgaatgtgctccgggacttgggaatttttggtctgtataagggtgccaaagcgtgtttcctccgagacattcccttctctgcaatctattttcctgtttatgctcattgcaaactacttctggctgatgaaaatggacacgtgggaggtttaaatcttcttgcagctggagccatggcaggtgtcccagctgcatctctggtgacccctgctgatgtcatcaagacaagactgcaggtggctgcccgcgctggccagacgacatacagtggtgtcatcgactgtttcaggaagattctccgggaagaagggccctcagcattttggaaagggactgcagctcgagtgtttcgatcctctccccagtttggtgttaccttggtcacttatgaacttctccagcggtggttttacattgattttggaggcctcaaacccgctggttcagaaccaacacctaagtcacgcattgcagaccttcctcctgccaaccctgatcacatcggtggatacagactcgccacagccacgtttgcaggcatcgaaaacaaatttggcctttatctcccgaaatttaagtctcctagtgttgctgtggttcagccaaaggcagcagtggcagccactcagtgatgagacaactgttgagtgtggcaaaatggcgccttgaagaaagaggcctaggagagcagccctgtaatgtatccagtcagctgcatggtactgactgagctgaggagtcaaactcttctttctgtatgacatatacatatacttgtttataaaataatcatttgcccagggaaaaaaccacaacgctgtttcaagctttagtcttatgtgttgaaatgtttttgtaagccttggcatgaattagtgttctagactctgctttgcacagcttgcacttacagtgattgtacatattgtacatctttgtacagagacatcttggcacctcatcccaacaaatcacatttgtagaaatgtaatgcggttctgagtggcttgaaatgtacagaatgttttgaaagtgttttattaagaatcacacaaaaataaatgtattaaaattaaattcattctcttattggtgacttatggaaataaagcatcaatattggatgtatttaattcctagtttgttttccattctggaataaaaaggtatttgctgataaaaggcataacgagacatagtgctgctaccactgaataagtgatactttggaaagatgcatgccagtggatgccagaggaccaggctaatgacttgtgtgtgctgatgtgtttccatttgtatttaatgtgtgtagaccctcctctgttcatcaatcaaaaagcatttcctaggcagctcctcgcctgtcagtgtgcatatggaaacagggacatctccatcattactggcttagttttgctttcctttgacacagtaaggcaaaggccaagctttcaaaagagtaaaggatactttcacaatttcccttcatatggatatgattccagtcaaaaataaaatgcacaccaaaatgta

SEQ ID NO: 183321 - DNA, 911 bp, Homo sapiens
  Payload ID: 16119
  Gene Symbol: SLC25A12
  Gene Name: solute carrier family 25 (aspartate/glutamate carrier), member 12
  ENST ID: ENST00000426896
  CDS Start-End: 31-663
actcgctcgtccccggcttccgagcacagcatggcggtcaaggtgcagacaactaagcgaggggatcctcatgagttaagaaacatatttctacagtatgccagtactgaggttgatggagagcgttatatgaccccagaagactttgttcagcgctatcttggactgtataatgatccaaatagtaacccaaagatcgtgcagctcttggcaggagtagctgatcaaaccaaggatgggttgatctcctatcaagagtttttggcatttgaatctgttttatgtgctccagattccatgttcatagtggctttccagttgtttgacaagagtggaaatggagaggtgacatttggaggagttctctggccacaccgttggtacagcagctccttccaggctcattcatggaacaggcatggtggcagtcttggagaagagtgccagccccggtcagagaaaatgtcaaagaaatttttggacagactattattcatcatcatatcccttttaactgggattgtgaatttatccgactgcattttgggcataaccggaagaagcatcttaactacacagaattcacgcagtttctccaggagctgcaattggaacatgcaagacaagcctttgcactcaaagacaaaagcaaaagtggcatgatttctggtctggatttcagtgacatcatggttaccattagatctcacatgcttactccttttgtggaggagaacttagtttcagcagctggaggaagtatctcacaccaggttagcttctcctacttcaatgcatttaactcgttactgaataacatggagcttgttcgtaagatatatagcactctagctggcacaaggaaagatgttgaagtcacaaaggaggaatttgcccagagtgccatacgc

SEQ ID NO: 183322 - DNA, 829 bp, Homo sapiens
  Payload ID: 16119
  Gene Symbol: SLC25A12
  Gene Name: solute carrier family 25 (aspartate/glutamate carrier), member 12
  ENST ID: ENST00000475360
  CDS Start-End: 1-528
gtgcagacaactaagcgaggggatcctcatgagttaagaaacatatttctacagtatgccagtactgaggttgatggagagcgttatatgaccccagaagactttgttcagcgctatcttggactgtataatgatccaaatagtaacccaaagatcgtgcagctcttggcaggagtagctgatcaaaccaaggatgggttgatctcctatcaagagtttttggcatttgaatctgttttatgtgctccagattccatgttcatagtggctttccagttgtttgacaagagtggaaatggagaggtgacatttggattttggatctggggtaaaggaggagttctctggccacaccgttggtacagcagctccttccaggctcattcatggaacaggcatggtggcagtcttggagaagagtgccagccccggtcagagggaagaaatgaatcctgcattccatttcaaagaaaagatgagaatcccatctccccagtgacatccaatgccttcttccaactttgctgattgctgcaatctattcagagctattatattgactctagactgaaaatgtcaaagaaatttttggacagactattattcatcatcatatcccttttaactgggattgtgaatttatccgactgcattttgggcataaccggaagaagcatcttaactacacagaattcacgcagtttctccaggagctgcaattggaacatgcaagacaagcctttgcactcaaagacaaaagcaaaagtggcatgatttctggtctggatttcagtgacatcatggttaccattagatctcacatgcttac

SEQ ID NO: 183323 - DNA, 3136 bp, Homo sapiens
  Payload ID: 16120
  Gene Symbol: SLC25A13
  Gene Name: solute carrier family 25 (aspartate/glutamate carrier), member 13
  Uniprot ID: Q9UJS0
  ENST ID: ENST00000265631
  CDS Start-End: 138-2165
ggccaggaacgcacgctgcctggccgtatcgccgcccccaccgccgccgccgccgggactagaagtgagccgcccgggtcccaaacgccagccagccagtcagtgggtcccgcagtcgcccgcaaccggggcgaatcatggcggccgccaaggtggctttaaccaagagagcagatccagctgagcttagaacaatatttttgaagtatgcaagcattgagaaaaacggtgaatttttcatgtcccccaatgactttgtcactcgatacttgaacatttttggagaaagccagcctaatccaaagactgtggaacttttaagtggagtggtggatcagaccaaagatggattaatatcttttcaagaatttgttgcctttgaatctgtcctgtgtgcccctgatgctttgtttatggtagcctttcagctgtttgacaaagctggcaaaggagaagtaacttttgaggatgttaagcaagtttttggacagaccacaattcatcaacatattccatttaactgggattcagaatttgtgcaactacattttggaaaagaaagaaaaagacacctgacatatgcggaatttactcagtttttattggaaatacaactggagcacgcaaagcaagcctttgtgcaacgggacaatgctaggactgggagagtcacagccatcgacttccgagacatcatggtcaccatccgcccccatgtcttgactccttttgtagaagaatgtctagtagctgctgctggaggtaccacatcccatcaagttagtttctcctattttaatggatttaattcgctccttaacaacatggaactcattagaaagatctatagcactctggctggcaccaggaaagatgttgaagtgactaaggaggagtttgttctggcagctcagaaatttggtcaggttacacccatggaagttgacatcttgtttcagttagcagatttatatgagccaaggggacgtatgaccttagcagacattgaacggattgctcctctggaagagggaactctgccctttaacttggctgaggcccagaggcagaaggcctcaggtgattcagctcgaccagttcttctacaagttgcagagtcggcctacaggtttggtctgggttctgttgctggagctgttggagccactgctgtgtatcctatcgatcttgtaaaaactcgaatgcagaaccaacgatcaactggctcttttgtgggagaactcatgtataaaaacagctttgactgttttaagaaagtgctacgctatgaaggcttctttggactgtatagaggtctgttgccacagttattgggagttgccccagagaaggccataaaacttacagtgaacgattttgtgagggataaatttatgcacaaagatggttcggtcccacttgcagcagaaattcttgctggaggctgcgctggaggctcccaggtgattttcacaaatcctttagaaatcgtcaagatccgtttgcaagtggcaggagaaatcaccactggtcctcgagtcagtgctctgtctgtcgtgcgggacctggggttttttgggatctacaagggtgccaaagcatgctttctgcgggacattcctttctcggccatctactttccgtgctatgctcatgtgaaggcttcctttgcaaatgaagatgggcaggttagcccaggaagcctgctcttagctggtgccatagctggtatgcctgcagcatctttagtgacccctgctgatgttatcaagacgagattacaggtggctgcccgggctggccaaaccacttacagcggagtgatagactgctttagaaagatactgcgtgaagaaggaccaaaagctctgtggaagggagctggtgctcgtgtatttcgatcctcaccccagtttggtgtaactttgctgacttacgaattgctacagcgatggttctacattgattttggaggagtaaaacccatgggatcagagccagttcctaaatccaggatcaacctgcctgccccgaatcctgatcacgttgggggctacaaactggcagttgctacatttgcagggattgaaaacaaatttggactttacctacctctcttcaagccatcagtatctacctcaaaggctattggtggaggcccataggaagatcagccctgggatagtgctgtctttttgtgggtactgcagtaaagaacatccctcctgggaatgaagcaatgcttcatcccttttacgtccatctcttgtttaaattcaagtccaggcttttttatcatgtgaaatcattcattttctgggtgttttcttaaccagatcattgtgaaattattcataattattatttggccctctgcccagaaacctttgtttgcatctgaaaattgatgggatttggtcaacactaacatgatttggggaaaggagcaagtcagaatagaaattagtactcccctccttgaactaggattgtagtcccaaagaggctactgtaaggcaatcatggtgctcagagcagtgtttcgtgtgtgttttaaactggtaggaaactaggtgcatatttataaaaataaaaaacactgggagaaatgaaaaaatatatatcaaatatattcagcctggcttcaaattgtaagcatgcacaaattctgtctctggattatattatgaagcttttatgtgaaacatgtttctttgtaatgaaaaccacattggagatgtttagtaatcatattgttactggtaccaagactactagggaaatgcctttgtactttagggaagtacttttggcattttactgtacagacagaaaaaactgagatgtagcccctctcctggaagtgctaattttgaaaaactgctcatatgatgtacatgtactgattactgcctattttaataaacactcttgaaaaatgcatgttgccctgttgctgcctgccctattctcctcatctccccatcattggtacccacttgcttttaaaatccactttatcttgaataatgtaagacaaatatgttctgacataagtatttaattcatgttgccttgcataatggtcagaggcgcatgaatttgtgaaggtggaaataaactatttgtaaagtga

SEQ ID NO: 183324 - DNA, 3192 bp, Homo sapiens
  Payload ID: 16120
  Gene Symbol: SLC25A13
  Gene Name: solute carrier family 25 (aspartate/glutamate carrier), member 13
  Uniprot ID: Q9UJS0
  ENST ID: ENST00000416240
  CDS Start-End: 192-2222
aatgggcgggcagcatccacatgacccgcgccggcgggagggcgtggggaggcaggccaggaacgcacgctgcctggccgtatcgccgcccccaccgccgccgccgccgggactagaagtgagccgcccgggtcccaaacgccagccagccagtcagtgggtcccgcagtcgcccgcaaccggggcgaatcatggcggccgccaaggtggctttaaccaagagagcagatccagctgagcttagaacaatatttttgaagtatgcaagcattgagaaaaacggtgaatttttcatgtcccccaatgactttgtcactcgatacttgaacatttttggagaaagccagcctaatccaaagactgtggaacttttaagtggagtggtggatcagaccaaagatggattaatatcttttcaagaatttgttgcctttgaatctgtcctgtgtgcccctgatgctttgtttatggtagcctttcagctgtttgacaaagctggcaaaggagaagtaacttttgaggatgttaagcaagtttttggacagaccacaattcatcaacatattccatttaactgggattcagaatttgtgcaactacattttggaaaagaaagaaaaagacacctgacatatgcggaatttactcagtttttattggaaatacaactggagcacgcaaagcaagcctttgtgcaacgggacaatgctaggactgggagagtcacagccatcgacttccgagacatcatggtcaccatccgcccccatgtcttgactccttttgtagaagaatgtctagtagctgctgctggaggtaccacatcccatcaagttagtttctcctattttaatggatttaattcgctccttaacaacatggaactcattagaaagatctatagcactctggctggcaccaggaaagatgttgaagtgactaaggaggagtttgttctggcagctcagaaatttggtcaggttacacccatggaagttgacatcttgtttcagttagcagatttatatgagccaaggggacgtatgaccttagcagacattgaacggattgctcctctggaagagggaactctgccctttaacttggctgaggcccagaggcagcagaaggcctcaggtgattcagctcgaccagttcttctacaagttgcagagtcggcctacaggtttggtctgggttctgttgctggagctgttggagccactgctgtgtatcctatcgatcttgtaaaaactcgaatgcagaaccaacgatcaactggctcttttgtgggagaactcatgtataaaaacagctttgactgttttaagaaagtgctacgctatgaaggcttctttggactgtatagaggtctgttgccacagttattgggagttgccccagagaaggccataaaacttacagtgaacgattttgtgagggataaatttatgcacaaagatggttcggtcccacttgcagcagaaattcttgctggaggctgcgctggaggctcccaggtgattttcacaaatcctttagaaatcgtcaagatccgtttgcaagtggcaggagaaatcaccactggtcctcgagtcagtgctctgtctgtcgtgcgggacctggggttttttgggatctacaagggtgccaaagcatgctttctgcgggacattcctttctcggccatctactttccgtgctatgctcatgtgaaggcttcctttgcaaatgaagatgggcaggttagcccaggaagcctgctcttagctggtgccatagctggtatgcctgcagcatctttagtgacccctgctgatgttatcaagacgagattacaggtggctgcccgggctggccaaaccacttacagcggagtgatagactgctttagaaagatactgcgtgaagaaggaccaaaagctctgtggaagggagctggtgctcgtgtatttcgatcctcaccccagtttggtgtaactttgctgacttacgaattgctacagcgatggttctacattgattttggaggagtaaaacccatgggatcagagccagttcctaaatccaggatcaacctgcctgccccgaatcctgatcacgttgggggctacaaactggcagttgctacatttgcagggattgaaaacaaatttggactttacctacctctcttcaagccatcagtatctacctcaaaggctattggtggaggcccataggaagatcagccctgggatagtgctgtctttttgtgggtactgcagtaaagaacatccctcctgggaatgaagcaatgcttcatcccttttacgtccatctcttgtttaaattcaagtccaggcttttttatcatgtgaaatcattcattttctgggtgttttcttaaccagatcattgtgaaattattcataattattatttggccctctgcccagaaacctttgtttgcatctgaaaattgatgggatttggtcaacactaacatgatttggggaaaggagcaagtcagaatagaaattagtactcccctccttgaactaggattgtagtcccaaagaggctactgtaaggcaatcatggtgctcagagcagtgtttcgtgtgtgttttaaactggtaggaaactaggtgcatatttataaaaataaaaaacactgggagaaatgaaaaaatatatatcaaatatattcagcctggcttcaaattgtaagcatgcacaaattctgtctctggattatattatgaagcttttatgtgaaacatgtttctttgtaatgaaaaccacattggagatgtttagtaatcatattgttactggtaccaagactactagggaaatgcctttgtactttagggaagtacttttggcattttactgtacagacagaaaaaactgagatgtagcccctctcctggaagtgctaattttgaaaaactgctcatatgatgtacatgtactgattactgcctattttaataaacactcttgaaaaatgcatgttgccctgttgctgcctgccctattctcctcatctccccatcattggtacccacttgcttttaaaatccactttatcttgaataatgtaagacaaatatgttctgacataagtatttaattcatgttgccttgcataatggtcagaggcgcatgaatttgtgaaggtggaaataaactatttgtaaagtg

SEQ ID NO: 183325 - DNA, 568 bp, Homo sapiens
  Payload ID: 16120
  Gene Symbol: SLC25A13
  Gene Name: solute carrier family 25 (aspartate/glutamate carrier), member 13
  ENST ID: ENST00000472162
  CDS Start-End: 181-402
agcatccacatgacccgcgccggcgggagggcgtggggaggcaggccaggaacgcacgctgcctggccgtatcgccgcccccaccgccgccgccgccgggactagaagtgagccgcccgggtcccaaacgccagccagccagtcagtgggtcccgcagtcgcccgcaaccggggcgaatcatggcggccgccaaggtggctttaaccaagagagcagatccagctgagcttagaacaatatttttgaagtatgcaagcattgagaaaaacggtgaatttttcatgtcccccaatgactttgtcactcgatacttgaacatttttggagaaagccagcctaatccaaagactgtggaacttttaagtggagtggtggatcagaccaaagatggaggatgttaagcaagtttttggacagaccacaattcatcaacatattccatttaactgggattcagaatttgtgcaactacattttggaaaagaaagaaaaagacacctgacatatgcggaatttactcagtttttattggaaatacaactggagcacgcaaagcaagcctttgtg

SEQ ID NO: 183326 - DNA, 1879 bp, Homo sapiens
  Payload ID: 16121
  Gene Symbol: SLC25A20
  Gene Name: solute carrier family 25 (carnitine/acylcarnitine translocase), member 20
  Uniprot ID: O43772
  ENST ID: ENST00000319017
  CDS Start-End: 200-1105
atcgaagcggggccgaggccggaagcagccccgggcggaagccctaccgtgccaactgggccctcctcccgacctgccccgggctcgtgccccgcccacccaaaagtgggtgaaaggtcggcggcgccggcactgcagctggggctgagaagccaggacggcccgagaactgacagacggagtgacagacggactgaccatggccgaccagccaaaacccatcagcccgctcaagaacctgctggccggcggctttggcggcgtgtgcctggtgttcgtcggtcaccctctggacacggtcaaggtccgactgcagacacagccaccgagtttgcctggacaacctcccatgtactctgggacctttgactgtttccggaagactctttttagagagggcatcacggggctatatcggggaatggctgcccctatcatcggggtcactcccatgtttgccgtgtgcttctttgggtttggtttggggaagaaactacaacagaaacacccagaagatgtgctcagctatccccagctttttgcagctgggatgttatctggcgtattcaccacaggaatcatgactcctggagaacggatcaagtgcttattacagattcaggcttcttcaggagaaagcaagtacactggtaccttggactgtgcaaagaagctgtaccaggagtttgggatccgaggcatctacaaagggactgtgcttacccttatgcgagatgtcccagctagtggaatgtatttcatgacatatgaatggctgaaaaatatcttcactccggagggaaagagggtcagtgagctcagtgcccctcggatcttggtggctgggggcattgcagggatcttcaactgggctgtggcaatccccccagatgtgctcaagtctcgattccagactgcacctcctgggaaatatcctaatggtttcagagatgtgctgagggagctgatccgggatgaaggagtcacatccttgtacaaagggttcaatgcagtgatgatccgagccttcccagccaatgcggcctgtttccttggctttgaagttgccatgaagttccttaattgggccacccccaacttgtgaggctgaaggctgctcaagttcacttctggatgctggaagctgtcgttgaggagaaggagtagtaagcagaactaagcagtcttggagggcaaggggaggggaatggtgagatccgagccctgtgcatggacttggtgagactgttgccttaatgacatcctgcaccgtgtataacttagtgtgtcattttgaaacttgaattcattcttatcaatttaagggatcttaaaaggatttggaaatggaacaagtagcttccagaccagatactacctgtggcaagaatgctgcctaccagttaactgctggtcctaccacagtcaaagtattcctcattaaagagagaatctcaggttctcactggaggcactgtgcatattttcaaccagatcaccaggagctgagatcttcttcagtccctagccaggaatacccatttgatttccagggtgccatctaatcctgggctgtacatgtggatatggacttgaggcccacctctgtgtccaagtggattgagcatatatgcctaggaggagatagactgttaatcgttggattttgattttttttttttatgcctgcaaataatcaaaagtaaaactggagtagcctaattttctgggagcaggtggagaactttccctcctacacagtgaggacagtcccagtctgctgggataagtgagaaagcccagggtgtaggaaggccctttttacatactcttttctcatgagagctcactattttaacaataaacaataaacgttgtt

SEQ ID NO: 183327 - DNA, 1383 bp, Homo sapiens
  Payload ID: 16121
  Gene Symbol: SLC25A20
  Gene Name: solute carrier family 25 (carnitine/acylcarnitine translocase), member 20
  ENST ID: ENST00000440964
  CDS Start-End: 99-329
aaaagtgggtgaaaggtcggcggcgccggcactgcagctggggctgagaagccaggacggcccgagaactgacagacggagtgacagacggactgaccatggccgaccagccaaaacccatcagcccgctcaagaacctgctggccggcggctttggcggcgtgtgcctggtgttcgtcggtcaccctctggacacggtcaaggggaggttatgcctgactatgggagatctgaaggacaatatgagggattttggatgtaaaggtccgactgcagacacagccaccgagtttgcctggacaacctcccatgtactctgggacctttgactgtttccggaagactctttttagagagggcatcacggggctatatcggggaatggctgcccctatcatcggggtcactcccatgtttgccgtgtgcttctttgggtttggtttggggaagaaactacaacagaaacacccagaagatgtgctcagctatccccagctttttgcagctgggatgttatctggcgtattcaccacaggaatcatgactcctggagaacggatcaagtgcttattacagattcaggcttcttcaggagaaagcaagtacactggtaccttggactgtgcaaagaagctgtaccaggagtttgggatccgaggcatctacaaagggactgtgcttacccttatgcgagatgtcccagctagtggaatgtatttcatgacatatgaatggctgaaaaatatcttcactccggagggaaagagggtcagtgagctcagtgcccctcggatcttggtggctgggggcattgcagggatcttcaactgggctgtggcaatccccccagatgtgctcaagtctcgattccagactgcacctcctgggaaatatcctaatggtttcagagatgtgctgagggagctgatccgggatgaaggagtcacatccttgtacaaagggttcaatgcagtgatgatccgagccttcccagccaatgcggcctgtttccttggctttgaagttgccatgaagttccttaattgggccacccccaacttgtgaggctgaaggctgctcaagttcacttctggatgctggaagctgtcgttgaggagaaggagtagtaagcagaactaagcagtcttggagggcaaggggaggggaatggtgagatccgagccctgtgcatggacttggtgagactgttgccttaatgacatcctgcaccgtgtataacttagtgtgtcattttgaaacttgaattcattcttatcaatttaagggatcttaaaaggatttggaaatggaacaagtagcttccagaccagatactacctgtggcaagaatgctgcctaccagttaactgctggtcctaccac

SEQ ID NO: 183328 - DNA, 1576 bp, Homo sapiens
  Payload ID: 16121
  Gene Symbol: SLC25A20
  Gene Name: solute carrier family 25 (carnitine/acylcarnitine translocase), member 20
  ENST ID: ENST00000430379
  CDS Start-End: 111-797
ccccgcccacccaaaagtgggtgaaaggtcggcggcgccggcactgcagctggggctgagaagccaggacggcccgagaactgacagacggagtgacagacggactgaccatggccgaccagccaaaacccatcagcccgctcaagaacctgctggccggcggctttggcggcgtgtgcctggtgttcgtcggtcaccctctggacacggtcaaggtccgactgcagacacagccaccgagtttgcctggacaacctcccatgtactctgggacctttgactgtttccggaagactctttttagagagattcaggcttcttcaggagaaagcaagtacactggtaccttggactgtgcaaagaagctgtaccaggagtttgggatccgaggcatctacaaagggactgtgcttacccttatgcgagatgtcccagctagtggaatgtatttcatgacatatgaatggctgaaaaatatcttcactccggagggaaagagggtcagtgagctcagtgcccctcggatcttggtggctgggggcattgcagggatcttcaactgggctgtggcaatccccccagatgtgctcaagtctcgattccagactgcacctcctgggaaatatcctaatggtttcagagatgtgctgagggagctgatccgggatgaaggagtcacatccttgtacaaagggttcaatgcagtgatgatccgagccttcccagccaatgcggcctgtttccttggctttgaagttgccatgaagttccttaattgggccacccccaacttgtgaggctgaaggctgctcaagttcacttctggatgctggaagctgtcgttgaggagaaggagtagtaagcagaactaagcagtcttggagggcaaggggaggggaatggtgagatccgagccctgtgcatggacttggtgagactgttgccttaatgacatcctgcaccgtgtataacttagtgtgtcattttgaaacttgaattcattcttatcaatttaagggatcttaaaaggatttggaaatggaacaagtagcttccagaccagatactacctgtggcaagaatgctgcctaccagttaactgctggtcctaccacagtcaaagtattcctcattaaagagagaatctcaggttctcactggaggcactgtgcatattttcaaccagatcaccaggagctgagatcttcttcagtccctagccaggaatacccatttgatttccagggtgccatctaatcctgggctgtacatgtggatatggacttgaggcccacctctgtgtccaagtggattgagcatatatgcctaggaggagatagactgttaatcgttggattttgattttttttttttatgcctgcaaataatcaaaagtaaaactggagtagcctaattttctgggagcaggtggagaactttccctcctacacagtgaggacagtcccagtctgctgggataagtgagaaagcccagggtgtaggaaggccctttttacatactcttttctcatgagagctcactattttaacaataaacaataaacgttgtttctaa

SEQ ID NO: 183329 - DNA, 2244 bp, Homo sapiens
  Payload ID: 16122
  Gene Symbol: SLC25A18
  Gene Name: solute carrier family 25 (glutamate carrier), member 18
  Uniprot ID: Q9H1K4
  ENST ID: ENST00000327451
  CDS Start-End: 539-1486
gagactcctgcaggttcgagaaagcatgacatgctcccagaatcctggatttggacttcattctggacagcatatgacaaggacgaggacccctattctagccagttaaagctggacagaatttttaaaagcaatgaagccagttccttggatatatccacgggctttgctttgagaaggaactgagtaggcagtgagaagagtcgagtgaagcctggcccgtgagtgcctcaacaactgagatgaacgtcgactcgcttgcaggcaagttgtcactcagcagcgatctgaactatatcctgggttccagaaaaggcagaggttcttaccgaaagcaggggaggaagccgcagcccaaggaggtcgtcacttgccgggaaggtggctcgggccaggctgcactcaaaacccgtgctctgtccacactgctacggggccagagccaaggaagcttccacttcttcccccagacagccccaacagcggctaccccaaggagccagcagccttgtgtcctgggatccccagcccctgcagaatgacccaccaggatctgagcatcacagccaaactcatcaatggaggtgtagcagggctcgtgggggtgacctgcgtgttccccatcgacttggccaagactcgcctgcagaaccagcatgggaaagccatgtacaaaggaatgatcgactgcctgatgaagacggctcgggcggagggcttcttcggcatgtaccgaggggctgcagtgaacctcactctggtcactccagagaaggccatcaagctggcggccaacgactttttccggcggctgctcatggaagatgggatgcagcggaacctgaagatggagatgcttgccgggtgtggggctgggatgtgccaggtcgtggtgacctgtcccatggaaatgctcaagattcagctgcaggatgctggacgcctggccgtccatcatcagggctcggcctcagcaccctccacctccaggtcctacacaactggttcggcttccacccacaggcgcccctctgccaccctcattgcctgggagctgctccgcactcagggcctggctgggctctacaggggcctgggtgccactctcctcagagacattcctttctccatcatctacttcccactgtttgccaaccttaacaacctggggttcaacgagctcgccggtaaggcgtcctttgcacattccttcgtgtcaggctgtgtggcaggttccatagctgcggtcgcagtgacgcctctagatgttctgaaaactcgaatccaaaccctcaagaaaggcctgggcgaggacatgtacagtgggatcaccgactgtgccaggaaactctggattcaggagggaccatctgccttcatgaaaggcgctggctgccgggcactggtcatagcacctctctttgggattgctcaaggggtctattttattgggattggagagcgcatcttaaagtgttttgactagacagagctggaggtcaagtccctgcgcttgccgccctctctctagctgtttcacttagcctagagggggcaagggcaggtggggccactctggcctgcctggtcctctgcgttgtagtgctacctcaatctcgggagaaacagccctatattctaacaagttgagcacagccttcttccccttcgtgtctacactcgttttcctttgtgggcacagctaccaggggcttttggaagcccctaaccacctacttttcaacaaaaatggtactttcgttgtattaattgcaggaccttaacaggtagtcacaatagaagggttgtttctgtattttaacatttctatttcacagtcaaactcggcattcttcagtcagcttgaggatttagcattgttaatcttggactccataacttatgagtcctagcactgattttgaggaaaaggaggatcagaagttcaagggaccgtgaaagccctcagagtcagcacctagtttgagaccaagcaccctttcgaatccctggatggctgagggggctgaggccggctctgactgggcagctcagcccctcccccagagcccagggtcttgcacacccctccctgtaaccaaggaacactctgaaataaaggtgaatggctaaaatctcatctgttcatcagtgggtacagcagataggctgcagtgaatgctatcaccatctacttttctacgtccatttcaaaaccaaacattaaaaagggcatagaagcag

SEQ ID NO: 183330 - DNA, 2057 bp, Homo sapiens
  Payload ID: 16122
  Gene Symbol: SLC25A18
  Gene Name: solute carrier family 25 (glutamate carrier), member 18
  Uniprot ID: Q9H1K4
  ENST ID: ENST00000399813
  CDS Start-End: 465-1412
aggttcgagaaagcatgacatgctcccagaatcctggatttggacttcattctggacagcatatgacaaggacgaggacccctattctagccagttaaagctggacagaatttttaaaagcaatgaagccagttccttggatatatccacgggctttgctttgagaaggaactgagtaggcagtgagaagagtcgagtgaagcctggcccgtgagtgcctcaacaactgagatgaacgtcgactcgcttgcaggcaagttgtcagggaggaagccgcagcccaaggaggtcgtcacttgccgggaaggtggctcgggccaggctgcactcaaaacccgtgctctgtccacactgctacggggccagagccaaggaagcttccacttcttcccccagacagccccaacagcggctaccccaaggagccagcagccttgtgtcctgggatccccagcccctgcagaatgacccaccaggatctgagcatcacagccaaactcatcaatggaggtgtagcagggctcgtgggggtgacctgcgtgttccccatcgacttggccaagactcgcctgcagaaccagcatgggaaagccatgtacaaaggaatgatcgactgcctgatgaagacggctcgggcggagggcttcttcggcatgtaccgaggggctgcagtgaacctcactctggtcactccagagaaggccatcaagctggcggccaacgactttttccggcggctgctcatggaagatgggatgcagcggaacctgaagatggagatgcttgccgggtgtggggctgggatgtgccaggtcgtggtgacctgtcccatggaaatgctcaagattcagctgcaggatgctggacgcctggccgtccatcatcagggctcggcctcagcaccctccacctccaggtcctacacaactggttcggcttccacccacaggcgcccctctgccaccctcattgcctgggagctgctccgcactcagggcctggctgggctctacaggggcctgggtgccactctcctcagagacattcctttctccatcatctacttcccactgtttgccaaccttaacaacctggggttcaacgagctcgccggtaaggcgtcctttgcacattccttcgtgtcaggctgtgtggcaggttccatagctgcggtcgcagtgacgcctctagatgttctgaaaactcgaatccaaaccctcaagaaaggcctgggcgaggacatgtacagtgggatcaccgactgtgccaggaaactctggattcaggagggaccatctgccttcatgaaaggcgctggctgccgggcactggtcatagcacctctctttgggattgctcaaggggtctattttattgggattggagagcgcatcttaaagtgttttgactagacagagctggaggtcaagtccctgcgcttgccgccctctctctagctgtttcacttagcctagagggggcaagggcaggtggggccactctggcctgcctggtcctctgcgttgtagtgctacctcaatctcgggagaaacagccctatattctaacaagttgagcacagccttcttccccttcgtgtctacactcgttttcctttgtgggcacagctaccaggggcttttggaagcccctaaccacctacttttcaacaaaaatggtactttcgttgtattaattgcaggaccttaacaggtagtcacaatagaagggttgtttctgtattttaacatttctatttcacagtcaaactcggcattcttcagtcagcttgaggatttagcattgttaatcttggactccataacttatgagtcctagcactgattttgaggaaaaggaggatcagaagttcaagggaccgtgaaagccctcagagtcagcacctagtttgagaccaagcaccctttcgaatccctggatggctgagggggctgaggccggctctgactgggcagctcagcccctcccccagagcccagggtcttgcacacccctccctgtaaccaaggaacactctgaaataaaggtgaatggct

SEQ ID NO: 183331 - DNA, 2385 bp, Homo sapiens
  Payload ID: 16123
  Gene Symbol: SLC25A29
  Gene Name: solute carrier family 25 (mitochondrial carnitine/acylcarnitine carrier), member 29
  Uniprot ID: Q8N8R3
  ENST ID: ENST00000359232
  CDS Start-End: 302-1213
cactcggcgcccccacccgggccctgccggcaggcacgaggggcggggcgcgcggcccgaggtgagggaccgcgggccggaggggatccagcgagtcagctgccgccgagggaccagcgcgggtctagctgctgccgccatccccaccatccctgaccgcgcctgcccgggctccgcgccaggaggagcggccaggcccagccccggcaccgcgcgctcggggaccccgacggcgcccagcccggcgaggggcctcagggggaggacgaggaggaaaggcggcctcgccggggacccggccatggcgctggacttcttggctggatgcgcggggggtgtggcaggcgtgcttgtgggacacccgtttgacacggtcaaggtacggcttcaggtccagagcgtggagaagcctcagtaccgcgggacgttgcactgcttcaagtccatcatcaagcaagagagcgtgctgggcctgtacaagggcctgggctcgccgctcatggggctcaccttcatcaacgcgctggtgttcggggtgcagggcaacaccctccgggccctgggccacgactcgcccctcaaccagttcctggcaggtgcggcggcgggcgccatccagtgcgtcatctgctgccccatggagctggccaagacgcggctgcagctgcaggacgcgggcccagcgcgcacctacaagggctcgctggactgcctcgcgcagatctacgggcacgagggtctgcgtggcgtcaaccggggcatggtgtccacgttgctgcgtgagacgcccagcttcggcgtctacttcctcacctatgacgctctcacgcgggcgctgggctgcgagccgggcgaccgcctgctggtgcccaagctgctgttggcgggcggtacgtcaggcatcgtgtcctggctctctacctatcctgtggacgtggtcaagtcgcggctgcaggcggacggactgcggggcgccccgcgctaccgcggcatcctggactgcgtgcaccagagctaccgcgccgagggctggcgcgtcttcacacgggggctggcgtccacgctgctgcgcgccttccccgtcaacgctgccaccttcgccaccgtcacggtggtgctcacctacgcgcgcggcgaggaggccgggcccgagggcgaggctgtgcccgccgcccctgcggggcctgccctggcgcagccctccagcctgtgacgctcaccccgccctccttccccagggctccttctcagaaacctgggacataaattggcccctgagtcgattgccctgcttcctgctgggatgctgcgagctgtggagtctatcagacgtgggctgaattttgctgatcagctgggtagttttggccgagaactgcacttgcctcagtgttctcatctatgaaataaggaccctcatgcccacactgtagagtcacgaagctcagagattattcccagcagcagccagcacctggcctggctgaggccattgcaccgttatcctggaaactgaggcagacactccagcccctttctgggatcctggccacgtcattgtgctcctgccctgcaggctggctcccgggggtctctgatggccaaccaaggggccacccagggacctctaactccacacatcctccacccgggggggtggtgggccacccctctggtctgtgttagggacagaggaaaacttggtgtgcctcctggtgtcacagaactggatcctctgcataccccagcttctccacatgccactgctaggggtaccccagctgctgccactcctgctggagggtgaactggggaccctgcaccctccgggaagccatggagtctgctggaggcaccatatcagcctgcgggactagggtggggagcaaacaggccagcggtggaggtctggacagttcaagtgtgatgcagctgtggcaaggagaaatccttccgcctctgggcctcaggctgcctgtccataaaatggggacatggccagctgacggacaactgagtctccggcccacctaccaccgccagccaggatcccccaaagtgtgcagagggctcagcagagaacagtatgggaccccctcaccaggcctggaacacctccagccacaaagaagccaaaggtcagtccctctgctccccagcaaacggtgcctcccaggcattctcagtgccagggcttcatccctgtgaaggcacagggcctgctagtgggcacaggggtggctagttggggcctggggcagaggagggctgcaccaggcgtcctggggaatgtgctcagtgaagacgacactgggctttgcacagcctggtgtcgctgtacagaaactgtcaagggaataaagtgttctttgttttttaagtggc

SEQ ID NO: 183332 - DNA, 2242 bp, Homo sapiens
  Payload ID: 16123
  Gene Symbol: SLC25A29
  Gene Name: solute carrier family 25 (mitochondrial carnitine/acylcarnitine carrier), member 29
  Uniprot ID: Q8N8R3
  ENST ID: ENST00000392908
  CDS Start-End: 210-647
gagtcagctgccgccgagggaccagcgcgggtctagctgctgccgccatccccaccatccctgaccgcgcctgcccgggctccgcgccaggaggagcggccaggcccagccccggcaccgcgcgctcggggaccccgacggcgcccagcccggcgaggggcctcagggggaggacgaggaggaaaggcggcctcgccggggacccggccatggcgctggacttcttggctggatgcgcggggggtacggcttcaggtccagagcgtggagaagcctcagtaccgcgggacgttgcactgcttcaagtccatcatcaagcaagagagcgtgctgggcctgtacaagggcctgggctcgccgctcatggggctcaccttcatcaacgcgctggtgttcggggtgcagggcaacaccctccgggccctgggccacgactcgcccctcaaccagttcctggcaggtgcggcggcgggcgccatccagtgcgtcatctgctgccccatggagctggccaagacgcggctgcagctgcaggacgcgggcccagcgcgcacctacaagggctcgctggactgcctcgcgcagatctacgggcacgagggtctgcgtggcgtcaaccggggcatggtgtccacgttgctgcgtgagacgcccagcttcggcgtctacttcctcacctatgacgctctcacgcgggcgctgggctgcgagccgggcgaccgcctgctggtgcccaagctgctgttggcgggcggtacgtcaggcatcgtgtcctggctctctacctatcctgtggacgtggtcaagtcgcggctgcaggcggacggactgcggggcgccccgcgctaccgcggcatcctggactgcgtgcaccagagctaccgcgccgagggctggcgcgtcttcacacgggggctggcgtccacgctgctgcgcgccttccccgtcaacgctgccaccttcgccaccgtcacggtggtgctcacctacgcgcgcggcgaggaggccgggcccgagggcgaggctgtgcccgccgcccctgcggggcctgccctggcgcagccctccagcctgtgacgctcaccccgccctccttccccagggctccttctcagaaacctgggacataaattggcccctgagtcgattgccctgcttcctgctgggatgctgcgagctgtggagtctatcagacgtgggctgaattttgctgatcagctgggtagttttggccgagaactgcacttgcctcagtgttctcatctatgaaataaggaccctcatgcccacactgtagagtcacgaagctcagagattattcccagcagcagccagcacctggcctggctgaggccattgcaccgttatcctggaaactgaggcagacactccagcccctttctgggatcctggccacgtcattgtgctcctgccctgcaggctggctcccgggggtctctgatggccaaccaaggggccacccagggacctctaactccacacatcctccacccgggggggtggtgggccacccctctggtctgtgttagggacagaggaaaacttggtgtgcctcctggtgtcacagaactggatcctctgcataccccagcttctccacatgccactgctaggggtaccccagctgctgccactcctgctggagggtgaactggggaccctgcaccctccgggaagccatggagtctgctggaggcaccatatcagcctgcgggactagggtggggagcaaacaggccagcggtggaggtctggacagttcaagtgtgatgcagctgtggcaaggagaaatccttccgcctctgggcctcaggctgcctgtccataaaatggggacatggccagctgacggacaactgagtctccggcccacctaccaccgccagccaggatcccccaaagtgtgcagagggctcagcagagaacagtatgggaccccctcaccaggcctggaacacctccagccacaaagaagccaaaggtcagtccctctgctccccagcaaacggtgcctcccaggcattctcagtgccagggcttcatccctgtgaaggcacagggcctgctagtgggcacaggggtggctagttggggcctggggcagaggagggctgcaccaggcgtcctggggaatgtgctcagtgaagacgacactgggctttgcacagcctggtgtcgctgtacagaaactgtcaagggaataaagtgttctttgtttttt

SEQ ID NO: 183333 - DNA, 5169 bp, Homo sapiens
  Payload ID: 16123
  Gene Symbol: SLC25A29
  Gene Name: solute carrier family 25 (mitochondrial carnitine/acylcarnitine carrier), member 29
  Uniprot ID: Q8N8R3
  ENST ID: ENST00000554912
  CDS Start-End: 3289-4002
ctgccacccaggagaaacagaacatggccagccctctggaagtcttccctcctgctcctatcaactcctccctccccttctgaggcttccactggcctaacttcctcctttttttttgagacacggtcttgctctgtcaccctaggtggagtgcagtggtgcaatcatagcccactgcagccttgatttcccaggctcaagcaatcctcccaccgcagcctctcaagtagctgaaactacaggcacacaccaccatgcctagctcatgttttttttgaagttattagtagagatggggtcttgatatgttgcccagctggtctcaaactactgggctcaagtgatcctcctgccttggcctcccaaagtgctgggatgacaggcctggcccactgtcctcacttccaacaccacgggtcccttttgcctggttgaatataattgcagctgtaccctaggatcatcaggggccacccgagtctgtgtcagtccgtactgtcacatggccacagactatctcatggctgggacagtcacagtttattcccccaggcccttgggactgaaagaatccaagatctggatctcctctatagcgcccagaaccacagccaccgtcctgaagcacacggccttcacacgtttctacacgaagggagttttctgtcctgcttccttggacacagcaataatcagggagcagttgtcttgacctatgatgagggggtgaccggccatccctgggcatgggatggggagtgtgggtgggggctggctgtgggggctccgcgcctggatgtgatgttgaaattttgtgttgctttaaccgcctttactttctgagctaggggctgtctccatccatagcaaaagtgtaactttgttgtagatgggcgtaagcctcaccctggagagcgctagtaagtacagaccaggtgaaccagatcccagcctggaccccaccctgtcatgcccatctccccaaccccagagttccctccgtagcaggggacagggagggtgtgaggcaagcttgggctcagcacaggtcctggggtgggggctcgggctggccaaaaaaaatcagccccctctggattgggggtcctcatgtgggggtctctcggccctatggggagctgggagcttcctaaacttgtgtccaaatgactagtttcccaggggtgggtccgttcccatcaatcctcaaaggagagcctggcaccccaagattttaagagcctgagctataaatgacaagacttgggacactgggccacagttcctctcccagagagcaagggctcgtcacagactgaggggtactgaggggtcagaaacaaagtggggagaggcctctgcccacattggtgggagaagctgagttgacctaagcctgacattccccagccggctggacttgggcattcaccagtgtctgtgatctgcaaagacttcacaacactacccaggtggcactgagtatccaacctgggaagggacagctccatgtcacatcagttctactcacacagccctcttagtgccagtgttggggctgcaggaggaacagagatccccccagaggccccagaacattgaagggagagcagcaaacctcgcatcaaggtgttggccaagaactgggcctccagggtgggagggtgcttcgggccaatcttgaagcattggcttccagctgttgaggtcctgggggtactgagatggtacttgtttcctaacaaaacattttttataagtgcattcaccaatagagggcccacctattctggtggagagaattggaaaaggttccagaatccgggcagaagcctggctgttcccggtgagggctctcccttgctagcactccctcccaccctcactctgagcaacacagctgctcatgtccctggagaggacagctttggccaagttgttaaacatctctgagcctgtcttcccatcttggaaatgggggcagttgtcccaatgccgagataattgagtgtgaagccctcccctgtcccatgctgcctagtaccgaaggcacttgctctgtggccctggctgtaagaatgatcatttctgagtcagacctagggaaccagcccctgagaatgtgacttgacctagtttactcccaccgcccgctctgcaactctgagcctcctattgagcaaagataagctcataggcaacaaagagcactttgacatggaagaggttctgggccactgggctcggaggcagcggggcctgaccagcgccccaggccccagagctgctgacgtgggtccccaaggaggttgttggctgttctcttgccaccactctattaactcataactgctgttctcacgagaggctactggcagagaccaggcaggagctcctggagccaaggtcattgcttttatttttatttatttatttattgagatggaatgttcctttctcgcccaggctggagtgcagtggcatgacctcactgcatcctctgcctcacgggttcaagcaattctcccacctcagcctcctgagtagcagggattacaggcgtatgccaccacactaggctaattttttttacagacacgatttcgccacgttggccaggctggtcttgaactcctgacctcaagtgatccacccacctcagcctcccaaagtgttgggattacaggcgtgagccactgcacctggccaggctcatcactttttgcgcctattgcctcgaagccagtctctgatgggacattagggcaggggcccttcagcctagtctgggacatgggccgctcactcagcagtatgacaagcatcacctggagaacgggccagtctcaggaggtcgttcatgccccactggcagtgcactgtgcagccatagtgtaaacaagaggcttaacctgaattggtctgagatcttggggaccccctaccctgtctccagcagcctgtccctttagctgtttgcctactggcaccccatcctgagaaggcatagatacccggcccaccctgccctggaattacaaaagtcttagactgtgcctgagtgcccggcctccttgggagaccctcctaggcagcctaagcaccagacccgggagctgggtgctctggtcctgcctgcctgcctctcactggaccctctccttccaggtacggcttcaggtccagagcgtggagaagcctcagtaccgcgggacgttgcactgcttcaagtccatcatcaagcaagagagcgtgctgggcctgtacaagggcctgggctcgccgctcatggggctcaccttcatcaacgcgctggtgttcggggtgcagggcaacaccctccgggccctgggccacgactcgcccctcaaccagttcctggcaggtgcggcggcgggcgccatccagtgcgtcatctgctgccccatggagctggccaagacgcggctgcagctgcaggacgcgggcccagcgcgcacctacaagggctcgctggactgcctcgcgcagatctacgggcacgagggtctgcgtggcgtcaaccggggcatggtgtccacgttgctgcgtgagacgcccagcttcggcgtctacttcctcacctatgacgctctcacgcgggcgctgggctgcgagccgggcgaccgcctgctggtgcccaagctgctgttggcgggcggtacgtcaggcatcgtgtcctggctctctacctatcctgtggacgtggtcaagtcgcggctgcaggcggacggactgcggggcgccccgcgctaccgcggcatcctggactgcgtgcaccagagctaccgcgccgagggctggcgcgtcttcacacgggggctggcgtccacgctgctgcgcgccttccccgtcaacgctgccaccttcgccaccgtcacggtggtgctcacctacgcgcgcggcgaggaggccgggcccgagggcgaggctgtgcccgccgcccctgcggggcctgccctggcgcagccctccagcctgtgacgctcaccccgccctccttccccagggctccttctcagaaacctgggacataaattggcccctgagtcgattgccctgcttcctgctgggatgctgcgagctgtggagtctatcagacgtgggctgaattttgctgatcagctgggtagttttggccgagaactgcacttgcctcagtgttctcatctatgaaataaggaccctcatgcccacactgtagagtcacgaagctcagagattattcccagcagcagccagcacctggcctggctgaggccattgcaccgttatcctggaaactgaggcagacactccagcccctttctgggatcctggccacgtcattgtgctcctgccctgcaggctggctcccgggggtctctgatggccaaccaaggggccacccagggacctctaactccacacatcctccacccgggggggtggtgggccacccctctggtctgtgttagggacagaggaaaacttggtgtgcctcctggtgtcacagaactggatcctctgcataccccagcttctccacatgccactgctaggggtaccccagctgctgccactcctgctggagggtgaactggggaccctgcaccctccgggaagccatggagtctgctggaggcaccatatcagcctgcgggactagggtggggagcaaacaggccagcggtggaggtctggacagttcaagtgtgatgcagctgtggcaaggagaaatccttccgcctctgggcctcaggctgcctgtccataaaatggggacatggccagctgacggacaactgagtctccggcccacctaccaccgccagccaggatcccccaaagtgtgcagagggctcagcagagaacagtatgggaccccctcaccaggcctggaacacctccagccacaaagaagccaaaggtcagtccctctgctccccagcaaacggtgcctcccaggcattctcagtgccagggcttcatccctgtgaaggcacagggcctgctagtgggcacaggggtggctagttggggcctggggcagaggagggctgcaccaggcgtcctggggaatgtgctcagtgaagacgacactgggctttgcacagcctggtgtcgctgtacagaaactgtcaagggaataaagtgttctttgttttttaa

SEQ ID NO: 183334 - DNA, 1124 bp, Homo sapiens
  Payload ID: 16123
  Gene Symbol: SLC25A29
  Gene Name: solute carrier family 25 (mitochondrial carnitine/acylcarnitine carrier), member 29
  ENST ID: ENST00000554224
  CDS Start-End: 316-423
ccgcccattggcctcactcggcgcccccacccgggccctgccggcaggcacgaggggcggggcgcgcggcccgaggtgagggaccgcgggccggaggggatccagcgagtcagctgccgccgagggaccagcgcgggtctagctgctgccgccatccccaccatccctgaccgcgcctgcccgggctccgcgccaggaggagcggccaggcccagccccggcaccgcgcgctcggggaccccgacggcgcccagcccggcgaggggcctcagggggaggacgaggaggaaaggcggcctcgccggggacccggccatggcgctggacttcttggctggatgcgcggggggtgtggcaggcgtgcttgtgggacacccgtttgacacggtcaaggggctgtctccatccatagcaaaagtgtaactttgttgtagatgggcgtaagcctcaccctggagagcgctagtacggcttcaggtccagagcgtggagaagcctcagtaccgcgggacgttgcactgcttcaagtccatcatcaagcaagagagcgtgctgggcctgtacaagggcctgggctcgccgctcatggggctcaccttcatcaacgcgctggtgttcggggtgcagggcaacaccctccgggccctgggccacgactcgcccctcaaccagttcctggcaggtgcggcggcgggcgccatccagtgcgtcatctgctgccccatggagctggccaagacgcggctgcagctgcaggacgcgggcccagcgcgcacctacaagggctcgctggactgcctcgcgcagatctacgggcacgagggtctgcgtggcgtcaaccggggcatggtgtccacgttgctgcgtgagacgcccagcttcggcgtctacttcctcacctatgacgctctcacgcgggcgctgggctgcgagccgggcgaccgcctgctggtgcccaagctgctgttggcgggcggtacgtcaggcatcgtgtcctggctctctacctatcctgtggacgtggtcaagtcgcggctgcaggcggacggactgcggggcgccccgcgctaccgcggcatcctggactgcgtgcaccagagctaccgcgccgagggctggcgcgt

SEQ ID NO: 183335 - DNA, 674 bp, Homo sapiens
  Payload ID: 16123
  Gene Symbol: SLC25A29
  Gene Name: solute carrier family 25 (mitochondrial carnitine/acylcarnitine carrier), member 29
  ENST ID: ENST00000554060
  CDS Start-End: 259-674
cggggcgcgcggcccgaggtgagggaccgcgggccggaggggatccagcgagtcagctgccgccgagggaccagcgcgggtctagctgctgccgccatccccaccatccctgaccgcgcctgcccgggctccgcgccaggaggagcggccaggcccagccccggcaccgcgcgctcggggaccccgacggcgcccagcccggcgaggggcctcagggggaggacgaggaggaaaggcggcctcgccggggacccggccatggcgctggacttcttggctggatgcgcggggggtacggcttcaggtccagagcgtggagaagcctcagtaccgcgggacgttgcactgcttcaagtccatcatcaagcaagagagcgtgctgggcctgtacaagggcctgggctcgccgctcatggggctcaccttcatcaacgcgctggtgttcggggtgcagggcaacaccctccgggccctgggccacgactcgcccctcaaccagttcctggcaggtgcggcggcgggcgccatccagtgcgtcatctgctgccccatggagctggccaagacgcggctgcagctgcaggacgcgggcccagcgcgcacctacaagggctcgctggactgcctcgcgcagatctacgggcacgagggtctgcgtggcgtcaaccggggca

SEQ ID NO: 183336 - DNA, 1067 bp, Homo sapiens
  Payload ID: 16123
  Gene Symbol: SLC25A29
  Gene Name: solute carrier family 25 (mitochondrial carnitine/acylcarnitine carrier), member 29
  ENST ID: ENST00000556868
  CDS Start-End: 286-654
ccgggccctgccggcaggcacgaggggcggggcgcgcggcccgaggtgagggaccgcgggccggaggggatccagcgagtcagctgccgccgagggaccagcgcgggtctagctgctgccgccatccccaccatccctgaccgcgcctgcccgggctccgcgccaggaggagcggccaggcccagccccggcaccgcgcgctcggggaccccgacggcgcccagcccggcgaggggcctcagggggaggacgaggaggaaaggcggcctcgccggggacccggccatggcgctggacttcttggctggatgcgcggggggtgtggcaggcgtgcttgtgggacacccgtttgacacggtcaaggcccttgggactgaaagaatccaagatctggatctcctctatagcgcccagaaccacagccaccgtcctgaagcacacggccttcacacgtttctacacgaagggagttttctgtcctgcttccttggacacagcaataatcagggagcagttgtcttgacctatgatgagggggtgaccggccatccctgggcatgggatggggagtgtgggtgggggctggctgtgggggctccgcgcctggatgtgatgttgaaattttgtgttgctttaaccgcctttactttctgagctaggggctgtctccatccatagcaaaagtgtaactttgttgtagatgggcgtaagcctcaccctggagagcgctagtacggcttcaggtccagagcgtggagaagcctcagtaccgcgggacgttgcactgcttcaagtccatcatcaagcaagagagcgtgctgggcctgtacaagggcctgggctcgccgctcatggggctcaccttcatcaacgcgctggtgttcggggtgcagggcaacaccctccgggccctgggccacgactcgcccctcaaccagttcctggcaggtgcggcggcgggcgccatccagtgcgtcatctgctgccccatggagctggccaagacgcggctgcagctgcaggacgcgggcccagcgcgcacctacaagggctcgctggactgcctc

SEQ ID NO: 183337 - DNA, 1025 bp, Homo sapiens
  Payload ID: 16123
  Gene Symbol: SLC25A29
  Gene Name: solute carrier family 25 (mitochondrial carnitine/acylcarnitine carrier), member 29
  ENST ID: ENST00000556715
  CDS Start-End: 284-391
gggccctgccggcaggcacgaggggcggggcgcgcggcccgaggtgagggaccgcgggccggaggggatccagcgagtcagctgccgccgagggaccagcgcgggtctagctgctgccgccatccccaccatccctgaccgcgcctgcccgggctccgcgccaggaggagcggccaggcccagccccggcaccgcgcgctcggggaccccgacggcgcccagcccggcgaggggcctcagggggaggacgaggaggaaaggcggcctcgccggggacccggccatggcgctggacttcttggctggatgcgcggggggtgtggcaggcgtgcttgtgggacacccgtttgacacggtcaaggggctgtctccatccatagcaaaagtgtaactttgttgtagatgggcgtaagcctcaccctggagagcgctagtacggcttcaggtccagagcgtggagaagcctcagtaccgcgggacgttgcactgcttcaagtccatcatcaagcaagagagcgtgctgggcctgtacaagggcctgggctcgccgctcatggggctcaccttcatcaacgcgctggtgttcggggtgcagggcaacaccctccgggccctgggccacgactcgcccctcaaccagttcctggcaggtgcggcggcgggcgccatccagtgcgtcatctgctgccccatggagctggccaagacgcggctgcagctgcaggacgcgggcccagcgcgcacctacaagggctcgctggactgcctcgcgcagatctacgggcacgagggtctgcgtggcgtcaaccggggcatggtgtccacgttgctgcgtgagacgcccagcttcggcgtctacttcctcacctatgacgctctcacgcgggcgctgggctgcgagccgggcgaccgcctgctggtgcccaagctgctgttggcgggcggtacgtcaggcatcgtgtcctggctctctacctatcctgtggacgtggtcaagtcgcggctgcaggcggacggactgcggg

SEQ ID NO: 183338 - DNA, 960 bp, Homo sapiens
  Payload ID: 16123
  Gene Symbol: SLC25A29
  Gene Name: solute carrier family 25 (mitochondrial carnitine/acylcarnitine carrier), member 29
  Uniprot ID: Q8N8R3
  ENST ID: ENST00000555927
  CDS Start-End: 194-907
agcaataatcagggagcagttgtcttgacctatgatgaggggatgggcgtaagcctcaccctggagagcgctagtacggcttcaggtccagagcgtggagaagcctcagtaccgcgggacgttgcactgcttcaagtccatcatcaagcaagagagcgtgctgggcctgtacaagggcctgggctcgccgctcatggggctcaccttcatcaacgcgctggtgttcggggtgcagggcaacaccctccgggccctgggccacgactcgcccctcaaccagttcctggcaggtgcggcggcgggcgccatccagtgcgtcatctgctgccccatggagctggccaagacgcggctgcagctgcaggacgcgggcccagcgcgcacctacaagggctcgctggactgcctcgcgcagatctacgggcacgagggtctgcgtggcgtcaaccggggcatggtgtccacgttgctgcgtgagacgcccagcttcggcgtctacttcctcacctatgacgctctcacgcgggcgctgggctgcgagccgggcgaccgcctgctggtgcccaagctgctgttggcgggcggtacgtcaggcatcgtgtcctggctctctacctatcctgtggacgtggtcaagtcgcggctgcaggcggacggactgcggggcgccccgcgctaccgcggcatcctggactgcgtgcaccagagctaccgcgccgagggctggcgcgtcttcacacgggggctggcgtccacgctgctgcgcgccttccccgtcaacgctgccaccttcgccaccgtcacggtggtgctcacctacgcgcgcggcgaggaggccgggcccgagggcgaggctgtgcccgccgcccctgcggggcctgccctggcgcagccctccagcctgtgacgctcaccccgccctccttccccagggctccttctcagaaacctgggacataa

SEQ ID NO: 183339 - DNA, 569 bp, Homo sapiens
  Payload ID: 16123
  Gene Symbol: SLC25A29
  Gene Name: solute carrier family 25 (mitochondrial carnitine/acylcarnitine carrier), member 29
  ENST ID: ENST00000554291
  CDS Start-End: 181-569
taactgctgttctcacgagaggctactggcagagaccaggcaggagctcctggagccaaggtacggcttcaggtccagagcgtggagaagcctcagtaccgcgggacgttgcactgcttcaagtccatcatcaagcaagagagcgtgctgggcctgtacaagggcctgggctcgccgctcatggggctcaccttcatcaacgcgctggtgttcggggtgcagggcaacaccctccgggccctgggccacgactcgcccctcaaccagttcctggcaggtgcggcggcgggcgccatccagtgcgtcatctgctgccccatggagctggccaagacgcggctgcagctgcaggacgcgggcccagcgcgcacctacaagggctcgctggactgcctcgcgcagatctacgggcacgagggtctgcgtggcgtcaaccggggcatggtgtccacgttgctgcgtgagacgcccagcttcggcgtctacttcctcacctatgacgctctcacgcgggcgctgggctgcgagccgggcgaccgcctgctggtgcccaagctgctgttggcggg

SEQ ID NO: 183340 - DNA, 1540 bp, Homo sapiens
  Payload ID: 16123
  Gene Symbol: SLC25A29
  Gene Name: solute carrier family 25 (mitochondrial carnitine/acylcarnitine carrier), member 29
  Uniprot ID: Q8N8R3
  ENST ID: ENST00000556505
  CDS Start-End: 230-943
tttgtgttgctttaaccgcctttactttctgagctaggggctgtctccatccatagcaaaagtgtaactttgttgtagatgggcgtaagcctcaccctggagagcgctagtacggcttcaggtccagagcgtggagaagcctcagtaccgcgggacgttgcactgcttcaagtccatcatcaagcaagagagcgtgctgggcctgtacaagggcctgggctcgccgctcatggggctcaccttcatcaacgcgctggtgttcggggtgcagggcaacaccctccgggccctgggccacgactcgcccctcaaccagttcctggcaggtgcggcggcgggcgccatccagtgcgtcatctgctgccccatggagctggccaagacgcggctgcagctgcaggacgcgggcccagcgcgcacctacaagggctcgctggactgcctcgcgcagatctacgggcacgagggtctgcgtggcgtcaaccggggcatggtgtccacgttgctgcgtgagacgcccagcttcggcgtctacttcctcacctatgacgctctcacgcgggcgctgggctgcgagccgggcgaccgcctgctggtgcccaagctgctgttggcgggcggtacgtcaggcatcgtgtcctggctctctacctatcctgtggacgtggtcaagtcgcggctgcaggcggacggactgcggggcgccccgcgctaccgcggcatcctggactgcgtgcaccagagctaccgcgccgagggctggcgcgtcttcacacgggggctggcgtccacgctgctgcgcgccttccccgtcaacgctgccaccttcgccaccgtcacggtggtgctcacctacgcgcgcggcgaggaggccgggcccgagggcgaggctgtgcccgccgcccctgcggggcctgccctggcgcagccctccagcctgtgacgctcaccccgccctccttccccagggctccttctcagaaacctgggacataaattggcccctgagtcgattgccctgcttcctgctgggatgctgcgagctgtggagtctatcagacgtgggctgaattttgctgatcagctgggtagttttggccgagaactgcacttgcctcagtgttctcatctatgaaataaggaccctcatgcccacactgtagagtcacgaagctcagagattattcccagcagcagccagcacctggcctggctgaggccattgcaccgttatcctggaaactgaggcagacactccagcccctttctgggatcctggccacgtcattgtgctcctgccctgcaggctggctcccgggggtctctgatggccaaccaaggggccacccagggacctctaactccacacatcctccacccgggggggtggtgggccacccctctggtctgtgttagggacagaggaaaacttggtgtgcctcctggtgtcacagaactggatcctctgcataccccagcttctccacatgccactgctaggggtaccccagctgctgccactcctgctggagggtgaact

SEQ ID NO: 183341 - DNA, 1121 bp, Homo sapiens
  Payload ID: 16124
  Gene Symbol: SLC25A16
  Gene Name: solute carrier family 25 (mitochondrial carrier), member 16
  ENST ID: ENST00000493963
  CDS Start-End: 64-237
ctatggtcccgtccggtgttctgtaagttggcaacctaggctcctgacgcgaccctggtcctgatggcggcggcgacggccgcggcagccctggcggcggccgatccccctcccgcaatgccgcaggcggcaggggccggagggcccacaacccgcagagacttctactggctgcgctcctttctggccggagaagaagaggaggttacttcaaacagaacctggcagttggattaataccttgaagtgtctgtctccataaccacattttagcaagattcccagccttcctcaggtattgctggatgctgtgccaaaacaacagttgctccattggatcgagtaaaggttttattacaagctcacaatcaccattacaagcatttaggagtattttctgcattgcgtgctgttcctcaaaaagaaggattccttggattgtataaaggaaatggtgcaatgatgattcgaatctttccctatggtgcaatccagtttatggcatttgagcattataaaacgttaattactacgaagctgggaatttcaggtcatgtgcacagattaatggctggatccatggcaggtatgacagcagttatctgtacttaccctcttgacatggttagggtccgcctagcattccaggtgaaaggggaacacagctatacaggaattattcatgctttcaaaacaatttatgcaaaggaaggtggtttctttggattttacagaggtctgatgcctactattttaggaatggctccatatgcaggtgtttcattttttacttttggtaccttgaagagtgttgggctttcccatgctcctacccttcttggcagaccttcatcagacaatcctaatgtcttagttttgaaaactcatgtaaacttactttgtggtggtgttgctggagcaatagcgcagacaatatcctacccatttgatgtgactcgtcggcgaatgcaattaggaactgttctgccggaatttgaaaagtgccttaccatgcgggatactatgaagtatgtctatggacaccatggaattcgaaaaggactctatcgtggtttatctcttaattacattcgctgtattccctctcaagcagtggcttt

SEQ ID NO: 183342 - DNA, 538 bp, Homo sapiens
  Payload ID: 16124
  Gene Symbol: SLC25A16
  Gene Name: solute carrier family 25 (mitochondrial carrier), member 16
  ENST ID: ENST00000491102
  CDS Start-End: 42-320
gtaagttggcaacctaggctcctgacgcgaccctggtcctgatggcggcggcgacggccgcggcagccctggcggcggccgatccccctcccgcaatgccgcaggcggcaggggccggagggcccacaacccgcagagacttctactggctgcgctcctttctggccggagaagaagaggagtttacttcaaacagaacctggcaatcggataaataccttcaagtgtctgtctccgtaaaaatgttccagaagaagaggaggttacttcaaacagaacctggcagttggattaataccttgaagtgtctgtctccataaccacattttagcaagattcccagccttcctcaggtattgctggatgctgtgccaaaacaacagttgctccattggatcgagtaaaggttttattacaagctcacaatcaccattacaagcatttaggagtattttctgcattgcgtgctgttcctcaaaaagaaggattccttggattgtataaaggaaatggtgcaatgatgattcgaatctttccc

SEQ ID NO: 183343 - DNA, 311 bp, Homo sapiens
  Payload ID: 16124
  Gene Symbol: SLC25A16
  Gene Name: solute carrier family 25 (mitochondrial carrier), member 16
  ENST ID: ENST00000474927
  CDS Start-End: 1-198
gcatttgagcattataaaacgttaattactacgaagctgggaatttcaggtcatgtgcacagattaatggctggatccatggcaggtaaacatattctactatttgtattggattgtagttgtaaactgagggaagaagaaagctgttaccaccactattcaaggtatgacagcagttatctgtacttaccctcttgacatggttagggtccgcctagcattccaggtgaaaggggaacacagctatacaggaattattcatgctttcaaaacaatttatgcaaaggaaggtggtttctttggattttaca

SEQ ID NO: 183344 - DNA, 6529 bp, Homo sapiens
  Payload ID: 16124
  Gene Symbol: SLC25A16
  Gene Name: solute carrier family 25 (mitochondrial carrier), member 16
  Uniprot ID: P16260
  ENST ID: ENST00000609923
  CDS Start-End: 100-1098
gcggggcggtcagcctcctgtcaccgcctgttccggctatggtcccgtccggtgttctgtaagttggcaacctaggctcctgacgcgaccctggtcctgatggcggcggcgacggccgcggcagccctggcggcggccgatccccctcccgcaatgccgcaggcggcaggggccggagggcccacaacccgcagagacttctactggctgcgctcctttctggccggaggtattgctggatgctgtgccaaaacaacagttgctccattggatcgagtaaaggttttattacaagctcacaatcaccattacaagcatttaggagtattttctgcattgcgtgctgttcctcaaaaagaaggattccttggattgtataaaggaaatggtgcaatgatgattcgaatctttccctatggtgcaatccagtttatggcatttgagcattataaaacgttaattactacgaagctgggaatttcaggtcatgtgcacagattaatggctggatccatggcaggtatgacagcagttatctgtacttaccctcttgacatggttagggtccgcctagcattccaggtgaaaggggaacacagctatacaggaattattcatgctttcaaaacaatttatgcaaaggaaggtggtttctttggattttacagaggtctgatgcctactattttaggaatggctccatatgcaggtgtttcattttttacttttggtaccttgaagagtgttgggctttcccatgctcctacccttcttggcagaccttcatcagacaatcctaatgtcttagttttgaaaactcatgtaaacttactttgtggtggtgttgctggagcaatagcgcagacaatatcctacccatttgatgtgactcgtcggcgaatgcaattaggaactgttctgccggaatttgaaaagtgccttaccatgcgggatactatgaagtatgtctatggacaccatggaattcgaaaaggactctatcgtggtttatctcttaattacattcgctgtattccctctcaagcagtggcttttacaacatacgaacttatgaagcagttttttcacctcaactaaaaaaaaattatggttggtttttcttaatacattctcagagggagaaatgaaacattactataattgtggggggaacattacttgaatggggatatttaccctgtcacaagagccactggtattttagtacttgattattttttctttagtcacaaatcagaactgcttaccatactttttgatgccaaacattataccttagaacattgaagaaaatattcctaagctgatgctggctaaaccgctttaaagttttatttggaagtagaactagctttaaaacggggttcaagaggttgccattagctttgtcatgctgttcaaagtttttaattgttatcatggtttttaaaagactgacagtgtttattattattaaaataaacagggttggttatattgcaatagaataatgagaattgaatttttaagttctatgaaacagccagcattgacattttatttttgttatctctcttctcacaattatgctccactggataataggaaaaacacttctttccttcattttttaaataaaattaatgttgtatttaaaaggtagccatgtagagacacaaaaataaatgaagaagctggacatggtgggatgggcatgtggtcccagctactctggaagctgaggtgagaggatcacttgagccctggaattccatgccagcctatgcaacatcatgaaaccccacttaataaatgaatgaacgactaagtcttgctcaaatgttattatgaggtactatgagtgacttacatgtgttttaaaatgtcagtgtgtttcccagaggcagaaataaaaatactgaatatctttgctcttaaaaaaaaagtaacactatagatttgtttttgttagatgatttgctctatagtagaatatttaagtagactgtgaaatatttattaatatagatgtgaatatcaaaaaatgtttctaaggtattatgatgcatcaactagttcttccatgtaaaataattttagtgcaatatgaagacgtagaaatgtaaaatatgatttgaattgttatcctttatattaagaaaatgttttaaaatgtaagaattccatttattctgtttagagtactttttatgatttattataagcgtgtcataaatgggaagggaatatttaaagttctgtgttcagaaagagtaatttgtagaactgatgtgactttttttttttttttgagatggagtctcgctctatcgcccaggctggagtgcagtggcgcgatctcagctcactgcaacctctgcctcccgggttcaagtgattctcctgcctcagtctcccgagtagctgggactacaggtgcccaccaccaaaaattcgcctggctaatttttgtatttttagtagagacgggatttcaccgtgttagccaggatggcctcgatctcctgaacctcatgatctgcccaccttggtctcccaaagtgctgagattactggcgtgagccacggcgcccggccctttgatgtgactttaaagacattagaaggccaggtgtggtggctcacgcctttattcccagcactttgggaggccgagttgggtggatcacctgaagtcaggagtttaagatcagcatggtgaaaccccacctctactaaaaatacaaaaagtagcaggtgtggtggctcgtgcctgtagtcccagttactcgcgaggctgagacatgagaattgcttgagctcgggaagcggaggttgcagtgagctgagatcacaccactgcactccagcctgggtgacagaatgagcctccatctcaaaaaaaaggagacattagaaaactaagttgagtccaggcgtggtggctcttgcctgtaaccctagcactttgggaggctgaggcgggaggatatcttgaccccaggagttcgagaccagcctgggcaacatagtgagaccccgtttctttcaaacaaaagaaggaaaactaagttgaaagtgttatttttgcttcaatttttatttctttacataaaaggtttcttgtcataccttggtaaaaatttgatgagctggtttcattttgaaagcctttattttaaaaataagtatgtatctttgtatgatttataagtgtaccagtaggtagaaatacatgtgttcttggccagatgtggtggctcacgcctgtaatcccagcattttgggaggctaaggcgagtggatcacctgaggtcaggagttcaagaccagactggccaacgtggagaaaccctgtctctactaaaaatacaaaaatcagccgggcatggtggcgggcgcctgtaatcccagctacttgggaggctaaggcagggagaattgcttgaacccaggaggcacaggttgcagtgagccaagattgcgccattgcactccagcctgggtggctgtataaaagcctgtataaaaatttcttttatacagagtgagactgtataaaagaaaaaaaaaggctgtacaaaaatttcttttatacagagactgtataaaagaaaaaaaaaagaaatacatgtgttcttaaaaccatttgtatattttcatttctagaccacactgtagctaattattgttattaaatgttaagataatttaagtatataaaataagtattgagccgggcatggtggctcacccctgtaatctcagcactttgggaggctgaggcggggggatcacgaggtcaggaaatcgagaccattgtggctaacacggtgaaaacctatctctactaaaaatacaaaaaattagctgggcgtggtggcacgcacctgtagtcccagttactcaggaggctgagacaggagaatcacttgaacctgggaggcggagcttgcagtgagccgagatcgtgccactgcattctaacctgggcgacagagcaagactccatctcaaaaaaaaaaaaaaaaaaaaaaaagatacctcagttaggttatcagtaaaaggggattgcaaatatcttttaaataaaaatttgcattctatatgttatagaatacagaggatattaaaaataaattttatccatgttttgacaatttctttctttcaactgtttacatattgaagcacaaatgctaaacataagtcagaatggaagaatatttaaaataatgactgtgtttatatctgatttatttcagattgcccaaagtgcatcttgccaggttatcttccatttgaagactgacattttatttcttttttgatctttattgttcctctcttccacctctcagtgggtatagctctctggtctgtagaatgggacagtggtctggtttccagattgataagtgaggtatacctcctagttttcagtaattacctgtagaaggtggagaagttactggatatgtttaataatatctcattacattcttttttttttttttttaacgagagtcttaactctgtcacccaagctggagtgcagtggtgcaatctcggctcactgcaatctccacctccgggttcaagcgattttcccgagtcatctttccaagtaactgggattacagctatgtgctaccatgcccagctgagttttgtatttttctttcttttctttcttttttttttttttttttgagacagagcctcactctgttgcccaggctggagtgcccaggctggagtgcagtggtgtgatctcagctcactgcaacctccacctcctgggttctagcgattctcctgcttcagcctcccgagtagctggggttacaagcacccgccaccacgcccagctaatttttgtgtatttagtagagctgggttttgccctgttggccaggctggtcttgaatacctgacctcaagtgatctgcccccccgacttcccaaaatgctgggactactggcatgagccagtgctcctgtcctcattccattcttcaccgtggtactgaccatccatttattcagcaccaattgtgtgccagaccttgtgtcagcattatggaggacttcccttgggaggcttgttagctgtacttgcaatctgatttgggttcccaaatcagcatataacaccaggtatttctctaatagagtatgtgccacactttctgctaactgcctgtttatcagtgtccccacatcccaatatctggttccttcaagggcagggagcacagggtatggcgtcagagtggtactcagtgatgtttactggtgggtagaaggaagggttagtccctgtttttgaagactttatgttctagcaggcagaaatgaagcacaaatagttcaagaaataaacaatttaggaataaagtcatttggtttgcttcgcagaaatgtcttattgctgatttgccagcatgagtggcaaatatataataaaacctggccgggcatggtggctcacgcctgtaatcccagcactttgggaggccaaggtgggcggatcacgtggtcaggagatcaagaccatcctggccaacatggtgaaatcccatctctactaaaaatataaaaattagccaggcatggtggtgggcgcctgtagtcccagctacttgggaggctgaggtaggagaattgcttgaacccagaaggcggaggttgcagtgagccaagattgccccactgcactccagcctgggtgacagagtgagactctgtcccaaaaaataaaaataaaaataaatgaatatataaaataaaaaatatatgtatacatatcatatatatatataaaataaaacttataaatagtttttatggctgggtgaagtgactcatgtctgtaattctagccctttgggaggctgagcgaggaggatcacttgagcctaggcattcgagcccagcctgggcaacattgcaagactctgtctcatttttttatataaaatgtttttttaaaaaaccctatgtataattatttattttttttccccaaggattattcccaaactatgtacaattaatgggttgccttgcagagttggatcaataatacctgacacacttgtatagcaagcatacactttacatagttcctcgcatctattctttgaaacccagacacattctagtattgggcactagaaactggtgataaataataacaattacatatatttcctgaagaattatgtggcattccttgttttaagcacctttgatgccttagctcaatctccattacaatactatgatataagtaccatttaatatttctttttgacagatgggaataatcgaggcctagggagattaaattacttggccaggttcatgtaagtggcagatctaggattcaaattcagccggtctgaatctagagcctattcttttagctatgatgctatactttaatacagtaatacactgttcaaatgaaactgtaacatgtcattaaatttgaacttgtcaataaacataccaagcaataaaa

SEQ ID NO: 183345 - DNA, 263 bp, Homo sapiens
  Payload ID: 16124
  Gene Symbol: SLC25A16
  Gene Name: solute carrier family 25 (mitochondrial carrier), member 16
  ENST ID: ENST00000608053
  CDS Start-End: 1-197
ggctttcccatgctcctacccttcttggcagaccttcatcagacaatcctaatgtcttagttttgaaaactcatgtaaacttactttgtggtggtgttgctggagcaatagcgcagacaatatcctacccatttgatgtgactcgtcggcgaatgcaattaggaactgttctgccggaatttgaaaagtgcctgtaagttcatcatatgtcattgttcattttctttaggaaatgtaacattaaactcagtaaggagatagga

SEQ ID NO: 183346 - DNA, 1616 bp, Homo sapiens
  Payload ID: 16125
  Gene Symbol: SLC25A14
  Gene Name: solute carrier family 25 (mitochondrial carrier, brain), member 14
  Uniprot ID: O95258
  ENST ID: ENST00000218197
  CDS Start-End: 228-1205
ctggttcccggcctgggaggggcttaacggtcctctggtctctctctcccctcagctgagtcccttccctgtctttcactcttctggcatcggtggttttacttcttcgattgaaccctgcttcctcgacccccctgggaggccgccttcttcaggcgcctcccttctctccacgagctcgctctgacagctgaggaactggcaagatcctgctacccagagggtgaatgggtatctttcccggaataatcctaatttttctaagggtgaagtttgcaacggcggccgtgattgtaagcggacaccagaaaagtaccactgtaagtcatgagatgtctggtctgaattggaaaccctttgtatatggcggccttgcctctatcgtggctgagtttgggactttccctgtggaccttaccaaaacacgacttcaggttcaaggccaaagcattgatgcccgtttcaaagagataaaatatagagggatgttccatgcgctgtttcgcatctgtaaagaggaaggtgtattggctctctattcaggaattgctcctgcgttgctaagacaagcatcatatggcaccattaaaattgggatttaccaaagcttgaagcgcttattcgtagaacgtttagaagatgaaactcttttaattaatatgatctgtggggtagtgtcaggagtgatatcttccactatagccaatcccaccgatgttctaaagattcgaatgcaggctcaaggaagcttgttccaagggagcatgattggaagctttatcgatatataccaacaagaaggcaccaggggtctgtggaggggtgtggttccaactgctcagcgtgctgccatcgttgtaggagtagagctaccagtctatgatattactaagaagcatttaatattgtcaggaatgatgggcgatacaattttaactcacttcgtttccagctttacatgtggtttggctggggctctggcctccaacccggttgatgtggttcgaactcgcatgatgaaccagagggcaatcgtgggacatgtggatctctataagggcactgttgatggtattttaaagatgtggaaacatgagggcttttttgcactctataaaggattttggccaaactggcttcggcttggaccctggaacatcattttttttattacatacgagcagctaaagaggcttcaaatctaagaactgaattatatgtgagcccagccctgccagcctttctactcctttgcccttttcccgtgttctaatgtattttgacaatgttgtaagtgtttaccaagccgttggtctcctaagggcctcctgatggaagaacagtggggtggttcaaagttatttctatgtttgtgttaccatgttaacttttccccgagagaaagtgttaacattgagactctggccccagattggtatcttctatgaagatggatactgatgggtgacattgaaaacggcctgctttccaaatgtggttaaatgtaattggttagccccagacttgggctagagcagaaggcataggccagggtggttattgctatatgtgttacagacctcggttctcattaaagtatttattggcagaatcac

SEQ ID NO: 183347 - DNA, 1062 bp, Homo sapiens
  Payload ID: 16125
  Gene Symbol: SLC25A14
  Gene Name: solute carrier family 25 (mitochondrial carrier, brain), member 14
  Uniprot ID: O95258
  ENST ID: ENST00000339231
  CDS Start-End: 1-1062
atgggtatctttcccggaataatcctaatttttctaagggtgaagtttgcaacggcggccgtgattcaccagaaaagtaccactgtaagtcatgagatgtctggtctgaattggaaaccctttgtatatggcggccttgcctctatcgtggctgagtttgggactttccctgtggaccttaccaaaacacgacttcaggttcaaggccaaagcattgatgcccgtttcaaagagataaaatatagagggatgttccatgcgctgtttcgcatctgtaaagaggaaggtgtattggctctctattcaggaattgctcctgcgttgctaagacaagcatcatatggcaccattaaaattgggatttaccaaagcttgaagcgcttattcgtagaacgtttagaagatgaaactcttttaattaatatgatctgtggggtagtgtcaggagtgatatcttccactatagccaatcccaccgatgttctaaagattcgaatgcaggctcaaggaagcttgttccaagggagcatgattggaagctttatcgatatataccaacaagaaggcaccaggggtctgtggaggtgcttatgttcaaaagctgttaccggctgtgtgctgtggctcatgcctgtaatcccagcactttgggaggccaacgcgggtggatcacttgagggtgtggttccaactgctcagcgtgctgccatcgttgtaggagtagagctaccagtctatgatattactaagaagcatttaatattgtcaggaatgatgggcgatacaattttaactcacttcgtttccagctttacatgtggtttggctggggctctggcctccaacccggttgatgtggttcgaactcgcatgatgaaccagagggcaatcgtgggacatgtggatctctataagggcactgttgatggtattttaaagatgtggaaacatgagggcttttttgcactctataaaggattttggccaaactggcttcggcttggaccctggaacatcattttttttattacatacgagcagctaaagaggcttcaaatctaa

SEQ ID NO: 183348 - DNA, 969 bp, Homo sapiens
  Payload ID: 16125
  Gene Symbol: SLC25A14
  Gene Name: solute carrier family 25 (mitochondrial carrier, brain), member 14
  Uniprot ID: O95258
  ENST ID: ENST00000361980
  CDS Start-End: 1-969
atgggtatctttcccggaataatcctaatttttctaagggtgaagtttgcaacggcggccgtgattcaccagaaaagtaccactgtaagtcatgagatgtctggtctgaattggaaaccctttgtatatggcggccttgcctctatcgtggctgagtttgggactttccctgtggaccttaccaaaacacgacttcaggttcaaggccaaagcattgatgcccgtttcaaagagataaaatatagagggatgttccatgcgctgtttcgcatctgtaaagaggaaggtgtattggctctctattcaggaattgctcctgcgttgctaagacaagcatcatatggcaccattaaaattgggatttaccaaagcttgaagcgcttattcgtagaacgtttagaagatgaaactcttttaattaatatgatctgtggggtagtgtcaggagtgatatcttccactatagccaatcccaccgatgttctaaagattcgaatgcaggctcaaggaagcttgttccaagggagcatgattggaagctttatcgatatataccaacaagaaggcaccaggggtctgtggaggggtgtggttccaactgctcagcgtgctgccatcgttgtaggagtagagctaccagtctatgatattactaagaagcatttaatattgtcaggaatgatgggcgatacaattttaactcacttcgtttccagctttacatgtggtttggctggggctctggcctccaacccggttgatgtggttcgaactcgcatgatgaaccagagggcaatcgtgggacatgtggatctctataagggcactgttgatggtattttaaagatgtggaaacatgagggcttttttgcactctataaaggattttggccaaactggcttcggcttggaccctggaacatcattttttttattacatacgagcagctaaagaggcttcaaatctaa

SEQ ID NO: 183349 - DNA, 831 bp, Homo sapiens
  Payload ID: 16125
  Gene Symbol: SLC25A14
  Gene Name: solute carrier family 25 (mitochondrial carrier, brain), member 14
  ENST ID: ENST00000424447
  CDS Start-End: 237-831
cgctgcagtggcgtttccgactgtgggagcctcagcttcccagtcgtccgatgagcccgagcagctgagtcccttccctgtctttcactcttctggcatcggtggttttacttcttcgattgaaccctgcttcctcgacccccctgggaggccgccttcttcaggcgcctcccttctctccacgagctcgctctgacagctgaggaactggcaagatcctgctacccagagggtgaatgggtatctttcccggaataatcctaatttttctaagggtgaagtttgcaacggcggccgtgattgtaagcggacaccagaaaagtaccactgtaagtcatgagatgtctggtctgaattggaaaccctttgtatatggcggccttgcctctatcgtggctgagtttgggactttccctgtggaccttaccaaaacacgacttcaggttcaaggccaaagcattgatgcccgtttcaaagagataaaatatagagggatgttccatgcgctgtttcgcatctgtaaagaggaaggtgtattggctctctattcaggaattgctcctgcgttgctaagacaagcatcatatggcaccattaaaattgggatttaccaaagcttgaagcgcttattcgtagaacgtttagaagatgaaactcttttaattaatatgatctgtggggtagtgtcaggagtgatatcttccactatagccaatcccaccgatgttctaaagattcgaatgcaggctcaaggaagcttgttccaagggagcatgattggaagctttatcgatatataccaacaagaaggcaccaggggtctgtggaggg

SEQ ID NO: 183350 - DNA, 1650 bp, Homo sapiens
  Payload ID: 16125
  Gene Symbol: SLC25A14
  Gene Name: solute carrier family 25 (mitochondrial carrier, brain), member 14
  Uniprot ID: O95258
  ENST ID: ENST00000545805
  CDS Start-End: 262-1239
gttggtttcaatgcttccgggttggcgctgcagtggcgtttccgactgtgggagcctcagcttcccagtcgtccgatgagcccgagcagctgagtcccttccctgtctttcactcttctggcatcggtggttttacttcttcgattgaaccctgcttcctcgacccccctgggaggccgccttcttcaggcgcctcccttctctccacgagctcgctctgacagctgaggaactggcaagatcctgctacccagagggtgaatgggtatctttcccggaataatcctaatttttctaagggtgaagtttgcaacggcggccgtgattgtaagcggacaccagaaaagtaccactgtaagtcatgagatgtctggtctgaattggaaaccctttgtatatggcggccttgcctctatcgtggctgagtttgggactttccctgtggaccttaccaaaacacgacttcaggttcaaggccaaagcattgatgcccgtttcaaagagataaaatatagagggatgttccatgcgctgtttcgcatctgtaaagaggaaggtgtattggctctctattcaggaattgctcctgcgttgctaagacaagcatcatatggcaccattaaaattgggatttaccaaagcttgaagcgcttattcgtagaacgtttagaagatgaaactcttttaattaatatgatctgtggggtagtgtcaggagtgatatcttccactatagccaatcccaccgatgttctaaagattcgaatgcaggctcaaggaagcttgttccaagggagcatgattggaagctttatcgatatataccaacaagaaggcaccaggggtctgtggaggggtgtggttccaactgctcagcgtgctgccatcgttgtaggagtagagctaccagtctatgatattactaagaagcatttaatattgtcaggaatgatgggcgatacaattttaactcacttcgtttccagctttacatgtggtttggctggggctctggcctccaacccggttgatgtggttcgaactcgcatgatgaaccagagggcaatcgtgggacatgtggatctctataagggcactgttgatggtattttaaagatgtggaaacatgagggcttttttgcactctataaaggattttggccaaactggcttcggcttggaccctggaacatcattttttttattacatacgagcagctaaagaggcttcaaatctaagaactgaattatatgtgagcccagccctgccagcctttctactcctttgcccttttcccgtgttctaatgtattttgacaatgttgtaagtgtttaccaagccgttggtctcctaagggcctcctgatggaagaacagtggggtggttcaaagttatttctatgtttgtgttaccatgttaacttttccccgagagaaagtgttaacattgagactctggccccagattggtatcttctatgaagatggatactgatgggtgacattgaaaacggcctgctttccaaatgtggttaaatgtaattggttagccccagacttgggctagagcagaaggcataggccagggtggttattgctatatgtgttacagacctcggttctcattaaagtatttattggcagaatcac

SEQ ID NO: 183351 - DNA, 1403 bp, Homo sapiens
  Payload ID: 16125
  Gene Symbol: SLC25A14
  Gene Name: solute carrier family 25 (mitochondrial carrier, brain), member 14
  ENST ID: ENST00000543953
  CDS Start-End: 120-992
gttggtttcaatgcttccgggttggcgctgcagtggcgtttccgactgtgggagcctcagcttcccagtcgtccgatgagcccgagcagcaccagaaaagtaccactgtaagtcatgagatgtctggtctgaattggaaaccctttgtatatggcggccttgcctctatcgtggctgagtttgggactttccctgtggaccttaccaaaacacgacttcaggttcaaggccaaagcattgatgcccgtttcaaagagataaaatatagagggatgttccatgcgctgtttcgcatctgtaaagaggaaggtgtattggctctctattcaggaattgctcctgcgttgctaagacaagcatcatatggcaccattaaaattgggatttaccaaagcttgaagcgcttattcgtagaacgtttagaagatgaaactcttttaattaatatgatctgtggggtagtgtcaggagtgatatcttccactatagccaatcccaccgatgttctaaagattcgaatgcaggctcaaggaagcttgttccaagggagcatgattggaagctttatcgatatataccaacaagaaggcaccaggggtctgtggaggggtgtggttccaactgctcagcgtgctgccatcgttgtaggagtagagctaccagtctatgatattactaagaagcatttaatattgtcaggaatgatgggcgatacaattttaactcacttcgtttccagctttacatgtggtttggctggggctctggcctccaacccggttgatgtggttcgaactcgcatgatgaaccagagggcaatcgtgggacatgtggatctctataagggcactgttgatggtattttaaagatgtggaaacatgagggcttttttgcactctataaaggattttggccaaactggcttcggcttggaccctggaacatcattttttttattacatacgagcagctaaagaggcttcaaatctaagaactgaattatatgtgagcccagccctgccagcctttctactcctttgcccttttcccgtgttctaatgtattttgacaatgttgtaagtgtttaccaagccgttggtctcctaagggcctcctgatggaagaacagtggggtggttcaaagttatttctatgtttgtgttaccatgttaacttttccccgagagaaagtgttaacattgagactctggccccagattggtatcttctatgaagatggatactgatgggtgacattgaaaacggcctgctttccaaatgtggttaaatgtaattggttagccccagacttgggctagagcagaaggcataggccagggtggttattgctatatgtgttacagacctcggttctcattaaagtatttattggcagaatcac

SEQ ID NO: 183352 - DNA, 1734 bp, Homo sapiens
  Payload ID: 16125
  Gene Symbol: SLC25A14
  Gene Name: solute carrier family 25 (mitochondrial carrier, brain), member 14
  Uniprot ID: O95258
  ENST ID: ENST00000612248
  CDS Start-End: 262-1323
gttggtttcaatgcttccgggttggcgctgcagtggcgtttccgactgtgggagcctcagcttcccagtcgtccgatgagcccgagcagctgagtcccttccctgtctttcactcttctggcatcggtggttttacttcttcgattgaaccctgcttcctcgacccccctgggaggccgccttcttcaggcgcctcccttctctccacgagctcgctctgacagctgaggaactggcaagatcctgctacccagagggtgaatgggtatctttcccggaataatcctaatttttctaagggtgaagtttgcaacggcggccgtgattcaccagaaaagtaccactgtaagtcatgagatgtctggtctgaattggaaaccctttgtatatggcggccttgcctctatcgtggctgagtttgggactttccctgtggaccttaccaaaacacgacttcaggttcaaggccaaagcattgatgcccgtttcaaagagataaaatatagagggatgttccatgcgctgtttcgcatctgtaaagaggaaggtgtattggctctctattcaggaattgctcctgcgttgctaagacaagcatcatatggcaccattaaaattgggatttaccaaagcttgaagcgcttattcgtagaacgtttagaagatgaaactcttttaattaatatgatctgtggggtagtgtcaggagtgatatcttccactatagccaatcccaccgatgttctaaagattcgaatgcaggctcaaggaagcttgttccaagggagcatgattggaagctttatcgatatataccaacaagaaggcaccaggggtctgtggaggtgcttatgttcaaaagctgttaccggctgtgtgctgtggctcatgcctgtaatcccagcactttgggaggccaacgcgggtggatcacttgagggtgtggttccaactgctcagcgtgctgccatcgttgtaggagtagagctaccagtctatgatattactaagaagcatttaatattgtcaggaatgatgggcgatacaattttaactcacttcgtttccagctttacatgtggtttggctggggctctggcctccaacccggttgatgtggttcgaactcgcatgatgaaccagagggcaatcgtgggacatgtggatctctataagggcactgttgatggtattttaaagatgtggaaacatgagggcttttttgcactctataaaggattttggccaaactggcttcggcttggaccctggaacatcattttttttattacatacgagcagctaaagaggcttcaaatctaagaactgaattatatgtgagcccagccctgccagcctttctactcctttgcccttttcccgtgttctaatgtattttgacaatgttgtaagtgtttaccaagccgttggtctcctaagggcctcctgatggaagaacagtggggtggttcaaagttatttctatgtttgtgttaccatgttaacttttccccgagagaaagtgttaacattgagactctggccccagattggtatcttctatgaagatggatactgatgggtgacattgaaaacggcctgctttccaaatgtggttaaatgtaattggttagccccagacttgggctagagcagaaggcataggccagggtggttattgctatatgtgttacagacctcggttctcattaaagtatttattggcagaatcac

SEQ ID NO: 183353 - DNA, 2796 bp, Homo sapiens
  Payload ID: 16126
  Gene Symbol: SLC25A22
  Gene Name: solute carrier family 25 (mitochondrial carrier: glutamate), member 22
  Uniprot ID: Q9H936
  ENST ID: ENST00000320230
  CDS Start-End: 385-1356
cccccggcagcttccccttctgtgtgagtgctgggctggagtgtggaagagccatccagagtgagtgcctggggcagagtgagagcaggaccagcgggcaggtggcggagcgggggtcggtggtggatggcccagccctggaaagccgaggtgaaggttacgagtccctgaggatctgtgggtgtgagccagccgcgtggccctgggcaacggcgctgccggacagaagtggcggttgctgacgcctggaaattcccctgaaggtggagcaccacccaacccccctgggtcccaccctccctcaaggcctcctccacctccacctccaccccgcctggcctggcgtccacctctgcggctcctacctgggtgcaatcgagttaaatggctgataagcagatcagcctgccagccaagctcatcaatggcggcatcgccgggctgatcggtgtcacctgcgtgtttcccatcgacctggccaagaccaggctgcagaaccagcagaacggccagcgcgtgtacacgagcatgtccgactgcctcatcaagaccgtccgctccgagggctacttcggcatgtaccggggagctgctgtgaacttgaccctcgtcacccccgagaaggccatcaagctggcagccaacgacttcttccgacatcagctctctaaggacgggcagaagctgaccctgcttaaagagatgctggcgggctgtggggctggcacctgccaggtgatcgtgaccacgcccatggagatgctgaagatccagctgcaggatgcagggcgcattgccgcccagaggaagatcctggctgcccagggccagctctcggcccaggggggtgcccagccctcagtggaggctccagctgcccctcggcccacggccacccagctgacccgcgacctgctgcggagccgtggcattgccggtctctacaagggactcggggccacgctgctcagggatgtccccttctctgtggtgtacttcccgctctttgccaacctgaaccagctgggccgcccggcgtccgaggagaagtcgcctttctacgtgtccttcctggccggctgtgtggctgggagtgccgccgctgtggccgtcaacccctgtgatgtggtgaagacgcggctccagtcacttcagcgaggcgtcaacgaggacacctactctgggatcctggactgtgccaggaagatcctgcggcacgagggcccctcggccttcctgaagggcgcctactgccgcgcgctggtcatcgcgccccttttcggcatcgcacaggtggtctacttcctgggcatcgcggagtccctgctggggctgctgcaggacccccaggcctgagcccagcacccgctccaccccagccagctgggcagggccggtgtggggctggagccaggcagctagcccaggacggagcaagggaagacccctccccagccctcccgtcggcaggggcagcagggggcagggtgcagggtccacataggtggtgcacacgcaagccccccggggtgctgcctgcaccgttgggatcaatgtctcatttatgtagaaaatgcagaaatctttacattcctcaagctagcccctgccccaatcctgccctggcctgaacacccccagggacagagctggtctctgggctgggggcccccgggcctgggccgggcaggctggaccatacccccagtccaccagctccagtctccacagccatcctggcccacacaggcaccccacacaaacctatttattgaatctgctggacccaagcggctctccagcccttccgtccttccccagccgctcttgtcgccttggcaggacttgactctgcctccctggccagccttgcaagaggactggggtctcctgccctctctgttgagccaggaatcccaagtgaggggttgccctgaggtctgactcttggggcaagcccgccacccactgtgggactttctggtgggctcctcagctcccaccccaggctggggcccagattgtgaggtctgtgtgcatgtgtgtgtgtatgtgtgtgtgcatgcgtgtgtgtgttgtggggatctggcctggcccttggggatggggctgctggggactgccccccttcccgccgtggccaggcgctctgtgtgctgtgtgtgccccaggctctgttgaccccgtccaggaactaacttacccagcttggtctctcctgagtcctccaccctggcctgggattggccagggagcagggcgggcattgggaccagtgtggagcctgagggtgcctgccctgctctggagggagggccaggagctgccacacccccaagtcctctcagggcccaccctcctttttcagcctctgcataaggcccctgggtacactgcagaagccccatccttcccgcctccgggcataaggcccctgaccacacttcagaagccccatcccccctgccaccgggcgatccctgctgtgagccgaagctctccctgccccgccctggccatgtgatcgtgttggtgacagaccctgatgtgctggtgctgtgtccccaaaaccggggccctccacagaggccccttcccagcgacactacctggggctcaggcctggacccccccagttcacggttgctcctgggagctgcccctcccgtcacatcagaaccttggaagctgctgctgctgcttacagaattatatttttttcttttgaagagttttaagaagttgtaactttttgtgtcttgtcatgtcagagaataaataaatattctaagtaga

SEQ ID NO: 183354 - DNA, 606 bp, Homo sapiens
  Payload ID: 16126
  Gene Symbol: SLC25A22
  Gene Name: solute carrier family 25 (mitochondrial carrier: glutamate), member 22
  ENST ID: ENST00000456706
  CDS Start-End: 263-606
gtgcacgtgagccccgagcgtgagcggcgtgtgaggctggctgggaagacgctggcggtggggagggggggactgaaaggaagccaggtggtcccaggggacagaagtggcggttgctgacgcctggaaattcccctgaaggtggagcaccacccaacccccctgggtcccaccctccctcaaggcctcctccacctccacctccaccccgcctggcctggcgtccacctctgcggctcctacctgggtgcaatcgagttaaatggctgataagcagatcagcctgccagccaagctcatcaatggcggcatcgccgggctgatcggtgtcacctgcgtgtttcccatcgacctggccaagaccaggctgcagaaccagcagaacggccagcgcgtgtacacgagcatgtccgactgcctcatcaagaccgtccgctccgagggctacttcggcatgtaccggggagctgctgtgaacttgaccctcgtcacccccgagaaggccatcaagctggcagccaacgacttcttccgacatcagctctctaaggacgggcagaagctgaccctgcttaaagagatgctggcgggctgtggggctggcac

SEQ ID NO: 183355 - DNA, 839 bp, Homo sapiens
  Payload ID: 16126
  Gene Symbol: SLC25A22
  Gene Name: solute carrier family 25 (mitochondrial carrier: glutamate), member 22
  ENST ID: ENST00000532484
  CDS Start-End: 270-839
gcacatacgtgtccccgagggtgggtgtccggggcccgagcccaaggaagaaaggccgacccgtgtgggacgcacacgtgggagttcaccggacatctgtggacacgacagaagtggcggttgctgacgcctggaaattcccctgaaggtggagcaccacccaacccccctgggtcccaccctccctcaaggcctcctccacctccacctccaccccgcctggcctggcgtccacctctgcggctcctacctgggtgcaatcgagttaaatggctgataagcagatcagcctgccagccaagctcatcaatggcggcatcgccgggctgatcggtgtcacctgcgtgtttcccatcgacctggccaagaccaggctgcagaaccagcagaacggccagcgcgtgtacacgagcatgtccgactgcctcatcaagaccgtccgctccgagggctacttcggcatgtaccggggagctgctgtgaacttgaccctcgtcacccccgagaaggccatcaagctggcagccaacgacttcttccgacatcagctctctaaggacgggcagaagctgaccctgcttaaagagatgctggcgggctgtggggctggcacctgccaggtgatcgtgaccacgcccatggagatgctgaagatccagctgcaggatgcagggcgcattgccgcccagaggaagatcctggctgcccagggccagctctcggcccaggggggtgcccagccctcagtggaggctccagctgcccctcggcccacggccacccagctgacccgcgacctgctgcggagccgtggcattgccggtctctacaagggactc

SEQ ID NO: 183356 - DNA, 1108 bp, Homo sapiens
  Payload ID: 16126
  Gene Symbol: SLC25A22
  Gene Name: solute carrier family 25 (mitochondrial carrier: glutamate), member 22
  ENST ID: ENST00000481290
  CDS Start-End: 170-1108
ttctaggacagaagtggcggttgctgacgcctggaaattcccctgaaggtggagcaccacccaacccccctgggtcccaccctccctcaaggcctcctccacctccacctccaccccgcctggcctggcgtccacctctgcggctcctacctgggtgcaatcgagttaaatggctgataagcagatcagcctgccagccaagctcatcaatggcggcatcgccgggctgatcggtgtcacctgcgtgtttcccatcgacctggccaagaccaggctgcagaaccagcagaacggccagcgcgtgtacacgagcatccctagacagtccagggaccctggcctccggctggccccagctggccctggctcaccctgtccccttggccacaggtccgactgcctcatcaagaccgtccgctccgagggctacttcggcatgtaccggggagctgctgtgaacttgaccctcgtcacccccgagaaggccatcaagctggcagccaacgacttcttccgacatcagctctctaaggacgggcagaagctgaccctgcttaaagagatgctggcgggctgtggggctggcacctgccaggtgatcgtgaccacgcccatggagatgctgaagatccagctgcaggatgcagggcgcattgccgcccagaggaagatcctggctgcccagggccagctctcggcccaggggggtgcccagccctcagtggaggctccagctgcccctcggcccacggccacccagctgacccgcgacctgctgcggagccgtggcattgccggtctctacaagggactcggggccacgctgctcagggatgtccccttctctgtggtgtacttcccgctctttgccaacctgaaccagctgggccgcccggcgtccgaggagaagtcgcctttctacgtgtccttcctggccggctgtgtggctgggagtgccgccgctgtggccgtcaacccctgtgatgtggtgaagacgcggctccagtcacttcagcgaggcgtcaacgaggacacctactctgggatcctggactgtgccaggaagatcctgcggcacgagggcccctcggccttcctgaagggcgcc

SEQ ID NO: 183357 - DNA, 1079 bp, Homo sapiens
  Payload ID: 16126
  Gene Symbol: SLC25A22
  Gene Name: solute carrier family 25 (mitochondrial carrier: glutamate), member 22
  ENST ID: ENST00000529351
  CDS Start-End: 551-769
cgcacatacgtgtccccgagggtgggtgtccggggcccgagcccaaggaagaaaggccgacccgtgtgggacgcacacgtgggagttcaccggacatctgtggacacgtgcgtggccggagtcgcggtggccaggcggaggacggagcggtcggctgagccccagcagtagggcaggggcctgagccggcctccgagcgcagagagcggcccccaacccgcttctcctttgtcctctggccgaggcatcgcgcagttggagtccccttccgggaccctccagccagcaggatagaaagcaccgccccaagaggacggggacagcgggagattgaatggggagccgccggccagactcggagcctcacccccattgcctttcttgggggacagaagtggcggttgctgacgcctggaaattcccctgaaggtggagcaccacccaacccccctgggtcccaccctccctcaaggcctcctccacctccacctccaccccgcctggcctggcgtccacctctgcggctcctacctgggtgcaatcgagttaaatggctgataagcagatcagcctgccagccaagctcatcaatggcggcatcgccgggctgatcggtgtcacctgcgtgtttcccatcgacctggccaagaccaggctgcagaaccagcagaacggccagcgcgtgtacacgagcatgtccgactgcctcatcaagaccgtccgctccgagggctacttcggcatgtaccggggtgaggagctgctgtgaacttgaccctcgtcacccccgagaaggccatcaagctggcagccaacgacttcttccgacatcagctctctaaggacgggcagaagctgaccctgcttaaagagatgctggcgggctgtggggctggcacctgccaggtgatcgtgaccacgcccatggagatgctgaagatccagctgcaggatgcagggcgcattgccgcccagaggaagatcctggctgcccagggccagctctcggcccaggggggtgcccagccctcagtggaggctccagctgcccctcggcccacggccacccagctgacccg

SEQ ID NO: 183358 - DNA, 569 bp, Homo sapiens
  Payload ID: 16126
  Gene Symbol: SLC25A22
  Gene Name: solute carrier family 25 (mitochondrial carrier: glutamate), member 22
  ENST ID: ENST00000528936
  CDS Start-End: 260-569
gtgagtgcctggggcagagtgagagcaggaccagcgggcaggtggcggagcgggggtcggtggtggatggcccagccctggaaagccgaggtgaaggacagaagtggcggttgctgacgcctggaaattcccctgaaggtggagcaccacccaacccccctgggtcccaccctccctcaaggcctcctccacctccacctccaccccgcctggcctggcgtccacctctgcggctcctacctgggtgcaatcgagttaaatggctgataagcagatcagcctgccagccaagctcatcaatggcggcatcgccgggctgatcggtgtcacctgcgtgtttcccatcgacctggccaagaccaggctgcagaaccagcagaacggccagcgcgtgtacacgagcatgtccgactgcctcatcaagaccgtccgctccgagggctacttcggcatgtaccggggagctgctgtgaacttgaccctcgtcacccccgagaaggccatcaagctggcagccaacgacttcttccgacatcagctctctaaggacgggcagaagctgaccctgc

SEQ ID NO: 183359 - DNA, 558 bp, Homo sapiens
  Payload ID: 16126
  Gene Symbol: SLC25A22
  Gene Name: solute carrier family 25 (mitochondrial carrier: glutamate), member 22
  ENST ID: ENST00000529066
  CDS Start-End: 324-558
atgggaggagagctatacctgggatagctgagcccaggtcggggggtcttagggcgcccgggaccccagcccctagctcgaagggggcaggtgccggctgctgctctctctgtgctgaaggatgtgggggatggtcaccacagctgtccaggtcgaggtgctccgaagtggcggttgctgacgcctggaaattcccctgaaggtggagcaccacccaacccccctgggtcccaccctccctcaaggcctcctccacctccacctccaccccgcctggcctggcgtccacctctgcggctcctacctgggtgcaatcgagttaaatggctgataagcagatcagcctgccagccaagctcatcaatggcggcatcgccgggctgatcggtgtcacctgcgtgtttcccatcgacctggccaagaccaggctgcagaaccagcagaacggccagcgcgtgtacacgagcatgtccgactgcctcatcaagaccgtccgctccgagggctacttcggcatgtaccggggagctgctgtgaacttgaccctcgtcacccccg

SEQ ID NO: 183360 - DNA, 583 bp, Homo sapiens
  Payload ID: 16126
  Gene Symbol: SLC25A22
  Gene Name: solute carrier family 25 (mitochondrial carrier: glutamate), member 22
  ENST ID: ENST00000527734
  CDS Start-End: 219-437
gaagacgctggcggtggggagggggggactgaaaggaagccaggtggtcccaggggacagaagtggcggttgctgacgcctggaaattcccctgaaggtggagcaccacccaacccccctgggtcccaccctccctcaaggcctcctccacctccacctccaccccgcctggcctggcgtccacctctgcggctcctacctgggtgcaatcgagttaaatggctgataagcagatcagcctgccagccaagctcatcaatggcggcatcgccgggctgatcggtgtcacctgcgtgtttcccatcgacctggccaagaccaggctgcagaaccagcagaacggccagcgcgtgtacacgagcatgtccgactgcctcatcaagaccgtccgctccgagggctacttcggcatgtaccggggtgaggagctgctgtgaacttgaccctcgtcacccccgagaaggccatcaagctggcagccaacgacttcttccgacatcagctctctaaggacgggcagaagctgaccctgcttaaagagatgctggcgggctgtggggctggcacctgccaggtgatcgtg

SEQ ID NO: 183361 - DNA, 641 bp, Homo sapiens
  Payload ID: 16126
  Gene Symbol: SLC25A22
  Gene Name: solute carrier family 25 (mitochondrial carrier: glutamate), member 22
  ENST ID: ENST00000531514
  CDS Start-End: 218-436
ggtgctggccgagcgcggggcgggcaggcgagcgcggcggcggcggcgagcgtggacagaagtggcggttgctgacgcctggaaattcccctgaaggtggagcaccacccaacccccctgggtcccaccctccctcaaggcctcctccacctccacctccaccccgcctggcctggcgtccacctctgcggctcctacctgggtgcaatcgagttaaatggctgataagcagatcagcctgccagccaagctcatcaatggcggcatcgccgggctgatcggtgtcacctgcgtgtttcccatcgacctggccaagaccaggctgcagaaccagcagaacggccagcgcgtgtacacgagcatgtccgactgcctcatcaagaccgtccgctccgagggctacttcggcatgtaccggggtgaggagctgctgtgaacttgaccctcgtcacccccgagaaggccatcaagctggcagccaacgacttcttccgacatcagctctctaaggacgggcagaagctgaccctgcttaaagagatgctggcgggctgtggggctggcacctgccaggtgatcgtgaccacgcccatggagatgctgaagatccagctgcaggatgcagggcgcattgccgccca

SEQ ID NO: 183362 - DNA, 746 bp, Homo sapiens
  Payload ID: 16126
  Gene Symbol: SLC25A22
  Gene Name: solute carrier family 25 (mitochondrial carrier: glutamate), member 22
  ENST ID: ENST00000533385
  CDS Start-End: 263-746
gtgagagcaggaccagcgggcaggtggcggagcgggggtcggtggtggatggcccagccctggaaagccgaggtgaaggttacgagtccctgaggatctgacagaagtggcggttgctgacgcctggaaattcccctgaaggtggagcaccacccaacccccctgggtcccaccctccctcaaggcctcctccacctccacctccaccccgcctggcctggcgtccacctctgcggctcctacctgggtgcaatcgagttaaatggctgataagcagatcagcctgccagccaagctcatcaatggcggcatcgccgggctgatcggtgtcacctgcgtgtttcccatcgacctggccaagaccaggctgcagaaccagcagaacggccagcgcgtgtacacgagcatgtccgactgcctcatcaagaccgtccgctccgagggctacttcggcatgtaccggggagctgctgtgaacttgaccctcgtcacccccgagaaggccatcaagctggcagccaacgacttcttccgacatcagctctctaaggacgggcagaagctgaccctgcttaaagagatgctggcgggctgtggggctggcacctgccaggtgatcgtgaccacgcccatggagatgctgaagatccagctgcaggatgcagggcgcattgccgcccagaggaagatcctggctgcccagggccagctctcggcccaggggggtgcccagccctcagtggagg

SEQ ID NO: 183363 - DNA, 666 bp, Homo sapiens
  Payload ID: 16126
  Gene Symbol: SLC25A22
  Gene Name: solute carrier family 25 (mitochondrial carrier: glutamate), member 22
  ENST ID: ENST00000527723
  CDS Start-End: 264-666
aaaggaagccaggtggtcccaggggtgagcatgggactgggtggcaggtgcctcccgctgctgcaccctcaggacgcagtgacggcttcagtctggggtggacagaagtggcggttgctgacgcctggaaattcccctgaaggtggagcaccacccaacccccctgggtcccaccctccctcaaggcctcctccacctccacctccaccccgcctggcctggcgtccacctctgcggctcctacctgggtgcaatcgagttaaatggctgataagcagatcagcctgccagccaagctcatcaatggcggcatcgccgggctgatcggtgtcacctgcgtgtttcccatcgacctggccaagaccaggctgcagaaccagcagaacggccagcgcgtgtacacgagcatgtccgactgcctcatcaagaccgtccgctccgagggctacttcggcatgtaccggggagctgctgtgaacttgaccctcgtcacccccgagaaggccatcaagctggcagccaacgacttcttccgacatcagctctctaaggacgggcagaagctgaccctgcttaaagagatgctggcgggctgtggggctggcacctgccaggtgatcgtgaccacgcccatggagatgctgaagatccagctgcaggatgcag

SEQ ID NO: 183364 - DNA, 736 bp, Homo sapiens
  Payload ID: 16126
  Gene Symbol: SLC25A22
  Gene Name: solute carrier family 25 (mitochondrial carrier: glutamate), member 22
  ENST ID: ENST00000530360
  CDS Start-End: 540-736
gctggccgagcgcggggcgggcaggcgagcgcggcggcggcggcgagcgtggctgccggaagcctctgcttgcccaaagtgaaagagaaagtgcccccccacccaagcccgccccaccccgccccacggccaatccctgcggcccctcgcctcctcccccggcagcttccccttctgtgtgagtgctgggctggagtgtggaagagccatccagagtgagtgcctggggcagagtgagagcaggaccagcgggcaggtggcggagcgggggtcggtggtggatggcccagccctggaaagccgaggtgaaggttacgagtccctgaggatctgtgggtgtgagccagccgcgtggccctgggcaacggcgctgccggacagaagtggcggttgctgacgcctggaaattcccctgaaggtggagcaccacccaacccccctgggtcccaccctccctcaaggcctcctccacctccacctccaccccgcctggcctggcgtccacctctgcggctcctacctgggtgcaatcgagttaaatggctgataagcagatcagcctgccagccaagctcatcaatggcggcatcgccgggctgatcggtgtcacctgcgtgtttcccatcgacctggccaagaccaggctgcagaaccagcagaacggccagcgcgtgtacacgagcatgtccgactgcctcatcaagaccgtccgctccgagggctacttcggcatgta

SEQ ID NO: 183365 - DNA, 824 bp, Homo sapiens
  Payload ID: 16126
  Gene Symbol: SLC25A22
  Gene Name: solute carrier family 25 (mitochondrial carrier: glutamate), member 22
  ENST ID: ENST00000531534
  CDS Start-End: 357-824
agctctgcaggccctaggtggagctgccatgggaggagagctatacctgggatagctgagcccaggtcggggggtcttagggcgcccgggaccccagcccctagctcgaagggggcaggtgccggctgctgctctctctgtgctgaaggatgtgggggatggtcaccacagctgtccaggtcgaggtgctccggacagaagtggcggttgctgacgcctggaaattcccctgaaggtggagcaccacccaacccccctgggtcccaccctccctcaaggcctcctccacctccacctccaccccgcctggcctggcgtccacctctgcggctcctacctgggtgcaatcgagttaaatggctgataagcagatcagcctgccagccaagctcatcaatggcggcatcgccgggctgatcggtgtcacctgcgtgtttcccatcgacctggccaagaccaggctgcagaaccagcagaacggccagcgcgtgtacacgagcatgtccgactgcctcatcaagaccgtccgctccgagggctacttcggcatgtaccggggagctgctgtgaacttgaccctcgtcacccccgagaaggccatcaagctggcagccaacgacttcttccgacatcagctctctaaggacgggcagaagctgaccctgcttaaagagatgctggcgggctgtggggctggcacctgccaggtgatcgtgaccacgcccatggagatgctgaagatccagctgcaggatgcagggcgcattgccgcccagaggaagatcctggctgcccagggccagctctcggcccaggggggtgcc

SEQ ID NO: 183366 - DNA, 802 bp, Homo sapiens
  Payload ID: 16126
  Gene Symbol: SLC25A22
  Gene Name: solute carrier family 25 (mitochondrial carrier: glutamate), member 22
  ENST ID: ENST00000531437
  CDS Start-End: 214-802
aggtgctggccgagcgcggggcgggcaggcgagcgcggcggcggcggcgagcgtgaagtggcggttgctgacgcctggaaattcccctgaaggtggagcaccacccaacccccctgggtcccaccctccctcaaggcctcctccacctccacctccaccccgcctggcctggcgtccacctctgcggctcctacctgggtgcaatcgagttaaatggctgataagcagatcagcctgccagccaagctcatcaatggcggcatcgccgggctgatcggtgtcacctgcgtgtttcccatcgacctggccaagaccaggctgcagaaccagcagaacggccagcgcgtgtacacgagcatgtccgactgcctcatcaagaccgtccgctccgagggctacttcggagctgctgtgaacttgaccctcgtcacccccgagaaggccatcaagctggcagccaacgacttcttccgacatcagctctctaaggacgggcagaagctgaccctgcttaaagagatgctggcgggctgtggggctggcacctgccaggtgatcgtgaccacgcccatggagatgctgaagatccagctgcaggatgcagggcgcattgccgcccagaggaagatcctggctgcccagggccagctctcggcccaggggggtgcccagccctcagtggaggctccagctgcccctcggcccacggccacccagctgacccgcgacctgctgcggagccgtggcattgccggtctctacaagggactcggggccacgctgctcagggatgtccccttct

SEQ ID NO: 183367 - DNA, 565 bp, Homo sapiens
  Payload ID: 16126
  Gene Symbol: SLC25A22
  Gene Name: solute carrier family 25 (mitochondrial carrier: glutamate), member 22
  ENST ID: ENST00000526152
  CDS Start-End: 184-565
gaaaggaagccaggtggtcccagggaagtggcggttgctgacgcctggaaattcccctgaaggtggagcaccacccaacccccctgggtcccaccctccctcaaggcctcctccacctccacctccaccccgcctggcctggcgtccacctctgcggctcctacctgggtgcaatcgagttaaatggctgataagcagatcagcctgccagccaagctcatcaatggcggcatcgccgggctgatcggtgtcacctgcgtgtttcccatcgacctggccaagaccaggctgcagaaccagcagaacggccagcgcgtgtacacgagcatgtccgactgcctcatcaagaccgtccgctccgagggctacttcggcatgtaccggggagctgctgtgaacttgaccctcgtcacccccgagaaggccatcaagctggcagccaacgacttcttccgacatcagctctctaaggacgggcagaagctgaccctgcttaaagagatgctggcgggctgtggggctggcacctgccaggtgatcgtgaccacgcccatggagatgctga

SEQ ID NO: 183368 - DNA, 741 bp, Homo sapiens
  Payload ID: 16126
  Gene Symbol: SLC25A22
  Gene Name: solute carrier family 25 (mitochondrial carrier: glutamate), member 22
  ENST ID: ENST00000528606
  CDS Start-End: 211-741
ccccttctgtgtgagtgctgggctggagtgtggaagagccatccagagacagaagtggcggttgctgacgcctggaaattcccctgaaggtggagcaccacccaacccccctgggtcccaccctccctcaaggcctcctccacctccacctccaccccgcctggcctggcgtccacctctgcggctcctacctgggtgcaatcgagttaaatggctgataagcagatcagcctgccagccaagctcatcaatggcggcatcgccgggctgatcggtgtcacctgcgtgtttcccatcgacctggccaagaccaggctgcagaaccagcagaacggccagcgcgtgtacacgagcatgtccgactgcctcatcaagaccgtccgctccgagggctacttcggcatgtaccggggagctgctgtgaacttgaccctcgtcacccccgagaaggccatcaagctggcagccaacgacttcttccgacatcagctctctaaggacgggcagaagctgaccctgcttaaagagatgctggcgggctgtggggctggcacctgccaggtgatcgtgaccacgcccatggagatgctgaagatccagctgcaggatgcagggcgcattgccgcccagaggaagatcctggctgcccagggccagctctcggcccaggggggtgcccagccctcagtggaggctccagctgcccctcggcccacggccacccagctgacccgcgacctg

SEQ ID NO: 183369 - DNA, 1790 bp, Homo sapiens
  Payload ID: 16126
  Gene Symbol: SLC25A22
  Gene Name: solute carrier family 25 (mitochondrial carrier: glutamate), member 22
  Uniprot ID: Q9H936
  ENST ID: ENST00000531214
  CDS Start-End: 548-1519
acatacgtgtccccgagggtgggtgtccggggcccgagcccaaggaagaaaggccgacccgtgtgggacgcacacgtgggagttcaccggacatctgtggacacgtgcgtggccggagtcgcggtggccaggcggaggacggagcggtcggctgagccccagcagtagggcaggggcctgagccggcctccgagcgcagagagcggcccccaacccgcttctcctttgtcctctggccgaggcatcgcgcagttggagtccccttccgggaccctccagccagcaggatagaaagcaccgccccaagaggacggggacagcgggagattgaatggggagccgccggccagactcggagcctcacccccattgcctttcttgggggacagaagtggcggttgctgacgcctggaaattcccctgaaggtggagcaccacccaacccccctgggtcccaccctccctcaaggcctcctccacctccacctccaccccgcctggcctggcgtccacctctgcggctcctacctgggtgcaatcgagttaaatggctgataagcagatcagcctgccagccaagctcatcaatggcggcatcgccgggctgatcggtgtcacctgcgtgtttcccatcgacctggccaagaccaggctgcagaaccagcagaacggccagcgcgtgtacacgagcatgtccgactgcctcatcaagaccgtccgctccgagggctacttcggcatgtaccggggagctgctgtgaacttgaccctcgtcacccccgagaaggccatcaagctggcagccaacgacttcttccgacatcagctctctaaggacgggcagaagctgaccctgcttaaagagatgctggcgggctgtggggctggcacctgccaggtgatcgtgaccacgcccatggagatgctgaagatccagctgcaggatgcagggcgcattgccgcccagaggaagatcctggctgcccagggccagctctcggcccaggggggtgcccagccctcagtggaggctccagctgcccctcggcccacggccacccagctgacccgcgacctgctgcggagccgtggcattgccggtctctacaagggactcggggccacgctgctcagggatgtccccttctctgtggtgtacttcccgctctttgccaacctgaaccagctgggccgcccggcgtccgaggagaagtcgcctttctacgtgtccttcctggccggctgtgtggctgggagtgccgccgctgtggccgtcaacccctgtgatgtggtgaagacgcggctccagtcacttcagcgaggcgtcaacgaggacacctactctgggatcctggactgtgccaggaagatcctgcggcacgagggcccctcggccttcctgaagggcgcctactgccgcgcgctggtcatcgcgccccttttcggcatcgcacaggtggtctacttcctgggcatcgcggagtccctgctggggctgctgcaggacccccaggcctgagcccagcacccgctccaccccagccagctgggcagggccggtgtggggctggagccaggcagctagcccaggacggagcaagggaagacccctccccagccctcccgtcggcaggggcagcagggggcagggtgcagggtccacataggtggtgcacacgcaagccccccggggtgctgcctgcaccgttgggatcaatgtctcatttatgtagaaaatgcagaaatctttacattcctcaagctagcccctgccccaatcctgccctggc

SEQ ID NO: 183370 - DNA, 816 bp, Homo sapiens
  Payload ID: 16126
  Gene Symbol: SLC25A22
  Gene Name: solute carrier family 25 (mitochondrial carrier: glutamate), member 22
  ENST ID: ENST00000625419
  CDS Start-End: 226-816
gcctggccctttaaaagccggagctggctggggtgcacgtgagccccgagcgtgagcggcgtgacagaagtggcggttgctgacgcctggaaattcccctgaaggtggagcaccacccaacccccctgggtcccaccctccctcaaggcctcctccacctccacctccaccccgcctggcctggcgtccacctctgcggctcctacctgggtgcaatcgagttaaatggctgataagcagatcagcctgccagccaagctcatcaatggcggcatcgccgggctgatcggtgtcacctgcgtgtttcccatcgacctggccaagaccaggctgcagaaccagcagaacggccagcgcgtgtacacgagcatgtccgactgcctcatcaagaccgtccgctccgagggctacttcggcatgtaccggggagctgctgtgaacttgaccctcgtcacccccgagaaggccatcaagctggcagccaacgacttcttccgacatcagctctctaaggacgggcagaagctgaccctgcttaaagagatgctggcgggctgtggggctggcacctgccaggtgatcgtgaccacgcccatggagatgctgaagatccagctgcaggatgcagggcgcattgccgcccagaggaagatcctggctgcccagggccagctctcggcccaggggggtgcccagccctcagtggaggctccagctgcccctcggcccacggccacccagctgacccgcgacctgctgcggagccgtggcattgccggtctctacaagggactcggggccacgctgctcagggat

SEQ ID NO: 183371 - DNA, 2692 bp, Homo sapiens
  Payload ID: 16126
  Gene Symbol: SLC25A22
  Gene Name: solute carrier family 25 (mitochondrial carrier: glutamate), member 22
  Uniprot ID: Q9H936
  ENST ID: ENST00000628067
  CDS Start-End: 281-1252
gaagcccggaggaggccgagggcggagcgcgcgcggcgccgagcggacgcgcctccccgcctaggtgctggccgagcgcggggcgggcaggcgagcgcggcggcggcggcgagcgtggacagaagtggcggttgctgacgcctggaaattcccctgaaggtggagcaccacccaacccccctgggtcccaccctccctcaaggcctcctccacctccacctccaccccgcctggcctggcgtccacctctgcggctcctacctgggtgcaatcgagttaaatggctgataagcagatcagcctgccagccaagctcatcaatggcggcatcgccgggctgatcggtgtcacctgcgtgtttcccatcgacctggccaagaccaggctgcagaaccagcagaacggccagcgcgtgtacacgagcatgtccgactgcctcatcaagaccgtccgctccgagggctacttcggcatgtaccggggagctgctgtgaacttgaccctcgtcacccccgagaaggccatcaagctggcagccaacgacttcttccgacatcagctctctaaggacgggcagaagctgaccctgcttaaagagatgctggcgggctgtggggctggcacctgccaggtgatcgtgaccacgcccatggagatgctgaagatccagctgcaggatgcagggcgcattgccgcccagaggaagatcctggctgcccagggccagctctcggcccaggggggtgcccagccctcagtggaggctccagctgcccctcggcccacggccacccagctgacccgcgacctgctgcggagccgtggcattgccggtctctacaagggactcggggccacgctgctcagggatgtccccttctctgtggtgtacttcccgctctttgccaacctgaaccagctgggccgcccggcgtccgaggagaagtcgcctttctacgtgtccttcctggccggctgtgtggctgggagtgccgccgctgtggccgtcaacccctgtgatgtggtgaagacgcggctccagtcacttcagcgaggcgtcaacgaggacacctactctgggatcctggactgtgccaggaagatcctgcggcacgagggcccctcggccttcctgaagggcgcctactgccgcgcgctggtcatcgcgccccttttcggcatcgcacaggtggtctacttcctgggcatcgcggagtccctgctggggctgctgcaggacccccaggcctgagcccagcacccgctccaccccagccagctgggcagggccggtgtggggctggagccaggcagctagcccaggacggagcaagggaagacccctccccagccctcccgtcggcaggggcagcagggggcagggtgcagggtccacataggtggtgcacacgcaagccccccggggtgctgcctgcaccgttgggatcaatgtctcatttatgtagaaaatgcagaaatctttacattcctcaagctagcccctgccccaatcctgccctggcctgaacacccccagggacagagctggtctctgggctgggggcccccgggcctgggccgggcaggctggaccatacccccagtccaccagctccagtctccacagccatcctggcccacacaggcaccccacacaaacctatttattgaatctgctggacccaagcggctctccagcccttccgtccttccccagccgctcttgtcgccttggcaggacttgactctgcctccctggccagccttgcaagaggactggggtctcctgccctctctgttgagccaggaatcccaagtgaggggttgccctgaggtctgactcttggggcaagcccgccacccactgtgggactttctggtgggctcctcagctcccaccccaggctggggcccagattgtgaggtctgtgtgcatgtgtgtgtgtatgtgtgtgtgcatgcgtgtgtgtgttgtggggatctggcctggcccttggggatggggctgctggggactgccccccttcccgccgtggccaggcgctctgtgtgctgtgtgtgccccaggctctgttgaccccgtccaggaactaacttacccagcttggtctctcctgagtcctccaccctggcctgggattggccagggagcagggcgggcattgggaccagtgtggagcctgagggtgcctgccctgctctggagggagggccaggagctgccacacccccaagtcctctcagggcccaccctcctttttcagcctctgcataaggcccctgggtacactgcagaagccccatccttcccgcctccgggcataaggcccctgaccacacttcagaagccccatcccccctgccaccgggcgatccctgctgtgagccgaagctctccctgccccgccctggccatgtgatcgtgttggtgacagaccctgatgtgctggtgctgtgtccccaaaaccggggccctccacagaggccccttcccagcgacactacctggggctcaggcctggacccccccagttcacggttgctcctgggagctgcccctcccgtcacatcagaaccttggaagctgctgctgctgcttacagaattatatttttttcttttgaagagttttaagaagttgtaactttttgtgtcttgtcatgtcagagaataaataaatattctaagtaga

SEQ ID NO: 183372 - DNA, 579 bp, Homo sapiens
  Payload ID: 16126
  Gene Symbol: SLC25A22
  Gene Name: solute carrier family 25 (mitochondrial carrier: glutamate), member 22
  ENST ID: ENST00000629634
  CDS Start-End: 288-579
agtgctgggctggagtgtggaagagccatccagagtgagtgcctggggcagagtgagagcaggaccagcgggcaggtggcggagcgggggtcggtggtggatggcccagccctggaaagccgaggacagaagtggcggttgctgacgcctggaaattcccctgaaggtggagcaccacccaacccccctgggtcccaccctccctcaaggcctcctccacctccacctccaccccgcctggcctggcgtccacctctgcggctcctacctgggtgcaatcgagttaaatggctgataagcagatcagcctgccagccaagctcatcaatggcggcatcgccgggctgatcggtgtcacctgcgtgtttcccatcgacctggccaagaccaggctgcagaaccagcagaacggccagcgcgtgtacacgagcatgtccgactgcctcatcaagaccgtccgctccgagggctacttcggcatgtaccggggagctgctgtgaacttgaccctcgtcacccccgagaaggccatcaagctggcagccaacgacttcttccgacatcagctctctaaggacg

SEQ ID NO: 183373 - DNA, 1021 bp, Homo sapiens
  Payload ID: 16126
  Gene Symbol: SLC25A22
  Gene Name: solute carrier family 25 (mitochondrial carrier: glutamate), member 22
  ENST ID: ENST00000627843
  CDS Start-End: 281-1021
agtgacggcttcagtctggggtggtgggtgaggggctgcgtgagagagggaggctgggggaggattactcttcgggtggccccaccctcactcattcccattccctcatccttctaggacagaagtggcggttgctgacgcctggaaattcccctgaaggtggagcaccacccaacccccctgggtcccaccctccctcaaggcctcctccacctccacctccaccccgcctggcctggcgtccacctctgcggctcctacctgggtgcaatcgagttaaatggctgataagcagatcagcctgccagccaagctcatcaatggcggcatcgccgggctgatcggtgtcacctgcgtgtttcccatcgacctggccaagaccaggctgcagaaccagcagaacggccagcgcgtgtacacgagcatgtccgactgcctcatcaagaccgtccgctccgagggctacttcggcatgtaccggggagctgctgtgaacttgaccctcgtcacccccgagaaggccatcaagctggcagccaacgacttcttccgacatcagctctctaaggacgggcagaagctgaccctgcttaaagagatgctggcgggctgtggggctggcacctgccaggtgatcgtgaccacgcccatggagatgctgaagatccagctgcaggatgcagggcgcattgccgcccagaggaagatcctggctgcccagggccagctctcggcccaggggggtgcccagccctcagtggaggctccagctgcccctcggcccacggccacccagctgacccgcgacctgctgcggagccgtggcattgccggtctctacaagggactcggggccacgctgctcagggatgtccccttctctgtggtgtacttcccgctctttgccaacctgaaccagctgggccgcccggcgtccgaggagaagtcgcctttctacgtgtccttcctggccggctgtgtggctgggagtgccgccgctgtggccgtcaacccctgtgat

SEQ ID NO: 183374 - DNA, 709 bp, Homo sapiens
  Payload ID: 16126
  Gene Symbol: SLC25A22
  Gene Name: solute carrier family 25 (mitochondrial carrier: glutamate), member 22
  ENST ID: ENST00000625752
  CDS Start-End: 357-709
gtgagtgctgggctggagtgtggaagagccatccagagtgagtgcctggggcagagtgagagcaggaccagcgggcaggtggcggagcgggggtcggtggtggatggcccagccctggaaagccgaggtgaaggttacgagtccctgaggatctgtgggtgtgagccagccgcgtggccctgggcaacggcgctgccgaagtggcggttgctgacgcctggaaattcccctgaaggtggagcaccacccaacccccctgggtcccaccctccctcaaggcctcctccacctccacctccaccccgcctggcctggcgtccacctctgcggctcctacctgggtgcaatcgagttaaatggctgataagcagatcagcctgccagccaagctcatcaatggcggcatcgccgggctgatcggtgtcacctgcgtgtttcccatcgacctggccaagaccaggctgcagaaccagcagaacggccagcgcgtgtacacgagcatgtccgactgcctcatcaagaccgtccgctccgagggctacttcggcatgtaccggggagctgctgtgaacttgaccctcgtcacccccgagaaggccatcaagctggcagccaacgacttcttccgacatcagctctctaaggacgggcagaagctgaccctgcttaaagagatgctggcgggctgtggggctggcacctgccaggt

SEQ ID NO: 183375 - DNA, 1841 bp, Homo sapiens
  Payload ID: 16127
  Gene Symbol: SLC25A31
  Gene Name: solute carrier family 25 (mitochondrial carrier
  adenine nucleotide translocator), member 31
  Uniprot ID: Q9H0C2
  ENST ID: ENST00000281154
  CDS Start-End: 169-1116
gcagcttttccgcacgcgcctcgccggcgcgcggctctctcagcgtcccaagagccactttctcgccagtacgatgctgcagcggttttccggttttccgcttcccttcatcgtagctcccgtactcatttttagccactgctgccggtttttatatccttctccatcatgcatcgtgagcctgcgaaaaagaaggcagaaaagcggctgtttgacgcctcatccttcgggaaggaccttctggccggcggagtcgcggcagctgtgtccaagacagcggtggcgcccatcgagcgggtgaagctgctgctgcaggtgcaggcgtcgtcgaagcagatcagccccgaggcgcggtacaaaggcatggtggactgcctggtgcggattcctcgcgagcagggtttcttcagtttttggcgtggcaatttggcaaatgttattcggtattttccaacacaagctctaaactttgcttttaaggacaaatacaagcagctattcatgtctggagttaataaagaaaaacagttctggaggtggtttttggcaaacctggcttctggtggagctgctggggcaacatccttatgtgtagtatatcctctagattttgcccgaacccgattaggtgtcgatattggaaaaggtcctgaggagcgacaattcaagggtttaggtgactgtattatgaaaatagcaaaatcagatggaattgctggtttataccaagggtttggtgtttcagtacagggcatcattgtgtaccgagcctcttattttggagcttatgacacagttaagggtttattaccaaagccaaagaaaactccatttcttgtctcctttttcattgctcaagttgtgactacatgctctggaatactttcttatccctttgacacagttagaagacgtatgatgatgcagagtggtgaggctaaacggcaatataaaggaaccttagactgctttgtgaagatataccaacatgaaggaatcagttccttttttcgtggcgccttctccaatgttcttcgcggtacagggggtgctttggtgttggtattatatgataaaattaaagaattctttcatattgatattggtggtaggtaatcgggagagtaaattaagaaatacatggatttaacttgttaaacatacaaattacatagctgccatttgcatacattttgatagtgttattgtctgtattttgttaaagtgctagttctgcaataaagcatacattttttcaagaatttaaatactaaaaatcagataaatgtggattttcctcccacttagactcaaacacattttagtgtgatatttcatttattataggtagtatattttaatttgttagtttaaaattctttttatgattaaaaattaatcatataatcctagattaatgctgaaatctaggaaatgaaagtagcgtcttttaaattgctattcatttaatatacctgttttcccatcttttgaagtcatatggtatgacatatttcttaaaagcttatcaatagatgtcatcatatgtgtaggcagaaataagctttgttctatatctcttctaagacagttgttattactgtgtataatatttacagtatcagcctttgattatagatgtgatcatttaaaatttgataatgactttagtgacattataaaactgaaactggaaaataaaatggcttatctgctgatgtttatctttaaaataaataaaatcttgctagtgtgaatatatcttagaacaaaaggtatcctcttgaaaattagtttgtatattttgttgacaataaaggaagcttaactgttataaagga

SEQ ID NO: 183376 - DNA, 4440 bp, Homo sapiens
  Payload ID: 16128
  Gene Symbol: SLC25A4
  Gene Name: solute carrier family 25 (mitochondrial carrier
  adenine nucleotide translocator), member 4
  Uniprot ID: P12235
  ENST ID: ENST00000281456
  CDS Start-End: 133-1029
aagggggagctgcgggccaggcggcggccccctagcgtcgcgcagggtcggggactgcgcggcggtgccaggccgggcgtgggcgagagcacgaacgggctgcctgcgggctgagagcgtcgagctgtcaccatgggtgatcacgcttggagcttcctaaaggacttcctggccgggggcgtcgccgctgccgtctccaagaccgcggtcgcccccatcgagagggtcaaactgctgctgcaggtccagcatgccagcaaacagatcagtgctgagaagcagtacaaagggatcattgattgtgtggtgagaatccctaaggagcagggcttcctctccttctggaggggtaacctggccaacgtgatccgttacttccccacccaagctctcaacttcgccttcaaggacaagtacaagcagctcttcttagggggtgtggatcggcataagcagttctggcgctactttgctggtaacctggcgtccggtggggccgctggggccacctccctttgctttgtctacccgctggactttgctaggaccaggttggctgctgatgtgggcaagggcgccgcccagcgtgagttccatggtctgggcgactgtatcatcaagatcttcaagtctgatggcctgagggggctctaccagggtttcaacgtctctgtccaaggcatcattatctatagagctgcctacttcggagtctatgatactgccaaggggatgctgcctgaccccaagaacgtgcacatttttgtgagctggatgattgcccagagtgtgacggcagtcgcagggctggtgtcctacccctttgacactgttcgtcgtagaatgatgatgcagtccggccggaaaggggccgatattatgtacacggggacagttgactgctggaggaagattgcaaaagacgaaggagccaaggccttcttcaaaggtgcctggtccaatgtgctgagaggcatgggcggtgcttttgtattggtgttgtatgatgagatcaaaaaatatgtctaatgtaattaaaacacaagttcacagatttacagtgaacttgatctacaagttcacagatccattgtgtggtttaatagactattcctaggggaagtaaaaagatctgggataaaaccagactgaaaggaatacctcagaagagatgcttcattgagtgttcattaaaccacacatgtattttgtatttattttacatttaaattcccacagcaaatagaaaataatttatcatacttgtacaattaactgaagaattgataataactgaatgtgaaacatcaataaagaccacttaatgcacgctttctattttattgaactcttattaactgtaaaatgcatttttaaaagatcaaaaatgcatattttctagcatgattcatgtatcagtcagcagccaagcttctaaatgccagatattatattgagaatgtattatatgagaacgtacaatgcttaaagttccggttttcaaacttaggcaggtcatattctatctatcttatccagcattactgtaggctagaaagtgataatggctttcataatcctgccttgtcttaggcactttcctgcagtctttagaaattctaagattctgctaaaagttttaaatcacaatctggagaattttctatgattaggaagtgctctgttttcatccctttagataactgtgacacctagaattttatgttaagtagagagtattcattgaaaatcaaggccaggtgcagtggctcacacctgtcaccccagcactttgggaggcagaggtgggcgtatcacttcaggccaggagtttgagaccagcctggccaaccgagcgaaaccccatctctaataaaaatacaaaaaattagctgggtgtggtggcgcacacctgtaatcccaactactcaggaggctgaggcatcagaatcacttgaacccgagaggcagaggttgcagtgagctgagatggcatgccaccacatccatcctaagcgacagggcaagactctgtctcaaaaaaaaaaaaaagaaagaaaatcagttgtcttagtttaagctactataacaaggtactgtagactgatggcttataagcaacagaaacttatttctcagttctgtagtctggaggtccaagatcaaggtgacactgtggtcaggttctgatgagggccctcttctgggttataaactacggacttcttgtatccttacatggcagaaagagcgacagagctctctgtagtcccttttataagctcactaatcccattcatgagggccctaccctcatgacccaattacctcccaaatgcccctcctccaaacaccaccactttgggggttaagatttcaacagatgaattttgaagggacacaaacattcagtccatagcatcacttatcaagctagtatttaatacctcttaggccccgtggaagggaaaatagataggaacctgccctgaaagatgcttcagttggggagaaaaggtgaaattccattgttagacaatttgtttaagacaatacatcttgcttgagaaggaatagaagggaaatgaaatggggggagggagtggtaggagatggaggctttgaaagaaaataaccagatttagaaacatgggtatagaaagcatcctccagtacttctgtaacaatttatcaagacctacaggaagtcagttttggatttgctcctccgagatttgcgagccagaggaaaatacttagactatcaggttggaaagttcacacttggaccaggaaaagaccaagcagttgctatagtctcctggattgtgactaatctggaggaagcaagtccctgtatccttggcaaagcttgaaaggcaggcaaatgtcttctctgtgttttctgacaggtggttgggtggtgggggttggtctctgtacctcctgttctttaccttgcttaccaagcccttccaccgactcactcctgcctccccagctaaaaattggctgtgttgcttttaccacagttaccaaggtctgagttttataaaatccaggatcacatctgacctcacctggtagatatctaggccaataaagtctaaagggctaaaaagaaggtacctctccatcctgtctcctcgaggccaggcagcacatgtgcagttaagaggcctcctggatccattgtcctcctgttgcttttcgttctaagtgatccaaactctattgctgatagggaataaaagcagggcaggctagtagtgggcaagtgctttgatggagcgtatctccaagcagggcccaagtttaggaggaggaagacctgatacaatgaatgaacagtgcgtcctcccaacccaaccaagaagtgtaattgtgttccgtctttaaccctggcatggaatggggagggaagaggcatggacatttattacatagtgcacattatctacattctctgcatgtgacccagatgtcagcccttccgcttcctgcgaaggttacctctaatgcacgttgccccaggccctgctgagctagttcctcaccgcagctacttaactcaccatgaattcctagaaccctcagcctctgagagtgctgggatctggcgggagaacaggcagtacttccctcactaacctacccgcacgccataccatcattgtgcaaagctgcctcatgctggaaggtctggtttacgtaaaagtgacaagttggaattgagcgtccgactctcgggtacctgccccaggcatttctcatcagccccatttcccacacagctctctcctaggcgcagccctccttcaccaccaccacccccaccccaatcacctttaggtattttctcccctaaagcctcacctgttggcattttacatctttttaagaccttattttgtattttaaatgtatgagaaaaattatggaggatgatgcaagatgagtgagtccataatggtaataattggacactaaaaacaatgaaaacttgtctcaagtatttgtgttgaaatctcaattaactgggcgactgctcccgttccattttattctgtaaaatatgtggcatcctttgtgttgaggcggcatttactaaacacccccaaggtgcaaggctgcaagagaatcgagcgccgcaaggcgagcttatcttccacacctggtacagtgcccaggacagagaaggtgtttagcaagtttctgctgaatggaagagtgagcgagaagggaaagtgcatctaaaaagcacagggaacctacaaaatatttgggaaagggtttcatcagttcgggtgaaatcttgaacgtgcaaagcaccatgggggtggctggacaggcttgttggagtcgtataatgcaatgaataaaaacttacggctgccttaaatgcaaatgtcaagcccttaaataaaatttaacaaagtc

SEQ ID NO: 183377 - DNA, 1666 bp, Homo sapiens
  Payload ID: 16128
  Gene Symbol: SLC25A4
  Gene Name: solute carrier family 25 (mitochondrial carrier
  adenine nucleotide translocator), member 4
  ENST ID: ENST00000491736
  CDS Start-End: 96-722
tcgcgcagggtcggggactgcgcggcggtgccaggccgggcgtgggcgagagcacgaacgggctgcctgcgggctgagagcgtcgagctgtcaccatgggtgatcacgcttggagcttcctaaaggacttcctggccgggggcgtcgccgctgccgtctccaagaccgcggtcgcccccatcgagagggtcaaactgctgctgcaggtccagcatgccagcaaacagatcagtgctgagaagcagtacaaagggatcattgattgtgtggtgagaatccctaaggagcagggcttcctctccttctggaggggtaacctggccaacgtgatccgttacttccccacccaagctctcaacttcgccttcaaggacaagtacaagcagctcttcttagggggtgtggatcggcataagcagttctggcgctactttgctggtaacctggcgtccggtggggccgctggggccacctccctttgctttgtctacccgctggactttgctaggaccaggttggctgctgatgtgggcaagggcgccgcccagcgtgagttccatggtctgggcgactgtatcatcaagatcttcaagtctgatggcctgagggggctctaccagggtttcaacgtctctgtccaaggcatcattatctatagagctgcctacttcggagtctatgatactgccaaggtctctgggataattgaggcttctgaatgaggaggtgatgtgcataagttaatagctgaagcgttccttgtgtcctctactgaaataaactctggcctttagttattcagagaggaggaggggggagcctgtctccctctagacacagccatagcagttactgagtttaacttgaagccacttccaatgccctgtatacaagctgagcactgcccctccggggtccggagagggcagcagccacctttgctgtctgcctggtcatatgtgaagcacctgcacaggggcaggttccccgcaaggtcagagcatggagctggaggtgcagtggcctctctccctccacctgctttctgctgagaacaggcacttcatagccgttcggcttctgggctctgtccacagggatgctgcctgaccccaagaacgtgcacatttttgtgagctggatgattgcccagagtgtgacggcagtcgcagggctggtgtcctacccctttgacactgttcgtcgtagaatgatgatgcagtccggccggaaaggggccgatattatgtacacggggacagttgactgctggaggaagattgcaaaagacgaaggagccaaggccttcttcaaaggtgcctggtccaatgtgctgagaggcatgggcggtgcttttgtattggtgttgtatgatgagatcaaaaaatatgtctaatgtaattaaaacacaagttcacagatttacagtgaacttgatctacaagttcacagatccattgtgtggtttaatagactattcctaggggaagtaaaaagatctgggataaaaccagactgaaaggaatacctcagaagagatgcttcattgagtgttcattaaaccacacatgtattttgtatttattttacatttaaattcccacagcaaatagaaaataatttatcatacttgtacaattaactgaagaattgataataactgaat

SEQ ID NO: 183378 - DNA, 1274 bp, Homo sapiens
  Payload ID: 16129
  Gene Symbol: SLC25A5
  Gene Name: solute carrier family 25 (mitochondrial carrier
  adenine nucleotide translocator), member 5
  Uniprot ID: P05141
  ENST ID: ENST00000317881
  CDS Start-End: 117-1013
agctccggctccccctatataaatcggccatttgcttcgctccgccccgcagcgccggagtcaaagccggttcccggcccagtcccgtcctgcagcagtctgcctcctctttcaacatgacagatgccgctgtgtccttcgccaaggacttcctggcaggtggagtggccgcagccatctccaagacggcggtagcgcccatcgagcgggtcaagctgctgctgcaggtgcagcatgccagcaagcagatcactgcagataagcaatacaaaggcattatagactgcgtggtccgtattcccaaggagcagggagttctgtccttctggcgcggtaacctggccaatgtcatcagatacttccccacccaggctcttaacttcgccttcaaagataaatacaagcagatcttcctgggtggtgtggacaagagaacccagttttggctctactttgcagggaatctggcatcgggtggtgccgcaggggccacatccctgtgttttgtgtaccctcttgattttgcccgtacccgtctagcagctgatgtgggtaaagctggagctgaaagggaattccgaggcctcggtgactgcctggttaagatctacaaatctgatgggattaagggcctgtaccaaggctttaacgtgtctgtgcagggtattatcatctaccgagccgcctacttcggtatctatgacactgcaaagggaatgcttccggatcccaagaacactcacatcgtcatcagctggatgatcgcacagactgtcactgctgttgccgggttgacttcctatccatttgacactgttcgccgccgcatgatgatgcagtcagggcgcaaaggaactgacatcatgtacacaggcacgcttgactgctggcggaagattgctcgtgatgaaggaggcaaagcttttttcaagggtgcatggtccaatgttctcagaggcatgggtggtgcttttgtgcttgtcttgtatgatgaaatcaagaagtacacataagttatttcctaggatttttccccctgtgaacaggcatgttgtattatataacatatcttgagcattcttgacagactcctggctgtcagtttctcagtggcaactatttactggttgaaaatgggaagcaataatattcatctgaccagttttctcttaaagccatttccatgatgatgatgatgggactcaattgtattttttatttcagtcactcctgataaataacaaatttggagaaataaaaatatctaaaataaa

SEQ ID NO: 183379 - DNA, 2062 bp, Homo sapiens
  Payload ID: 16130
  Gene Symbol: SLC25A6
  Gene Name: solute carrier family 25 (mitochondrial carrier
  adenine nucleotide translocator), member 6
  Uniprot ID: P12236
  ENST ID: ENST00000381401
  CDS Start-End: 716-1612
gcagcgggactgagccgcgcccacgtggaagccgccgcaggcttcgcgcggggccccccgggtgcacgcgggcaggggccggggtctcccgacgcacgaccccggagagtgttgaaagggtcggagctgcccggaggtcaagggtcaagggtcgggggtcggggcaccacatgtcgcacatcccggcggggtcgccgcggcctccgggagaaagcggacgacgcactcggagcgaactgggcatcagggtgggcttctgactccgcagctgccctcccgcccgctcgggtactggcagcggcctgaccttcacaaggtcaaggctgccgcggaacccccagcggcccctacggcgcatgggcggggcctggctcccggcatacctaggggtgcggggcgggacgtctccggggagcgcagccaatgggcgcggttcgctggagtgcggggcgggacgcagcgggattcccggcagccctcagaggcgaggcacgcaggctggtgtggggcggggcctggcggcgcagccaatgagcgcggcgcgaggaggcgcgggggcggagagtgggcgtggcgtcggcgtcttagcggctgcgcggtggctgctccgtcctttcggtccaggcggcggcagggctgagccagcgacgccctccattcactctccgcgcccgttctccggctgtcctcccgttccgctgcccgccctgccaccatgacggaacaggccatctccttcgccaaagacttcttggccggaggcatcgccgccgccatctccaagacggccgtggctccgatcgagcgggtcaagctgctgctgcaggtccagcacgccagcaagcagatcgccgccgacaagcagtacaagggcatcgtggactgcattgtccgcatccccaaggagcagggcgtgctgtccttctggaggggcaaccttgccaacgtcattcgctacttccccactcaagccctcaacttcgccttcaaggataagtacaagcagatcttcctggggggcgtggacaagcacacgcagttctggaggtactttgcgggcaacctggcctccggcggtgcggccggcgcgacctccctctgcttcgtgtacccgctggatttcgccagaacccgcctggcagcggacgtgggaaagtcaggcacagagcgcgagttccgaggcctgggagactgcctggtgaagatcaccaagtccgacggcatccggggcctgtaccagggcttcagtgtctccgtgcagggcatcatcatctaccgggcggcctacttcggcgtgtacgatacggccaagggcatgctccccgaccccaagaacacgcacatcgtggtgagctggatgatcgcgcagaccgtgacggccgtggccggcgtggtgtcctaccccttcgacacggtgcggcggcgcatgatgatgcagtccgggcgcaaaggagctgacatcatgtacacgggcaccgtcgactgttggaggaagatcttcagagatgaggggggcaaggccttcttcaagggtgcgtggtccaacgtcctgcggggcatggggggcgccttcgtgctggtcctgtacgacgagctcaagaaggtgatctaagggccgcggcctcctccacacacacacacacaccaggggaaccaagagaaccacgtagaatcctcaaccgtgcggaccatcaaccttcgagaaattccagttgtctttttcccagccgcatcctgcctgtagatggccggggaaggctctagaaaaggggcgcattgcgatccaaccatcggcagccgattccgtgtcttgatcacggggtgggagggaaccgtggcgtccctgcgtggggcccatgggtgagacactccagtactgagacctagagtccagatgcttgtaggagccaagtcgtgttctaagtatttatttaaaacaaaagaatcacgttttcccatttgtacttcagcgctagcccctgttttgcacagccgagtactggcgagtatgttctatgttgggcctcctgctgcaaaacaataaacagaggacgcagaggtc

SEQ ID NO: 183380 - DNA, 1648 bp, Homo sapiens
  Payload ID: 16131
  Gene Symbol: SLC25A1
  Gene Name: solute carrier family 25 (mitochondrial carrier
  citrate transporter), member 1
  Uniprot ID: P53007
  ENST ID: ENST00000215882
  CDS Start-End: 158-1093
ggggcctggctcggaccacgcggggcgggacctggagctgacgcggccgccccgcccctgggaccataaccggccgccgccgccaccgcggaccgagcgcggagttctggagtctcggacccgaagccgccacagggcgccccgcctcccgcccgccatgcccgcgccccgcgccccgcgcgctctggcggccgccgcgcccgcgtccgggaaggccaagctgacgcacccggggaaggcgatcctggcaggcggcctggcgggtggcatcgagatctgcatcaccttccccaccgagtacgtgaagacgcagctgcagctggacgagcgctcgcacccgccgcggtaccggggcatcggggactgcgtgcggcagacggttcgcagccatggcgtcctgggcctgtaccgcggccttagctccctgctctacggttccatccccaaggcggccgtcaggtttggaatgttcgagttcctcagcaaccacatgcgggatgcccagggacggctggacagcacgcgtgggctgctgtgcggcctgggcgctggcgtggccgaggccgtggtggtcgtgtgccccatggagaccatcaaggtgaagttcatccacgaccagacctccccaaaccccaagtacagaggattcttccacggggttagggagattgtgcgggaacaagggctgaaggggacgtaccagggcctcacagccactgtcctgaagcagggctcgaaccaggccatccgcttcttcgtcatgacctccctgcgcaactggtaccgaggggacaaccccaacaagcccatgaaccctctgatcactggggtcttcggagctattgcaggcgcagccagtgtctttggaaacactcctctggatgtgattaagacccggatgcagggcctggaggcgcacaaataccggaacacgtgggactgcggcttgcagatcctgaagaaggaggggctcaaggcattctacaagggcactgtcccccgcctgggccgggtctgcctggatgtggccatagtgtttgtcatctatgatgaagtggtgaagctgctcaacaaagtgtggaagacggactaagcctagagaggccgcaaggggaccgccccaggcaccgccagagtgtcctgctacctttgtctcacgattccagtgcagtagtgccaaaaggccccttcccacgtccctcgagctctgtagcctggtctgtgcattgtggctgtcaaatccatgtgtcccccctgtggtctgtgtgtgacaccaccactgtgtcccagtgtctggcccagccatggctggatgtgcatctggcctatgaccctgtgcctgtgtttcatgttctgtgtcacgtgaccctgtgccccgcctcccggggtgcccgtgtggcctgggtcctcggccctgtagccctggcccggtcccagtccggtgccttccaccctgccctggcctaccacagctgcctccgggcctcggcctggcttcaccgcattccaggggctgcagccccctgcttctcccgccattggccttaactggccctcgggccctctctccgccccggacagggtggcacccaccactctcaggaccaccctgccaaggcagaataaaccggatcctgttgcagcctcc

SEQ ID NO: 183381 - DNA, 1514 bp, Homo sapiens
  Payload ID: 16131
  Gene Symbol: SLC25A1
  Gene Name: solute carrier family 25 (mitochondrial carrier
  citrate transporter), member 1
  ENST ID: ENST00000451283
  CDS Start-End: 351-977
gctgaggccccgccccacttccgggttgggccgtgggctggggagtcgtggaggcgcggtcctggtccccacccggcgcgctgggactcgcccgcctcccgtctgtcaccccctgcgcctcgccgggacaacggggcggcctggcgggtggcatcgagatctgcatcaccttccccaccgagtacgtgaagacgcagctgcagctggacgagcgctcgcacccgccgcggtaccggggcatcggggactgcgtgcggcagacggttcgcagccatggcgtcctgggcctgtaccgcggccttagctccctgctctacggttccatccccaaggcggccgtcaggtttggaatgttcgagttcctcagcaaccacatgcgggatgcccagggacggctggacagcacgcgtgggctgctgtgcggcctgggcgctggcgtggccgaggccgtggtggtcgtgtgccccatggagaccatcaaggtgaagttcatccacgaccagacctccccaaaccccaagtacagaggattcttccacggggttagggagattgtgcgggaacaagggctgaaggggacgtaccagggcctcacagccactgtcctgaagcagggctcgaaccaggccatccgcttcttcgtcatgacctccctgcgcaactggtaccgaggggacaaccccaacaagcccatgaaccctctgatcactggggtcttcggagctattgcaggcgcagccagtgtctttggaaacactcctctggatgtgattaagacccggatgcagggcctggaggcgcacaaataccggaacacgtgggactgcggcttgcagatcctgaagaaggaggggctcaaggcattctacaagggcactgtcccccgcctgggccgggtctgcctggatgtggccatagtgtttgtcatctatgatgaagtggtgaagctgctcaacaaagtgtggaagacggactaagcctagagaggccgcaaggggaccgccccaggcaccgccagagtgtcctgctacctttgtctcacgattccagtgcagtagtgccaaaaggccccttcccacgtccctcgagctctgtagcctggtctgtgcattgtggctgtcaaatccatgtgtcccccctgtggtctgtgtgtgacaccaccactgtgtcccagtgtctggcccagccatggctggatgtgcatctggcctatgaccctgtgcctgtgtttcatgttctgtgtcacgtgaccctgtgccccgcctcccggggtgcccgtgtggcctgggtcctcggccctgtagccctggcccggtcccagtccggtgccttccaccctgccctggcctaccacagctgcctccgggcctcggcctggcttcaccgcattccaggggctgcagccccctgcttctcccgccattggccttaactggccctcgggccctctctccgccccggacagggtggcacccaccactctcaggaccaccctgccaaggcagaataaaccg

SEQ ID NO: 183382 - DNA, 1946 bp, Homo sapiens
  Payload ID: 16132
  Gene Symbol: SLC25A10
  Gene Name: solute carrier family 25 (mitochondrial carrier
  dicarboxylate transporter), member 10
  Uniprot ID: Q9UBX3
  ENST ID: ENST00000331531
  CDS Start-End: 121-1011
cgcgcgggcggcgctttgaaccgggcgcggggcgcggggcgcggggcgctgcggccggtacacgccggggtagggccggggtcgggttgtggtcgggccgggattgggctctcctgggccatggcagccgaggcgcgcgtgtcgcgctggtacttcggggggctggcctcctgcggggccgcctgctgcacgcacccgctggacctgctcaaggtgcatctgcagacgcagcaggaggtgaagctgcgcatgacgggcatggcgctgcgggtggtgcgtaccgacggcatcctggcactctacagcggcctgagcgcctcgctgtgcagacagatgacctactccctgactcggttcgccatctacgagactgtgcgggaccgtgtggccaagggcagccaggggcctctccccttccacgagaaggtgttgctgggctccgtcagcggtttagctggaggcttcgtggggacgcccgcagacttggtcaacgtcaggatgcagaacgacgtgaagctgccccagggtcagcggcgcaactacgcccatgcgctggatggcctgtaccgcgtagctcgtgaagagggtctcaggagactgttctcgggtgcaaccatggcatccagccgaggggccttagtcactgtgggccagctgtcctgctacgaccaggccaagcagctggtccttagcaccgggtacctctctgacaacatcttcactcactttgtcgccagctttattgcagccgctggtgacgagccccctcctcagggtggatgtgccacgttcctgtgccagcccctggatgtgctgaagactcgcctgatgaactccaagggggagtatcagggcgttttccactgcgccgtggagacagcgaagctcgggcctctggccttttacaagggcctcgtcccagctggcatccgcctcatcccccacaccgtgctcacttttgtgtttctggaacagctacgcaaaaactttggcatcaaagtgccatcctgaccagccgtgggaatggctgggctgccaggccagacacgctaggttcttccaaagagtcccaagcccagcacctgctcctggggccacgacctccctggccgtggccacccgtcctccgcagcaggcccctgctgtccccccacctgctggctgagctcctcctggcctcgtcccctctcagctgtagctgcaccacccccgctctggctaccaggctctcccggctgggcactgcgtggccttgcccctctcccgctggcagctcctcaggggaacaggggctaccagaggctgatttctcccctctcctgggccaggggaggggtattatccctgcctcctgcccccgatgcccaaagcagcatcttccagcactttccatcgaggacttgggtggcagagtgtgggtgcagcctggctgttgctcacccaagtgctagctctgcacttcgtgtctgctgagagcaaccagaccttccatgtcctcgggcagctgcaactccccgcgagaccccgcagctgggtgggatgaacaagcaacgcagaccacaagcgagtgcctgggagggagtggcccagggtggttctggagccattgtgggtgagggtcgagggccaccgaggtcccgcgcaccgctgcctgccctgcagtggctttaacagttagttttgccaaagcctctccactcaccagcaggcggtctctgtcttcagggattgtgcctgcgtccctcgggcacctgggcccccccgcttggctccctgggggaatggcccaggcgggccgcggttcctccttagggccttctccccgacaaggagtccgacggggcggatgctgcatcctctgcctccctggtcgctgggcttcaccccacctgggaagggcagtgtgctctgtgggggctgcaatcaataaatgccgggagctgcca

SEQ ID NO: 183383 - DNA, 1885 bp, Homo sapiens
  Payload ID: 16132
  Gene Symbol: SLC25A10
  Gene Name: solute carrier family 25 (mitochondrial carrier
  dicarboxylate transporter), member 10
  Uniprot ID: Q9UBX3
  ENST ID: ENST00000350690
  CDS Start-End: 87-950
cggggcgcggggcgctgcggccggtacacgccggggtagggccggggtcgggttgtggtcgggccgggattgggctctcctgggccatggcagccgaggcgcgcgtgtcgcgctggtacttcggggggctggcctcctgcggggccgcctgctgcacgcacccgctggacctgctcaaggtgcatctgcagacgcagcaggaggtgaagctgcgcatgacgggcatggcgctgcgggtggtgcgtaccgacggcatcctggcactctacagcggcctgagcgcctcgctgtgcagacagatgacctactccctgactcggttcgccatctacgagactgtgcgggaccgtgtggccaagggcagccaggggcctctccccttccacgagaaggtgttgctgggctccgtcagcggtttagctggaggcttcgtggggacgcccgcagacttggtcaacgtcaggatgcagaacgacgtgaagctgccccagggtcagcggcgcaactacgcccatgcgctggatggcctgtaccgcgtagctcgtgaagagggtctcaggagactgttctcgggtgcaaccatggcatccagccgaggggccttagtcactgtgggccagctgtcctgctacgaccaggccaagcagctggtccttagcaccgggtacctctctgacaacatcttcactcactttgtcgccagctttattgcaggtggatgtgccacgttcctgtgccagcccctggatgtgctgaagactcgcctgatgaactccaagggggagtatcagggcgttttccactgcgccgtggagacagcgaagctcgggcctctggccttttacaagggcctcgtcccagctggcatccgcctcatcccccacaccgtgctcacttttgtgtttctggaacagctacgcaaaaactttggcatcaaagtgccatcctgaccagccgtgggaatggctgggctgccaggccagacacgctaggttcttccaaagagtcccaagcccagcacctgctcctggggccacgacctccctggccgtggccacccgtcctccgcagcaggcccctgctgtccccccacctgctggctgagctcctcctggcctcgtcccctctcagctgtagctgcaccacccccgctctggctaccaggctctcccggctgggcactgcgtggccttgcccctctcccgctggcagctcctcaggggaacaggggctaccagaggctgatttctcccctctcctgggccaggggaggggtattatccctgcctcctgcccccgatgcccaaagcagcatcttccagcactttccatcgaggacttgggtggcagagtgtgggtgcagcctggctgttgctcacccaagtgctagctctgcacttcgtgtctgctgagagcaaccagaccttccatgtcctcgggcagctgcaactccccgcgagaccccgcagctgggtgggatgaacaagcaacgcagaccacaagcgagtgcctgggagggagtggcccagggtggttctggagccattgtgggtgagggtcgagggccaccgaggtcccgcgcaccgctgcctgccctgcagtggctttaacagttagttttgccaaagcctctccactcaccagcaggcggtctctgtcttcagggattgtgcctgcgtccctcgggcacctgggcccccccgcttggctccctgggggaatggcccaggcgggccgcggttcctccttagggccttctccccgacaaggagtccgacggggcggatgctgcatcctctgcctccctggtcgctgggcttcaccccacctgggaagggcagtgtgctctgtgggggctgcaatcaataaatgccgggagctgcca

SEQ ID NO: 183384 - DNA, 1911 bp, Homo sapiens
  Payload ID: 16132
  Gene Symbol: SLC25A10
  Gene Name: solute carrier family 25 (mitochondrial carrier
  dicarboxylate transporter), member 10
  ENST ID: ENST00000545862
  CDS Start-End: 192-1412
aatcgcagggggcgtggcctagcggtcccgcccccggggcgcgcgcgcgcattggctgtgcggggtgcgggcgcgcgggcggcgctttgaaccgggcgcggggcgcggggcgcggggcgctgcggccggtacacgccggggtagggccggggtcgggttgtggtcgggccgggattgggctctcctgggccatggcagccgaggcgcgcgtgtcgcgctggtacttcggggggctggcctcctgcggggccgcctgctgcacgcacccgctggacctgctcaaggtgcatctgcagacgcagcaggaggtgaagctgcgcatgacgggcatggcgctgcgggtggtgcgtaccgacggcatcctggcactctacagcggcctgagcgcctcgctgtgcagacagatgacctactccctgactcggttcgccatctacgagactgtgcgggaccgtgtggccaagggcagccaggggcctctccccttccacgagaaggtgttgctgggctccgtcagcggtttagctggaggcttcgtggggacgcccgcagacttggtcaacgtcaggatgcagaacgacgtgaagctgccccagggtcagcggcgcaactacgcccatgcgctggatggcctgtaccgcgtagctcgtgaagagggtctcaggagactgttctcgggtgcaaccatggcatccagccgaggggccttagtcactgtgggccagctttattgcaggtggatgtgccacgttcctgtgccagcccctggatgtgctgaagactcgcctgatgaactccaagggggagtatcagggcgttttccactgcgccgtggagacagcgaagctcgggcctctggccttttacaagggcctcgtcccagctggcatccgcctcatcccccacaccgtgctcacttttgtgtttctggaacagctacgcaaaaactttggcatcaaagtgccatcctgaccagccgtgggaatggctgggctgccaggccagacacgctaggttcttccaaagagtcccaagcccagcacctgctcctggggccacgacctccctggccgtggccacccgtcctccgcagcaggcccctgctgtccccccacctgctggctgagctcctcctggcctcgtcccctctcagctgtagctgcaccacccccgctctggctaccaggctctcccggctgggcactgcgtggccttgcccctctcccgctggcagctcctcaggggaacaggggctaccagaggctgatttctcccctctcctgggccaggggaggggtattatccctgcctcctgcccccgatgcccaaagcagcatcttccagcactttccatcgaggacttgggtggcagagtgtgggtgcagcctggctgttgctcacccaagtgctagctctgcacttcgtgtctgctgagagcaaccagaccttccatgtcctcgggcagctgcaactccccgcgagaccccgcagctgggtgggatgaacaagcaacgcagaccacaagcgagtgcctgggagggagtggcccagggtggttctggagccattgtgggtgagggtcgagggccaccgaggtcccgcgcaccgctgcctgccctgcagtggctttaacagttagttttgccaaagcctctccactcaccagcaggcggtctctgtcttcagggattgtgcctgcgtccctcgggcacctgggcccccccgcttggctccctgggggaatggcccaggcgggccgcggttcctccttagggccttctccccgacaaggagtccgacggggcggatgctgcatcctctgcctccctggtcgctgggcttcaccccacctgggaagggcagtgtgctctgtgggggctgcaatcaataaatgccgggagctgccacatc

SEQ ID NO: 183385 - DNA, 726 bp, Homo sapiens
  Payload ID: 16132
  Gene Symbol: SLC25A10
  Gene Name: solute carrier family 25 (mitochondrial carrier
  dicarboxylate transporter), member 10
  ENST ID: ENST00000574884
  CDS Start-End: 1-340
gcagacgcagcaggaggtgaagctgcgcatgacgggcatggcgctgcgggtggtgcgtaccgacggcatcctggcactctacagcggcctgagcgcctcgctgtgcagacagatgacctactccctgactcggttcgccatctacgagactgtgcgggaccgtgtggccaagggcagccaggggcctctccccttccacgagaaggtgttgctgggctccgtcagcggtttagctggaggcttcgtggggacgcccgcagacttggtcaacgtcaggatgcagaacgacgtgaagctgccccagggtcagcggcgcaaggagagatcttcaggcccatgaggcctctgcttcctcgagaacccccggcctgcctcggggcctgggaggaccctctgtgggagccggtggtcagggggagtctcatgtggtcattctgtgtccccggcagctacgcccatgcgctggatggcctgtaccgcgtagctcgtgaagagggtctcaggagactgttctcgggtgcaaccatggcatccagccgaggggccttagtcactgtgggccagctgtcctgctacgaccaggccaagcagctggtccttagcaccgggtacctctctgacaacatcttcactcactttgtcgccagctttattgcaggtggatgtgccacgttcctgtgccagcccctggatgtgctgaagactcgcctgatgaactccaagggg

SEQ ID NO: 183386 - DNA, 1523 bp, Homo sapiens
  Payload ID: 16132
  Gene Symbol: SLC25A10
  Gene Name: solute carrier family 25 (mitochondrial carrier
  dicarboxylate transporter), member 10
  ENST ID: ENST00000574129
  CDS Start-End: 164-283
cgcccccggggcgcgcgcgcgcattggctgtgcggggtgcgggcgcgcgggcggcgctttgaaccgggcgcggggcgcggggcgcggggcgctgcggccggtacacgccggggtagggccggggtcgggttgtggtcgggccgggattgggctctcctgggccatggcagccgaggcgcgcgtgtcgcgctggtacttcggggggctggcctcctgcggggccgcctgctgcacgcacccgctggacctgctcaagggacagccaaggggcgttgttttctgaccgtgtcttgccacagagaacaaagaagaaagggcctgaggctttgcacagtctgcccagcaggccctgccctgtgaacctggctgtggtcactgggcagccgcctgtctaggggacctttattttagcagcctgtccaggggacttgtattccagcagcctttgaggggactggctttactaatgagcaacaatgctggtcgctgcgtgaaggccaggtgcatctgcagacgcagcaggaggtgaagctgcgcatgacgggcatggcgctgcgggtggtgcgtaccgacggcatcctggcactctacagcggcctgagcgcctcgctgtgcagacagatgacctactccctgactcggttcgccatctacgagactgtgcgggaccgtgtggccaagggcagccaggggcctctccccttccacgagaaggtgttgctgggctccgtcagcggtttagctggaggcttcgtggggacgcccgcagacttggtcaacgtcaggatgcagaacgacgtgaagctgccccagggtcagcggcgcaactacgcccatgcgctggatggcctgtaccgcgtagctcgtgaagagggtctcaggagactgttctcgggtgcaaccatggcatccagccgaggggccttagtcactgtgggccagctgtcctgctacgaccaggccaagcagctggtccttagcaccgggtacctctctgacaacatcttcactcactttgtcgccagctttattgcaggtggatgtgccacgttcctgtgccagcccctggatgtgctgaagactcgcctgatgaactccaagggggagtatcagggcgttttccactgcgccgtggagacagcgaagctcgggcctctggccttttacaagggcctcgtcccagctggcatccgcctcatcccccacaccgtgctcacttttgtgtttctggaacagctacgcaaaaactttggcatcaaagtgccatcctgaccagccgtgggaatggctgggctgccaggccagacacgctaggttcttccaaagagtcccaagcccagcacctgctcctggggccacgacctccctggccgtggccacccgtcctccgcagcaggcccctgctgtccccccacctgctggctgagctcctcctggcctcgtcccctctcagctgtagctgcaccacccccgctctggctaccaggctctcccggctgggcactgcgtggccttgcccctct

SEQ ID NO: 183387 - DNA, 1586 bp, Homo sapiens
  Payload ID: 16133
  Gene Symbol: SLC25A15
  Gene Name: solute carrier family 25 (mitochondrial carrier
  ornithine transporter) member 15
  Uniprot ID: Q9Y619
  ENST ID: ENST00000338625
  CDS Start-End: 237-1142
gggcgctcctgagcttcgcggggccgcagtccgggatgcctgcgcgaagggaggggcgaagggccggccgttgccgacgtgggtgttaagtggccgccccagccggcgacccggagccgagagcgggcggcggagcctgagctggacgcggccacgccggcgcggcgggatatgtggtgcctgtcataagctccagagagctgccttccacaagaccagcagaagagtgggcaaacatgaaatccaatcctgctatccaggctgccattgacctcacagcgggggctgcaggaggtacagcatgtgtactgaccgggcagccctttgacacaatgaaagtgaagatgcagacgttccctgacctgtaccggggcctcaccgactgctgcctgaagacttactcccaggtgggcttccgtggcttctacaagggtaccagtccagcactaatcgccaacatcgctgagaactcagtcctcttcatgtgctacggcttctgccagcaggtggtgcggaaagtggctggattggacaagcaggcaaagctgagtgatctgcagaatgcagccgccggttccttcgcctctgcctttgctgcactggtgctctgccccacggagctcgtgaagtgccggctgcagaccatgtatgagatggagacatcagggaagatagccaagagccagaatacagtgtggtctgtcatcaaaagtattcttaggaaagatggccccttggggttctaccatggactctcaagcactttacttcgagaagtaccaggctatttcttcttcttcggtggctatgaactgagccggtccttttttgcatcagggagatcaaaagatgaattaggccctgtacctttgatgttaagtggtggagttggtgggatttgcctctggcttgcggtatacccagtggattgtatcaaatccagaattcaagttctttccatgtctggaaaacaggcaggatttatcagaacctttataaatgttgtgaaaaatgaaggaataacggccttatattctggactgaaacctactatgattcgagcattccctgccaatggagcactctttttggcctacgaatatagcaggaagttgatgatgaaccagttggaagcatactgaagtgtcttggtgggcctgagccaagcacaggtgtttgaggactacagttcatctcagggtttcttggagtacaagaccagtgtgaagttattctgatttcttgggaattttgctttttgtcttcccttctaccctacatcttaaactttatggaagaacctctattttgcatcatatcatttctgtccataattgtactgaaatagaaaagtgaccgctcttgctcttggtaaaatatagagtggtcagtagccttatgcacctaattcaaaaggtggaatatagttctgtcagggcttttacgtaaacctccacttgtacatgcaatttggacagttatgtgttgagggaaatacagtttggtaccttgtttatttcaaatatcagaaaaacccagaggtgatcatttctcatgaagatgcttataaatggttgcttaaccca

SEQ ID NO: 183388 - DNA, 468 bp, Homo sapiens
  Payload ID: 16133
  Gene Symbol: SLC25A15
  Gene Name: solute carrier family 25 (mitochondrial carrier
  ornithine transporter) member 15
  ENST ID: ENST00000417731
  CDS Start-End: 70-468
ggatatgtggtgcctgtcataagctccagagagctgccttccacaagaccagcagaagagtgggcaaacatgaaatccaatcctgctatccaggctgccattgacctcacagcgggggctgcaggaggtacagcatgtgtactgaccgggcagccctttgacacaatgaaagtgaagatgcagacgttccctgacctgtaccggggcctcaccgactgctgcctgaagacttactcccaggtgggcttccgtggcttctacaagggtaccagtccagcactaatcgccaacatcgctgagaactcagtcctcttcatgtgctacggcttctgccagcaggtggtgcggaaagtggctggattggacaagcaggcaaagctgagtacagtgtggtctgtcatcaaaagtattcttaggaaagatggccccttggggttctaccatggactctcaagcactttacttcga

SEQ ID NO: 183389 - DNA, 511 bp, Homo sapiens
  Payload ID: 16133
  Gene Symbol: SLC25A15
  Gene Name: solute carrier family 25 (mitochondrial carrier
  ornithine transporter) member 15
  ENST ID: ENST00000470509
  CDS Start-End: 70-243
ggatatgtggtgcctgtcataagctccagagagctgccttccacaagaccagcagaagagtgggcaaacatgaaatccaatcctgctatccaggctgccattgacctcacagcgggggctgcaggaggtacagcatgtgtactgaccgggcagccctttgacacaatgaaagtgaagatgcagacgttccctgacctgtaccggggcctcaccgactgctgcctgaagacttactcccagtgatctgcagaatgcagccgccggttccttcgcctctgcctttgctgcactggtgctctgccccacggagctcgtgaagtgccggctgcagaccatgtatgagatggagacatcagggaagatagccaagagccagaatacagtgtggtctgtcatcaaaagtattcttaggaaagatggccccttggggttctaccatggactctcaagcactttacttcgagaagtaccaggctatttcttcttcttcggtggctatgaactgagccgg

SEQ ID NO: 183390 - DNA, 1417 bp, Homo sapiens
  Payload ID: 16134
  Gene Symbol: SLC25A2
  Gene Name: solute carrier family 25 (mitochondrial carrier
  ornithine transporter) member 2
  Uniprot ID: Q9BXI2
  ENST ID: ENST00000239451
  CDS Start-End: 181-1086
cggagcgtagggttgagcggcttcccccgcactggggtgagagcccagaacaggcggtagagccaccccaccacccccaactccattccccgcgctcgctgcggctggacgtgaaaagccggtctcacgctctggggagttagtcgccttccactgggaccctcagacgagtgagcgaacatgaagtccggtcctggcatccaagccgccatcgacctcacagcgggggccgcaggggggacagcgtgtgtactgactgggcagcccttcgacacaataaaagtgaagatgcagacgttccctgacctgtacaagggcctcaccgactgcttcctgaagacatacgctcaagtgggtctccggggcttctacaagggcaccggcccggcacttatggcctacgtcgccgaaaactcggtcctcttcatgtgctacgggttctgccagcagtttgtcaggaaagtggctggaatggacaagcaggcaaagctgagtgatctccagactgcagccgcggggtccttcgcctctgcatttgctgcactggctctctgccccactgagcttgtgaagtgccggctacagaccatgtatgaaatggagatgtcagggaagatagcaaaaagccataatacaatttggtctgtcgtgaagggtatccttaaaaaggatggccccttgggcttctaccatggactctcgagtactctacttcaagaagtaccgggttatttctttttctttggtggctatgaactgagccgatcgttttttgcgtcagggagatcaaaagatgaactaggccctgtccatttgatgttaagtggtggagttgctggaatttgcctgtggcttgtcgtgttcccagtggattgtattaaatccagaattcaagttctttccatgtatgggaaacaggcaggatttattggtaccctcttaagtgttgtgagaaatgaaggaatagtagccttatattctggactgaaagctactatgattcgagcaatccctgccaatggggcactgtttgtggcctacgaatacagcaggaagatgatgatgaaacagttggaagcatactgaagtgtcttggtgaacctggatccgagtccatgagtttgaggactacagttcatcacagggttcagcagagtacaagaccactgtctaattttgacttcatgggaattttggttttatcttcccttcttctaccctaaatcttaactttatggaagggcctctattttacatcatataatttctgcccataattgtattgaaataggaaagttgctgctcttgcacttgctggaatgtacagggtgggctggttggccctatgtacctaatctgaaaaactaaatatcgttctgtcagggcctttgcataaagccatttgtgtgtacatgca

SEQ ID NO: 183391 - DNA, 1897 bp, Homo sapiens
  Payload ID: 16135
  Gene Symbol: SLC25A11
  Gene Name: solute carrier family 25 (mitochondrial carrier
  oxoglutarate carrier), member 11
  Uniprot ID: Q02978
  ENST ID: ENST00000225665
  CDS Start-End: 342-1286
aacttggcgagccgtactcactcgatctcgcgagaccttcaaacaaactcttctctattttcccgcgattctaattcggtgaaaacagcgcctttcctctggtttccaaatcagttacgccccttctcgcacgcttccatcaagctcctccttcagctccgccttactcccggccgcctttgcgctgcgcgcctgcgcccgcgccggcttccagcgggtgtcggacctgagagctggaggggcgtgcgcgcgccctcgctctgttgcgcgcgcggtgtcaccttgggcgcgagcggggccgcgcgcgcacgggacccggagccgagggccattgagtggcgatggcggcgacggcgagtgccggggccggcgggatagacgggaagccccgtacctcccctaagtccgtcaagttcctgtttgggggcctggccgggatgggagctacagtttttgtccagcccctggacctggtgaagaaccggatgcagttgagcggggaaggggccaagactcgagagtacaaaaccagcttccatgccctcaccagtatcctgaaggcagaaggcctgaggggcatttacactgggctgtcggctggcctgctgcgtcaggccacctacaccactacccgccttggcatctataccgtgctgtttgagcgcctgactggggctgatggtactccccctggctttctgctgaaggctgtgattggcatgaccgcaggtgccactggtgcctttgtgggaacaccagccgaagtggctcttatccgcatgactgccgatggccggcttccagctgaccagcgccgtggctacaaaaatgtgtttaacgccctgattcgaatcacccgggaagagggtgtcctcacactgtggcggggctgcatccctaccatggctcgggccgtcgtcgtcaatgctgcccagctcgcctcctactcccaatccaagcagttcttactggactcaggctacttctctgacaacatcttgtgccacttctgtgccagcatgatcagcggtcttgtcaccactgctgcctccatgcctgtggacattgccaagacccgaatccagaacatgcggatgattgatgggaagccggaatacaagaacgggctggacgtgctgttcaaagttgtccgctacgagggcttcttcagcctgtggaagggcttcacgccgtactatgcccgcctgggcccccacaccgtcctcaccttcatcttcttggagcagatgaacaaggcctacaagcgtctcttcctcagtggctgaagcggccgggggctcccactcgcctgctgcgcctatagccactgcgccctgggggcctgggctctgctgccctggacccctctatttatttcccttccacagtgtggtttcttcctctgcggtaaaggacttggtctgttctaccccctgctccagcttgccctgctcgtcctgatcctgtgatttctctgtccttggctattcttgcagggagctggaaaacttctgaggatttctggcctccccctgggttttagtttcagggcacacaggacagcagaagatcccctttgtcagtggggaaaccaaggcagagctgaggggacagggaggagcagaagccatcaagatggtcaaagggcctgcagagggagatgtggcccttcctccccctcattgaggacttaataaattggattgatgacaccagccccaaatctggagagtctggggggtggctaggagaggggaggagactggacaaagaagctggagaataggaactggagtttttaagaaaaattgttaaagaaaaagcagccgctggttttttgcaaatgctgtataaatctgtcatgccacagcagctgacagggccagaaaaactcaaa

SEQ ID NO: 183392 - DNA, 952 bp, Homo sapiens
  Payload ID: 16135
  Gene Symbol: SLC25A11
  Gene Name: solute carrier family 25 (mitochondrial carrier
  oxoglutarate carrier), member 11
  Uniprot ID: Q02978
  ENST ID: ENST00000544061
  CDS Start-End: 144-935
ccgcgccggcttccagcgggtgtcggacctgagagctggaggggcgtgcgcgcgccctcgctctgttgcgcgcgcggtgtcaccttgggcgcgagcggggccgcgcgcgcacgggacccggagccgagggccattgagtggcgatggcggcgacggcgagtgccggggccggcgggatagacgggaagccccgtacctcccctaagtccgtcaagttcctgtttgggggcctggccgggctgtcggctggcctgctgcgtcaggccacctacaccactacccgccttggcatctataccgtgctgtttgagcgcctgactggggctgatggtactccccctggctttctgctgaaggctgtgattggcatgaccgcaggtgccactggtgcctttgtgggaacaccagccgaagtggctcttatccgcatgactgccgatggccggcttccagctgaccagcgccgtggctacaaaaatgtgtttaacgccctgattcgaatcacccgggaagagggtgtcctcacactgtggcggggctgcatccctaccatggctcgggccgtcgtcgtcaatgctgcccagctcgcctcctactcccaatccaagcagttcttactggactcaggctacttctctgacaacatcttgtgccacttctgtgccagcatgatcagcggtcttgtcaccactgctgcctccatgcctgtggacattgccaagacccgaatccagaacatgcggatgattgatgggaagccggaatacaagaacgggctggacgtgctgttcaaagttgtccgctacgagggcttcttcagcctgtggaagggcttcacgccgtactatgcccgcctgggcccccacaccgtcctcaccttcatcttcttggagcagatgaacaaggcctacaagcgtctcttcctcagtggctgaagcggccgggggctccc

SEQ ID NO: 183393 - DNA, 893 bp, Homo sapiens
  Payload ID: 16135
  Gene Symbol: SLC25A11
  Gene Name: solute carrier family 25 (mitochondrial carrier
  oxoglutarate carrier), member 11
  ENST ID: ENST00000576951
  CDS Start-End: 4-893
gcgatggcggcgacggcgagtgccggggccggcgggatagacgggaagccccgtacctcccctaagatgggagctacagtttttgtccagcccctggacctggtgaagaaccggatgcagttgagcggggaaggggccaagactcgagagtacaaaaccagcttccatgccctcaccagtatcctgaaggcagaaggcctgaggggcatttacactgggctgtcggctggcctgctgcgtcaggccacctacaccactacccgccttggcatctataccgtgctgtttgagcgcctgactggggctgatggtactccccctggctttctgctgaaggctgtgattggcatgaccgcaggtgccactggtgcctttgtgggaacaccagccgaagtggctcttatccgcatgactgccgatggccggcttccagctgaccagcgccgtggctacaaaaatgtgtttaacgccctgattcgaatcacccgggaagagggtgtcctcacactgtggcggggctgcatccctaccatggctcgggccgtcgtcgtcaatgctgcccagctcgcctcctactcccaatccaagcagttcttactggactcaggctacttctctgacaacatcttgtgccacttctgtgccagcatgatcagcggtcttgtcaccactgctgcctccatgcctgtggacattgccaagacccgaatccagaacatgcggatgattgatgggaagccggaatacaagaacgggctggacgtgctgttcaaagttgtccgctacgagggcttcttcagcctgtggaagggcttcacgccgtactatgcccgcctgggcccccacaccgtcctcaccttcatcttcttggagcagatgaacaaggcctacaa

SEQ ID NO: 183394 - DNA, 2058 bp, Homo sapiens
  Payload ID: 16136
  Gene Symbol: SLC25A17
  Gene Name: solute carrier family 25 (mitochondrial carrier
  peroxisomal membrane protein, 34kDa), member 17
  ENST ID: ENST00000263255
  CDS Start-End: 83-274
gagctccggtgctcctttcctaactccactggctgcggcatctgtgggaaaagtgtggctgggtcttcgaggagccgcaccaatggcttccgtgctgtcctacgaaagcctggtccacgccgtggccggagccgtgggaagcgtgacagcaatgacagtgttttttcccctggatacagctagacttcgacttcaggttgatgagaaaagaaaatccaaaactacacacatggtgctcctggagatcattaaagaagaaggactgagtggttaatgtgttgctaacaactccactctgggtggtaaacaccagactgaagcttcaaggagcaaaatttaggaatgaagacattgtaccaacaaactacaaaggtatcattgatgcttttcatcagatcattcgcgatgaaggaatctcggctttatggaatggcacatttccctcattgctgttggtcttcaatcctgccatccagttcatgttttatgaaggtttaaaacggcagcttttaaagaaacggatgaagctttcttccttggatgtgttcatcattggtgcagtagccaaagcgattgccaccacggtgacctatcccctgcagacggtacagtcaattctgaggtttgggcgtcatagactaaacccagaaaacagaacattgggaagtcttcggaatattctctatcttcttcaccaacgagtaagacgttttggaataatgggactctacaaaggccttgaagccaaactgctgcagacagtcctcactgctgctctcatgttccttgtttatgagaaactgacagctgccaccttcacagttatggggctgaagcgtgcacaccaacactgagacgccttcccatgaaaaattccgaagatgctcaagagggaggtttcctcctgagtgaagagaagtgattctcccttgactctggctcctgccaccacaaatgttaccctcattggcttgaaaagcatccaagggtgcacagggagtatggccaactggacctgttgtcaccttaattgtcatgctggctggttggattttggggtggcagttggactaatgtgaaaaaaacattgctgaaaacctaaaaatgaaagtttgtgagtgtttattggttttcttaagagaaatggactattttgctctcatgtgtaatgttttctatttaaatctttcttaaatataccagctgttctctttccctgaactctcccccaggttctaggacaaatttaataacatgtaattctcctcaaatacttttgtatgtctcagtgttggtgttttcctccctaaaactaacattagggctgtgccacgggcatgactttatttttgttgggcttttttttccctgcttaaggagaggtgtcttttttggatatgagctatttattttgtgaaatgaaaattgttcacccaaatgattctcttataaactatttgtaaatgtcacttattcattagtgtttgacataatttttagaatatttattttgaatcaatcctttcattacgaaagacttgaagttttgtgtccattcttacaagccctggtcagtcaagtcccaataaatggtcagcacaaaaaagatattcttgaaaattgctctttattaaggtattacgttgagtttgcaaccagatgggaaaaatcacaaaaatgagaaggggagcagatatcttgttgaggtctggatattatctccctttataaacttggtgtaggccgtatattttgaaaataaacatctggttgaggttatttcatttggaaaccttccttagagtcctgttgctcagtgtggtccatcagacggtagtactgccacaagctgagagcttgctgggcacgcaacccagagtttctgaatcctgttccgtattttaacattcccaggtgattcacagccacattaaagttcaggagaccataggacccctgacccatgagaagaagtgattggtttcgattatagacatcaagataaagatttttctcaaaggaaagagattaatgtattaaaacaacctctgaaaaatc

SEQ ID NO: 183395 - DNA, 2405 bp, Homo sapiens
  Payload ID: 16136
  Gene Symbol: SLC25A17
  Gene Name: solute carrier family 25 (mitochondrial carrier
  peroxisomal membrane protein, 34kDa), member 17
  ENST ID: ENST00000402844
  CDS Start-End: 982-1659
gtttatccttggttagactgtatttcctatatataatattttgagataccttaaatcaaaactttatttcttcaattatctttaaatggattttagtaaaagacttctcttccttaggattttttctcttggttcttcagatcttgactagagccagacagttggatgtgtgcttttttactgagtttgttcattgcttcatttgttccactatttatttaacaaatgtttataaagtatataccatgtgtcaggcacattgttacaattctatctggtatttttttttaatcatttcaggactggtgaggaatattttaatatctcaagatggtgttaaattgggatcatatgttttcaaaaaagaagcacctggctcattgtattgttctactctgaggcaaccttggggggccaagatccccatccttaagcttgtaaggatcatgatgcttgtgaagctgtttcaggtgttttgtgacacttacctgatgcttgctgcctgcctatcctaatgctctcagcaaggaggaactcttcagcgagcttctagtctctgttaaggcacttttaaatgtcaccacctttccccctcctgtcactcattgtaccatatccatactcacttcaaaccgtgtgagctacttaagtaagagttgtaaattgtgtgttttatctgatattgtcatggacttagcatgttagctgtaagccactctcatctctaaagctgttacgttaaaattatatttaaagctatatcaaaattgctactttgaatggtatataaattgacaaatagattgcctgttgtacaaatgagggaacttattgctcttcatctggagagctgctgccgccagccattttgctatcagcaaagcttccaaatcgcttctaacagtagtggcttgtgttgtaccctggcacaaagagacaccttaccttaggtctcctaagaggtcagtgacagagatataaatggaatattggtatgtagctttaaagcagcaaagcttaaaagctgacattttgccttccctttttctctccatctttcttgttaaaggagtggttaatgtgttgctaacaactccactctgggtggtaaacaccagactgaagcttcaaggagcaaaatttaggaatgaagacattgtaccaacaaactacaaaggtatcattgatgcttttcatcagatcattcgcgatgaaggaatctcggctttatggaatggcacatttccctcattgctgttggtcttcaatcctgccatccagttcatgttttatgaaggtttaaaacggcagcttttaaagaaacggatgaagctttcttccttggatgtgttcatcattggtgcagtagccaaagcgattgccaccacggtgacctatcccctgcagacggtacagtcaattctgaggtttgggcgtcatagactaaacccagaaaacagaacattgggaagtcttcggaatattctctatcttcttcaccaacgagtaagacgttttggaataatgggactctacaaaggccttgaagccaaactgctgcagacagtcctcactgctgctctcatgttccttgtttatgagaaactgacagctgccaccttcacagttatggggctgaagcgtgcacaccaacactgagacgccttcccatgaaaaattccgaagatgctcaagagggaggtttcctcctgagtgaagagaagtgattctcccttgactctggctcctgccaccacaaatgttaccctcattggcttgaaaagcatccaagggtgcacagggagtatggccaactggacctgttgtcaccttaattgtcatgctggctggttggattttggggtggcagttggactaatgtgaaaaaaacattgctgaaaacctaaaaatgaaagtttgtgagtgtttattggttttcttaagagaaatggactattttgctctcatgtgtaatgttttctatttaaatctttcttaaatataccagctgttctctttccctgaactctcccccaggttctaggacaaatttaataacatgtaattctcctcaaatacttttgtatgtctcagtgttggtgttttcctccctaaaactaacattagggctgtgccacgggcatgactttatttttgttgggcttttttttccctgcttaaggagaggtgtcttttttggatatgagctatttattttgtgaaatgaaaattgttcacccaaatgattctcttataaactatttgtaaatgtcacttattcattagtgtttgacataatttttagaatatttattttgaatcaatcctttcattacgaaagacttgaagttttgtgtccattcttacaagccctggtcagtcaagtcccaataaatggtcagcac

SEQ ID NO: 183396 - DNA, 801 bp, Homo sapiens
  Payload ID: 16136
  Gene Symbol: SLC25A17
  Gene Name: solute carrier family 25 (mitochondrial carrier
  peroxisomal membrane protein, 34kDa), member 17
  ENST ID: ENST00000458600
  CDS Start-End: 152-289
gcgacccggaagtggttctagggcaggcgggcgggtttgagagggcggggattgcgactctcacaccctgagctccggtgctcctttcctaactccactggctgcggcatctgtgggaaaagtgtggctgggtcttcgaggagccgcaccaatggcttccgtgctgtcctacgaaagcctggtccacgccgtggccggagccgtgggaagcgtgacagcaatgacagtgttttttcccctggatacagctagacttcgacttcaggatttgttcaagttgaaattgtaaacctatgccagaacttgcatgaagagatgattgatgagaaaagaaaatccaaaactacacacatggtgctcctggagatcattaaagaagaaggactcctggcaccatatcgagggtggtttccagtgatttccagtctctgctgctccaattttgtctatttctacacttttaatagcctcaaagcactctgggtcaaaggtcaacattctaccactggaaaagatctggtagttgggtttgttgcaggagtggttaatgtgttgctaacaactccactctgggtggtaaacaccagactgaagcttcaaggagcaaaatttaggaatgaagacattgtaccaacaaactacaaaggtatcattgatgcttttcatcagatcattcgcgatgaaggaatctcggctttatggaatggcacatttccctcattgctgttggtcttcaatcctgccatccagttcatgttttatgaaggtttaaaacggcagcttttaaagaaacggatgaag

SEQ ID NO: 183397 - DNA, 641 bp, Homo sapiens
  Payload ID: 16136
  Gene Symbol: SLC25A17
  Gene Name: solute carrier family 25 (mitochondrial carrier
  peroxisomal membrane protein, 34kDa), member 17
  ENST ID: ENST00000426396
  CDS Start-End: 85-531
ctgagctccggtgctcctttcctaactccactggctgcggcatctgtgggaaaagtgtggctgggtcttcgaggagccgcaccaatggcttccgtgctgtcctacgaaagcctggtccacgccgtggccggagccgtgggaagcgtgacagcaatgacagtgttttttcccctggatacagctagacttcgacttcaggttgatgagaaaagaaaatccaaaactacacacatggtgctcctggagatcattaaagaagaaggactcctggcaccatatcgagggtggtttccagtgatttccagtctctgctgctccaattttgtctatttctacacttttaatagcctcaaagcactctgggtcaaaggtcaacattctaccactggaaaagatctggtagttgggtttgttgcagatgggggtctttctgtgttgcccaggctggtttcaaacccctggcctcaagagattcttctgcctcgaccttccaaagtgctaggattacaggagtggttaatgtgttgctaacaactccactctgggtggtaaacaccagactgaagcttcaaggagcaaaatttaggaatgaagacattgtaccaacaaactacaaaggtatcattgatgcttttcatcag

SEQ ID NO: 183398 - DNA, 1243 bp, Homo sapiens
  Payload ID: 16136
  Gene Symbol: SLC25A17
  Gene Name: solute carrier family 25 (mitochondrial carrier
  peroxisomal membrane protein, 34kDa), member 17
  ENST ID: ENST00000447566
  CDS Start-End: 103-234
gattgcgactctcacaccctgagctccggtgctcctttcctaactccactggctgcggcatctgtgggaaaagtgtggctgggtcttcgaggagccgcaccaatggcttccgtgctgtcctacgaaagcctggtccacgccgtggccggagccgtgcctggcaccatatcgagggtggtttccagtgatttccagtctctgctgctccaattttgtctatttctacacttttaatagcctcaaagcactctgggtcaaaggtcaacattctaccactggaaaagatctggtagttgggtttgttgcaggagtggttaatgtgttgctaacaactccactctgggtggtaaacaccagactgaagcttcaaggagcaaaatttaggaatgaagacattgtaccaacaaactacaaaggtatcattgatgcttttcatcagatcattcgcgatgaaggaatctcggctttatggaatggcacatttccctcattgctgttggtcttcaatcctgccatccagttcatgttttatgaaggtttaaaacggcagcttttaaagaaacggatgaagctttcttccttggatgtgttcatcattggtgcagtagccaaagcgattgccaccacggtgacctatcccctgcagacggtacagtcaattctgaggtttgggcgtcatagactaaacccagaaaacagaacattgggaagtcttcggaatattctctatcttcttcaccaacgagtaagacgttttggaataatgggactctacaaaggccttgaagccaaactgctgcagacagtcctcactgctgctctcatgttccttgtttatgagaaactgacagctgccaccttcacagttatggggctgaagcgtgcacaccaacactgagacgccttcccatgaaaaattccgaagatgctcaagagggaggtttcctcctgagtgaagagaagtgattctcccttgactctggctcctgccaccacaaatgttaccctcattggcttgaaaagcatccaagggtgcacagggagtatggccaactggacctgttgtcaccttaattgtcatgctggctggttggattttggggtggcagttggactaatgtgaaaaaaacattgctgaaaacctaaaaatgaaagtttgtgagtgtttattggttttcttaagagaaatggactattttgctctcatgtgtaatgttttctatttaaatctttcttaaatata

SEQ ID NO: 183399 - DNA, 2262 bp, Homo sapiens
  Payload ID: 16136
  Gene Symbol: SLC25A17
  Gene Name: solute carrier family 25 (mitochondrial carrier
  peroxisomal membrane protein, 34kDa), member 17
  Uniprot ID: O43808
  ENST ID: ENST00000435456
  CDS Start-End: 135-1058
ctagggcaggcgggcgggtttgagagggcggggattgcgactctcacaccctgagctccggtgctcctttcctaactccactggctgcggcatctgtgggaaaagtgtggctgggtcttcgaggagccgcaccaatggcttccgtgctgtcctacgaaagcctggtccacgccgtggccggagccgtgggaagcgtgacagcaatgacagtgttttttcccctggatacagctagacttcgacttcaggttgatgagaaaagaaaatccaaaactacacacatggtgctcctggagatcattaaagaagaaggactcctggcaccatatcgagggtggtttccagtgatttccagtctctgctgctccaattttgtctatttctacacttttaatagcctcaaagcactctgggtcaaaggtcaacattctaccactggaaaagatctggtagttgggtttgttgcaggagtggttaatgtgttgctaacaactccactctgggtggtaaacaccagactgaagcttcaaggagcaaaatttaggaatgaagacattgtaccaacaaactacaaaggtatcattgatgcttttcatcagatcattcgcgatgaaggaatctcggctttatggaatggcacatttccctcattgctgttggtcttcaatcctgccatccagttcatgttttatgaaggtttaaaacggcagcttttaaagaaacggatgaagctttcttccttggatgtgttcatcattggtgcagtagccaaagcgattgccaccacggtgacctatcccctgcagacggtacagtcaattctgaggtttgggcgtcatagactaaacccagaaaacagaacattgggaagtcttcggaatattctctatcttcttcaccaacgagtaagacgttttggaataatgggactctacaaaggccttgaagccaaactgctgcagacagtcctcactgctgctctcatgttccttgtttatgagaaactgacagctgccaccttcacagttatggggctgaagcgtgcacaccaacactgagacgccttcccatgaaaaattccgaagatgctcaagagggaggtttcctcctgagtgaagagaagtgattctcccttgactctggctcctgccaccacaaatgttaccctcattggcttgaaaagcatccaagggtgcacagggagtatggccaactggacctgttgtcaccttaattgtcatgctggctggttggattttggggtggcagttggactaatgtgaaaaaaacattgctgaaaacctaaaaatgaaagtttgtgagtgtttattggttttcttaagagaaatggactattttgctctcatgtgtaatgttttctatttaaatctttcttaaatataccagctgttctctttccctgaactctcccccaggttctaggacaaatttaataacatgtaattctcctcaaatacttttgtatgtctcagtgttggtgttttcctccctaaaactaacattagggctgtgccacgggcatgactttatttttgttgggcttttttttccctgcttaaggagaggtgtcttttttggatatgagctatttattttgtgaaatgaaaattgttcacccaaatgattctcttataaactatttgtaaatgtcacttattcattagtgtttgacataatttttagaatatttattttgaatcaatcctttcattacgaaagacttgaagttttgtgtccattcttacaagccctggtcagtcaagtcccaataaatggtcagcacaaaaaagatattcttgaaaattgctctttattaaggtattacgttgagtttgcaaccagatgggaaaaatcacaaaaatgagaaggggagcagatatcttgttgaggtctggatattatctccctttataaacttggtgtaggccgtatattttgaaaataaacatctggttgaggttatttcatttggaaaccttccttagagtcctgttgctcagtgtggtccatcagacggtagtactgccacaagctgagagcttgctgggcacgcaacccagagtttctgaatcctgttccgtattttaacattcccaggtgattcacagccacattaaagttcaggagaccataggacccctgacccatgagaagaagtgattggtttcgattatagacatcaagataaagatttttctcaaaggaaagagattaatgtattaaaacaacctctgaaaaatc

SEQ ID NO: 183400 - DNA, 1060 bp, Homo sapiens
  Payload ID: 16136
  Gene Symbol: SLC25A17
  Gene Name: solute carrier family 25 (mitochondrial carrier
  peroxisomal membrane protein, 34kDa), member 17
  ENST ID: ENST00000420970
  CDS Start-End: 79-798
tccggtgctcctttcctaactccactggctgcggcatctgtgggaaaagtgtggctgggtcttcgaggagccgcaccaatggcttccgtgctgtcctacgaaagcctggtccacgccgtggccggagccgtgggaagcgtgacagcaatgacagtgttttttcccctggatacagctagacttcgacttcaggttgatgagaaaagaaaatccaaaactacacacatggtgctcctggagatcattaaagaagaaggactcctggcaccatatcgagggtggtttccagtgatttccagtctctgctgctccaattttgtctatttctacacttttaatagcctcaaagcactctgggtcaaaggtcaacattctaccactggaaaagatctggtagttgggtttgttgcaggagtggttaatgtgttgctaacaactccactctgggtggtaaacaccagactgaagcttcaaggagcaaaatttaggaatgaagacattgtaccaacaaactacaaaggtatcattgatgcttttcatcagatcattcgcgatgaaggaatctcggctttatggaatggcacatttccctcattgctgttggtcttcaatcctgccatccagttcatgttttatgaaggtttaaaacggcagcttttaaagaaacggatgaagctttcttccttggatgtgttcatcattggtgcagtagccaaagcgattgccaccacggtgacctatcccctgcagacggtacagtcaattctgaggttatttatccattcaaatatttactaagcatccacactgtgggaggacctgggcatgcagtggtaaataaaagtcataatccctgcccttatggagctagtggaagagagaatgaacagtttgggcgtcatagactaaacccagaaaacagaacattgggaagtcttcggaatattctctatcttcttcaccaacgagtaagacgttttggaataatgggactctacaaaggccttgaagccaaactgctgcagacagtcctcactgctgctctcatgttccttgttta

SEQ ID NO: 183401 - DNA, 561 bp, Homo sapiens
  Payload ID: 16136
  Gene Symbol: SLC25A17
  Gene Name: solute carrier family 25 (mitochondrial carrier
  peroxisomal membrane protein, 34kDa), member 17
  ENST ID: ENST00000412879
  CDS Start-End: 142-288
agtggttctagggcaggcgggcgggtttgagagggcggggattgcgactctcacaccctgagctccggtgctcctttcctaactccactggctgcggcatctgtgggaaaagtgtggctgggtcttcgaggagccgcaccaatggcttccgtgctgtcctacgaaagcctggtccacgccgtggccggagccgtgggaagcgtgacagcaatgacagtgttttttcccctggatacagctagacttcgacttcaggcctggcaccatatcgagggtggtttccagtgatttccagtctctgctgctccaattttgtctatttctacacttttaatagcctcaaagcactctgggtcaaaggtcaacattctaccactggaaaagatctggtagttgggtttgttgcaggagtggttaatgtgttgctaacaactccactctgggtggtaaacaccagactgaagcttcaaggagcaaaatttaggaatgaagacattgtaccaacaaactacaaaggtatcattgatgcttttcatcagatcattcgcgatgaaggaatct

SEQ ID NO: 183402 - DNA, 565 bp, Homo sapiens
  Payload ID: 16136
  Gene Symbol: SLC25A17
  Gene Name: solute carrier family 25 (mitochondrial carrier
  peroxisomal membrane protein, 34kDa), member 17
  ENST ID: ENST00000434185
  CDS Start-End: 290-565
aggcgggcgggtttgagagggcggggattgcgactctcacaccctgagctccggtgctcctttcctaactccactggctgcggcatctgtgggaaaagtgtggctgggtcttcgaggagccgcaccaatggcttccgtgctgtcctacgaaagcctggtccacgccgtggccggagccgtgttgtgactcccggccaggcacagtggctcacacctgtaatcccggcactttgggaggcctgaggcgggtggatcatgaggtcaggagatcgagaccatcctggctaacatgggaagcgtgacagcaatgacagtgttttttcccctggatacagctagacttcgacttcaggttgatgagaaaagaaaatccaaaactacacacatggtgctcctggagatcattaaagaagaaggactcctggcaccatatcgagggtggtttccagtgatttccagtctctgctgctccaattttgtctatttctacacttttaatagcctcaaagcactctgggtcaaaggtcaacattctaccactggaaaagatctggtagttgggttt

SEQ ID NO: 183403 - DNA, 734 bp, Homo sapiens
  Payload ID: 16136
  Gene Symbol: SLC25A17
  Gene Name: solute carrier family 25 (mitochondrial carrier
  peroxisomal membrane protein, 34kDa), member 17
  ENST ID: ENST00000430221
  CDS Start-End: 69-218
ctttcctaactccactggctgcggcatctgtgggaaaagtgtggctgggtcttcgaggagccgcaccaatggcttccgtgctgtcctacgaaagcctggtccacgccgtggccggagccgtgctagacttcgacttcaggcctggcaccatatcgagggtggtttccagtgatttccagtctctgctgctccaattttgtctatttctacacttttaatagcctcaaagcactctgggtcaaaggtcaacattctaccactggaaaagatctggtagttgggtttgttgcaggagtggttaatgtgttgctaacaactccactctgggtggtaaacaccagactgaagcttcaaggagcaaaatttaggaatgaagacattgtaccaacaaactacaaaggtatcattgatgcttttcatcagatcattcgcgatgaaggaatctcggctttatggaatggcacatttccctcattgctgttggtcttcaatcctgccatccagttcatgttttatgaaggtttaaaacggcagcttttaaagaaacggatgaagctttcttccttggatgtgttcatcattggtgcagtagccaaagcgattgccaccacggtgacctatcccctgcagacggtacagtcaattctgaggtttgggcgtcatagactaaacccagaaaacagaacattgggaagtcttcggaatattctctatcttcttcaccaacgagtaag

SEQ ID NO: 183404 - DNA, 533 bp, Homo sapiens
  Payload ID: 16136
  Gene Symbol: SLC25A17
  Gene Name: solute carrier family 25 (mitochondrial carrier
  peroxisomal membrane protein, 34kDa), member 17
  ENST ID: ENST00000449676
  CDS Start-End: 99-236
gcgactctcacaccctgagctccggtgctcctttcctaactccactggctgcggcatctgtgggaaaagtgtggctgggtcttcgaggagccgcaccaatggcttccgtgctgtcctacgaaagcctggtccacgccgtggccggagccgtgggaagcgtgacagcaatgacagtgttttttcccctggatacagctagacttcgacttcaggatttgttcaagttgaaattgtaaacctatgccagaacttgcatgaagagatgattgatgagaaaagaaaatccaaaactacacacatggtgctcctggagatcattaaagaagaaggactcctggcaccatatcgagggtggtttccagtgatttccagtctctgctgctccaattttgtctatttctacacttttaatagcctcaaagcactctgggtcaaaggtcaacattctaccactggaaaagatctggtagttgggtttgttgcaggagtggttaatgtgttgctaacaactccactctgggtggtaaacacca

SEQ ID NO: 183405 - DNA, 598 bp, Homo sapiens
  Payload ID: 16136
  Gene Symbol: SLC25A17
  Gene Name: solute carrier family 25 (mitochondrial carrier
  peroxisomal membrane protein, 34kDa), member 17
  ENST ID: ENST00000434193
  CDS Start-End: 90-227
acaccctgagctccggtgctcctttcctaactccactggctgcggcatctgtgggaaaagtgtggctgggtcttcgaggagccgcaccaatggcttccgtgctgtcctacgaaagcctggtccacgccgtggccggagccgtgggaagcgtgacagcaatgacagtgttttttcccctggatacagctagacttcgacttcaggatttgttcaagttgaaattgtaaacctatgccagaacttgcatgaagagatgagtaagattagctttcaatagtaattcaaagttgatgagaaaagaaaatccaaaactacacacatggtgctcctggagatcattaaagaagaaggactcctggcaccatatcgagggtggtttccagtgatttccagtctctgctgctccaattttgtctatttctacacttttaatagcctcaaagcactctgggtcaaaggtcaacattctaccactggaaaagatctggtagttgggtttgttgcaggagtggttaatgtgttgctaacaactccactctgggtggtaaacaccagactgaagcttcaaggagcaaaatttaggaatgaagacattgta

SEQ ID NO: 183406 - DNA, 593 bp, Homo sapiens
  Payload ID: 16136
  Gene Symbol: SLC25A17
  Gene Name: solute carrier family 25 (mitochondrial carrier
  peroxisomal membrane protein, 34kDa), member 17
  ENST ID: ENST00000443810
  CDS Start-End: 133-270
agggcaggcgggcgggtttgagagggcggggattgcgactctcacaccctgagctccggtgctcctttcctaactccactggctgcggcatctgtgggaaaagtgtggctgggtcttcgaggagccgcaccaatggcttccgtgctgtcctacgaaagcctggtccacgccgtggccggagccgtgggaagcgtgacagcaatgacagtgttttttcccctggatacagctagacttcgacttcaggatttgttcaagttgaaattgtaaacctatgccagaacttgcatgaagagatgagtaagattagctttcaatagtaattcaaagcctcaaagcactctgggtcaaaggtcaacattctaccactggaaaagatctggtagttgggtttgttgcaggagtggttaatgtgttgctaacaactccactctgggtggtaaacaccagactgaagcttcaaggagcaaaatttaggaatgaagacattgtaccaacaaactacaaaggtatcattgatgcttttcatcagatcattcgcgatgaaggaatctcggctttatggaatggcacatttccctcattgctgttgg

SEQ ID NO: 183407 - DNA, 749 bp, Homo sapiens
  Payload ID: 16136
  Gene Symbol: SLC25A17
  Gene Name: solute carrier family 25 (mitochondrial carrier
  peroxisomal membrane protein, 34kDa), member 17
  ENST ID: ENST00000427084
  CDS Start-End: 120-290
gggtttgagagggcggggattgcgactctcacaccctgagctccggtgctcctttcctaactccactggctgcggcatctgtgggaaaagtgtggctgggtcttcgaggagccgcaccaatggcttccgtgctgtcctacgaaagcctggtccacgccgtggccggagccgtgctagacttcgacttcaggttgatgagaaaagaaaatccaaaactacacacatggtgctcctggagatcattaaagaagaaggactcctggcaccatatcgagggtggtttccagtgatttccagtctctgctgctccaattttgtctatttctacacttttaatagcctcaaagcactctgggtcaaaggtcaacattctaccactggaaaagatctggtagttgggtttgttgcaggagtggttaatgtgttgctaacaactccactctgggtggtaaacaccagactgaagcttcaaggagcaaaatttaggaatgaagacattgtaccaacaaactacaaaggtatcattgatgcttttcatcagatcattcgcgatgaaggaatctcggctttatggaatggcacatttccctcattgctgttggtcttcaatcctgccatccagttcatgttttatgaaggtttaaaacggcagcttttaaagaaacggatgaagctttcttccttggatgtgttcatcattggtgcagtagccaaagcgattgccaccacggtgacctatcccctgcaga

SEQ ID NO: 183408 - DNA, 2060 bp, Homo sapiens
  Payload ID: 16136
  Gene Symbol: SLC25A17
  Gene Name: solute carrier family 25 (mitochondrial carrier
  peroxisomal membrane protein, 34kDa), member 17
  ENST ID: ENST00000544408
  CDS Start-End: 152-856
gcgacccggaagtggttctagggcaggcgggcgggtttgagagggcggggattgcgactctcacaccctgagctccggtgctcctttcctaactccactggctgcggcatctgtgggaaaagtgtggctgggtcttcgaggagccgcaccaatggcttccgtgctgtcctacgaaagcctggtccacgccgtggccggagccgtgggaagcgtgacagcaatgacagtgttttttcccctggatacagctagacttcgacttcagggagtggttaatgtgttgctaacaactccactctgggtggtaaacaccagactgaagcttcaaggagcaaaatttaggaatgaagacattgtaccaacaaactacaaaggtatcattgatgcttttcatcagatcattcgcgatgaaggaatctcggctttatggaatggcacatttccctcattgctgttggtcttcaatcctgccatccagttcatgttttatgaaggtttaaaacggcagcttttaaagaaacggatgaagctttcttccttggatgtgttcatcattggtgcagtagccaaagcgattgccaccacggtgacctatcccctgcagacggtacagtcaattctgaggtttgggcgtcatagactaaacccagaaaacagaacattgggaagtcttcggaatattctctatcttcttcaccaacgagtaagacgttttggaataatgggactctacaaaggccttgaagccaaactgctgcagacagtcctcactgctgctctcatgttccttgtttatgagaaactgacagctgccaccttcacagttatggggctgaagcgtgcacaccaacactgagacgccttcccatgaaaaattccgaagatgctcaagagggaggtttcctcctgagtgaagagaagtgattctcccttgactctggctcctgccaccacaaatgttaccctcattggcttgaaaagcatccaagggtgcacagggagtatggccaactggacctgttgtcaccttaattgtcatgctggctggttggattttggggtggcagttggactaatgtgaaaaaaacattgctgaaaacctaaaaatgaaagtttgtgagtgtttattggttttcttaagagaaatggactattttgctctcatgtgtaatgttttctatttaaatctttcttaaatataccagctgttctctttccctgaactctcccccaggttctaggacaaatttaataacatgtaattctcctcaaatacttttgtatgtctcagtgttggtgttttcctccctaaaactaacattagggctgtgccacgggcatgactttatttttgttgggcttttttttccctgcttaaggagaggtgtcttttttggatatgagctatttattttgtgaaatgaaaattgttcacccaaatgattctcttataaactatttgtaaatgtcacttattcattagtgtttgacataatttttagaatatttattttgaatcaatcctttcattacgaaagacttgaagttttgtgtccattcttacaagccctggtcagtcaagtcccaataaatggtcagcacaaaaaagatattcttgaaaattgctctttattaaggtattacgttgagtttgcaaccagatgggaaaaatcacaaaaatgagaaggggagcagatatcttgttgaggtctggatattatctccctttataaacttggtgtaggccgtatattttgaaaataaacatctggttgaggttatttcatttggaaaccttccttagagtcctgttgctcagtgtggtccatcagacggtagtactgccacaagctgagagcttgctgggcacgcaacccagagtttctgaatcctgttccgtattttaacattcccaggtgattcacagccacattaaagttcaggagaccataggacccctgacccatgagaagaagtgattggtttcgattatagacatcaagataaagatttttctcaaaggaaagagattaatgtattaaaacaacctctgaaaaatc

SEQ ID NO: 183409 - DNA, 2056 bp, Homo sapiens
  Payload ID: 16137
  Gene Symbol: SLC25A23
  Gene Name: solute carrier family 25 (mitochondrial carrier
  phosphate carrier), member 23
  Uniprot ID: Q9BV35
  ENST ID: ENST00000264088
  CDS Start-End: 124-1572
ggaggctgcggagccggcggccgcgggagctgaccctgcggggtcccggggggggagggggagccgcgaagcccccactgaggccgccgctgccgggcctcccctcccccccgggcgggcgccatgcgggggagcccgggcgacgcggagcggcggcagcgctggggtcgcctgttcgaggagctggacagtaacaaggatggccgcgtggacgtgcacgagttgcgccaggggctggccaggctgggcgggggcaacccagaccccggcgcccaacagggtatctcctctgagggtgatgctgacccagatggcgggctcgacctggaggaattttcccgctatctgcaggagcgggaacagcgtctgctgctcatgtttcacagtcttgaccggaaccaggatggtcacattgatgtctctgagatccaacagagtttccgagctctgggcatttccatctcgctggagcaggctgagaaaattttgcacagcatggaccgagacggcacaatgaccattgactggcaagaatggcgcgaccacttcctgttgcattcgctggaaaatgtggaggacgtgctgtatttctggaagcattccacgctctcttctgctgggttctctgcctggataaaagattctacggctgaacagaatcgttcaaaaaccacggtcttggccaggcgcagtggctcacacctaaaatcccagcactttgggaggccgaagtgggcggatcacgaggtcctggacattggcgagtgcctgacagtgccggacgagttctcaaagcaagagaagctgacgggcatgtggtggaaacagctggtggccggcgcagtggcaggtgccgtgtcacggacaggcacggcccctctggaccgcctcaaggtcttcatgcaggtccatgcctcaaagaccaaccggctgaacatccttggggggcttcgaagcatggtccttgagggaggcatccgctccctgtggcgcggcaatggtattaatgtactcaagattgcccccgagtcagctatcaagttcatggcctatgaacagatcaagagggccatcctggggcagcaggagacactgcatgtgcaggagcgcttcgtggctggctccctggctggtgccacagcccaaaccatcatttaccctatggaggtgctgaagacgcggctgaccttgcgccggacgggccagtataaggggctgctggactgcgccaggcgtatcctggagagggaggggccccgtgccttctaccgcggctacctccccaacgtgctgggcatcatcccctatgcgggcatcgacctggccgtctacgagactctgaagaactggtggcttcagcagtacagccacgactcggcagacccaggcatcctcgtgctcctggcctgcggtaccatatccagcacctgcggccagatagccagttacccgctggccctggtccggacccgcatgcaggcacaaggctggagtacagtggctcgatttcagatcactgcaacctctgccttccaggttcaagcgattctcctgcctcagcctccagagtagctggtattacaggatttcatcatgttgcccaggctcatctcgaactcgtggggtcaaggaattcgccagccttcagcctcccaacgtgctgggattacagccggtggtcatgccatgagcagccttatggagaggaccatgtggtaaggaactcagccaatagccatgtaactgagcttggaagaggatcttgctgtcctggccaacatctcactgcaattctatcagttgaattccctggatagtccaagctttgtggatccctccaccgaaacaactggatcccagtacctgaatcctgaatcttagactcttatacttcaaacactgatcacgggaacagccggctcagcggctcctgagttcctaatgctcagaatatgggtgagatgataaatgtttgttgtgttaagctgccaacctttggcgggggggtaattcgtcacatggcaacagctggctaatacatatatacctacatgta

SEQ ID NO: 183410 - DNA, 3425 bp, Homo sapiens
  Payload ID: 16137
  Gene Symbol: SLC25A23
  Gene Name: solute carrier family 25 (mitochondrial carrier
  phosphate carrier), member 23
  Uniprot ID: Q9BV35
  ENST ID: ENST00000301454
  CDS Start-End: 108-1514
gcggccgcgggagctgaccctgcggggtcccggggggggagggggagccgcgaagcccccactgaggccgccgctgccgggcctcccctcccccccgggcgggcgccatgcgggggagcccgggcgacgcggagcggcggcagcgctggggtcgcctgttcgaggagctggacagtaacaaggatggccgcgtggacgtgcacgagttgcgccaggggctggccaggctgggcgggggcaacccagaccccggcgcccaacagggtatctcctctgagggtgatgctgacccagatggcgggctcgacctggaggaattttcccgctatctgcaggagcgggaacagcgtctgctgctcatgtttcacagtcttgaccggaaccaggatggtcacattgatgtctctgagatccaacagagtttccgagctctgggcatttccatctcgctggagcaggctgagaaaattttgcacagcatggaccgagacggcacaatgaccattgactggcaagaatggcgcgaccacttcctgttgcattcgctggaaaatgtggaggacgtgctgtatttctggaagcattccacggtcctggacattggcgagtgcctgacagtgccggacgagttctcaaagcaagagaagctgacgggcatgtggtggaaacagctggtggccggcgcagtggcaggtgccgtgtcacggacaggcacggcccctctggaccgcctcaaggtcttcatgcaggtccatgcctcaaagaccaaccggctgaacatccttggggggcttcgaagcatggtccttgagggaggcatccgctccctgtggcgcggcaatggtattaatgtactcaagattgcccccgagtcagctatcaagttcatggcctatgaacagatcaagagggccatcctggggcagcaggagacactgcatgtgcaggagcgcttcgtggctggctccctggctggtgccacagcccaaaccatcatttaccctatggaggtgctgaagacgcggctgaccttgcgccggacgggccagtataaggggctgctggactgcgccaggcgtatcctggagagggaggggccccgtgccttctaccgcggctacctccccaacgtgctgggcatcatcccctatgcgggcatcgacctggccgtctacgagactctgaagaactggtggcttcagcagtacagccacgactcggcagacccaggcatcctcgtgctcctggcctgcggtaccatatccagcacctgcggccagatagccagttacccgctggccctggtccggacccgcatgcaggcacaagcctccatcgagggtggcccccagctgtccatgctgggtctgctacgtcacatcctgtcccaggagggcatgcggggcctctaccgggggatcgcccccaacttcatgaaggttattccagctgtgagcatctcctatgtggtctacgagaacatgaagcaggccttgggggtcacgtccaggtgagggacccggagcccgtccccccaatccctcaccccccacacctcagccactggagactgatgatccaaccacaggatccctactctttggccacgagatcccagtacccagatcctggatcctagactcctatgccccaaccattgggtcatgggatcccagcatccagatcctggatcctagactcctatgccccaaccactgggtcatgcgatccccacccttcagccactagatcccagatccccctgtaaccataactgtggatcccttacttcagcaactcaagtctgctaccctaaccacaagattcaagattatccacaccccagcccttaatccccatcccccaaatcactggatcctgcagccccacatcctaaggtggatcccacgcttccctgtgccccctactggatcctggacctctacgtcttaaccactggatcccacacaaatcagtgaatggatcccaacaccccaaccacaggagcacggattccctgtacctcaacacccagaccctgcctccctcaggcaccagatccagtgtcctagtgaaacgctggatcctagatccccaaccccagatccccatgcctcgagccctggatctccaagctcagctgctggattctggatgtcaacaaacctcaccactggatcctgacaaccacaatgcctggatcctggggcccccatcactggatcccagatcccctcactccacccactggattcctgcattggtttttggttttttgtttttttttaacctcgacactgggtctcagatccttctgctgactgccagatccctgcatttcaagcactacgccttccacccccaggcactggatcccagattcccaagccttcacccaccagattctggctcctaaaacaagtgcgggggccccagtggcacagcaagtggatcctggcaactgcagctgctggattccagattctgggtccccaatccctctgcccagtccctcaatgttgaaacctcatctcttgaaggcagatcctgatattccaaggcactgaatcccaagccctgaatccccggtttctgatctgaatcttccaggcgccgggtcccaaatgttcaggccccaagtctagatcctggcagcccagtcacagagtatcccacacacactggtgcccagagccggcttctcatgacatgaaattgcatggtcgagggagtctgtggggaaggaagcccaggtcctggctgcaacctgcacggatgctggattccccctcaccccacctctgcatggccaccccctcccagccctgtggggaaactgttccctggaaccactccactccctgcatccccacacttcacagcatcttccatccccctcccaccttctaggcgaatagtccccagagctgtgttcctccaaggggtccgaggaatcactcactcctggaggctggcaaggagacagtctgaggccagggacacatgaagggatgtccccaccccagcactatcagggcctccccaggcttccagagttgaaagccaggagaaaatcggcaaagaccacccttccctaaacccaagcacccaatgatgcaaaaaacaaaaacaaaaaaaaaccaccaaatccccaaattcattccagatctatttttctaccagagagaggagcaaagtcctcctcccctgcgcccttacattctgcacttcatagttggattctgagcttaggatcatctggagaccccatggagggacttggaaaggggaactgggatttggggaggggctggaggacttccgcacgcttccacctccttcgacctccactgcgccccacctccctgcctgtgtgtgttatttcaaaggaaaagaacaaaaggaataaattttctaagctcttt

SEQ ID NO: 183411 - DNA, 1424 bp, Homo sapiens
  Payload ID: 16137
  Gene Symbol: SLC25A23
  Gene Name: solute carrier family 25 (mitochondrial carrier
  phosphate carrier), member 23
  Uniprot ID: Q9BV35
  ENST ID: ENST00000334510
  CDS Start-End: 108-1424
gcggccgcgggagctgaccctgcggggtcccggggggggagggggagccgcgaagcccccactgaggccgccgctgccgggcctcccctcccccccgggcgggcgccatgcgggggagcccgggcgacgcggagcggcggcagcgctggggtcgcctgttcgaggagctggacagtaacaaggatggccgcgtggacgtgcacgagttgcgccaggggctggccaggctgggcgggggcaacccagaccccggcgcccaacagggtatctcctctgagggtgatgctgacccagatggcgggctcgacctggaggaattttcccgctatctgcaggagcgggaacagcgtctgctgctcatgtttcacagtcttgaccggaaccaggatggtcacattgatgtctctgagatccaacagagtttccgagctctgggcatttccatctcgctggagcaggctgagaaaattttgcacagcatggaccgagacggcacaatgaccattgactggcaagaatggcgcgaccacttcctgttgcattcgctggaaaatgtggaggacgtgctgtatttctggaagcattccacggtcctggacattggcgagtgcctgacagtgccggacgagttctcaaagcaagagaagctgacgggcatgtggtggaaacagctggtggccggcgcagtggcaggtgccgtgtcacggacaggcacggcccctctggaccgcctcaaggtcttcatgcaggtccatgcctcaaagaccaaccggctgaacatccttggggggcttcgaagcatggtccttgagggaggcatccgctccctgtggcgcggcaatggtattaatgtactcaagattgcccccgagtcagctatcaagttcatggcctatgaacagatcaagagggccatcctggggcagcaggagacactgcatgtgcaggagcgcttcgtggctggctccctggctggtgccacagcccaaaccatcatttaccctatggaggtgctgaagacgcggctgaccttgcgccggacgggccagtataaggggctgctggactgcgccaggcgtatcctggagagggaggggccccgtgccttctaccgcggctacctccccaacgtgctgggcatcatcccctatgcgggcatcgacctggccgtctacgagactctgaagaactggtggcttcagcagtacagccacgactcggcagacccaggcatcctcgtgctcctggcctgcggtaccatatccagcacctgcggccagatagccagttacccgctggccctggtccggacccgcatgcaggcacaagatgtgtcagtgtacaagacggacacggtccccaccctcatagagctcacaggccggagaggaaggaagatgctaaataaatcattctggaattaa

SEQ ID NO: 183412 - DNA, 1210 bp, Homo sapiens
  Payload ID: 16137
  Gene Symbol: SLC25A23
  Gene Name: solute carrier family 25 (mitochondrial carrier
  phosphate carrier), member 23
  ENST ID: ENST00000600682
  CDS Start-End: 1-709
gcaagagaagctgacgggcatgtggtggaaacagctggtggccggcgcagtggcaggtgccgtgtcacggacaggcacggcccctctggaccgcctcaaggtcttcatgcaggtccatgcctcaaagaccaaccggctgaacatccttggggggcttcgaagcatggtccttgagggaggcatccgctccctgtggcgcggcaatggtattaatgtactcaagattgcccccgagtcagctatcaagttcatggcctatgaacagatcaagagggccatcctggggcagcaggagacactgcatgtgcaggagcgcttcgtggctggctccctggctggtgccacagcccaaaccatcatttaccctatggagactctgaagaactggtggcttcagcagtacagccacgactcggcagacccaggcatcctcgtgctcctggcctgcggtaccatatccagcacctgcggccagatagccagttacccgctggccctggtccggacccgcatgcaggcacaagcctccatcgagggtggcccccagctgtccatgctgggtctgctacgtcacatcctgtcccaggagggcatgcggggcctctaccgggggatcgcccccaacttcatgaaggttattccagctgtgagcatctcctatgtggtctacgagaacatgaagcaggccttgggggtcacgtccaggtgagggacccggagcccgtccccccaatccctcaccccccacacctcagccactggagactgatgatccaaccacaggatccctactctttggccacgagatcccagtacccagatcctggatcctagactcctatgccccaaccattgggtcatgggatcccagcatccagatcctggatcctagactcctatgccccaaccactgggtcatgcgatccccacccttcagccactagatcccagatccccctgtaaccataactgtggatcccttacttcagcaactcaagtctgctaccctaaccacaagattcaagattatccacaccccagcccttaatccccatcccccaaatcactggatcctgcagccccacatcctaaggtggatcccacgcttccctgtgccccctactggatcctggacctctacgtcttaaccactggatcccacacaaatcagtgaatggatcccaacaccccaaccacaggagcacggatt

SEQ ID NO: 183413 - DNA, 526 bp, Homo sapiens
  Payload ID: 16137
  Gene Symbol: SLC25A23
  Gene Name: solute carrier family 25 (mitochondrial carrier
  phosphate carrier), member 23
  ENST ID: ENST00000601322
  CDS Start-End: 1-300
aatgtactcaagattgcccccgagtcagctatcaagttcatggcctatgaacagactctgaagaactggtggcttcagcagtacagccacgactcggcagacccaggcatcctcgtgctcctggcctgcggtaccatatccagcacctgcggccagatagccagttacccgctggccctggtccggacccgcatgcaggcacaaggttcaagcgattctcctgcctcagcctccagagtagctggtattacagccggtggtcatgccatgagcagccttatggagaggaccatgtggtaaggaactcagccaatagccatgtaactgagcttggaagaggatcttgctgtcctggccaacatctcactgcaattctatcagttgaattccctggatagtccaagctttgtggatccctccaccgaaacaactggatcccagtacctgaatcctgaatcttagactcttatacttcaaacactgatcacgggaacagccggctcagcggctcctgagttcctaatgc

SEQ ID NO: 183414 - DNA, 834 bp, Homo sapiens
  Payload ID: 16137
  Gene Symbol: SLC25A23
  Gene Name: solute carrier family 25 (mitochondrial carrier
  phosphate carrier), member 23
  ENST ID: ENST00000593600
  CDS Start-End: 1-834
tccgctccctgtggcgcggcaatggtattaatgtactcaagattgcccccgagtcagctatcaagttcatggcctatgaacagatcaagagggccatcctggggcagcaggagacactgcatgtgcaggagcgcttcgtggctggctccctggctggtgccacagcccaaaccatcatttaccctatggaggtgctgaagacgcggctgaccttgcgccggacgggccagtataaggggctgctggactgcgccaggcgtatcctggagagggaggggccccgtgccttctaccgcggctacctccccaacgtgctgggcatcatcccctatgcgggcatcgacctggccgtctacgagactctgaagaactggtggcttcagcagtacagccacgactcggcagacccaggcatcctcgtgctcctggcctgcggtaccatatccagcacctgcggccagatagccagttacccgctggccctggtccggacccgcatgcaggcacaagcctccatcgagggtggcccccagctgtccatgctgggtctgctacgtcacatcctgtcccaggagggcatgcggggcctctaccgggggatcgcccccaacttcatgaaggttattccagctgtgagcatctcctatgtggtctacgagaacatgaagcaggccttgggggtcacgtccaggagcacggattccctgtacctcaacacccagaccctgcctccctcaggcaccagatccagtgtcctagtgaaacgctggatcctagatccccaaccccagatccccatgcctcgagccctggatctccaagctcagctgctgg

SEQ ID NO: 183415 - DNA, 888 bp, Homo sapiens
  Payload ID: 16137
  Gene Symbol: SLC25A23
  Gene Name: solute carrier family 25 (mitochondrial carrier
  phosphate carrier), member 23
  ENST ID: ENST00000598908
  CDS Start-End: 1-649
gcaagagaagctgacgggcatgtggtggaaacagctggtggccggcgcagtggcaggtgccgtgtcacggacaggcacggcccctctggaccgcctcaaggtcttcatgcaggtccatgcctcaaagaccaaccggctgaacatccttggggggcttcgaagcatggtccttgagggaggcatccgctccctgtggcgcggcaatggtattaatgtactcaagattgcccccgagtcagctatcaagttcatggcctatgaacagactctgaagaactggtggcttcagcagtacagccacgactcggcagacccaggcatcctcgtgctcctggcctgcggtaccatatccagcacctgcggccagatagccagttacccgctggccctggtccggacccgcatgcaggcacaaggatttcatcatgttgcccaggctcatctcgaactcgtggggtcaaggaattcgccagccttcagcctcccaacgtgctgggattacagccggtggtcatgccatgagcagccttatggagaggaccatgtggtaaggaactcagccaatagccatgtaactgagcttggaagaggatcttgctgtcctggccaacatctcactgcaattctatcagttgaattccctggatagtccaagctttgtggatccctccaccgaaacaactggatcccagtacctgaatcctgaatcttagactcttatacttcaaacactgatcacgggaacagccggctcagcggctcctgagttcctaatgctcagaatatgggtgagatgataaatgtttgttgtgttaagctgccaacctttggcgggggggtaattcgtcacatggcaacagctggctaatacatatatacctacatgta

SEQ ID NO: 183416 - DNA, 557 bp, Homo sapiens
  Payload ID: 16137
  Gene Symbol: SLC25A23
  Gene Name: solute carrier family 25 (mitochondrial carrier
  phosphate carrier), member 23
  ENST ID: ENST00000597307
  CDS Start-End: 327-557
aaaacaaatctaagactgaatggctggggtctacaccttcagccaaccaggtcgacccggctcggcaggcctcctcccagctcccagttcacccaaaaacacctgcactataccaagactcagtggtcatcaggactggggagaatgacttaacctccgcttccttatctgcaaagtgcgaacgccagtaccacctaccttatagggttttggcaaagacgactcgagagggtatctcctctgagggtgatgctgacccagatggcgggctcgacctggaggaattttcccgctatctgcaggagcgggaacagcgtctgctgctcatgtttcacagtcttgaccggaaccaggatggtcacattgatgtctctgagatccaacagagtttccgagctctgggcatttccatctcgctggagcaggctgagaaaattttgcacagcatggaccgagacggcacaatgaccattgactggcaagaatggcgcgaccacttcctgttgcattcgctggaaaatgtggaggacgtgctgtatttctggaagcattccacg

SEQ ID NO: 183417 - DNA, 736 bp, Homo sapiens
  Payload ID: 16137
  Gene Symbol: SLC25A23
  Gene Name: solute carrier family 25 (mitochondrial carrier
  phosphate carrier), member 23
  ENST ID: ENST00000598704
  CDS Start-End: 1-272
gtgccttctaccgcggctacctccccaacgtgctgggcatcatcccctatgcgggcatcgacctggccgtctacgagactctgaagaactggtggcttcagcagtacagccacgactcggcagacccaggcatcctcgtgctcctggcctgcggtaccatatccagcacctgcggccagatagccagttacccgctggccctggtccggacccgcatgcaggcacaagatgcagtttcgctctgtttcccaggctggagtgcaatgacgtgatctcagctcactgcaacctccgcttcccgggttcaagtgatcctcctgcctcagcctccagaatagctgggattacagccggtggtcatgccatgagcagccttatggagaggaccatgtggtaaggaactcagccaatagccatgtaactgagcttggaagaggatcttgctgtcctggccaacatctcactgcaattctatcagttgaattccctggatagtccaagctttgtggatccctccaccgaaacaactggatcccagtacctgaatcctgaatcttagactcttatacttcaaacactgatcacgggaacagccggctcagcggctcctgagttcctaatgctcagaatatgggtgagatgataaatgtttgttgtgttaagctgccaacctttggcgggggggtaattcgtcacatggcaacagctggctaatacatatatacctacatgtata

SEQ ID NO: 183418 - DNA, 734 bp, Homo sapiens
  Payload ID: 16137
  Gene Symbol: SLC25A23
  Gene Name: solute carrier family 25 (mitochondrial carrier
  phosphate carrier), member 23
  ENST ID: ENST00000595810
  CDS Start-End: 1-395
cagcccaaaccatcatttaccctatggaggtgctgaagacgcggctgaccttgcgccggacgggccagtataaggggctgctggactgcgccaggcgtatcctggagagggaggggccccgtgccttctaccgcggctacctccccaacgtgctgggcatcatcccctatgcgggcatcgacctggccgtctacgagactctgaagaactggtggcttcagcagtacagccacgactcggcagacccaggcatcctcgtgctcctggcctgcggtaccatatccagcacctgcggccagatagccagttacccgctggccctggtccggacccgcatgcaggcacaagccggtggtcatgccatgagcagccttatggagaggaccatgtggtaaggaactcagccaatagccatgtaactgagcttggaagaggatcttgctgtcctggccaacatctcactgcaattctatcagttgaattccctggatagtccaagctttgtggatccctccaccgaaacaactggatcccagtacctgaatcctgaatcttagactcttatacttcaaacactgatcacgggaacagccggctcagcggctcctgagttcctaatgctcagaatatgggtgagatgataaatgtttgttgtgttaagctgccaacctttggcgggggggtaattcgtcacatggcaacagctggctaatacatatatacctacatgtata

SEQ ID NO: 183419 - DNA, 3320 bp, Homo sapiens
  Payload ID: 16138
  Gene Symbol: SLC25A24
  Gene Name: solute carrier family 25 (mitochondrial carrier
  phosphate carrier), member 24
  ENST ID: ENST00000264128
  CDS Start-End: 142-474
gcagccgcaaccccgacggcgccccaaacgctgttgcgccgcgcgccccgcccagcccggcctcgcgctggtcccggtctcgccccgcagccctcgatctcccgtgacttcctcggccaggccgcctgcgcctctgggaccatgttgcgctggctgcgggacttcgtgctgcccaccgcggcctgccaggacgcggagcagccgacgcgctacgagaccctcttccaggcactggaccgcaatggggacggagtggtggacatcggcgagctgcaggaggggctcaggaacctgggcatccctctgggccaggacgccgaggagaaaatttttactactggagatgtcaacaaagatgggaagctggattttgaagaatttatgaagtaccttaaagaccatgagaagaaaatgaaattggcatttaagagtttagacaaaaataatgatgcattgatgttgatgggacaatgacagtggactggaatgaatggagagactacttcttatttaatcctgttacagacattgaggaaattatccgtttctggaaacattctacaggaattgacataggggatagcttaactattccagatgaattcacggaagacgaaaaaaaatccggacaatggtggaggcagcttttggcaggaggcattgctggtgctgtctctcgaacaagcactgcccctttggaccgtctgaaaatcatgatgcaggttcacggttcaaaatcagacaaaatgaacatatttggtggctttcgacagatggtaaaagaaggaggtatccgctcgctttggaggggaaatggtacaaacgtcatcaaaattgctcctgagacagctgttaaattctgggcatatgaacagtacaagaagttacttactgaagaaggacaaaaaataggaacatttgagagatttatttctggttccatggctggagcaactgcacagacttttatatatccaatggaggttatgaaaaccaggctggctgtaggcaaaactgggcagtactctggaatatatgattgtgccaagaagattttgaaacatgaaggcttgggagctttttacaaaggctatgttcccaatttattaggtatcataccttatgcaggcatagatcttgctgtgtatgagctcttgaagtcctattggctggataattttgcaaaagattctgtaaaccctggagtcatggtgttgctgggatgcggtgccttatccagcacctgtggtcagctggccagctacccattggctttggtgagaactcgcatgcaggctcaagccatgttagaaggttccccacagctgaatatggttggcctctttcgacgaattatttccaaagaaggaataccaggactttacagaggcatcaccccaaacttcatgaaggtgctccctgctgtaggcatcagttatgtggtttatgaaaatatgaagcaaactttaggagtaacccagaaatgatgttgcattttttgctttagcctgataattgaaactttcaacaatctctggagtgactttttctcctcgaattgaaacaagtctatggcaaaagaagctgcatttttttcacaaaagggaagatggtaacaatggtcacttcaaacttttgggctaaattatatgtacacagaaatgttcaaaatcatagttttaatgtgttttgaaaaggccacacaattatactttatcttttcttaataatcctgcaaatctctgccctgaatccgaaatctgaaaatgtactggcttgaacaaaatttgttttgtgtgttagagttataaatcattaatctttatttcgggtggtttacgtttatgccagttcctttatatttaaatttcttgttttatatattttgaatgtctttatagatttctttaaatttccttatagaaccattaatagaaaatcattacatttaaaatataccttacagcaaaagcatccaaataagtatagggtttatgtccttatttttctttcagctgaatacgaatgaacacagtggtggaatttctgaagggaagtgatgaaattatatttatttcagtgggcacttttccattttaccactgtaccattatttggttcctggagttatacactaattttcagtatattactgttaaattaccaacacaaggcaatttatttgaaagattccgtttatcctgccattgctttgaaaagcagcaggaaacgaaatcctttgacttgtatcagcttctgcagagcatctttgttttcctttgtcctttgtttcctaccttttgaatcagattccgttttagtcaggaagacttcttgggaccattcttagtaacctgaaatttcttttttaattgcatgaagtggattgatcatgagcaaatgatgtgcttatttctccctcactgttgaatatctttgaacttgctgttttcaatatgggcagcacaaaggtgagagatacatattaatagtagtatgtattactcttatacattagatacctatatttaaatgaaaggcccaatttgtaaacatatacattcatattctctcttgccccaagttttaggaacatgttaggatataggagacttaatttataataatgagagcatttttttattttactaaagccatttttatagtcaactatcttttcttatttgtgtgattagaacttagaaaaatatttactagttgaagttattatcagtttttaatttagttcttaaactcatttcacttctaataatttctgttataaatttccagcattttaatgaaaatctaatgatgtaataggcattttctttatttgaacctacctcttttattttctgaaccaaagagaaagatggactggtgtttgtgaaacatttttaaaaatgtagtttcatttatattagttatgtttgataaatgtctcagtatttttataatatgataagcctgggattctacttttagggttatttgtacttttgagtaatatataaagtgacaatattaaggtacatgatcagctctttctatttttactcgtaaaaattatggaaatgaataattttgctaacaactttgaaatttcaaacttctggaaaatatgaaaatattcattgttcattatgaatttaaattgtaaggtatgaatgtgatttgtctgtacatcttgtatcttttccaaaaaatgattctgtatcttttggaaaaaagccgagagttgaagatagtatatttctggtagtactgaatatttacttacagtttctatcaaaaatatatatttgtttctaaaatta

SEQ ID NO: 183420 - DNA, 3404 bp, Homo sapiens
  Payload ID: 16138
  Gene Symbol: SLC25A24
  Gene Name: solute carrier family 25 (mitochondrial carrier
  phosphate carrier), member 24
  Uniprot ID: Q6NUK1
  ENST ID: ENST00000370041
  CDS Start-End: 198-1574
gaagccgttaggatgagccctctccttccagagctttaaccgatgaaggtgcattgtgtttggcgcccctgaggaggatgctgtcttaggcctcttcccactggacgtgtgtggtgggcagagatcccgttcgtcggtcgcacttccaccccgctggggctcactcaggccgcggagctgcgagggagacatcctcgatggactccctctacggagatctcttttggtacctggactataacaaggatgggaccttggacatttttgagcttcaggaaggcctggaggatgtaggggccattcaatctctagaggaagcgaagaaaatttttactactggagatgtcaacaaagatgggaagctggattttgaagaatttatgaagtaccttaaagaccatgagaagaaaatgaaattggcatttaagagtttagacaaaaataatgatggaaaaattgaggcttcagaaattgtccagtctctccagacactgggtctgactatttctgaacaacaagcagagttgattcttcaaagcattgatgttgatgggacaatgacagtggactggaatgaatggagagactacttcttatttaatcctgttacagacattgaggaaattatccgtttctggaaacattctacaggaattgacataggggatagcttaactattccagatgaattcacggaagacgaaaaaaaatccggacaatggtggaggcagcttttggcaggaggcattgctggtgctgtctctcgaacaagcactgcccctttggaccgtctgaaaatcatgatgcaggttcacggttcaaaatcagacaaaatgaacatatttggtggctttcgacagatggtaaaagaaggaggtatccgctcgctttggaggggaaatggtacaaacgtcatcaaaattgctcctgagacagctgttaaattctgggcatatgaacagtacaagaagttacttactgaagaaggacaaaaaataggaacatttgagagatttatttctggttccatggctggagcaactgcacagacttttatatatccaatggaggttatgaaaaccaggctggctgtaggcaaaactgggcagtactctggaatatatgattgtgccaagaagattttgaaacatgaaggcttgggagctttttacaaaggctatgttcccaatttattaggtatcataccttatgcaggcatagatcttgctgtgtatgagctcttgaagtcctattggctggataattttgcaaaagattctgtaaaccctggagtcatggtgttgctgggatgcggtgccttatccagcacctgtggtcagctggccagctacccattggctttggtgagaactcgcatgcaggctcaagccatgttagaaggttccccacagctgaatatggttggcctctttcgacgaattatttccaaagaaggaataccaggactttacagaggcatcaccccaaacttcatgaaggtgctccctgctgtaggcatcagttatgtggtttatgaaaatatgaagcaaactttaggagtaacccagaaatgatgttgcattttttgctttagcctgataattgaaactttcaacaatctctggagtgactttttctcctcgaattgaaacaagtctatggcaaaagaagctgcatttttttcacaaaagggaagatggtaacaatggtcacttcaaacttttgggctaaattatatgtacacagaaatgttcaaaatcatagttttaatgtgttttgaaaaggccacacaattatactttatcttttcttaataatcctgcaaatctctgccctgaatccgaaatctgaaaatgtactggcttgaacaaaatttgttttgtgtgttagagttataaatcattaatctttatttcgggtggtttacgtttatgccagttcctttatatttaaatttcttgttttatatattttgaatgtctttatagatttctttaaatttccttatagaaccattaatagaaaatcattacatttaaaatataccttacagcaaaagcatccaaataagtatagggtttatgtccttatttttctttcagctgaatacgaatgaacacagtggtggaatttctgaagggaagtgatgaaattatatttatttcagtgggcacttttccattttaccactgtaccattatttggttcctggagttatacactaattttcagtatattactgttaaattaccaacacaaggcaatttatttgaaagattccgtttatcctgccattgctttgaaaagcagcaggaaacgaaatcctttgacttgtatcagcttctgcagagcatctttgttttcctttgtcctttgtttcctaccttttgaatcagattccgttttagtcaggaagacttcttgggaccattcttagtaacctgaaatttcttttttaattgcatgaagtggattgatcatgagcaaatgatgtgcttatttctccctcactgttgaatatctttgaacttgctgttttcaatatgggcagcacaaaggtgagagatacatattaatagtagtatgtattactcttatacattagatacctatatttaaatgaaaggcccaatttgtaaacatatacattcatattctctcttgccccaagttttaggaacatgttaggatataggagacttaatttataataatgagagcatttttttattttactaaagccatttttatagtcaactatcttttcttatttgtgtgattagaacttagaaaaatatttactagttgaagttattatcagtttttaatttagttcttaaactcatttcacttctaataatttctgttataaatttccagcattttaatgaaaatctaatgatgtaataggcattttctttatttgaacctacctcttttattttctgaaccaaagagaaagatggactggtgtttgtgaaacatttttaaaaatgtagtttcatttatattagttatgtttgataaatgtctcagtatttttataatatgataagcctgggattctacttttagggttatttgtacttttgagtaatatataaagtgacaatattaaggtacatgatcagctctttctatttttactcgtaaaaattatggaaatgaataattttgctaacaactttgaaatttcaaacttctggaaaatatgaaaatattcattgttcattatgaatttaaattgtaaggtatgaatgtgatttgtctgtacatcttgtatcttttccaaaaaatgattctgtatcttttggaaaaaagccgagagttgaagatagtatatttctggtagtactgaatatttacttacagtttctatcaaaaatatatatttgtttctaaaa

SEQ ID NO: 183421 - DNA, 2357 bp, Homo sapiens
  Payload ID: 16138
  Gene Symbol: SLC25A24
  Gene Name: solute carrier family 25 (mitochondrial carrier
  phosphate carrier), member 24
  ENST ID: ENST00000569674
  CDS Start-End: 712-921
acgcagatggctgttgatcttttctgcaacaaatccaggagtttctcctttttgttttataattgctccaatagatgctttaggatttaactctctgctttttaaagcagaatcgccatcccaggtgtgcaaccacgaaaaaattagacatccgtgagagacaatgccctccatggcccagtttccaggcagagagaagcagctctgggctgaccgccaaggctccggcccgagagggtctttaagtggagtaaccagtcttcaagaccccgctcccaagccaccgacgcgctgacgctgcagccctggacctgctgggggcctcttcctcggacccgcatgctgacagcgggactggcaactgggcagaggtcgaccccgggtccgcacagcacctcccgagacccagctcccagctccctcacttccggctctctggaggcgggcccggccagtgccgccgaggccagcgcggcgagctcctccccagcagcggcgggacggccacaccctgcgctccgcgcgggctcgggtggggtctccgctcctgcgccctgcgccctgcgcgccgcagccgcaaccccgacggcgccccaaacgctgttgcgccgcgcgccccgcccagcccggcctcgcgctggtcccggtctcgccccgcagccctcgatctcccgtgacttcctcggccaggccgcctgcgcctctgggaccatgttgcgctggctgcgggacttcgtgctgcccaccgcggcctgccaggacgcggagcagccgacgcgctacgagaccctcttccaggcactggaccgcaatggggacggagtggtggacatcggcgagctgcaggaggggctcaggaacctgggcatccctctgggccaggacgccgaggaggtgggtcgccgccggggcgccgcctgagcgtagggagggctgcgggcgctggggacactgcgaggaccgaggagggcggcggcttgaggcgttgccaggagaggaaggaggaactgtggcgcccagcgctccggtggcttcagaaactcgggcgtggggccgcgaccggcgaccccggtaacagaagtgggtcataatacgaaagtctactggtatttgtccagataaaatgagtgttgtggacactctggcccacgggcactgttaaatttttaagacacttttgtcctgaatccatcccaggttctttgttttctgttttaataccttgcagacatgtaatccgttttagctgtcagacttcagtgggtcccaagttttgtataaaggcgcacacattcgatctctttcgaagctgctttgttacagcagctatgtgtattgtctactgtttgaaaactgtttgaaaaccaatcgcgtgtttcccccacttcctgttgagaaggaatggcggcattccattgtttaagacattcctaggttaatgccctaggtacataaattgatctgaagggttgacttgacctgcgactgagcaatttcattttctctgagtcatcttaactgtgcccctgaacttctgcccctttagtagggtggagatatgtggaacttctccaaccctgttgaagcgttccctgacactggcattctcttatccaaagagggaaagtgattaggttactatgagggccaacaactgttatatagttatatttcacttctcttttaatgtctttggtagttataggcctcttcagtttactgtttcttctagagtcagatttagtaagttacaattttttttgaaactgcctgttctgtccaaggttcataatactcaccgatgattttataacacttctgactgaatctgtaggtaggttctctatttcattcctcatatctatccttttctccccttcaatcttgccaaagttttgtgtattttattcatactttgaaggaaccaacttttggtactttgtgctgattgtcccagaaatggcccagttggagttccccaccatgtccaatcattggctggaagcagcccaggaaagggacgaccttgctgcagtgcatcagcagatgccagggttagaggctagagagtggaagtcaactgtgttcctcacagtaggtgcctttgaagggagatctcagtggtacaactccatggtccctacaatatacaaaagctctttggagtgctcaatgatttttaagattgtaaagggatcctgagatcaaaaagcttgagaattgctgctgtatcaccatttttacgtaactgcatcatattctgttatatgtttgtgtcatagtatatgttaccaattctttttaaatcaccttttactttattgatagtttaaaaacgattgtaagtgaaattgcaa

SEQ ID NO: 183422 - DNA, 4271 bp, Homo sapiens
  Payload ID: 16138
  Gene Symbol: SLC25A24
  Gene Name: solute carrier family 25 (mitochondrial carrier
  phosphate carrier), member 24
  Uniprot ID: Q6NUK1
  ENST ID: ENST00000565488
  CDS Start-End: 221-1654
agcggcgggacggccacaccctgcgctccgcgcgggctcgggtggggtctccgctcctgcgccctgcgccctgcgcgccgcagccgcaaccccgacggcgccccaaacgctgttgcgccgcgcgccccgcccagcccggcctcgcgctggtcccggtctcgccccgcagccctcgatctcccgtgacttcctcggccaggccgcctgcgcctctgggaccatgttgcgctggctgcgggacttcgtgctgcccaccgcggcctgccaggacgcggagcagccgacgcgctacgagaccctcttccaggcactggaccgcaatggggacggagtggtggacatcggcgagctgcaggaggggctcaggaacctgggcatccctctgggccaggacgccgaggagaaaatttttactactggagatgtcaacaaagatgggaagctggattttgaagaatttatgaagtaccttaaagaccatgagaagaaaatgaaattggcatttaagagtttagacaaaaataatgatggaaaaattgaggcttcagaaattgtccagtctctccagacactgggtctgactatttctgaacaacaagcagagttgattcttcaaagcattgatgttgatgggacaatgacagtggactggaatgaatggagagactacttcttatttaatcctgttacagacattgaggaaattatccgtttctggaaacattctacaggaattgacataggggatagcttaactattccagatgaattcacggaagacgaaaaaaaatccggacaatggtggaggcagcttttggcaggaggcattgctggtgctgtctctcgaacaagcactgcccctttggaccgtctgaaaatcatgatgcaggttcacggttcaaaatcagacaaaatgaacatatttggtggctttcgacagatggtaaaagaaggaggtatccgctcgctttggaggggaaatggtacaaacgtcatcaaaattgctcctgagacagctgttaaattctgggcatatgaacagtacaagaagttacttactgaagaaggacaaaaaataggaacatttgagagatttatttctggttccatggctggagcaactgcacagacttttatatatccaatggaggttatgaaaaccaggctggctgtaggcaaaactgggcagtactctggaatatatgattgtgccaagaagattttgaaacatgaaggcttgggagctttttacaaaggctatgttcccaatttattaggtatcataccttatgcaggcatagatcttgctgtgtatgagctcttgaagtcctattggctggataattttgcaaaagattctgtaaaccctggagtcatggtgttgctgggatgcggtgccttatccagcacctgtggtcagctggccagctacccattggctttggtgagaactcgcatgcaggctcaagccatgttagaaggttccccacagctgaatatggttggcctctttcgacgaattatttccaaagaaggaataccaggactttacagaggcatcaccccaaacttcatgaaggtgctccctgctgtaggcatcagttatgtggtttatgaaaatatgaagcaaactttaggagtaacccagaaatgatgttgcattttttgctttagcctgataattgaaactttcaacaatctctggagtgactttttctcctcgaattgaaacaagtctatggcaaaagaagctgcatttttttcacaaaagggaagatggtaacaatggtcacttcaaacttttgggctaaattatatgtacacagaaatgttcaaaatcatagttttaatgtgttttgaaaaggccacacaattatactttatcttttcttaataatcctgcaaatctctgccctgaatccgaaatctgaaaatgtactggcttgaacaaaatttgttttgtgtgttagagttataaatcattaatctttatttcgggtggtttacgtttatgccagttcctttatatttaaatttcttgttttatatattttgaatgtctttatagatttctttaaatttccttatagaaccattaatagaaaatcattacatttaaaatataccttacagcaaaagcatccaaataagtatagggtttatgtccttatttttctttcagctgaatacgaatgaacacagtggtggaatttctgaagggaagtgatgaaattatatttatttcagtgggcacttttccattttaccactgtaccattatttggttcctggagttatacactaattttcagtatattactgttaaattaccaacacaaggcaatttatttgaaagattccgtttatcctgccattgctttgaaaagcagcaggaaacgaaatcctttgacttgtatcagcttctgcagagcatctttgttttcctttgtcctttgtttcctaccttttgaatcagattccgttttagtcaggaagacttcttgggaccattcttagtaacctgaaatttcttttttaattgcatgaagtggattgatcatgagcaaatgatgtgcttatttctccctcactgttgaatatctttgaacttgctgttttcaatatgggcagcacaaaggtgagagatacatattaatagtagtatgtattactcttatacattagatacctatatttaaatgaaaggcccaatttgtaaacatatacattcatattctctcttgccccaagttttaggaacatgttaggatataggagacttaatttataataatgagagcatttttttattttactaaagccatttttatagtcaactatcttttcttatttgtgtgattagaacttagaaaaatatttactagttgaagttattatcagtttttaatttagttcttaaactcatttcacttctaataatttctgttataaatttccagcattttaatgaaaatctaatgatgtaataggcattttctttatttgaacctacctcttttattttctgaaccaaagagaaagatggactggtgtttgtgaaacatttttaaaaatgtagtttcatttatattagttatgtttgataaatgtctcagtatttttataatatgataagcctgggattctacttttagggttatttgtacttttgagtaatatataaagtgacaatattaaggtacatgatcagctctttctatttttactcgtaaaaattatggaaatgaataattttgctaacaactttgaaatttcaaacttctggaaaatatgaaaatattcattgttcattatgaatttaaattgtaaggtatgaatgtgatttgtctgtacatcttgtatcttttccaaaaaatgattctgtatcttttggaaaaaagccgagagttgaagatagtatatttctggtagtactgaatatttacttacagtttctatcaaaaatatatatttgtttctaaaattacttgttttccagtttttattttttttagagaaaattcttaagtctcagtttcctaattgaaaaaaaaaaattataaataaagcaaaaattgtatcctacagcttagctagcttagatgtttggcaccagtttgaatcatgctttttacagctggctccatgtagtctttccaaacattttggcctttcctgagcagcccttgtagatattgtctgtatgatgcattttgacacaaggtgatattttttgtgatatcaaaattccacatttacccattagagttacagccctggggttcacagtaccaagggggacccagagcctcaggattggccaggctcattttgccgtggagtatcagtttgtcttgaaattgtgggaaaaaattctaagttgaattcactggtaagtaattttttaaaatttcataatgcagattacatccaaaatttgatttaaaaattaaaacataagactgcagagaaattctgcatttcaactccaatactatccagacttcagaaataacttatcagttatttctgtaagcttcttgcttacctggatacctgacaggtgagatggctgtagcagacactggcagttccctgcccacacacctgtccctgtccacagctgcacaaggcagctctgtgtgcaattgccagcatctgctcctctgttctcagggaatctttgttagaaaaatgctgccatatttgtttctcacctattagtcttgtctcccagtcaagagaataaatttatgcaagcagagattgta

SEQ ID NO: 183423 - DNA, 3474 bp, Homo sapiens
  Payload ID: 16139
  Gene Symbol: SLC25A25
  Gene Name: solute carrier family 25 (mitochondrial carrier
  phosphate carrier), member 25
  Uniprot ID: Q6KCM7
  ENST ID: ENST00000373064
  CDS Start-End: 264-1673
cggtgacgtcagccctgatctttgtgcctctcacttgagcaacctgatgccaccttctcccccgggctctgtgttcattggctgttggcaggacttgccgtgggagggcttttttcttttttcaattaagtaaaagggcagggcttaagcagccaatgacagctgaggccaggcttgtcttatgcaagtttcccgggaccggcagcatttagggaacttgctcccggtggtgagggcagtggagcacccagcaggccgccaacatgctctgtctgtgcctgtatgtgccggtcatcggggaagcccagaccgagttccagtactttgagtcgaaggggctccctgccgagctgaagtccattttcaagctcagtgtcttcatcccctcccaggaattctccacctaccgccagtggaagcagaaaattgtacaagctggagataaggaccttgatgggcagctagactttgaagaatttgtccattatctccaagatcatgagaagaagctgaggctggtgtttaagagtttggacaaaaagaatgatggacgcattgacgcgcaggagatcatgcagtccctgcgggacttgggagtcaagatatctgaacagcaggcagaaaaaattctcaagagcatggataaaaacggcacgatgaccattgactggaacgagtggagagactaccacctcctccaccccgtggaaaacatccccgagatcatcctctactggaagcattccacgatctttgatgtgggtgagaatctaacggtcccggatgagttcacagtggaggagaggcagacggggatgtggtggagacacctggtggcaggaggtggggcaggggccgtatccagaacctgcacggcccccctggacaggctcaaggtgctcatgcaggtccatgcctcccgcagcaacaacatgggcatcgttggtggcttcactcagatgattcgagaaggaggggccaggtcactctggcggggcaatggcatcaacgtcctcaaaattgcccccgaatcagccatcaaattcatggcctatgagcagatcaagcgccttgttggtagtgaccaggagactctgaggattcacgagaggcttgtggcagggtccttggcaggggccatcgcccagagcagcatctacccaatggaggtcctgaagacccggatggcgctgcggaagacaggccagtactcaggaatgctggactgcgccaggaggatcctggccagagagggggtggccgccttctacaaaggctatgtccccaacatgctgggcatcatcccctatgccggcatcgaccttgcagtctacgagacgctcaagaatgcctggctgcagcactatgcagtgaacagcgcggaccccggcgtgtttgtgctcctggcctgtggcaccatgtccagtacctgtggccagctggccagctaccccctggccctagtcaggacccggatgcaggcgcaagcctctattgagggcgctccggaggtgaccatgagcagcctcttcaaacatatcctgcggaccgagggggccttcgggctgtacagggggctggcccccaacttcatgaaggtcatcccagctgtgagcatcagctacgtggtctacgagaacctgaagatcaccctgggcgtgcagtcgcggtgacggggggagggccgcccggcagtggactcgctgatcctgggccgcagcctggggtgtgcagccatctcattctgtgaatgtgccaacactaagctgtctcgagccaagctgtgaaaaccctagacgcacccgcagggagggtggggagagctggcaggcccagggcttgtcctgctgaccccagcagaccctcctgttggttccagcgaagaccacaggcattccttagggtccagggtcagcaggctccgggctcacatgtgtaaggacaggacattttctgcagtgcctgccaatagcgagcttggagcctggaggccggcttagttcttccatttcacccttgcagccagctgttggccacggcccctgccctctggtctgccgtgcatctccctgtgccctcttgctgcctgcctgtctgctgaggtaaggtgggaggagggctacagcccacatcccaccccctcgtccaatcccataatccatgatgaaaggtgaggtcacgtggcctcccaggcctgacttcccaacctacagcattgacgccaacttggctgtgaaggaagaggaaaggatctggccttgtggtcactggcatctgagccctgctgatggctggggctctcgggcatgcttgggagtgcagggggctcgggctgcctggcctggctgcacagaaggcaagtgctggggctcatggtgctctgagctggcctggaccctgtcaggatgggccccacctcagaaccaaactcactgtccccactgtggcatgagggcagtggagcaccatgtttgagggcgaagggcagagcgtttgtgtgttctggggagggaaggaaaaggtgttggaggccttaattatggactgttgggaaaagggttttgtccagaaggacaagccggacaaatgagcgacttctgtgcttccagaggaagacgagggagcaggagcttggctgactgctcagagtctgttctgacgccctgggggttcctgtccaaccccagcaggggcgcagcgggaccagccccacattccacttgtgtcactgcttggaacctatttattttgtatttatttgaacagagttatgtcctaactatttttatagatttgtttaattaatagcttgtcattttcaagttcattttttattcatatttatgttcatggttgattgtaccttcccaagcccgcccagtgggatgggaggaggaggagaaggggggccttgggccgctgcagtcacatctgtccagagaaattccttttgggactggaggcagaaaagcggccagaaggcagcagccctggctcctttcctttggcaggttggggaagggcttgcccccagccttaggatttcagggtttgactgggggcgtggagagagagggaggaacctcaataaccttgaaggtggaatccagttatttcctgcgctgcgagggtttctttatttcactcttttctgaatgtcaaggcagtgaggtgcctctcactgtgaatttgtggtgggcgggggctggaggagagggtgggggactggctccgtccctcccagccttctgctgcccttgcttaacaatgccggccaactggcgacctcacggttgcacttccattccaccagaatgacctgatgaggaaatcttcaataggatgcaaagatcaatgcaaaaattgttatatatgaacatataactggagtcgtcaaaaagcaaattaagaaagaattggacgttagaagttgtcatttaaagcagccttctaataaagttgtttcaaagctga

SEQ ID NO: 183424 - DNA, 3714 bp, Homo sapiens
  Payload ID: 16139
  Gene Symbol: SLC25A25
  Gene Name: solute carrier family 25 (mitochondrial carrier
  phosphate carrier), member 25
  Uniprot ID: Q6KCM7
  ENST ID: ENST00000373066
  CDS Start-End: 408-1913
gcgaggacagctgaataactgggagctcgaagttgcttgctgcctccgggagtggtctgcttggctgtcgcgttttccttttctttttttttttttttaaaaaaaagccaaacgtttgctcaccatcacctgcagaagtgagtttttattgaagaagctccagctgctttctccttattgccggcagcctggcaagcctcccttagagtgagctacttctcaggccgggcacgacagcagtgctagcacatttgaaaaagcaggaaaccgcccctgcatgcagagcttccagcctgagaaccccaggcccgtcctcccagcagctgtgtagccagagagcgttggtactgtggtcacatccctcaaaagtgaacagtcgccatcagaggcgtttggaggagaccgtgatgttgcagatgctgtggcatttcctagctagctttttccccagggctgggtgccacggctccagagagggggacgatcgtgaagtcagaggcaccccagcccctgcctggagagaccagatggcaagctttttggggaaacaggacggaagggctgaggccacggaaaaaagacccaccattttgctggtggttggacctgcagagcagtttcctaagaaaattgtacaagctggagataaggaccttgatgggcagctagactttgaagaatttgtccattatctccaagatcatgagaagaagctgaggctggtgtttaagagtttggacaaaaagaatgatggacgcattgacgcgcaggagatcatgcagtccctgcgggacttgggagtcaagatatctgaacagcaggcagaaaaaattctcaagagaatacgaacgggccatttctggggccctgtcacctacatggataaaaacggcacgatgaccattgactggaacgagtggagagactaccacctcctccaccccgtggaaaacatccccgagatcatcctctactggaagcattccacgatctttgatgtgggtgagaatctaacggtcccggatgagttcacagtggaggagaggcagacggggatgtggtggagacacctggtggcaggaggtggggcaggggccgtatccagaacctgcacggcccccctggacaggctcaaggtgctcatgcaggtccatgcctcccgcagcaacaacatgggcatcgttggtggcttcactcagatgattcgagaaggaggggccaggtcactctggcggggcaatggcatcaacgtcctcaaaattgcccccgaatcagccatcaaattcatggcctatgagcagatcaagcgccttgttggtagtgaccaggagactctgaggattcacgagaggcttgtggcagggtccttggcaggggccatcgcccagagcagcatctacccaatggaggtcctgaagacccggatggcgctgcggaagacaggccagtactcaggaatgctggactgcgccaggaggatcctggccagagagggggtggccgccttctacaaaggctatgtccccaacatgctgggcatcatcccctatgccggcatcgaccttgcagtctacgagacgctcaagaatgcctggctgcagcactatgcagtgaacagcgcggaccccggcgtgtttgtgctcctggcctgtggcaccatgtccagtacctgtggccagctggccagctaccccctggccctagtcaggacccggatgcaggcgcaagcctctattgagggcgctccggaggtgaccatgagcagcctcttcaaacatatcctgcggaccgagggggccttcgggctgtacagggggctggcccccaacttcatgaaggtcatcccagctgtgagcatcagctacgtggtctacgagaacctgaagatcaccctgggcgtgcagtcgcggtgacggggggagggccgcccggcagtggactcgctgatcctgggccgcagcctggggtgtgcagccatctcattctgtgaatgtgccaacactaagctgtctcgagccaagctgtgaaaaccctagacgcacccgcagggagggtggggagagctggcaggcccagggcttgtcctgctgaccccagcagaccctcctgttggttccagcgaagaccacaggcattccttagggtccagggtcagcaggctccgggctcacatgtgtaaggacaggacattttctgcagtgcctgccaatagcgagcttggagcctggaggccggcttagttcttccatttcacccttgcagccagctgttggccacggcccctgccctctggtctgccgtgcatctccctgtgccctcttgctgcctgcctgtctgctgaggtaaggtgggaggagggctacagcccacatcccaccccctcgtccaatcccataatccatgatgaaaggtgaggtcacgtggcctcccaggcctgacttcccaacctacagcattgacgccaacttggctgtgaaggaagaggaaaggatctggccttgtggtcactggcatctgagccctgctgatggctggggctctcgggcatgcttgggagtgcagggggctcgggctgcctggcctggctgcacagaaggcaagtgctggggctcatggtgctctgagctggcctggaccctgtcaggatgggccccacctcagaaccaaactcactgtccccactgtggcatgagggcagtggagcaccatgtttgagggcgaagggcagagcgtttgtgtgttctggggagggaaggaaaaggtgttggaggccttaattatggactgttgggaaaagggttttgtccagaaggacaagccggacaaatgagcgacttctgtgcttccagaggaagacgagggagcaggagcttggctgactgctcagagtctgttctgacgccctgggggttcctgtccaaccccagcaggggcgcagcgggaccagccccacattccacttgtgtcactgcttggaacctatttattttgtatttatttgaacagagttatgtcctaactatttttatagatttgtttaattaatagcttgtcattttcaagttcattttttattcatatttatgttcatggttgattgtaccttcccaagcccgcccagtgggatgggaggaggaggagaaggggggccttgggccgctgcagtcacatctgtccagagaaattccttttgggactggaggcagaaaagcggccagaaggcagcagccctggctcctttcctttggcaggttggggaagggcttgcccccagccttaggatttcagggtttgactgggggcgtggagagagagggaggaacctcaataaccttgaaggtggaatccagttatttcctgcgctgcgagggtttctttatttcactcttttctgaatgtcaaggcagtgaggtgcctctcactgtgaatttgtggtgggcgggggctggaggagagggtgggggactggctccgtccctcccagccttctgctgcccttgcttaacaatgccggccaactggcgacctcacggttgcacttccattccaccagaatgacctgatgaggaaatcttcaataggatgcaaagatcaatgcaaaaattgttatatatgaacatataactggagtcgtcaaaaagcaaattaagaaagaattggacgttagaagttgtcatttaaagcagccttctaataaagttgtttcaaagctga

SEQ ID NO: 183425 - DNA, 3431 bp, Homo sapiens
  Payload ID: 16139
  Gene Symbol: SLC25A25
  Gene Name: solute carrier family 25 (mitochondrial carrier
  phosphate carrier), member 25
  Uniprot ID: Q6KCM7
  ENST ID: ENST00000373068
  CDS Start-End: 120-1631
tgccggcgtctccgagcccgcgctcccagctgcagagcgcctggcttgcctcccgcgcggtcaccgccggcccgccgcccccgctcccgcccgcgcccggagcccctgcctcgcgcccgatggtgagcagtgtgttgtgccgctgtgtggcctccccgccgccggacgccgccgccaccgccgcctcttcgtctgcctcatcgccggcgtccgtgggggacccctgcggcggcgctatctgcgggggcccggaccaccggctgcgcctgtggagactctttcagacgctcgacgtcaaccgggacggcggcctgtgtgtcaacgacctggcggtggggctgcggcgcctgggactgcaccgcaccgagggcgagctccagaaaattgtacaagctggagataaggaccttgatgggcagctagactttgaagaatttgtccattatctccaagatcatgagaagaagctgaggctggtgtttaagagtttggacaaaaagaatgatggacgcattgacgcgcaggagatcatgcagtccctgcgggacttgggagtcaagatatctgaacagcaggcagaaaaaattctcaagagcatggataaaaacggcacgatgaccattgactggaacgagtggagagactaccacctcctccaccccgtggaaaacatccccgagatcatcctctactggaagcattccacgatctttgatgtgggtgagaatctaacggtcccggatgagttcacagtggaggagaggcagacggggatgtggtggagacacctggtggcaggaggtggggcaggggccgtatccagaacctgcacggcccccctggacaggctcaaggtgctcatgcaggtccatgcctcccgcagcaacaacatgggcatcgttggtggcttcactcagatgattcgagaaggaggggccaggtcactctggcggggcaatggcatcaacgtcctcaaaattgcccccgaatcagccatcaaattcatggcctatgagcagatcaagcgccttgttggtagtgaccaggagactctgaggattcacgagaggcttgtggcagggtccttggcaggggccatcgcccagagcagcatctacccaatggaggtcctgaagacccggatggcgctgcggaagacaggccagtactcaggaatgctggactgcgccaggaggatcctggccagagagggggtggccgccttctacaaaggctatgtccccaacatgctgggcatcatcccctatgccggcatcgaccttgcagtctacgagacgctcaagaatgcctggctgcagcactatgcagtgaacagcgcggaccccggcgtgtttgtgctcctggcctgtggcaccatgtccagtacctgtggccagctggccagctaccccctggccctagtcaggacccggatgcaggcgcaagcctctattgagggcgctccggaggtgaccatgagcagcctcttcaaacatatcctgcggaccgagggggccttcgggctgtacagggggctggcccccaacttcatgaaggtcatcccagctgtgagcatcagctacgtggtctacgagaacctgaagatcaccctgggcgtgcagtcgcggtgacggggggagggccgcccggcagtggactcgctgatcctgggccgcagcctggggtgtgcagccatctcattctgtgaatgtgccaacactaagctgtctcgagccaagctgtgaaaaccctagacgcacccgcagggagggtggggagagctggcaggcccagggcttgtcctgctgaccccagcagaccctcctgttggttccagcgaagaccacaggcattccttagggtccagggtcagcaggctccgggctcacatgtgtaaggacaggacattttctgcagtgcctgccaatagcgagcttggagcctggaggccggcttagttcttccatttcacccttgcagccagctgttggccacggcccctgccctctggtctgccgtgcatctccctgtgccctcttgctgcctgcctgtctgctgaggtaaggtgggaggagggctacagcccacatcccaccccctcgtccaatcccataatccatgatgaaaggtgaggtcacgtggcctcccaggcctgacttcccaacctacagcattgacgccaacttggctgtgaaggaagaggaaaggatctggccttgtggtcactggcatctgagccctgctgatggctggggctctcgggcatgcttgggagtgcagggggctcgggctgcctggcctggctgcacagaaggcaagtgctggggctcatggtgctctgagctggcctggaccctgtcaggatgggccccacctcagaaccaaactcactgtccccactgtggcatgagggcagtggagcaccatgtttgagggcgaagggcagagcgtttgtgtgttctggggagggaaggaaaaggtgttggaggccttaattatggactgttgggaaaagggttttgtccagaaggacaagccggacaaatgagcgacttctgtgcttccagaggaagacgagggagcaggagcttggctgactgctcagagtctgttctgacgccctgggggttcctgtccaaccccagcaggggcgcagcgggaccagccccacattccacttgtgtcactgcttggaacctatttattttgtatttatttgaacagagttatgtcctaactatttttatagatttgtttaattaatagcttgtcattttcaagttcattttttattcatatttatgttcatggttgattgtaccttcccaagcccgcccagtgggatgggaggaggaggagaaggggggccttgggccgctgcagtcacatctgtccagagaaattccttttgggactggaggcagaaaagcggccagaaggcagcagccctggctcctttcctttggcaggttggggaagggcttgcccccagccttaggatttcagggtttgactgggggcgtggagagagagggaggaacctcaataaccttgaaggtggaatccagttatttcctgcgctgcgagggtttctttatttcactcttttctgaatgtcaaggcagtgaggtgcctctcactgtgaatttgtggtgggcgggggctggaggagagggtgggggactggctccgtccctcccagccttctgctgcccttgcttaacaatgccggccaactggcgacctcacggttgcacttccattccaccagaatgacctgatgaggaaatcttcaataggatgcaaagatcaatgcaaaaattgttatatatgaacatataactggagtcgtcaaaaagcaaattaagaaagaattggacgttagaagttgtcatttaaagcagccttctaataaagttgtttcaaagctg

SEQ ID NO: 183426 - DNA, 3376 bp, Homo sapiens
  Payload ID: 16139
  Gene Symbol: SLC25A25
  Gene Name: solute carrier family 25 (mitochondrial carrier
  phosphate carrier), member 25
  Uniprot ID: Q6KCM7
  ENST ID: ENST00000373069
  CDS Start-End: 28-1575
gcgcccggagcccctgcctcgcgcccgatggtgagcagtgtgttgtgccgctgtgtggcctccccgccgccggacgccgccgccaccgccgcctcttcgtctgcctcatcgccggcgtccgtgggggacccctgcggcggcgctatctgcgggggcccggaccaccggctgcgcctgtggagactctttcagacgctcgacgtcaaccgggacggcggcctgtgtgtcaacgacctggcggtggggctgcggcgcctgggactgcaccgcaccgagggcgagctccagaaaattgtacaagctggagataaggaccttgatgggcagctagactttgaagaatttgtccattatctccaagatcatgagaagaagctgaggctggtgtttaagagtttggacaaaaagaatgatggacgcattgacgcgcaggagatcatgcagtccctgcgggacttgggagtcaagatatctgaacagcaggcagaaaaaattctcaagagaatacgaacgggccatttctggggccctgtcacctacatggataaaaacggcacgatgaccattgactggaacgagtggagagactaccacctcctccaccccgtggaaaacatccccgagatcatcctctactggaagcattccacgatctttgatgtgggtgagaatctaacggtcccggatgagttcacagtggaggagaggcagacggggatgtggtggagacacctggtggcaggaggtggggcaggggccgtatccagaacctgcacggcccccctggacaggctcaaggtgctcatgcaggtccatgcctcccgcagcaacaacatgggcatcgttggtggcttcactcagatgattcgagaaggaggggccaggtcactctggcggggcaatggcatcaacgtcctcaaaattgcccccgaatcagccatcaaattcatggcctatgagcagatcaagcgccttgttggtagtgaccaggagactctgaggattcacgagaggcttgtggcagggtccttggcaggggccatcgcccagagcagcatctacccaatggaggtcctgaagacccggatggcgctgcggaagacaggccagtactcaggaatgctggactgcgccaggaggatcctggccagagagggggtggccgccttctacaaaggctatgtccccaacatgctgggcatcatcccctatgccggcatcgaccttgcagtctacgagacgctcaagaatgcctggctgcagcactatgcagtgaacagcgcggaccccggcgtgtttgtgctcctggcctgtggcaccatgtccagtacctgtggccagctggccagctaccccctggccctagtcaggacccggatgcaggcgcaagcctctattgagggcgctccggaggtgaccatgagcagcctcttcaaacatatcctgcggaccgagggggccttcgggctgtacagggggctggcccccaacttcatgaaggtcatcccagctgtgagcatcagctacgtggtctacgagaacctgaagatcaccctgggcgtgcagtcgcggtgacggggggagggccgcccggcagtggactcgctgatcctgggccgcagcctggggtgtgcagccatctcattctgtgaatgtgccaacactaagctgtctcgagccaagctgtgaaaaccctagacgcacccgcagggagggtggggagagctggcaggcccagggcttgtcctgctgaccccagcagaccctcctgttggttccagcgaagaccacaggcattccttagggtccagggtcagcaggctccgggctcacatgtgtaaggacaggacattttctgcagtgcctgccaatagcgagcttggagcctggaggccggcttagttcttccatttcacccttgcagccagctgttggccacggcccctgccctctggtctgccgtgcatctccctgtgccctcttgctgcctgcctgtctgctgaggtaaggtgggaggagggctacagcccacatcccaccccctcgtccaatcccataatccatgatgaaaggtgaggtcacgtggcctcccaggcctgacttcccaacctacagcattgacgccaacttggctgtgaaggaagaggaaaggatctggccttgtggtcactggcatctgagccctgctgatggctggggctctcgggcatgcttgggagtgcagggggctcgggctgcctggcctggctgcacagaaggcaagtgctggggctcatggtgctctgagctggcctggaccctgtcaggatgggccccacctcagaaccaaactcactgtccccactgtggcatgagggcagtggagcaccatgtttgagggcgaagggcagagcgtttgtgtgttctggggagggaaggaaaaggtgttggaggccttaattatggactgttgggaaaagggttttgtccagaaggacaagccggacaaatgagcgacttctgtgcttccagaggaagacgagggagcaggagcttggctgactgctcagagtctgttctgacgccctgggggttcctgtccaaccccagcaggggcgcagcgggaccagccccacattccacttgtgtcactgcttggaacctatttattttgtatttatttgaacagagttatgtcctaactatttttatagatttgtttaattaatagcttgtcattttcaagttcattttttattcatatttatgttcatggttgattgtaccttcccaagcccgcccagtgggatgggaggaggaggagaaggggggccttgggccgctgcagtcacatctgtccagagaaattccttttgggactggaggcagaaaagcggccagaaggcagcagccctggctcctttcctttggcaggttggggaagggcttgcccccagccttaggatttcagggtttgactgggggcgtggagagagagggaggaacctcaataaccttgaaggtggaatccagttatttcctgcgctgcgagggtttctttatttcactcttttctgaatgtcaaggcagtgaggtgcctctcactgtgaatttgtggtgggcgggggctggaggagagggtgggggactggctccgtccctcccagccttctgctgcccttgcttaacaatgccggccaactggcgacctcacggttgcacttccattccaccagaatgacctgatgaggaaatcttcaataggatgcaaagatcaatgcaaaaattgttatatatgaacatataactggagtcgtcaaaaagcaaattaagaaagaattggacgttagaagttgtcatttaaagcagccttctaataaagttgtttcaaagctga

SEQ ID NO: 183427 - DNA, 3678 bp, Homo sapiens
  Payload ID: 16139
  Gene Symbol: SLC25A25
  Gene Name: solute carrier family 25 (mitochondrial carrier
  phosphate carrier), member 25
  Uniprot ID: Q6KCM7
  ENST ID: ENST00000432073
  CDS Start-End: 408-1877
gcgaggacagctgaataactgggagctcgaagttgcttgctgcctccgggagtggtctgcttggctgtcgcgttttccttttctttttttttttttttaaaaaaaagccaaacgtttgctcaccatcacctgcagaagtgagtttttattgaagaagctccagctgctttctccttattgccggcagcctggcaagcctcccttagagtgagctacttctcaggccgggcacgacagcagtgctagcacatttgaaaaagcaggaaaccgcccctgcatgcagagcttccagcctgagaaccccaggcccgtcctcccagcagctgtgtagccagagagcgttggtactgtggtcacatccctcaaaagtgaacagtcgccatcagaggcgtttggaggagaccgtgatgttgcagatgctgtggcatttcctagctagctttttccccagggctgggtgccacggctccagagagggggacgatcgtgaagtcagaggcaccccagcccctgcctggagagaccagatggcaagctttttggggaaacaggacggaagggctgaggccacggaaaaaagacccaccattttgctggtggttggacctgcagagcagtttcctaagaaaattgtacaagctggagataaggaccttgatgggcagctagactttgaagaatttgtccattatctccaagatcatgagaagaagctgaggctggtgtttaagagtttggacaaaaagaatgatggacgcattgacgcgcaggagatcatgcagtccctgcgggacttgggagtcaagatatctgaacagcaggcagaaaaaattctcaagagcatggataaaaacggcacgatgaccattgactggaacgagtggagagactaccacctcctccaccccgtggaaaacatccccgagatcatcctctactggaagcattccacgatctttgatgtgggtgagaatctaacggtcccggatgagttcacagtggaggagaggcagacggggatgtggtggagacacctggtggcaggaggtggggcaggggccgtatccagaacctgcacggcccccctggacaggctcaaggtgctcatgcaggtccatgcctcccgcagcaacaacatgggcatcgttggtggcttcactcagatgattcgagaaggaggggccaggtcactctggcggggcaatggcatcaacgtcctcaaaattgcccccgaatcagccatcaaattcatggcctatgagcagatcaagcgccttgttggtagtgaccaggagactctgaggattcacgagaggcttgtggcagggtccttggcaggggccatcgcccagagcagcatctacccaatggaggtcctgaagacccggatggcgctgcggaagacaggccagtactcaggaatgctggactgcgccaggaggatcctggccagagagggggtggccgccttctacaaaggctatgtccccaacatgctgggcatcatcccctatgccggcatcgaccttgcagtctacgagacgctcaagaatgcctggctgcagcactatgcagtgaacagcgcggaccccggcgtgtttgtgctcctggcctgtggcaccatgtccagtacctgtggccagctggccagctaccccctggccctagtcaggacccggatgcaggcgcaagcctctattgagggcgctccggaggtgaccatgagcagcctcttcaaacatatcctgcggaccgagggggccttcgggctgtacagggggctggcccccaacttcatgaaggtcatcccagctgtgagcatcagctacgtggtctacgagaacctgaagatcaccctgggcgtgcagtcgcggtgacggggggagggccgcccggcagtggactcgctgatcctgggccgcagcctggggtgtgcagccatctcattctgtgaatgtgccaacactaagctgtctcgagccaagctgtgaaaaccctagacgcacccgcagggagggtggggagagctggcaggcccagggcttgtcctgctgaccccagcagaccctcctgttggttccagcgaagaccacaggcattccttagggtccagggtcagcaggctccgggctcacatgtgtaaggacaggacattttctgcagtgcctgccaatagcgagcttggagcctggaggccggcttagttcttccatttcacccttgcagccagctgttggccacggcccctgccctctggtctgccgtgcatctccctgtgccctcttgctgcctgcctgtctgctgaggtaaggtgggaggagggctacagcccacatcccaccccctcgtccaatcccataatccatgatgaaaggtgaggtcacgtggcctcccaggcctgacttcccaacctacagcattgacgccaacttggctgtgaaggaagaggaaaggatctggccttgtggtcactggcatctgagccctgctgatggctggggctctcgggcatgcttgggagtgcagggggctcgggctgcctggcctggctgcacagaaggcaagtgctggggctcatggtgctctgagctggcctggaccctgtcaggatgggccccacctcagaaccaaactcactgtccccactgtggcatgagggcagtggagcaccatgtttgagggcgaagggcagagcgtttgtgtgttctggggagggaaggaaaaggtgttggaggccttaattatggactgttgggaaaagggttttgtccagaaggacaagccggacaaatgagcgacttctgtgcttccagaggaagacgagggagcaggagcttggctgactgctcagagtctgttctgacgccctgggggttcctgtccaaccccagcaggggcgcagcgggaccagccccacattccacttgtgtcactgcttggaacctatttattttgtatttatttgaacagagttatgtcctaactatttttatagatttgtttaattaatagcttgtcattttcaagttcattttttattcatatttatgttcatggttgattgtaccttcccaagcccgcccagtgggatgggaggaggaggagaaggggggccttgggccgctgcagtcacatctgtccagagaaattccttttgggactggaggcagaaaagcggccagaaggcagcagccctggctcctttcctttggcaggttggggaagggcttgcccccagccttaggatttcagggtttgactgggggcgtggagagagagggaggaacctcaataaccttgaaggtggaatccagttatttcctgcgctgcgagggtttctttatttcactcttttctgaatgtcaaggcagtgaggtgcctctcactgtgaatttgtggtgggcgggggctggaggagagggtgggggactggctccgtccctcccagccttctgctgcccttgcttaacaatgccggccaactggcgacctcacggttgcacttccattccaccagaatgacctgatgaggaaatcttcaataggatgcaaagatcaatgcaaaaattgttatatatgaacatataactggagtcgtcaaaaagcaaattaagaaagaattggacgttagaagttgtcatttaaagcagccttctaataaagttgtttcaaagctga

SEQ ID NO: 183428 - DNA, 905 bp, Homo sapiens
  Payload ID: 16139
  Gene Symbol: SLC25A25
  Gene Name: solute carrier family 25 (mitochondrial carrier
  phosphate carrier), member 25
  ENST ID: ENST00000466983
  CDS Start-End: 1-496
cacagtggaggagaggcagacggggatgtggtggagacacctggtggcaggaggtggggcaggggccgtatccagaacctgcacggcccccctggacaggctcaaggtgctcatgcaggtcctgaagacccggatggcgctgcggaagacaggccagtactcaggaatgctggactgcgccaggaggatcctggccagagagggggtggccgccttctacaaaggctatgtccccaacatgctgggcatcatcccctatgccggcatcgaccttgcagtctacgagacgctcaagaatgcctggctgcagcactatgcagtgaacagcgcggaccccggcgtgtttgtgctcctggcctgtggcaccatgtccagtacctgtggccagctggccagctaccccctggccctagtcaggacccggatgcaggcgcaaggtaaggctggccctggacagtcccctgggaggtcggggggagcggacagaagcatctgactggtggcctccatcctgcagcctctattgagggcgctccggaggtgaccatgagcagcctcttcaaacatatcctgcggaccgagggggccttcgggctgtacagggggctggcccccaacttcatgaaggtcatcccagctgtgagcatcagctacgtggtctacgagaacctgaagatcaccctgggcgtgcagtcgcggtgacggggggagggccgcccggcagtggactcgctgatcctgggccgcagcctggggtgtgcagccatctcattctgtgaatgtgccaacactaagctgtctcgagccaagctgtgaaaaccctagacgcacccgcagggagggtggggagagctggcaggcccagggcttgtcctgctgaccccagcagaccctcctgttggttc

SEQ ID NO: 183429 - DNA, 676 bp, Homo sapiens
  Payload ID: 16139
  Gene Symbol: SLC25A25
  Gene Name: solute carrier family 25 (mitochondrial carrier
  phosphate carrier), member 25
  ENST ID: ENST00000472769
  CDS Start-End: 31-258
gggcagtggagcacccagcaggccgccaacatgctctgtctgtgcctgtatgtgccggtcatcggggaagcccagaccgagttccagtactttgagtcgaaggggctccctgccgagctgaagtccattttcaagctcagtgtcttcatcccctcccaggaattctccacctaccgccagtggaagcagtgcccactgtgcaccaagggggatttgcagatccaaggaaggagacagaaggaggcccaggccctgtgaggcagaagcaagcactttgagaatgcgttgaagccagctgcgaaaattgtacaagctggagataaggaccttgatgggcagctagactttgaagaatttgtccattatctccaagatcatgagaagaagctgaggctggtgtttaagagtttggacaaaaagaatgatggacgcattgacgcgcaggagatcatgcagtccctgcgggacttgggagtcaagatatctgaacagcaggcagaaaaaattctcaagagcatggataaaaacggcacgatgaccattgactggaacgagtggagagactaccacctcctccaccccgtggaaaacatccccgagatcatcctctactggaagcattccacgatctttgatgtgggtgagaatctaacggtcccggatgagttcacagtgg

SEQ ID NO: 183430 - DNA, 1909 bp, Homo sapiens
  Payload ID: 16140
  Gene Symbol: SLC25A3
  Gene Name: solute carrier family 25 (mitochondrial carrier
  phosphate carrier), member 3
  Uniprot ID: Q00325
  ENST ID: ENST00000188376
  CDS Start-End: 355-1440
gtgtgcgtcacgccgacgacgcgcgaagggcacacatcttaggacccggaggacgtccggcctctgtgagccgcaacctttccaagggagtggttgtgtgatcgccatcttagggagtgagtgtggccgggccttctcctgtggcgggtgtggggagcggagcccagagctcctgtggggccgctgctttggcggtgggcccagccgggagcagcctctttcgaaggccgccgtgacctcttcaagggcgtggagacgggaaggaaaaggccccggttggggttccagggcgccggtaacgttaaccggcgccttgcctgtcctctaaccgtcgctccctcctcccctagaaagatgttctcgtccgtggcgcacctggcgcgggcgaaccccttcaacacgccacatctgcagctggtgcacgatggtctcggggacctccgcagcagctccccagggcccacgggccagccccgccgccctcgcaacctggcagccgccgccgtggaagagtacagttgtgaatttggctccgcgaagtattatgcactgtgtggctttggtggggtcttaagttgtggtctgacacacactgctgtggttcccctggatttagtgaaatgccgtatgcaggtggacccccaaaagtacaagggcatatttaacggattctcagttacacttaaagaggatggtgttcgtggtttggctaaaggatgggctccgactttccttggctactccatgcagggactctgcaagtttggcttttatgaagtctttaaagtcttgtatagcaatatgcttggagaggagaatacttatctctggcgcacatcactatatttggctgcctctgccagtgctgaattctttgctgacattgccctggctcctatggaagctgctaaggttcgaattcaaacccagccaggttatgccaacactttgagggatgcagctcccaaaatgtataaggaagaaggcctaaaagcattctacaagggggttgctcctctctggatgagacagataccatacaccatgatgaagttcgcctgctttgaacgtactgttgaagcactgtacaagtttgtggttcctaagccccgcagtgaatgttcaaagccagagcagctggttgtaacatttgtagcaggttacatagctggagtcttttgtgcaattgtttctcaccctgctgattctgtggtatctgtgttgaataaagaaaaaggtagcagtgcttctctggtcctcaagagacttggatttaaaggtgtatggaagggactgtttgcccgtatcatcatgattggtaccctgactgcactacagtggtttatctatgactccgtgaaggtctacttcagacttcctcgccctcctccacccgagatgccagagtctctgaagaagaagcttgggttaactcagtagttagatcaaagcaaatgtggactgaatctgcttgttgatcagtgttgaagaaagtgcaaaaggaacttttatatatttgacagtgtaggaaattgtctattcctgatataattactgtagtactcttgcttaaggcaagagtttcagatttactgttgaaataaacccaactcttcatgatttgcctgtgacttatttttaaaacttttttaaaaaagatttagctttaaaatagttggaaagaatgaagtatataagttaaggaaaaaatacaaaactgaccatgaccattgttggttgaatattccagttgctattcagaaattgtcatatgtctcaagttttatcacacaaagttcctgtatttctagggaagcagactttaaatttctaaaaacttgatttaattatagttaaatatgtgtagtcatttgtggttattttggcaagtaaatgtcagtgtatactt

SEQ ID NO: 183431 - DNA, 1678 bp, Homo sapiens
  Payload ID: 16140
  Gene Symbol: SLC25A3
  Gene Name: solute carrier family 25 (mitochondrial carrier
  phosphate carrier), member 3
  Uniprot ID: Q00325
  ENST ID: ENST00000228318
  CDS Start-End: 121-1209
gtgtgcgtcacgccgacgacgcgcgaagggcacacatcttaggacccggaggacgtccggcctctgtgagccgcaacctttccaagggagtggttgtgtgatcgccatcttagggaaaagatgttctcgtccgtggcgcacctggcgcgggcgaaccccttcaacacgccacatctgcagctggtgcacgatggtctcggggacctccgcagcagctccccagggcccacgggccagccccgccgccctcgcaacctggcagccgccgccgtggaagagcagtatagctgtgactatggatctggcagattctttatcctttgtggacttggaggaattattagctgtggcacaacacatacagcattggttcctctagatctggttaaatgcagaatgcaggtggacccccaaaagtacaagggcatatttaacggattctcagttacacttaaagaggatggtgttcgtggtttggctaaaggatgggctccgactttccttggctactccatgcagggactctgcaagtttggcttttatgaagtctttaaagtcttgtatagcaatatgcttggagaggagaatacttatctctggcgcacatcactatatttggctgcctctgccagtgctgaattctttgctgacattgccctggctcctatggaagctgctaaggttcgaattcaaacccagccaggttatgccaacactttgagggatgcagctcccaaaatgtataaggaagaaggcctaaaagcattctacaagggggttgctcctctctggatgagacagataccatacaccatgatgaagttcgcctgctttgaacgtactgttgaagcactgtacaagtttgtggttcctaagccccgcagtgaatgttcaaagccagagcagctggttgtaacatttgtagcaggttacatagctggagtcttttgtgcaattgtttctcaccctgctgattctgtggtatctgtgttgaataaagaaaaaggtagcagtgcttctctggtcctcaagagacttggatttaaaggtgtatggaagggactgtttgcccgtatcatcatgattggtaccctgactgcactacagtggtttatctatgactccgtgaaggtctacttcagacttcctcgccctcctccacccgagatgccagagtctctgaagaagaagcttgggttaactcagtagttagatcaaagcaaatgtggactgaatctgcttgttgatcagtgttgaagaaagtgcaaaaggaacttttatatatttgacagtgtaggaaattgtctattcctgatataattactgtagtactcttgcttaaggcaagagtttcagatttactgttgaaataaacccaactcttcatgatttgcctgtgacttatttttaaaacttttttaaaaaagatttagctttaaaatagttggaaagaatgaagtatataagttaaggaaaaaatacaaaactgaccatgaccattgttggttgaatattccagttgctattcagaaattgtcatatgtctcaagttttatcacacaaagttcctgtatttctagggaagcagactttaaatttctaaaaacttgatttaattatagttaaatatgtgtagtcatttgtggttattttggcaagtaaatgtcagtgtatactt

SEQ ID NO: 183432 - DNA, 6087 bp, Homo sapiens
  Payload ID: 16140
  Gene Symbol: SLC25A3
  Gene Name: solute carrier family 25 (mitochondrial carrier
  phosphate carrier), member 3
  Uniprot ID: Q00325
  ENST ID: ENST00000401722
  CDS Start-End: 151-1236
accaatgggcgacgcgtacttgcagtggcgcgctgtgtgcgtcacgccgacgacgcgcgaagggcacacatcttaggacccggaggacgtccggcctctgtgagccgcaacctttccaagggagtggttgtgtgatcgccatcttagggaatgttctcgtccgtggcgcacctggcgcgggcgaaccccttcaacacgccacatctgcagctggtgcacgatggtctcggggacctccgcagcagctccccagggcccacgggccagccccgccgccctcgcaacctggcagccgccgccgtggaagagtacagttgtgaatttggctccgcgaagtattatgcactgtgtggctttggtggggtcttaagttgtggtctgacacacactgctgtggttcccctggatttagtgaaatgccgtatgcaggtggacccccaaaagtacaagggcatatttaacggattctcagttacacttaaagaggatggtgttcgtggtttggctaaaggatgggctccgactttccttggctactccatgcagggactctgcaagtttggcttttatgaagtctttaaagtcttgtatagcaatatgcttggagaggagaatacttatctctggcgcacatcactatatttggctgcctctgccagtgctgaattctttgctgacattgccctggctcctatggaagctgctaaggttcgaattcaaacccagccaggttatgccaacactttgagggatgcagctcccaaaatgtataaggaagaaggcctaaaagcattctacaagggggttgctcctctctggatgagacagataccatacaccatgatgaagttcgcctgctttgaacgtactgttgaagcactgtacaagtttgtggttcctaagccccgcagtgaatgttcaaagccagagcagctggttgtaacatttgtagcaggttacatagctggagtcttttgtgcaattgtttctcaccctgctgattctgtggtatctgtgttgaataaagaaaaaggtagcagtgcttctctggtcctcaagagacttggatttaaaggtgtatggaagggactgtttgcccgtatcatcatgattggtaccctgactgcactacagtggtttatctatgactccgtgaaggtctacttcagacttcctcgccctcctccacccgagatgccagagtctctgaagaagaagcttgggttaactcagtagttagatcaaagcaaatgtggactgaatctgcttgttgatcagtgttgaagaaagtgcaaaaggaacttttatatatttgacagtgtaggaaattgtctattcctgatataattactgtagtactcttgcttaaggcaagagtttcagatttactgttgaaataaacccaactcttcatgatttgcctgtgacttatttttaaaacttttttaaaaaagatttagctttaaaatagttggaaagaatgaagtatataagttaaggaaaaaatacaaaactgaccatgaccattgttggttgaatattccagttgctattcagaaattgtcatatgtctcaagttttatcacacaaagttcctgtatttctagggaagcagactttaaatttctaaaaacttgatttaattatagttaaatatgtgtagtcatttgtggttattttggcaagtaaatgtcagtgtatacttacatttttgcagcatgtactacaccttttttatgttggtgagtttgctaatccttatttgtaagacaaggtaaaccaaattaggctgattcttagaatgacagtaaaggaccaaagtgattgacagctgaaaacaattttcaggtacactaattctctttacacagatctgactttttttttttttgagacggagtttcactcttgttgcccagacgagtgtagtgtcgcgatctcgcctcacggcaacctctgcctcccaggttcaagcgattgttctgcctcagcctcccaagtagctgggatttcaggcatgtgccaccacgcccagctaattttgtatttttagtagagacggggtttccctgtgttggtcaggctggtctcgaacttccaacctcaggtgatccgcccgcctcagcctcccaaactgctgggattataggcatgagccaccgtgcccggctctgactttttacagaaaattgaactattttcagtctggtattttaagaaaggtactgcttgacagctgaactatatgaatgccactggggaaaaagcattccatcatacttagatacgagattggattgtaggtttaagcccatttttaaagagctcctagaaagtgaattagtttttgtgtttagattccccttaagtttgattaggaagtgtataaaagttcaatcttttgtaatgacagcccaccactggaaaaaaaacgaaaaacctagtgtaatatataacatgctgtttttcaaacactagattttacctagagtccttatgtgtaatacgtgggttggttaacagtccctacgtaaagcgtacagatggcctggagagaaaaactttttcagagattggagagaaatgttactacaaactcatggtaaggtcagtgaactcaatttagaagccagtgcagctagttgcatgttaacttctttatatcatcattgcctgaacttgttaaaggttccaacattttacctgtgctgcaggaaaaaaggaaaagttgtaggtacaaatttggaccaaactttaaaaaggtaaagtaggatgtcttctgaacccaaccaagtggtggctgtggtgcttagcagtatcaactgtatattatttcttgctatgttagcaaagcatccaaagatcaatggtgtatgataagcttttctgtgggtgaagaactcgggagtatcagactcttctggttctgagtctcatgaagcttttcacttctgagctgaaaggatgctctttgtgcttttcactattagtggtatagtctttcccgaaaatctctagcatggtggcttcagggcagctggacttaggtggtattttggggctccaggagagcttggcagagttggctttttaggacttatccttcaatgtcacataacatcacttttaccatgctcttggttacaacagtgatgtctcagaaaccaagtcccagattgaggaaaaaaggaacatagtctctacctcttcctgagaggaaagtcagtcaacgtgtaagaggagcagtagaaacgcattagtccagccaacgtgaaagtggaccgtagatctaaaacattttgggtatgcagttcagccagcccttactgaggcagttctgccaatcaggattcaagttttatttcctaagagttataataggttttatttgtgggcattgatacaaaatacgctgtgttcaagctatggagcctgccactgtagttactagagttacggttcaaagctatttctgagagaaagccacttcatcctcaaaacccaagaggcccacttaaagtgatgcgaattctcatttcaggtttttaaattatactaaaagattctagtaagaaaattttaatatgtatgtattggtgttctttttacatttcatttaatgaaatgtctactgtcaatacgataaagcagaacccagtggagtaagaatacacgaaactgccaggcacagtgggtcatgcctgtaaacccagcattctgggaggccgaggcgggtggatcacctgaggtcgggagttcaagaccagcctgaccaacatggagaaaccctgtctctactaaaaatacaaaattagctgcggtggtggtgcgtgcctgtaatcccagctactcaggaggctgaggcaggagaatcgcttgaacccgggaggcggaggttgtggtgagccaagattgcgccattgcactccagcctgggcaacaacagcgaaactctgtctcaaaaaaaaaaaatatatatatatatatatatatatgaagctgatagttgaattatgttgattcagggacaagatagcattgcatagtaacttccagtaggatcaaatattttgagagtggttaaaacgccaaggaatcctgattttatgaaattatgccttctgataggtgcaacaaaattgaacagaagagtaacagcttaactaaacctccattgtgtgaaagttttatgaaatgttttgacttttttttttttttccctagagaacagggttcttgctttgtcgcccaggctggagtacagccttgaactcctgggctcaagcgatcctcctgcctcagcctcccagttagctgacacaattgggatgtgccactacttgctcctgttttttcatagacgggtcctgctgttgctcaggctggtctcggattcctggcctcaagcaactttcctgccccagctcctaaagcggccagggttacaggtagccgccttgtctgtcccgtttcgaccatattttatttttgagaaggtcttgctctgtcgccagactggagtgcagtggcacgatgatagctcactgcagcctcgatctcccaagctcaagtgatcctcccacctcagcctcttgaataactgggactgcaagtgtggaccaccatgtctggctaatgttttttatttttagcagaaatgaggtcttgctatgttgccaaggctagtcttgaactcctgagctcaagcgagccttctgccttggccttccaaagggctgggattagagggctgagccaccacacttggccaaccatattttattttttatatttttattttatttgatccttgttctgaaaccataaagtgagtttaacatttctggctgggcacagtggctcatgcctgtaattctaacactttaggagaccaaggcaggaggatgccttgagcccaggagtttgagaccatcctggacaacataatgagaaaagaaaatacaaaaattaaggggtgtggtgacacatgcctgtagtctcaactatttgggaggctgaggcaggaggattgcttgagcccgagaggttgaggctacagtgagccatgtttacgccattgcagtccagcctgggcgacagagtgaaaccctgtctcaaaaaaaaagtaacatttctatatgatttttgggatcgacatgtccataatgttaatgaagcgcatagcagtcactagtaaattaggagttatacattgcttctatagcatcagaaattgtatatcaggccaggtgcaaaagctcactcctgaaatccaagcactttgggaggctgaggtgggcggattgcttgaggtcaggagttcaagaacagcctggccaacatgatgaaaccccaggtctctactaaaaatacaaaaattggtcaggcatggtggtgcatgcctgtaattccagctactcgggaggctgaggcaggagaattgcttgaacccgggaggcagaggttgcagtgagccaagattgtgccactgcactccagcctgggcgacagagccagactgtctgaggaagaaattgtatatcaggctgggcacagtggctcatacccgtaatcccagcactttgggaggcccaggctgggtatcacttgagcccaggagttggagaccagcctgggcaacaaagtgagacccctctctctacaaaaaataaattagccaggcatggtggcacgtgcctgtaatctcagctacttaggaagctgaaggaggatcgtctgagcccaggagtttgaggctgcaatgagctacaatcacacccctgcactccggcctgggcgacagagtgataacctgtctaaaaaaataaaaataaattgtataatcatattgcaattttctttgcattactgatgaggaaaaatctcaaagtaattgtaaaaaatcctggatatcacatagttgagaaacaaagttattttaaacttacaggactctgtagttcacagttgaacactgtggcttcctgaaatatcaaagaataatgtacattaataagccagctactatcggcatcttgtaaaaattaaaaaattaaacataaataaaagttcaaactatgtgttgaa

SEQ ID NO: 183433 - DNA, 1359 bp, Homo sapiens
  Payload ID: 16140
  Gene Symbol: SLC25A3
  Gene Name: solute carrier family 25 (mitochondrial carrier
  phosphate carrier), member 3
  Uniprot ID: Q00325
  ENST ID: ENST00000551917
  CDS Start-End: 92-1180
aagggcacacatcttaggacccggaggacgtccggcctctgtgagccgcaacctttccaagggagtggttgtgtgatcgccatcttagggaatgttctcgtccgtggcgcacctggcgcgggcgaaccccttcaacacgccacatctgcagctggtgcacgatggtctcggggacctccgcagcagctccccagggcccacgggccagccccgccgccctcgcaacctggcagccgccgccgtggaagagcagtatagctgtgactatggatctggcagattctttatcctttgtggacttggaggaattattagctgtggcacaacacatacagcattggttcctctagatctggttaaatgcagaatgcaggtggacccccaaaagtacaagggcatatttaacggattctcagttacacttaaagaggatggtgttcgtggtttggctaaaggatgggctccgactttccttggctactccatgcagggactctgcaagtttggcttttatgaagtctttaaagtcttgtatagcaatatgcttggagaggagaatacttatctctggcgcacatcactatatttggctgcctctgccagtgctgaattctttgctgacattgccctggctcctatggaagctgctaaggttcgaattcaaacccagccaggttatgccaacactttgagggatgcagctcccaaaatgtataaggaagaaggcctaaaagcattctacaagggggttgctcctctctggatgagacagataccatacaccatgatgaagttcgcctgctttgaacgtactgttgaagcactgtacaagtttgtggttcctaagccccgcagtgaatgttcaaagccagagcagctggttgtaacatttgtagcaggttacatagctggagtcttttgtgcaattgtttctcaccctgctgattctgtggtatctgtgttgaataaagaaaaaggtagcagtgcttctctggtcctcaagagacttggatttaaaggtgtatggaagggactgtttgcccgtatcatcatgattggtaccctgactgcactacagtggtttatctatgactccgtgaaggtctacttcagacttcctcgccctcctccacccgagatgccagagtctctgaagaagaagcttgggttaactcagtagttagatcaaagcaaatgtggactgaatctgcttgttgatcagtgttgaagaaagtgcaaaaggaacttttatatatttgacagtgtaggaaattgtctattcctgatataattactgtagtactcttgcttaaggcaagagtttcagatttactgttgaaataaacccaactcttcatg

SEQ ID NO: 183434 - DNA, 550 bp, Homo sapiens
  Payload ID: 16140
  Gene Symbol: SLC25A3
  Gene Name: solute carrier family 25 (mitochondrial carrier
  phosphate carrier), member 3
  ENST ID: ENST00000548046
  CDS Start-End: 90-550
acacatcttaggacccggaggacgtccggcctctgtgagccgcaacctttccaagggagtggttgtgtgatcgccatcttagggaaaagatgttctcgtccgtggcgcacctggcgcgggcgaaccccttcaacacgccacatctgcagctggtgcacgatggtctcggggacctccgcagcagctccccagggcccacgggccagccccgccgccctcgcaacctggcagccgccgccgtggaagagcagtatagctgtgactatggatctggcagattctttatcctttgtggacttggaggaattattagctgtggcacaacacatacagcattggttcctctagatctggttaaatgcagaatgcaggtggacccccaaaagtacaagggcatatttaacggattctcagttacacttaaagaggatggtgttcgtggtttggctaaaggatgggctccgactttccttggctactccatgcagggactctgcaagtttggcttttatgaagtctttaaagtcttgtatagcaatatgcttggaga

SEQ ID NO: 183435 - DNA, 1285 bp, Homo sapiens
  Payload ID: 16140
  Gene Symbol: SLC25A3
  Gene Name: solute carrier family 25 (mitochondrial carrier
  phosphate carrier), member 3
  Uniprot ID: Q00325
  ENST ID: ENST00000549338
  CDS Start-End: 54-1139
cgcaacctttccaagggagtggttgtgtgatcgccatcttagggagtgaaaagatgttctcgtccgtggcgcacctggcgcgggcgaaccccttcaacacgccacatctgcagctggtgcacgatggtctcggggacctccgcagcagctccccagggcccacgggccagccccgccgccctcgcaacctggcagccgccgccgtggaagagtacagttgtgaatttggctccgcgaagtattatgcactgtgtggctttggtggggtcttaagttgtggtctgacacacactgctgtggttcccctggatttagtgaaatgccgtatgcaggtggacccccaaaagtacaagggcatatttaacggattctcagttacacttaaagaggatggtgttcgtggtttggctaaaggatgggctccgactttccttggctactccatgcagggactctgcaagtttggcttttatgaagtctttaaagtcttgtatagcaatatgcttggagaggagaatacttatctctggcgcacatcactatatttggctgcctctgccagtgctgaattctttgctgacattgccctggctcctatggaagctgctaaggttcgaattcaaacccagccaggttatgccaacactttgagggatgcagctcccaaaatgtataaggaagaaggcctaaaagcattctacaagggggttgctcctctctggatgagacagataccatacaccatgatgaagttcgcctgctttgaacgtactgttgaagcactgtacaagtttgtggttcctaagccccgcagtgaatgttcaaagccagagcagctggttgtaacatttgtagcaggttacatagctggagtcttttgtgcaattgtttctcaccctgctgattctgtggtatctgtgttgaataaagaaaaaggtagcagtgcttctctggtcctcaagagacttggatttaaaggtgtatggaagggactgtttgcccgtatcatcatgattggtaccctgactgcactacagtggtttatctatgactccgtgaaggtctacttcagacttcctcgccctcctccacccgagatgccagagtctctgaagaagaagcttgggttaactcagtagttagatcaaagcaaatgtggactgaatctgcttgttgatcagtgttgaagaaagtgcaaaaggaacttttatatatttgacagtgtaggaaattgtctattcctgatataattactgtagtactcttgcttaaggcaagagtttca

SEQ ID NO: 183436 - DNA, 1351 bp, Homo sapiens
  Payload ID: 16140
  Gene Symbol: SLC25A3
  Gene Name: solute carrier family 25 (mitochondrial carrier
  phosphate carrier), member 3
  Uniprot ID: Q00325
  ENST ID: ENST00000552981
  CDS Start-End: 86-1171
atcttaggacccggaggacgtccggcctctgtgagccgcaacctttccaagggagtggttgtgtgatcgccatcttagggaaaagatgttctcgtccgtggcgcacctggcgcgggcgaaccccttcaacacgccacatctgcagctggtgcacgatggtctcggggacctccgcagcagctccccagggcccacgggccagccccgccgccctcgcaacctggcagccgccgccgtggaagagtacagttgtgaatttggctccgcgaagtattatgcactgtgtggctttggtggggtcttaagttgtggtctgacacacactgctgtggttcccctggatttagtgaaatgccgtatgcaggtggacccccaaaagtacaagggcatatttaacggattctcagttacacttaaagaggatggtgttcgtggtttggctaaaggatgggctccgactttccttggctactccatgcagggactctgcaagtttggcttttatgaagtctttaaagtcttgtatagcaatatgcttggagaggagaatacttatctctggcgcacatcactatatttggctgcctctgccagtgctgaattctttgctgacattgccctggctcctatggaagctgctaaggttcgaattcaaacccagccaggttatgccaacactttgagggatgcagctcccaaaatgtataaggaagaaggcctaaaagcattctacaagggggttgctcctctctggatgagacagataccatacaccatgatgaagttcgcctgctttgaacgtactgttgaagcactgtacaagtttgtggttcctaagccccgcagtgaatgttcaaagccagagcagctggttgtaacatttgtagcaggttacatagctggagtcttttgtgcaattgtttctcaccctgctgattctgtggtatctgtgttgaataaagaaaaaggtagcagtgcttctctggtcctcaagagacttggatttaaaggtgtatggaagggactgtttgcccgtatcatcatgattggtaccctgactgcactacagtggtttatctatgactccgtgaaggtctacttcagacttcctcgccctcctccacccgagatgccagagtctctgaagaagaagcttgggttaactcagtagttagatcaaagcaaatgtggactgaatctgcttgttgatcagtgttgaagaaagtgcaaaaggaacttttatatatttgacagtgtaggaaattgtctattcctgatataattactgtagtactcttgcttaaggcaagagtttcagatttactgttgaaataaacccaactcttcatga

SEQ ID NO: 183437 - DNA, 580 bp, Homo sapiens
  Payload ID: 16140
  Gene Symbol: SLC25A3
  Gene Name: solute carrier family 25 (mitochondrial carrier
  phosphate carrier), member 3
  ENST ID: ENST00000551265
  CDS Start-End: 56-424
ctctgtgagccgcaacctttccaagggagtggttgtgtgatcgccatcttagggaatgttctcgtccgtggcgcacctggcgcgggcgaaccccttcaacacgccacatctgcagctggtgcacgatggtctcggggacctccgcagcagctccccagggcccacgggccagccccgccgccctcgcaacctggcagccgccgccgtggaaggtgagatcagaccctgcccaatacagtcgtgtggtctacttgtgggccgcccagcctttgaggcctggacccggcttggaggacagggaaggacgagtccagcccgctgcaccgtaggacggcgcccagttgcttgccctggggtatcggccttttccaccataggcgggtgtcagatccttggccttccctcaagggcgtggaagcgctgaggccctgtgtcccttcgtgacctccgtgtgcccgagggaagagaggccgtgactagctctttctccgccgtgagctcgcttggtcagcaaactaagtactgggtaaactctcctcccgaaactactgaccacccacagttctactaactatattac

SEQ ID NO: 183438 - DNA, 1417 bp, Homo sapiens
  Payload ID: 16140
  Gene Symbol: SLC25A3
  Gene Name: solute carrier family 25 (mitochondrial carrier
  phosphate carrier), member 3
  ENST ID: ENST00000551123
  CDS Start-End: 46-360
cgcaacctttccaagggagtggttgtgtgatcgccatcttagggaatgttctcgtccgtggcgcacctggcgcgggcgaaccccttcaacacgccacatctgcagctggtgcacgatggtctcggggacctccgcagcagctccccagggcccacgggccagccccgccgccctcgcaacctggcagccgccgccgtggaagagcagtatagctgtgactatggatctggcagattctttatcctttgtggacttggaggaattattagctgtggcacaacacatacagcattggttcctctagatctggttaaatgcagaatgcaggtttgttttgcatgctggactagagcatattgaagcatgactgactgttaagttataagatatagtcatctaacaagctgtgtggaaacctaactgtccaggaggtggacccccaaaagtacaagggcatatttaacggattctcagttacacttaaagaggatggtgttcgtggtttggctaaaggatgggctccgactttccttggctactccatgcagggactctgcaagtttggcttttatgaagtctttaaagtcttgtatagcaatatgcttggagaggagaatacttatctctggcgcacatcactatatttggctgcctctgccagtgctgaattctttgctgacattgccctggctcctatggaagctgctaaggttcgaattcaaacccagccaggttatgccaacactttgagggatgcagctcccaaaatgtataaggaagaaggcctaaaagcattctacaagggggttgctcctctctggatgagacagataccatacaccatgatgaagttcgcctgctttgaacgtactgttgaagcactgtacaagtttgtggttcctaagccccgcagtgaatgttcaaagccagagcagctggttgtaacatttgtagcaggttacatagctggagtcttttgtgcaattgtttctcaccctgctgattctgtggtatctgtgttgaataaagaaaaaggtagcagtgcttctctggtcctcaagagacttggatttaaaggtgtatggaagggactgtttgcccgtatcatcatgattggtaccctgactgcactacagtggtttatctatgactccgtgaaggtctacttcagacttcctcgccctcctccacccgagatgccagagtctctgaagaagaagcttgggttaactcagtagttagatcaaagcaaatgtggactgaatctgcttgttgatcagtgttgaagaaagtgcaaaaggaacttttatatatttgacagtgtaggaaattgtctattcctgatataattactgtagtactcttgcttaaggcaagagtttcagatttactgttgaaataaacccaactcttcatg

SEQ ID NO: 183439 - DNA, 1369 bp, Homo sapiens
  Payload ID: 16140
  Gene Symbol: SLC25A3
  Gene Name: solute carrier family 25 (mitochondrial carrier
  phosphate carrier), member 3
  ENST ID: ENST00000548847
  CDS Start-End: 255-1229
atcgccatcttagggagtgagtgtggccgggccttctcctgtggcgggtgtggggagcggagcccagagctcctgtggggccgctgctttggcggtgggcccagccgggagcagcctctttcgaaggccgccgtgacctcttcaagggcgtggagacgggaaggaaaaggccccggttggggttccagggcgccggtaacgttaaccggcgccttgcctgtcctctaaccgtcgctccctcctcccctagaaagatgttctcgtccgtggcgcacctggcgcgggcgaaccccttcaacacgccacatctgcagctggtgcacgatggtctcggggacctccgcagcagctccccagggcccacgggccagccccgccgccctcgcaacctggcagccgccgccgtggaagagtacagttgtgaatttggctccgcgaagtattatgcactgtgtggctttggtggggtcttaagttgtggtctgacacacactgctgtggttcccctggatttagtgaaatgccgtatgcaggtggacccccaaaagtacaagggcatatttaacggattctcagttacacttaaagaggatggtgttcgtggtttggctaaaggatgggctccgactttccttggctactccatgcagggactctgcaagtttggcttttatgaagtctttaaagtcttgtatagcaatatgcttggagaggagaatacttatctctggcgcacatcactatatttggctgcctctgccagtgctgaattctttgctgacattgccctggctcctatggaagctgctaaggttcgaattcaaacccagccaggttatgccaacactttgagggatgcagctcccaaaatgtataaggaagaaggcctaaaagcattctacaagggggttgctcctctctggatgagacagataccatacaccatgatgaagttcgcctgctttgaacgtactgttgaagcactgtacaagtttgtggttcctaagccccgcagtgaatgttcaaagccagagcagctggttgtaacatttgtagcaggttacataggtgtatggaagggactgtttgcccgtatcatcatgattggtaccctgactgcactacagtggtttatctatgactccgtgaaggtctacttcagacttcctcgccctcctccacccgagatgccagagtctctgaagaagaagcttgggttaactcagtagttagatcaaagcaaatgtggactgaatctgcttgttgatcagtgttgaagaaagtgcaaaaggaacttttatatatttgacagtgtaggaaattgtctattcctgatataattactgtagtactcttgcttaaggcaaga

SEQ ID NO: 183440 - DNA, 756 bp, Homo sapiens
  Payload ID: 16140
  Gene Symbol: SLC25A3
  Gene Name: solute carrier family 25 (mitochondrial carrier
  phosphate carrier), member 3
  ENST ID: ENST00000550695
  CDS Start-End: 294-756
ctctgtgagccgcaacctttccaagggagtggttgtgtgatcgccatcttagggagtgagtgtggccgggccttctcctgtggcgggtgtggggagcggagcccagagctcctgtggggccgctgctttggcggtgggcccagccgggagcagcctctttcgaaggccgccgtgacctcttcaagggcgtggagacgggaaggaaaaggccccggttggggttccagggcgccggtaacgttaaccggcgccttgcctgtcctctaaccgtcgctccctcctcccctagaaagatgttctcgtccgtggcgcacctggcgcgggcgaaccccttcaacacgccacatctgcagctggtgcacgatggtctcggggacctccgcagcagctccccagggcccacgggccagccccgccgccctcgcaacctggcagccgccgccgtggaagagcagtatagctgtgactatggatctggcagattctttatcctttgtggacttggaggaattattagctgtggcacaacacatacagcattggttcctctagatctggttaaatgcagaatgcaggtggacccccaaaagtacaagggcatatttaacggattctcagttacacttaaagaggatggtgttcgtggtttggctaaaggatgggctccgactttccttggctactccatgcagggactctgcaagtttggcttttatgaagtctttaaagtcttgtatagcaatatgcttggagagg

SEQ ID NO: 183441 - DNA, 556 bp, Homo sapiens
  Payload ID: 16140
  Gene Symbol: SLC25A3
  Gene Name: solute carrier family 25 (mitochondrial carrier
  phosphate carrier), member 3
  ENST ID: ENST00000547534
  CDS Start-End: 60-530
ctctgtgagccgcaacctttccaagggagtggttgtgtgatcgccatcttagggaaaagatgttctcgtccgtggcgcacctggcgcgggcgaaccccttcaacacgccacatctgcagctggtgcacgatggtctcggggacctccgcagcagctccccagggcccacgggccagccccgccgccctcgcaacctggcagccgccgccgtggaagagtacagttgtgaatttggctccgcgaagtattatgcactgtgtggctttggtggggtcttaagttgtggtctgacacacactgctgtggttcccctggatttagtgaaatgccgtatgcaggtggacccccaaaagtacaagggcatatttaacggattctcagttacacttaaagaggatggtgttcgtggtttggctaaaggatgggctccgactttccttggctactccatgcagggactctgcaagtttggcttttatgaagtctttaaagtcttgtatagcaatatgcttggagaggtatgtaattaactttaaaattgaatgttccgagtgtt

SEQ ID NO: 183442 - DNA, 2891 bp, Homo sapiens
  Payload ID: 16141
  Gene Symbol: SLC25A32
  Gene Name: solute carrier family 25 (mitochondrial folate carrier), member 32
  Uniprot ID: Q9H2D1
  ENST ID: ENST00000297578
  CDS Start-End: 168-1115
actagagtctccggcttcgctcacgcgccttgggcataagagtcctctcgttggtcccggaggtggggttgcgctcacaaggggcgaccgtcgccacggtggcggccactgcatcgcgtcccacctccgcggccctgggcgccgtggtgtcgacgggccccgagcctatgacgggccagggccagtcggcgtccgggtcgtcggcgtggagcacggtattccgccacgtccggtatgagaacctgatagcgggcgtgagcggcggcgtcttatccaaccttgcgctgcatccgctcgacctcgtgaagatccgcttcgccgtgagtgatggattggaactgagaccgaaatataatggaattttacattgcttgactaccatttggaaacttgatggactacggggactttatcaaggagtaaccccaaatatatggggtgcaggtttatcctggggactctactttttcttttacaatgccatcaagtcatataaaacagaaggaagagctgaacgtttagaggcaacagaataccttgtctcagctgctgaagctggagccatgaccctctgcattacaaacccattatgggtaacaaaaactcgccttatgttacagtatgatgctgttgttaactccccacaccgacaatataaaggaatgtttgatacacttgtgaaaatatataagtatgaaggtgtgcgtggattatataagggatttgttcctgggctgtttggaacatcgcatggtgcccttcagtttatggcatatgaattgctgaagttgaagtacaaccagcatatcaatagattaccagaagcccagttgagcacagtagaatatatatctgttgcagcactatccaaaatatttgctgtcgcagcaacatacccatatcaagtcgtaagagctcgtcttcaggatcaacacatgttttacagtggtgtaatagatgtaatcacaaagacatggaggaaagaaggcgtcggtggattttacaagggaattgctcctaatttgattagagtgactccagcctgctgtattacctttgtggtatatgaaaacgtctcacattttttacttgaccttagagaaaagagaaagtaagctcaaagaggacaattccagtatatctgcccaaggcagcaacaagctcttttgtgtttaaggcataaaagaagaattctgcatagaaacatggctcatattcgaaattgctctatagtcattagaagccagagaactgctaagtctcctgcaatgtttttcttgctttttgccttccccatatatatggaacttggctacctctgcctgaaatggctgccatcaacacaatgttaaaactgacacgaaggatagagtttcacagatttctacgttttattggtggaagctgatttgcaacatttgctaaatggattagatgaatgtacttctttttgtgagcttacttgcctggattgctttaaaattaacctttgtgcaataccaagaaaatagctctttaaaagaatgtctttgtatgtctcaaggtaaattaaggatttactgaataaggtgttgaccaaatccagaccattttattttatttttttatttatttattttttgagatggagtcttgctttgtcgcccaggctggagtgcagtggcgtgatctcagctcactgcaacctccacctcccgggttcacgccattctcctgcctcagcctcctgagtagctgggactacaggcacctgccaccacgcctggctaacttttttttatattttgagtagaaatggggtttcaccatgttagccaggatggtctcaatctcctgaccttgtgatccgcctgccttggcctcccaaagtgctgggattacaggcgtgagccactgcgcctggccagaccattttagaattgggaaattttagtgagaaaaaatgcactgtaaatatgctttagttttaattcagttgggatgcactacctagcgaaaattgagaaactatatacttctcagagaaatatctgacatctattgtcattccattgctattttttttccccagagacttccataatttaaaataaaatcctagatccagttcttgttttttggcataaatacttaatctattttaaatttataaaatctgagcttctaggatccagctgtgtcaacctttatttagcatatataactataaatcacttattacagatgctaaatagatcaccttttacagatgctgaaatgtttgggatatgtttgttgacaaggtaaatggaaatgagaaactttatacttcagttttcagatatatggatctagatcccaaataaatgattaatcttcattggtttctcaaattcaggttgaaatacaaattaatagcctttattgattttacttttatgagtcattgtagacatctataaatataaaagggcctgtacccaaaggatgccagaatactagtatttttatttatcgtaaacatccacgagtgctgttgcactaccatctatttgttgtaaataaaagtgttgttttcaaagccatctttaaatagttctttaaaaataggtcttttttttatattttggaaaaggcattgtttttaaagtaaagataaaatggtaagtacctaattgtatttactgtaatatcttataacatgcagatgaatgctttataagttaaatatgatgtattttttcatacttctggattatactataattcatatgaaatcttgatattagtccccacacggaaaaagtgaactgcagttgatatttggtgtttaagatagcaccattgtttaaataccgcctatgtactcccaaatgaataaaacataattcttgtcctctgagagcatacaa

SEQ ID NO: 183443 - DNA, 2711 bp, Homo sapiens
  Payload ID: 16141
  Gene Symbol: SLC25A32
  Gene Name: solute carrier family 25 (mitochondrial folate carrier), member 32
  ENST ID: ENST00000523256
  CDS Start-End: 235-606
acctcccctccatcgcgctttccgccggcgtgacgtagtgtctgtgccccgttcttgccccctcagtactagagtctccggcttcgctcacgcgccttgggcataagagtcctctcgttggtcccggaggtggggttgcgctcacaaggggcgaccgtcgccacggtggcggccactgcatcgcgtcccacctccgcggccctgggcgccgtggtgtcgacgggccccgagcctatgacgggccagggccagtcggcgtccgggtcgtcggcgtggagcacggtattccgccacgtccggtatgagaacctgatagcgggcgtgagcggcggcgtcttatccaaccttgcgctgcatccgctcgacctcgtgaagatccgcttcgccgtgagtgatggattggaactgagaccgaaatataatggaattttacattgcttgactaccatttggaaacttgatggactacggggactttatcaaggagtaaccccaaatatatggggtgcaggtttatcctggggactctactttttcttggatttgttcctgggctgtttggaacatcgcatggtgcccttcagtttatggcatatgaattgctgaagttgaagtacaaccagcatatcaatagattaccagaagcccagttgagcacagtagaatatatatctgttgcagcactatccaaaatatttgctgtcgcagcaacatacccatatcaagtcgtaagagctcgtcttcaggatcaacacatgttttacagtggtgtaatagatgtaatcacaaagacatggaggaaagaaggcgtcggtggattttacaagggaattgctcctaatttgattagagtgactccagcctgctgtattacctttgtggtatatgaaaacgtctcacattttttacttgaccttagagaaaagagaaagtaagctcaaagaggacaattccagtatatctgcccaaggcagcaacaagctcttttgtgtttaaggcataaaagaagaattctgcatagaaacatggctcatattcgaaattgctctatagtcattagaagccagagaactgctaagtctcctgcaatgtttttcttgctttttgccttccccatatatatggaacttggctacctctgcctgaaatggctgccatcaacacaatgttaaaactgacacgaaggatagagtttcacagatttctacgttttattggtggaagctgatttgcaacatttgctaaatggattagatgaatgtacttctttttgtgagcttacttgcctggattgctttaaaattaacctttgtgcaataccaagaaaatagctctttaaaagaatgtctttgtatgtctcaaggtaaattaaggatttactgaataaggtgttgaccaaatccagaccattttattttatttttttatttatttattttttgagatggagtcttgctttgtcgcccaggctggagtgcagtggcgtgatctcagctcactgcaacctccacctcccgggttcacgccattctcctgcctcagcctcctgagtagctgggactacaggcacctgccaccacgcctggctaacttttttttatattttgagtagaaatggggtttcaccatgttagccaggatggtctcaatctcctgaccttgtgatccgcctgccttggcctcccaaagtgctgggattacaggcgtgagccactgcgcctggccagaccattttagaattgggaaattttagtgagaaaaaatgcactgtaaatatgctttagttttaattcagttgggatgcactacctagcgaaaattgagaaactatatacttctcagagaaatatctgacatctattgtcattccattgctattttttttccccagagacttccataatttaaaataaaatcctagatccagttcttgttttttggcataaatacttaatctattttaaatttataaaatctgagcttctaggatccagctgtgtcaacctttatttagcatatataactataaatcacttattacagatgctaaatagatcaccttttacagatgctgaaatgtttgggatatgtttgttgacaaggtaaatggaaatgagaaactttatacttcagttttcagatatatggatctagatcccaaataaatgattaatcttcattggtttctcaaattcaggttgaaatacaaattaatagcctttattgattttacttttatgagtcattgtagacatctataaatataaaagggcctgtacccaaaggatgccagaatactagtatttttatttatcgtaaacatccacgagtgctgttgcactaccatctatttgttgtaaataaaagtgttgttttcaaagccatctttaaatagttctttaaaaataggtcttttttttatattttggaaaaggcattgtttttaaagtaaagataaaatggtaagtacctaattgtatttactgtaatatcttataacatgcagatgaatgctttataagttaaatatgatgtattttttcatacttctggattatactataattcatatgaaatcttgatattagtccccacacggaaaaagtgaactgcagttgatatttggtgtttaagatagcaccattgtttaaataccgcctatgtactcccaaatgaataaaacataattcttgtcctctgagagcatacaa

SEQ ID NO: 183444 - DNA, 1347 bp, Homo sapiens
  Payload ID: 16141
  Gene Symbol: SLC25A32
  Gene Name: solute carrier family 25 (mitochondrial folate carrier), member 32
  ENST ID: ENST00000523866
  CDS Start-End: 133-504
ataagagtcctctcgttggtcccggaggtggggttgcgctcacaaggggcgaccgtcgccacggtggcggccactgcatcgcgtcccacctccgcggccctgggcgccgtggtgtcgacgggccccgagcctatgacgggccagggccagtcggcgtccgggtcgtcggcgtggagcacggtattccgccacgtccggtatgagaacctgatagcgggcgtgagcggcggcgtcttatccaaccttgcgctgcatccgctcgacctcgtgaagatccgcttcgccgtgagtgatggattggaactgagaccgaaatataatggaattttacattgcttgactaccatttggaaacttgatggactacggggactttatcaaggagtaaccccaaatatatggggtgcaggtttatcctggggactctactttttcttgagccatgaccctctgcattacaaacccattatgggtaacaaaaactcgccttatgttacagtatgatgctgttgttaactccccacaccgacaatataaaggaatgtttgatacacttgtgaaaatatataagtatgaaggtgtgcgtggattatataagggatttgttcctgggctgtttggaacatcgcatggtgcccttcagtttatggcatatgaattgctgaagttgaagtacaaccagcatatcaatagattaccagaagcccagttgagcacagtagaatatatatctgttgcagcactatccaaaatatttgctgtcgcagcaacatacccatatcaagtcgtaagagctcgtcttcaggatcaacacatgttttacagtggtgtaatagatgtaatcacaaagacatggaggaaagaaggcgtcggtggattttacaagggaattgctcctaatttgattagagtgactccagcctgctgtattacctttgtggtatatgaaaacgtctcacattttttacttgaccttagagaaaagagaaagtaagctcaaagaggacaattccagtatatctgcccaaggcagcaacaagctcttttgtgtttaaggcataaaagaagaattctgcatagaaacatggctcatattcgaaattgctctatagtcattagaagccagagaactgctaagtctcctgcaatgtttttcttgctttttgccttccccatatatatggaacttggctacctctgcctgaaatggctgccatcaacacaatgttaaaactgacacgaaggatagagtttcacagatttctacgttttattggtggaagctgatttgcaacatttgctaaatggattagatgaatgtacttctttttgtgagcttacttgcct

SEQ ID NO: 183445 - DNA, 2815 bp, Homo sapiens
  Payload ID: 16141
  Gene Symbol: SLC25A32
  Gene Name: solute carrier family 25 (mitochondrial folate carrier), member 32
  ENST ID: ENST00000521645
  CDS Start-End: 253-702
gactcgggagaggctgggacctcccctccatcgcgctttccgccggcgtgacgtagtgtctgtgccccgttcttgccccctcagtactagagtctccggcttcgctcacgcgccttgggcataagagtcctctcgttggtcccggaggtggggttgcgctcacaaggggcgaccgtcgccacggtggcggccactgcatcgcgtcccacctccgcggccctgggcgccgtggtgtcgacgggccccgagcctatgacgggccagggccagtcggcgtccgggtcgtcggcgtggagcacggtattccgccacgtccggtatgagaacctgatagcgggcgtgagcggcggcgtcttatccaaccttgcgctgcatccgctcgacctcgtgaagatccgcttcgccgtgagtgatggattggaactgagaccgaaatataatggaattttacattgcttgactaccatttggaaacttgatggactacggggactttatcaaggagtaaccccaaatatatggggtgcaggtttatcctggggactctactttttcttttacaatgccatcaagtcatataaaacagaaggaagagctgaacgtttagaggcaacagaataccttgtctcagctgctgaagctgggatttgttcctgggctgtttggaacatcgcatggtgcccttcagtttatggcatatgaattgctgaagttgaagtacaaccagcatatcaatagattaccagaagcccagttgagcacagtagaatatatatctgttgcagcactatccaaaatatttgctgtcgcagcaacatacccatatcaagtcgtaagagctcgtcttcaggatcaacacatgttttacagtggtgtaatagatgtaatcacaaagacatggaggaaagaaggcgtcggtggattttacaagggaattgctcctaatttgattagagtgactccagcctgctgtattacctttgtggtatatgaaaacgtctcacattttttacttgaccttagagaaaagagaaagtaagctcaaagaggacaattccagtatatctgcccaaggcagcaacaagctcttttgtgtttaaggcataaaagaagaattctgcatagaaacatggctcatattcgaaattgctctatagtcattagaagccagagaactgctaagtctcctgcaatgtttttcttgctttttgccttccccatatatatggaacttggctacctctgcctgaaatggctgccatcaacacaatgttaaaactgacacgaaggatagagtttcacagatttctacgttttattggtggaagctgatttgcaacatttgctaaatggattagatgaatgtacttctttttgtgagcttacttgcctggattgctttaaaattaacctttgtgcaataccaagaaaatagctctttaaaagaatgtctttgtatgtctcaaggtaaattaaggatttactgaataaggtgttgaccaaatccagaccattttattttatttttttatttatttattttttgagatggagtcttgctttgtcgcccaggctggagtgcagtggcgtgatctcagctcactgcaacctccacctcccgggttcacgccattctcctgcctcagcctcctgagtagctgggactacaggcacctgccaccacgcctggctaacttttttttatattttgagtagaaatggggtttcaccatgttagccaggatggtctcaatctcctgaccttgtgatccgcctgccttggcctcccaaagtgctgggattacaggcgtgagccactgcgcctggccagaccattttagaattgggaaattttagtgagaaaaaatgcactgtaaatatgctttagttttaattcagttgggatgcactacctagcgaaaattgagaaactatatacttctcagagaaatatctgacatctattgtcattccattgctattttttttccccagagacttccataatttaaaataaaatcctagatccagttcttgttttttggcataaatacttaatctattttaaatttataaaatctgagcttctaggatccagctgtgtcaacctttatttagcatatataactataaatcacttattacagatgctaaatagatcaccttttacagatgctgaaatgtttgggatatgtttgttgacaaggtaaatggaaatgagaaactttatacttcagttttcagatatatggatctagatcccaaataaatgattaatcttcattggtttctcaaattcaggttgaaatacaaattaatagcctttattgattttacttttatgagtcattgtagacatctataaatataaaagggcctgtacccaaaggatgccagaatactagtatttttatttatcgtaaacatccacgagtgctgttgcactaccatctatttgttgtaaataaaagtgttgttttcaaagccatctttaaatagttctttaaaaataggtcttttttttatattttggaaaaggcattgtttttaaagtaaagataaaatggtaagtacctaattgtatttactgtaatatcttataacatgcagatgaatgctttataagttaaatatgatgtattttttcatacttctggattatactataattcatatgaaatcttgatattagtccccacacggaaaaagtgaactgcagttgatatttggtgtttaagatagcaccattgtttaaataccgcctatgtactcccaaatgaataaaacataattcttgtcctctgagagcatacaa

SEQ ID NO: 183446 - DNA, 1451 bp, Homo sapiens
  Payload ID: 16142
  Gene Symbol: SLC25A28
  Gene Name: solute carrier family 25 (mitochondrial iron transporter), member 28
  Uniprot ID: Q96A46
  ENST ID: ENST00000370495
  CDS Start-End: 30-1124
ggggtgggcgccgcagctggcccgggtggatggagttggaggggcggggtgctggcggtgtggcgggggggccggcggcagggcccgggcggagccccggggagtcggcgctgctggacgggtggctgcagcggggcgtgggccggggggccggcggcggggaggccggggcctgcaggcccccggtacgacaagatccggactccggcccggactacgaggcgctgccggctggagccactgtcaccacgcacatggtggcaggcgccgtggcagggatcctggagcactgcgtgatgtaccccatcgactgcgtcaagacccggatgcagagtctacagcctgacccagctgcccgctatcgcaatgtgttggaggccctctggaggattataagaacggagggcctatggaggcccatgagggggctgaacgtcacagcaacaggcgcagggcctgcccacgccctttattttgcctgctacgaaaagttaaaaaagacattgagtgatgtaatccaccctgggggcaatagccatattgccaatggtgcggccgggtgtgtggcaacattacttcatgatgcagccatgaaccctgcggaagtggtcaagcagaggatgcagatgtacaactcaccataccaccgggtgacagactgtgtacgggcagtgtggcaaaatgaaggggccggggccttttaccgcagctacaccacccagctgaccatgaacgttcctttccaagccattcacttcatgacctatgaattcctgcaggagcactttaacccccagagacggtacaacccaagctcccacgtcctctctggagcttgcgcaggagctgtagctgccgcagccacaaccccactggacgtttgcaaaacactgctcaacacccaggagtccttggctttgaactcacacattacaggacatatcacaggcatggctagtgccttcaggacggtatatcaagtaggtggggtgaccgcctatttccgaggggtgcaggccagagtaatttaccagatcccctccacagccatcgcatggtctgtgtatgagttcttcaaatacctaatcactaaaaggcaagaagagtggagggctggcaagtgaagtagcactgaacgaagccaggggttcagatgacactgctgcatcctggtcacattctctgtctcctggaatgctcccacctcaagtggagttagaaggaaggtagaggggctctcccccaggattttggtgttttgactaacaccagttcctgccaacctctgttgccaccacctttccttccaggccctaagcacgtgcagcaaagcacaccacagcacctttgataacctctctccatcctgggcctgatgacctgctctagactgttatagagggataagcagctcattcccctggttcctaataaaaagcctttaaattaaa

SEQ ID NO: 183447 - DNA, 1005 bp, Homo sapiens
  Payload ID: 16142
  Gene Symbol: SLC25A28
  Gene Name: solute carrier family 25 (mitochondrial iron transporter), member 28
  ENST ID: ENST00000434701
  CDS Start-End: 1-678
cgaggcgctgccggctggagccactgtcaccacgcacatggtggcaggcgccgtggcagggatcctggagcactgcgtgatgtaccccatcgactgcgtcaaggtgcggccgggtgtgtggcaacattacttcatgatgcagccatgaaccctgcggaagtggtcaagcagaggatgcagatgtacaactcaccataccaccgggtgacagactgtgtacgggcagtgtggcaaaatgaaggggccggggccttttaccgcagctacaccacccagctgaccatgaacgttcctttccaagccattcacttcatgacctatgaattcctgcaggagcactttaacccccagagacggtacaacccaagctcccacgtcctctctggagcttgcgcaggagctgtagctgccgcagccacaaccccactggacgtttgcaaaacactgctcaacacccaggagtccttggctttgaactcacacattacaggacatatcacaggcatggctagtgccttcaggacggtatatcaagtaggtggggtgaccgcctatttccgaggggtgcaggccagagtaatttaccagatcccctccacagccatcgcatggtctgtgtatgagttcttcaaatacctaatcactaaaaggcaagaagagtggagggctggcaagtgaagtagcactgaacgaagccaggggttcagatgacactgctgcatcctggtcacattctctgtctcctggaatgctcccacctcaagtggagttagaaggaaggtagaggggctctcccccaggattttggtgttttgactaacaccagttcctgccaacctctgttgccaccacctttccttccaggccctaagcacgtgcagcaaagcacaccacagcacctttgataacctctctccatcctgggcctgatgacctgctctagactgttatagagggataagcagctcattcccctggttcctaataaaaagcctttaaattaaa

SEQ ID NO: 183448 - DNA, 1889 bp, Homo sapiens
  Payload ID: 16143
  Gene Symbol: SLC25A37
  Gene Name: solute carrier family 25 (mitochondrial iron transporter), member 37
  Uniprot ID: Q9NYZ2
  ENST ID: ENST00000290075
  CDS Start-End: 48-515
ctccctgcccacctcctgcagcctcctgcgccccgccgagctggcggatggagctgcgcagcgggagcgtgggcagccaggcggtggcgcggaggatggatggggacagccgagatggcggcggcggcaaggacgccaccgggtcggaggactacgagaacctgccgactagcgcctccgtgtccacccacatgacagcaggagcgatggccgggatcctggagcactcggtcatgtacccggtggactcggtgaagacacgaatgcagagtttgagtccagatcccaaagcccagtacacaagtatctacggagccctcaagaaaatcatgcggaccgaaggcttctggaggcccttgcgaggcgtcaacgtcatgatcatgggtgcagggccggcccatgccatgtattttgcctgctatgaaaacatgaaaaggactttaaatgacgttttccaccaccaaggaaacagccacctagccaacggtattttgaaagcgtttgtctggagttagaaagttctcttcttcaacacgtccctccccagggtgttcctccctgtgacccagccgcctcgacttcggcccgcttgctcacgaataaagaactcagagttgtgtgtgcaatgcacacccagacacacgcacgcacacacacgcgcgcgcacacacatgcttttttctgttcccctccgctttctgaagcctggggagaaatcagtgacagaggtgttttggttttattgttatgtgggttttcttttgtatttttttttgtttgttttgtttttaaacattcaaaagcaattaatgatcagacataggagaaaccctgaatagaaacaaaacttttgaatgctggattcaaaaaaaaaaaaaagttatctggacagcttctttgagactatttaaaaactggtacaacaggtctctacaacgccaagatctaactaagctttaaaagggatagctgggagtatggccaccctgctccacgatgcggtaatgaatccagcagaagtggtgaagcagcgcttgcagatgtacaactcgcagcaccggtcagcaatcagctgcatccggacggtgtggaggaccgaggggttgggggccttctaccggagctacaccacgcagctgaccatgaacatccccttccagtccatccacttcatcacctatgagttcctgcaggagcaggtcaacccccaccggacctacaacccgcagtcccacatcatctcaggcgggctggccggggccctcgccgcggccgccacgacccccctggacgtctgtaagacccttctgaacactcaggagaacgtggccctctcgctggccaacatcagcggccggctgtcgggtatggccaatgccttccggacggtgtaccagctcaacggcctggccggctacttcaaaggcatccaggcgcgtgtcatctaccagatgccctccaccgccatttcttggtctgtctatgagttcttcaagtactttctcaccaagcgccagctggaaaatcgagctccatactaaaggaagggatcatagaatcttttcttaaagtcattctctgcctgcatccagccccttgccctctcctcacacgtagatcattttttttttgcagggtgctgcctatgggccctctgctccccaatgccttagagagaggaggggacggcacggccgctcaccggaaggctgtgtgcggggacatccgaggtggtggtggacaggaaggacttgggaaggggagcgagaaattgctttttctcttcctccctgggcagaatgtagcttttctgcttcactgtggcagcctcctccctggatccttagatcccagaggagggaagaaaatttgcagtgactgaaaacagt

SEQ ID NO: 183449 - DNA, 735 bp, Homo sapiens
  Payload ID: 16143
  Gene Symbol: SLC25A37
  Gene Name: solute carrier family 25 (mitochondrial iron transporter), member 37
  ENST ID: ENST00000417331
  CDS Start-End: 48-527
ctccctgcccacctcctgcagcctcctgcgccccgccgagctggcggatggagctgcgcagcgggagcgtgggcagccaggcggtggcgcggaggatggatggggacagccgagatggcggcggcggcaaggacgccaccgggtcggaggactacgagaacctgccgactagcgcctccgtgtccacccacatgacagcaggagcgatggccgggatcctggagcactcggtcatgtacccggtggactcggtgaagacacgaatgcagagtttgagtccagatcccaaagcccagtacacaagtatctacggagccctcaagaaaatcatgcggaccgaaggcttctggaggcccttgcgaggcgtcaacgtcatgatcatgggtgcagggccggcccatgccatgtattttgcctgctatgaaaacatgaaaaggactttaaatgacgttttccaccaccaaggaaacagccacctagccaacggttccaggaacttcctgagaacacccgatcgcagagggtaattttctggagtttgttttgcagggatagctgggagtatggccaccctgctccacgatgcggtaatgaatccagcagaagtggtgaagcagcgcttgcagatgtacaactcgcagcaccggtcagcaatcagctgcatccggacggtgtggaggaccgaggggttgggggccttctaccggagctacaccacgcagctgaccatgaaca

SEQ ID NO: 183450 - DNA, 823 bp, Homo sapiens
  Payload ID: 16143
  Gene Symbol: SLC25A37
  Gene Name: solute carrier family 25 (mitochondrial iron transporter), member 37
  ENST ID: ENST00000523930
  CDS Start-End: 1-462
gacagccgagatggcggcggcggcaaggacgccaccgggtcggaggactacgagaacctgccgactagcgcctccgtgtccacccacatgacagcaggagcgatggccgggatcctggagcactcggtcatgtacccggtggactcggtgaagacacgaatgcagagtttgagtccagatcccaaagcccagtacacaagtatctacggagccctcaagaaaatcatgcggaccgaaggcttctggaggcccttgcgaggcgtcaacgtcatgatcatgggtgcagggccggcccatgccatgtattttgcctgctatgaaaacatgaaaaggactttaaatgacgttttccaccaccaaggaaacagccacctagccaacgggatagctgggagtatggccaccctgctccacgatgcggtaatgaatccagcagaagtccatccacttcatcacctatgagttcctgcaggagcaggtcaacccccaccggacctacaacccgcagtcccacatcatctcaggcgggctggccggggccctcgccgcggccgccacgacccccctggacgtctgtaagacccttctgaacactcaggagaacgtggccctctcgctggccaacatcagcggccggctgtcgggtatggccaatgccttccggacggtgtaccagctcaacggcctggccggctacttcaaaggcatccaggcgcgtgtcatctaccagatgccctccaccgccatttcttggtctgtctatgagttcttcaagtactttctcaccaagcgccagctggaaaatcgagctccatactaaagg

SEQ ID NO: 183451 - DNA, 4823 bp, Homo sapiens
  Payload ID: 16143
  Gene Symbol: SLC25A37
  Gene Name: solute carrier family 25 (mitochondrial iron transporter), member 37
  Uniprot ID: Q9NYZ2
  ENST ID: ENST00000519973
  CDS Start-End: 199-1215
acaccaatggcgcggcggccgccggcctcttggttcccggcgattggtgtctctggccgctgcgctccaccccagcccgccatggcgtcaggcgccgcggccccggggaggtggctcccactttaagaagtgaagttttgcgcccctccccctccctgcccacctcctgcagcctcctgcgccccgccgagctggcggatggagctgcgcagcgggagcgtgggcagccaggcggtggcgcggaggatggatggggacagccgagatggcggcggcggcaaggacgccaccgggtcggaggactacgagaacctgccgactagcgcctccgtgtccacccacatgacagcaggagcgatggccgggatcctggagcactcggtcatgtacccggtggactcggtgaagacacgaatgcagagtttgagtccagatcccaaagcccagtacacaagtatctacggagccctcaagaaaatcatgcggaccgaaggcttctggaggcccttgcgaggcgtcaacgtcatgatcatgggtgcagggccggcccatgccatgtattttgcctgctatgaaaacatgaaaaggactttaaatgacgttttccaccaccaaggaaacagccacctagccaacgggatagctgggagtatggccaccctgctccacgatgcggtaatgaatccagcagaagtggtgaagcagcgcttgcagatgtacaactcgcagcaccggtcagcaatcagctgcatccggacggtgtggaggaccgaggggttgggggccttctaccggagctacaccacgcagctgaccatgaacatccccttccagtccatccacttcatcacctatgagttcctgcaggagcaggtcaacccccaccggacctacaacccgcagtcccacatcatctcaggcgggctggccggggccctcgccgcggccgccacgacccccctggacgtctgtaagacccttctgaacactcaggagaacgtggccctctcgctggccaacatcagcggccggctgtcgggtatggccaatgccttccggacggtgtaccagctcaacggcctggccggctacttcaaaggcatccaggcgcgtgtcatctaccagatgccctccaccgccatttcttggtctgtctatgagttcttcaagtactttctcaccaagcgccagctggaaaatcgagctccatactaaaggaagggatcatagaatcttttcttaaagtcattctctgcctgcatccagccccttgccctctcctcacacgtagatcattttttttttgcagggtgctgcctatgggccctctgctccccaatgccttagagagaggaggggacggcacggccgctcaccggaaggctgtgtgcggggacatccgaggtggtggtggacaggaaggacttgggaaggggagcgagaaattgctttttctcttcctccctgggcagaatgtagcttttctgcttcactgtggcagcctcctccctggatccttagatcccagaggagggaagaaaatttgcagtgactgaaaacagtaaaaaaaaaaaaaaaaaaaaaaaaaaaaaaaaaaaaaaaaaaaaatttatgtatataaaagttgcattacacagtacaaaatagatggataatgtttatcctttatttttctatgtagaagtttttgaatttgtgtgtgtgcttgtgcgtgtctacacctagtattacggctgggactctccagctgtttttgttgttgttatgtttttaagagggttgaattcttccatcaggtgaacgaaaaaggcaacaaagtaataaatcagtgaatgtggccggcagctgtgtttagcccctccagatggaagtttcacttgaatgtaaaataataaagtttatattttgaatttctcttttcatgggggaaaaaaggtacgttaaaaaaatcaaaataatgatatgtcacttgcagctacctttttttttcttttaaattcaatcagccaccttcatgtgcctttttcctttgtctttccccaaaattccaggaccagagatctggccctggcctattttctcttgctgtgtacacacacgcacacatgctgggtggcaggatctcgcccgctggagggtggtggagcccagtagaattggggtgactgggcataaacctgctgagactgcttccttccctggttgtgagtgatgtgaatgcctgccttccccggtcagcacttagaagcccttgataggcagcatttggcgacttgtggggcaggtgtttgggataaatcctaccttcatcctaggacttatttctgcatcagccttttaactcaggcacttcaggtaacgtgatctatgtgtgttttgactgaatctcatctcctgtgtttccctgtgcagtctagggaagcatgtctccagtctttgtccctgtcttgtcccaaccattaattctcatgtcacagcttctcactgcatgtgacaagagccaggcctatctgctagggccctgcggctgaggtctgacctggaccctcatgcccgagtcggaagacccctctccagaagccattctgcatccttgtctgctctgcgtcacccgagaacacaggcttcgcagcctcgctttctgaaatggtgtgtgccgagtcagattgccgctcagagaaaatacaagcccgttttccctagctgtgccatttggtgctctgccaggctgccgtgcaagggaataccgacgagacgagctgcactgtctctgatttggagccctcaccggagcttgtctttaaaaatgagcaggaagctcatgtatgtttgcatttcagtgagccgggtcctgacctgccgccacccatcacggtcagcgtggtgcatcttaccgaggaggcgcaggcctggattcttttgagtggtgctactgcctaggaagtaacacgtggagaatttccatcttgggaccatgcacacagtgccttggggagtagattttgccctaatagcgatgaagaattttatcagtcagtggagttcctttttcagatcagggatgggaaagagccaaactgggtacctcccacgtgtgccccgtgaacagccctttgcagctgggctgtggggcttggctgctgccctgtcccatctggcagttaacgccttctccctgctctgccccccactccccaaaaccagttgcagcctcaacccacatggggatgtagaaagccgtaaagtccacgctactgttgaaaatgtttacatctccgctctcaacctgccttgggttcgtgttaaatggtgttaaattctgcaaatggaggggaaaaaaatcaaattctaaatttcaaagtagaatttaaagcaaatttgtaaaaaaattatcctaccaccccttttggtccacttaagatatgccacgctgaagcaaggtatttcctactggattttgctttcactggtgtttagaaaataaacttgatttctctaggagcactcctttggttagagggatgcaagaaggagaggtgaaggtggcgtgtggtggctcatgcctgtaatcccagcactttggggaggccgaggcaggcggatcacttgaggccagcagtttgagaccagcctggccaacatgatgaaaccccatctctactaaaaatacaaaaaattagctgggcatggtggcaggcacctgtaatcccagttacttgggaggctgaggcaggagaattgcttgaacccaggaggtggaggttgcagtgagctgagattgtgccactgcacttcagcctgggcgacagagtgactctgtcaaaaaggaaaggcaaaaaccggaccctggagctctgtgggccctgattgcaggcccctccctgtgtgatgagggatgagtcagcttggggagccacttggccagcctgcatgcctggtcatcaggaggttgagaaaagccttgaaagttgtgaagcactgagcagatacaagtgtttgttaattttgtagaaattaactttcccatctggcctttatctccaaagttggtattgttgctccacgcagactgcagtccggtttcttattgtgactttgacaatgcaaagtgcaaaataggaagaggcctccccaccccactatcccaccctggtgaccaattcagtgtaacctttgcacgtactcagtcattggtgtctttggagtgacatctgcagccagttagtgccacctgagtacagcactcgtacttttacatgatgtgtgtgtgagtagctcttctgtccaaaccatgatttgaggttcaactacctgtagatcaaagctttattttagaacgataaactgattttttccaaatgggtgaaatcttctccccatgactatgttttcttaactttgcattgaatctatttactgggttacattctatgtgtagtttgctttcttcatttttttttcttttaaaatgctcatgtcttattccaagcaccttcctccaaagtccccataaagctgcatctccaacacattgttatgccaataaggttttatttaactttatttaaggatgattgtgtctttgaatgacaaatgtactgctgcttcctacctgcaagacgaacaatgtatgtttcaagggtgagcaagtgttatttcttaaatttctcaaatgcctgtagtaactattgtttctgcctctcaattgttgccagctctttgaagaaggggagaattgtgtgtttttgtgtggggatgtttctgatatgctgctacagttgcaaaacactggagctagagaaaataaagtactgatcttcgaa

SEQ ID NO: 183452 - DNA, 2785 bp, Homo sapiens
  Payload ID: 16144
  Gene Symbol: SLC25A21
  Gene Name: solute carrier family 25 (mitochondrial oxoadipate carrier), member 21
  Uniprot ID: Q9BQT8
  ENST ID: ENST00000331299
  CDS Start-End: 517-1416
ttataggacaactaactgaggaatttattcacttgtcccttcttttgaacctcactgtgctctggcttgccaggaggtgcaagtgtcgtccccgctttgtacttggcgctccaggcctgggtcacttcacttgagttatcagaggcaaccgtctagtttgacaaactaccggaggctcctgatagagaagggcgtgggcgccaatctaggagacaaagcctgagccgctgcggtgagccaacccaaacccatccgcgggtcttctttccagagacattttcggagccgagggcgcctctgcgagagcgctgcgaacaggttccgacgcgccggagatcgcgcgacgaatctgcgcctcgaaccctcgctttccagcagtcgccggattgctgctccacagggagccaacgcgcttgaggaccagcccagccggggctctctggatcagtaggctgtgcaggctgcgagctcgttgacgcatctcagcccactcccttgtcctcccgcctggcgaagatgtccgccaagcctgaagtcagcttagtgcgcgaggcttctcggcagatcgtggccggtggttctgcaggtcttgtagaaatttgcctgatgcaccccctagatgtggtgaaaaccaggtttcagattcagagatgtgcaaccgatccaaacagttataaaagcttggtagacagctttcgaatgattttccaaatggaagggttatttggtttttacaagggaattctgccacctatcttggctgaaaccccaaaaagagcagtgaagtttttcacctttgagcagtacaagaaattgctgggatatgtgtcactgtcaccagcattgacattcgccattgctggattgggatctggactaacagaagccattgtagttaacccttttgaggtagtaaaagttggcttgcaagcaaatcggaacacatttgcagagcaaccatccactgtgggttatgcaagacaaatcattaagaaggaaggctggggactccagggcctcaacaaaggattaactgcaactttgggacgacatggagttttcaacatggtttattttggcttctactacaatgtcaaaaacatgattcctgtcaataaggatccaatcttggagttttggagaaaatttgggattggtcttctctcggggacaatagcctcagtcattaacatcccttttgatgttgccaaaagtaggattcaagggcctcaaccagttcctggagagatcaagtacagaacctgttttaaaacaatggcaacagtctatcaggaagaagggattttagctttgtacaaaggcctgcttcccaagattatgagacttggaccaggtggtgcagtgatgctgctggtttatgaatacacctattcatggcttcaagagaactggtgattgcctatgaagtgtttttcccccttgagataatggatatttgctatgcagcaccatgaagaagagagactatcgatcggccaggtgtataattatgaaggagaaaactgttcaagaacaaaatctattttaatactttaaaaaatgtctataggcaacttgagattatagttttggctgtataaataaaactgtgagaagaaaaaaataatatgaaacaatgaggtatttaaagtgaatatagaaaaatagcatagaaatcatatatttatttcataaaataaatagaaactttgtctcctgtgttcctcttcaatgcttcacaatgaaaattcattgtattgatcagcatttttcctaagaggtctagaaatgcttaaactattgaaaataaatcaaattattcaaagactggattaaaaaaaagttaagccaaaatttaagcagtttttataatgaattaaattattccataaataatatttaaagagcacaagaaaaattttttaaagtgcactaaaatgaccttttaagaatgtttaattttatgaatactatgttaaaatgtaaatctgttggttttttttagtaactatgcacatatcagctctattttcctacatctactttatatctcatattgctgtaagataataaataggtattttaaaacattgtttaaaacagaatgttaaaacactgttgtttaagcatgtttaaatcaaggtattccaaatctcttctaacacaagtaggaaacatgaaataaaatttactttcctccacatagttctctttgaagataagttttgttgatgagatattgtcatgttaaatcacaaattggaaacacctttggacccatttgtcagccatcagtatttgcatccaaatacctttattcagcatgcctacctgtgccatttttaggaagaatgtatagaacagaactgcattttcaggttattagttttaaacgacaacttcaggtgggaagtcagctgtctgcagtattaaaatatgtatgatgaaggggaaatgttctgaaaaagaaatacacttagcatttctaaggattactatactaacatgtatcaacaaaaatatctccttggtcttgatgtaaccaaacttgattttatatctgcatccagagatgatgctgattcagtaaagtcaacaagaataactgaaagtccatatgacacctgtcctaagttactaccgtgggctatttctactacggggctatttcactaaagcattttgaaaataaaaagtaaaagataacatggtaattattactttttattaatttagagcatttgaagtataaaaataaaaggcttttgacatactgtatatacat

SEQ ID NO: 183453 - DNA, 1023 bp, Homo sapiens
  Payload ID: 16144
  Gene Symbol: SLC25A21
  Gene Name: solute carrier family 25 (mitochondrial oxoadipate carrier), member 21
  Uniprot ID: Q9BQT8
  ENST ID: ENST00000555449
  CDS Start-End: 74-970
atcagtaggctgtgcaggctgcgagctcgttgacgcatctcagcccactcccttgtcctcccgcctggcgaagatgtccgccaagcctgaagtcagcttagtgcgcgaggcttctcggcagatcgtggccggtggttctgcaggtcttgtagaaatttgcctgatgcaccccctagatgtggtgaaaaccaggtttcagattcagagatgtgcaaccgatccaaacagttataaaagcttggtagacagctttcgaatgattttccaaatggaagggttatttggtttttacaagggaattctgccacctatcttggctgaaaccccaaaaagagcagtgaagtttttcacctttgagcagtacaagaaattgctgggatatgtgtcactgtcaccagcattgacattcgccattgctggattgggatctggactaacagaagccattgtagttaacccttttgaggtagtaaaagttggcttgcaagcaaatcggaacacatttgcagagcaaccatccactgtgggttatgcaagacaaatcattaagaaggaaggctggggactccagggcctcaacaaaggattaactgcaactttgggacgacatggagttttcaacatggtttattttggcttctactacaatgtcaaaaacatgattcctgtcaataaggatccaatcttggagttttggagaaaatttgggattggtcttctctcggggacaatagcctcagtcattaacatcccttttgatgttgccaaaagtaggattcaagggcctcaaccagttcctggagagatcaagtacagaacctgttttaaaacaatggcaacagtctatcaggaagaagggattttagctttgtacaaaggcctgcttcccaagattatgagacttggaccaggtggtgcagtgatgctgctggtttatgaatacacctattcatggcttcaagagaactgactgggaactccagatgtcaatggaagttttacaagatcaaaggaagactatgg

SEQ ID NO: 183454 - DNA, 3572 bp, Homo sapiens
  Payload ID: 16144
  Gene Symbol: SLC25A21
  Gene Name: solute carrier family 25 (mitochondrial oxoadipate carrier), member 21
  ENST ID: ENST00000622765
  CDS Start-End: 131-835
ttcaggtcttgtagaaatttgcctgatgcaccccctagatgtggtgaaaaccaggtttcagattcagagatgtgcaaccgatccaaacagttataaaagcttggtagacagctttcgaatgattttccaaatggaagggttatttggtttttacaagggaattctgccacctatcttggctgaaaccccaaaaagagcagtgaagtttttcacctttgagcagtacaagaaattgctgggatatgtgtcactgtcaccagcattgacattcgccattgctggattgggatctggactaacagaagccattgtagttaacccttttgaggtagtaaaagttggcttgcaagcaaatcggaacacatttgcagagcaaccatccactgtgggttatgcaagacaaatcattaagaaggaaggctggggactccagggcctcaacaaaggattaactgcaactttgggacgacatggagttttcaacatggtttattttggcttctactacaatgtcaaaaacatgattcctgtcaataaggatccaatcttggagttttggagaaaatttgggattggtcttctctcggggacaatagcctcagtcattaacatcccttttgatgttgccaaaagtaggattcaagggcctcaaccagttcctggagagatcaagtacagaacctgttttaaaacaatggcaacagtctatcaggaagaagggattttagctttgtacaaaggcctgcttcccaagattatgagacttggaccaggtggtgcagtgatgctgctggtttatgaatacacctattcatggcttcaagagaactggtgattgcctatgaagtgtttttcccccttgagataatggatatttgctatgcagcaccatgaagaagagagactatcgatcggccaggtgtataattatgaaggagaaaactgttcaagaacaaaatctattttaatactttaaaaaatgtctataggcaacttgagattatagttttggctgtataaataaaactgtgagaagaaaaaaataatatgaaacaatgaggtatttaaagtgaatatagaaaaatagcatagaaatcatatatttatttcataaaataaatagaaactttgtctcctgtgttcctcttcaatgcttcacaatgaaaattcattgtattgatcagcatttttcctaagaggtctagaaatgcttaaactattgaaaataaatcaaattattcaaagactggattaaaaaaaagttaagccaaaatttaagcagtttttataatgaattaaattattccataaataatatttaaagagcacaagaaaaattttttaaagtgcactaaaatgaccttttaagaatgtttaattttatgaatactatgttaaaatgtaaatctgttggttttttttagtaactatgcacatatcagctctattttcctacatctactttatatctcatattgctgtaagataataaataggtattttaaaacattgtttaaaacagaatgttaaaacactgttgtttaagcatgtttaaatcaaggtattccaaatctcttctaacacaagtaggaaacatgaaataaaatttactttcctccacatagttctctttgaagataagttttgttgatgagatattgtcatgttaaatcacaaattggaaacacctttggacccatttgtcagccatcagtatttgcatccaaatacctttattcagcatgcctacctgtgccatttttaggaagaatgtatagaacagaactgcattttcaggttattagttttaaacgacaacttcaggtgggaagtcagctgtctgcagtattaaaatatgtatgatgaaggggaaatgttctgaaaaagaaatacacttagcatttctaaggattactatactaacatgtatcaacaaaaatatctccttggtcttgatgtaaccaaacttgattttatatctgcatccagagatgatgctgattcagtaaagtcaacaagaataactgaaagtccatatgacacctgtcctaagttactaccgtgggctatttctactacggggctatttcactaaagcattttgaaaataaaaagtaaaagataacatggtaattattactttttattaatttagagcatttgaagtataaaaataaaaggcttttgacatactgtatatacatacatagccttctgttgtacatcctttccaacgtgttttttaaaatttatatttcagtccaatattcaataaaagggtcattaaaaacaaaacaaaattgtgaaaaaaaagaaataagaatgtgtctctgttgcacaactgcattctatccttgcaggtaatattcttacatccaatgagagcgctgcctgcatagaggtcatgaaattgaacctttaacctctccatgtggatcagatagaaaaggatttctgaagagtgcatttgccagtttaaaagcaacacttttaccatctatgagatagaggaaatatgtcaacattaaccaataataatctttaaaagttaaccctttaatccatcctattttccttctcgtattttaaaaagtggctttaaatcataattttctttgaatagcaaattgtatctgatatcttttaaaaattactccatgtgaattcactgttaagacctagagggagaaaaggaaacttcaataccattaatattagattttttaaaatacaagaaccagaaaaaaattataaatagcacaataacaagagatttcttaatttagataaagaaaataacattatttgcatttccacacaagcaagtaatattttttaaagccccctaacagccacctaaaaacatttgataaagaatagttctgtaccttacatcagtttttcagatgacaggagagtccctgtatggtatggttttaaagaagtctccaccaaaatattggattggatctttgttccattcagtttatagtctattttctcaccagactgggaactccagatgtcaatggaagttttacaagatcaaaggaagactatggccctgagagttcatctgctccttctgcttattcttctcctgaagttataatcctctatttgtagcactgaatttcggttgctttagaaataaatgcagttcaaagctctctataagatatctgctgtctgaaaaaagcagtcactctaacataatttgtgtgtcagaaatctgcttactgtttacatcctagtgatttgaaaacctaactaatctagccatctgagttttaaacgaagccacgaaaccgatgtggtggaaccgcattgccatgtagactgtgcacagcacagaccggaagaaattaaaatcacctagggaatccatcttcaacatccatatccagtgaggtgctcttttagttattgcacagaattagtaccaaaaaaccctcaatatattaattttccaacagctgaattgtaccaatgtcctaaaaacatatttttaagcctatattgccaaacaggaagaacttcctaaacagaagggattaaaaactgtagaattt

SEQ ID NO: 183455 - DNA, 1651 bp, Homo sapiens
  Payload ID: 16145
  Gene Symbol: SLC25A19
  Gene Name: solute carrier family 25 (mitochondrial thiamine pyrophosphate carrier), member 19
  Uniprot ID: Q9HC21
  ENST ID: ENST00000320362
  CDS Start-End: 231-1193
agtagagttttgctgttaagactgcgcgaggagctagagagagcggagagcgctgagccgggccgcacccgccgagccgtcccttctccctgtgatcagttaccaactacctgttgatgaaaaaagtacatctcctggaagggatgctttttagctgagctctggtggatgagaggagctagccttgaaaaacttgatactgatggacattgtgtgggccagaggcagggatggttggctatgaccccaaaccagatggcaggaataacaccaagttccaggtggcagtggctgggtctgtgtctggacttgttactcgggcgctgatcagtcccttcgacgtcatcaagatccgtttccagcttcagcatgagcgcctgtctcgcagtgaccccagcgcaaagtaccatggcatcctccaggcctctaggcagattctgcaggaggagggtccgacagctttctggaaaggacacgtcccagctcagattctctccataggctatggagctgtccaattcttgtcatttgaaatgctgacggagctggtccacagaggcagcgtgtatgacgcccgggaattctcagtgcactttgtatgtggtggcctggctgcctgtatggccaccctcactgtgcaccccgtggatgttctgcgcacccgctttgcagctcagggtgagcccaaggtctataatacgctgcgccacgccgtggggaccatgtataggagcgaaggcccccaggttttctacaaaggcttggctcccaccttgatcgccatcttcccctacgccgggctgcagttctcttgctacagctccttgaagcacctgtacaagtgggccataccagccgaaggaaagaaaaatgagaacctccaaaacctgctttgtggcagtggagctggtgtcatcagcaagaccctgacatatccgctggacctcttcaagaagcggctacaggttggagggtttgagcatgccagagctgcctttggccaggtacggagatacaagggcctcatggactgtgccaagcaggtgctgcaaaaggaaggcgccctgggcttcttcaagggcctgtcccccagcttgctgaaggctgccctctccacaggcttcatgttcttctcgtatgaattcttctgtaatgtcttccactgcatgaacaggacagccagccagcgctgagtgcaggaaggaccccaggtcttccctggaggcagcctcctgaaggaaggaagattcagtctccactgagaggtgccgtctggcccttccctgcaggccagctgccccaagcggggtagcagccttgaacccacccagctgggacaccaccagaaggtccagggctctccccatgagagaatcagagggaatgcaggacgtggtctatggtgagccaacgacacagtgagaaggagcaggaagttgctgtttctcctctgaccagcccacactccaaaggaaacagacgccatcctacacctatcagccctgcctgccaggagaacagaacacactcctggtctggatggggctgctgcttgagtgcagagggctgcggtaggccctttgcaggagtcaggtccctacacttggcctgtttttccaacctatttaatagacattaaagctaaacacac

SEQ ID NO: 183456 - DNA, 1486 bp, Homo sapiens
  Payload ID: 16145
  Gene Symbol: SLC25A19
  Gene Name: solute carrier family 25 (mitochondrial thiamine pyrophosphate carrier), member 19
  Uniprot ID: Q9HC21
  ENST ID: ENST00000375261
  CDS Start-End: 225-1016
agtttcgtccgagctcagtagagttttgctgttaagactgcgcgaggagctagagagagcggagagcgctgagccgggccgcacccgccgagccgtcccttctccctgtgatcagttaccaactacctgttgatgtgtgtggttacagacttctttctatgctttgtacaactctacagaccgtatcttgatactgatggacattgtgtgggccagaggcagggatggttggctatgaccccaaaccagatggcaggaataacaccaagttccaggtggcagtggctgggtctgtgtctggacttgttactcgggcgctgatcagtcccttcgacgtcatcaagatccgtttccagcttcagcatgagcgcctgtctcgcagtgaccccagcgcaaagtaccatggcatcctccaggcctctaggcagattctgcaggaggagggtccgacagctttctggaaaggacacgtcccagctcagattctctccataggctatggagctgtccaagtctataatacgctgcgccacgccgtggggaccatgtataggagcgaaggcccccaggttttctacaaaggcttggctcccaccttgatcgccatcttcccctacgccgggctgcagttctcttgctacagctccttgaagcacctgtacaagtgggccataccagccgaaggaaagaaaaatgagaacctccaaaacctgctttgtggcagtggagctggtgtcatcagcaagaccctgacatatccgctggacctcttcaagaagcggctacaggttggagggtttgagcatgccagagctgcctttggccaggtacggagatacaagggcctcatggactgtgccaagcaggtgctgcaaaaggaaggcgccctgggcttcttcaagggcctgtcccccagcttgctgaaggctgccctctccacaggcttcatgttcttctcgtatgaattcttctgtaatgtcttccactgcatgaacaggacagccagccagcgctgagtgcaggaaggaccccaggtcttccctggaggcagcctcctgaaggaaggaagattcagtctccactgagaggtgccgtctggcccttccctgcaggccagctgccccaagcggggtagcagccttgaacccacccagctgggacaccaccagaaggtccagggctctccccatgagagaatcagagggaatgcaggacgtggtctatggtgagccaacgacacagtgagaaggagcaggaagttgctgtttctcctctgaccagcccacactccaaaggaaacagacgccatcctacacctatcagccctgcctgccaggagaacagaacacactcctggtctggatggggctgctgcttgagtgcagagggctgcggtaggccctttgcaggagtcaggtccctacacttggcctgtttttccaacctatttaatagacattaaagctaaacacacattccttatctt

SEQ ID NO: 183457 - DNA, 2331 bp, Homo sapiens
  Payload ID: 16145
  Gene Symbol: SLC25A19
  Gene Name: solute carrier family 25 (mitochondrial thiamine pyrophosphate carrier), member 19
  Uniprot ID: Q9HC21
  ENST ID: ENST00000402418
  CDS Start-End: 911-1873
cacttgagtgggctcactcagtgagcaggagtttgctataaagttgccagatgtcttggaaaaccagttgatctctgggaccaacaattgcctatcaagcctgttcattcgattctcaaatattattaagcacttaccatgatgggctctattccaggaaccggaaatttacgagtgaacaaatgagaccaaggtcgtgtttccacgggcttacattctagtcagggagagagacaagaaacaaatgtactgtataaataacccatggcgtgccgggcgctgtggctcatgcatgtaatctcagcaattcaggaggctgaggcaggagaatcacttgaggccaggagttcgagaccagccagggcaacattgagaccttatctctacaaaaataaaaaacttagccaggcctgcacctgttaagtgacagctaattgggaggctgaggcaagagaatcacttgagcccaggagttcaaggctatggtgagttatgatggcaccactgcattccagcctgggcaacagagtgagaccctgtctctaaaaaagtaaacaaatatgccatagtaataagtactgtaaagaggaataaaacaagtgctattttattttatttttaaatttttgtattttttgtagagttggggttttgcagtgttgcccaggctggtcttgaactcctgagctcaagcaatccacccacctcggcctccgaaagtgctgggatacaggcatgaaccgctgcgcccagtccaaaagtgagtgctattttagacagtctagtcagggagggctgctctgaggaggtgatatttgagcagagaccataagaaacttgcctggtgtttattccgtatctcttgcatttagcttgatactgatggacattgtgtgggccagaggcagggatggttggctatgaccccaaaccagatggcaggaataacaccaagttccaggtggcagtggctgggtctgtgtctggacttgttactcgggcgctgatcagtcccttcgacgtcatcaagatccgtttccagcttcagcatgagcgcctgtctcgcagtgaccccagcgcaaagtaccatggcatcctccaggcctctaggcagattctgcaggaggagggtccgacagctttctggaaaggacacgtcccagctcagattctctccataggctatggagctgtccaattcttgtcatttgaaatgctgacggagctggtccacagaggcagcgtgtatgacgcccgggaattctcagtgcactttgtatgtggtggcctggctgcctgtatggccaccctcactgtgcaccccgtggatgttctgcgcacccgctttgcagctcagggtgagcccaaggtctataatacgctgcgccacgccgtggggaccatgtataggagcgaaggcccccaggttttctacaaaggcttggctcccaccttgatcgccatcttcccctacgccgggctgcagttctcttgctacagctccttgaagcacctgtacaagtgggccataccagccgaaggaaagaaaaatgagaacctccaaaacctgctttgtggcagtggagctggtgtcatcagcaagaccctgacatatccgctggacctcttcaagaagcggctacaggttggagggtttgagcatgccagagctgcctttggccaggtacggagatacaagggcctcatggactgtgccaagcaggtgctgcaaaaggaaggcgccctgggcttcttcaagggcctgtcccccagcttgctgaaggctgccctctccacaggcttcatgttcttctcgtatgaattcttctgtaatgtcttccactgcatgaacaggacagccagccagcgctgagtgcaggaaggaccccaggtcttccctggaggcagcctcctgaaggaaggaagattcagtctccactgagaggtgccgtctggcccttccctgcaggccagctgccccaagcggggtagcagccttgaacccacccagctgggacaccaccagaaggtccagggctctccccatgagagaatcagagggaatgcaggacgtggtctatggtgagccaacgacacagtgagaaggagcaggaagttgctgtttctcctctgaccagcccacactccaaaggaaacagacgccatcctacacctatcagccctgcctgccaggagaacagaacacactcctggtctggatggggctgctgcttgagtgcagagggctgcggtaggccctttgcaggagtcaggtccctacacttggcctgtttttccaacctatttaatagacattaaagctaaacacac

SEQ ID NO: 183458 - DNA, 1587 bp, Homo sapiens
  Payload ID: 16145
  Gene Symbol: SLC25A19
  Gene Name: solute carrier family 25 (mitochondrial thiamine pyrophosphate carrier), member 19
  Uniprot ID: Q9HC21
  ENST ID: ENST00000416858
  CDS Start-End: 166-1128
cggagagcgctgagccgggccgcacccgccgagccgtcccttctccctgtgatcagttaccaactacctgttgatgtgtgtggttacagacttctttctatgctttgtacaactctacagaccgtatcttgatactgatggacattgtgtgggccagaggcagggatggttggctatgaccccaaaccagatggcaggaataacaccaagttccaggtggcagtggctgggtctgtgtctggacttgttactcgggcgctgatcagtcccttcgacgtcatcaagatccgtttccagcttcagcatgagcgcctgtctcgcagtgaccccagcgcaaagtaccatggcatcctccaggcctctaggcagattctgcaggaggagggtccgacagctttctggaaaggacacgtcccagctcagattctctccataggctatggagctgtccaattcttgtcatttgaaatgctgacggagctggtccacagaggcagcgtgtatgacgcccgggaattctcagtgcactttgtatgtggtggcctggctgcctgtatggccaccctcactgtgcaccccgtggatgttctgcgcacccgctttgcagctcagggtgagcccaaggtctataatacgctgcgccacgccgtggggaccatgtataggagcgaaggcccccaggttttctacaaaggcttggctcccaccttgatcgccatcttcccctacgccgggctgcagttctcttgctacagctccttgaagcacctgtacaagtgggccataccagccgaaggaaagaaaaatgagaacctccaaaacctgctttgtggcagtggagctggtgtcatcagcaagaccctgacatatccgctggacctcttcaagaagcggctacaggttggagggtttgagcatgccagagctgcctttggccaggtacggagatacaagggcctcatggactgtgccaagcaggtgctgcaaaaggaaggcgccctgggcttcttcaagggcctgtcccccagcttgctgaaggctgccctctccacaggcttcatgttcttctcgtatgaattcttctgtaatgtcttccactgcatgaacaggacagccagccagcgctgagtgcaggaaggaccccaggtcttccctggaggcagcctcctgaaggaaggaagattcagtctccactgagaggtgccgtctggcccttccctgcaggccagctgccccaagcggggtagcagccttgaacccacccagctgggacaccaccagaaggtccagggctctccccatgagagaatcagagggaatgcaggacgtggtctatggtgagccaacgacacagtgagaaggagcaggaagttgctgtttctcctctgaccagcccacactccaaaggaaacagacgccatcctacacctatcagccctgcctgccaggagaacagaacacactcctggtctggatggggctgctgcttgagtgcagagggctgcggtaggccctttgcaggagtcaggtccctacacttggcctgtttttccaacctatttaatagacattaaagctaaacacaca

SEQ ID NO: 183459 - DNA, 1496 bp, Homo sapiens
  Payload ID: 16145
  Gene Symbol: SLC25A19
  Gene Name: solute carrier family 25 (mitochondrial thiamine pyrophosphate carrier), member 19
  Uniprot ID: Q9HC21
  ENST ID: ENST00000442286
  CDS Start-End: 76-1038
cggagagcgctgagccgggccgcacccgccgagccgtcttgatactgatggacattgtgtgggccagaggcagggatggttggctatgaccccaaaccagatggcaggaataacaccaagttccaggtggcagtggctgggtctgtgtctggacttgttactcgggcgctgatcagtcccttcgacgtcatcaagatccgtttccagcttcagcatgagcgcctgtctcgcagtgaccccagcgcaaagtaccatggcatcctccaggcctctaggcagattctgcaggaggagggtccgacagctttctggaaaggacacgtcccagctcagattctctccataggctatggagctgtccaattcttgtcatttgaaatgctgacggagctggtccacagaggcagcgtgtatgacgcccgggaattctcagtgcactttgtatgtggtggcctggctgcctgtatggccaccctcactgtgcaccccgtggatgttctgcgcacccgctttgcagctcagggtgagcccaaggtctataatacgctgcgccacgccgtggggaccatgtataggagcgaaggcccccaggttttctacaaaggcttggctcccaccttgatcgccatcttcccctacgccgggctgcagttctcttgctacagctccttgaagcacctgtacaagtgggccataccagccgaaggaaagaaaaatgagaacctccaaaacctgctttgtggcagtggagctggtgtcatcagcaagaccctgacatatccgctggacctcttcaagaagcggctacaggttggagggtttgagcatgccagagctgcctttggccaggtacggagatacaagggcctcatggactgtgccaagcaggtgctgcaaaaggaaggcgccctgggcttcttcaagggcctgtcccccagcttgctgaaggctgccctctccacaggcttcatgttcttctcgtatgaattcttctgtaatgtcttccactgcatgaacaggacagccagccagcgctgagtgcaggaaggaccccaggtcttccctggaggcagcctcctgaaggaaggaagattcagtctccactgagaggtgccgtctggcccttccctgcaggccagctgccccaagcggggtagcagccttgaacccacccagctgggacaccaccagaaggtccagggctctccccatgagagaatcagagggaatgcaggacgtggtctatggtgagccaacgacacagtgagaaggagcaggaagttgctgtttctcctctgaccagcccacactccaaaggaaacagacgccatcctacacctatcagccctgcctgccaggagaacagaacacactcctggtctggatggggctgctgcttgagtgcagagggctgcggtaggccctttgcaggagtcaggtccctacacttggcctgtttttccaacctatttaatagacattaaagctaaacacac

SEQ ID NO: 183460 - DNA, 693 bp, Homo sapiens
  Payload ID: 16145
  Gene Symbol: SLC25A19
  Gene Name: solute carrier family 25 (mitochondrial thiamine pyrophosphate carrier), member 19
  ENST ID: ENST00000583332
  CDS Start-End: 146-693
gagcgctgagccgggccgcacccgccgagccgtgaaaaaagtacatctcctggaagggatgctttttagctgagctctggtggatgagaggagctagccttgaaaaacttgatactgatggacattgtgtgggccagaggcagggatggttggctatgaccccaaaccagatggcaggaataacaccaagttccaggtggcagtggctgggtctgtgtctggacttgttactcgggcgctgatcagtcccttcgacgtcatcaagatccgtttccagcttcagcatgagcgcctgtctcgcagtgaccccagcgcaaagtaccatggcatcctccaggcctctaggcagattctgcaggaggagggtccgacagctttctggaaaggacacgtcccagctcagattctctccataggctatggagctgtccaattcttgtcatttgaaatgctgacggagctggtccacagaggcagcgtgtatgacgcccgggaattctcagtgcactttgtatgtggtggcctggctgcctgtatggccaccctcactgtgcaccccgtggatgttctgcgcacccgctttgcagctcagggtgagcccaaggtacggagatacaagggcctcatggactgtgccaagcaggtgctgcaaaaggaaggcgccctgggcttcttcaagggcctgtcccccag

SEQ ID NO: 183461 - DNA, 748 bp, Homo sapiens
  Payload ID: 16145
  Gene Symbol: SLC25A19
  Gene Name: solute carrier family 25 (mitochondrial thiamine pyrophosphate carrier), member 19
  ENST ID: ENST00000580151
  CDS Start-End: 296-748
gaggagctagagagagcggagagcgctgagccgggccgcacccgccgagccgtcccttctccctgtgatcagttaccaactacctgttgatgtgtgtggttacagacttctttctatgctttgtacaactctacagaccgtatgtaggtattactgtttttgttttttgtttttacaaaaaaggaaaaaagtacatctcctggaagggatgctttttagctgagctctggtggatgagaggagctagccttgaaaaacttgatactgatggacattgtgtgggccagaggcagggatggttggctatgaccccaaaccagatggcaggaataacaccaagttccaggtggcagtggctgggtctgtgtctggacttgttactcgggcgctgatcagtcccttcgacgtcatcaagatccgtttccagcttcagcatgagcgcctgtctcgcagtgaccccagcgcaaagtaccatggcatcctccaggcctctaggcagattctgcaggaggagggtccgacagctttctggaaaggacacgtcccagctcagattctctccataggctatggagctgtccaattcttgtcatttgaaatgctgacggagctggtccacagaggcagcgtgtatgacgcccgggaattctcagtgcactttgtatgtggtggcctggctgcctgtatggccaccctcactgtgcaccccgtggatgttctgcgcacccgctttgcagctcagggtgag

SEQ ID NO: 183462 - DNA, 448 bp, Homo sapiens
  Payload ID: 16145
  Gene Symbol: SLC25A19
  Gene Name: solute carrier family 25 (mitochondrial thiamine pyrophosphate carrier), member 19
  ENST ID: ENST00000582822
  CDS Start-End: 1-202
caagttccaggtggcagtggctgggtctgtgtctggacttgttactcgggcgctgatcagtcccttcgacgtcatcaagatccgtttccagcttcagcatgagcgcctgtctcgcagtgaccccagcgcaaagtaccatggcatcctccagggctctccccatgagagaatcagagggaatgcaggacgtggtctatggtgagccaacgacacagtgagaaggagcaggaagttgctgtttctcctctgaccagcccacactccaaaggaaacagacgccatcctacacctatcagccctgcctgccaggagaacagaacacactcctggtctggatggggctgctgcttgagtgcagagggctgcggtaggccctttgcaggagtcaggtccctacacttggcctgtttttccaacctatttaatagacattaaagctaaacacaca

SEQ ID NO: 183463 - DNA, 513 bp, Homo sapiens
  Payload ID: 16145
  Gene Symbol: SLC25A19
  Gene Name: solute carrier family 25 (mitochondrial thiamine pyrophosphate carrier), member 19
  ENST ID: ENST00000582778
  CDS Start-End: 257-513
agagaagcatctccagggacaccggcggccgagccccgcgcacgcccttgagcacctgagctccagggcgtcccctcggactcaaggagaaaaaacacaccccgaggcacacgtggacacctagcccttctccctgtgatcagttaccaactacctgttgatgtgtgtggttacagacttctttctatgctttgtacaactctacagaccgtatgtagcttgatactgatggacattgtgtgggccagaggcagggatggttggctatgaccccaaaccagatggcaggaataacaccaagttccaggtggcagtggctgggtctgtgtctggacttgttactcgggcgctgatcagtcccttcgacgtcatcaagatccgtttccagcttcagcatgagcgcctgtctcgcagtgaccccagcgcaaagtaccatggcatcctccaggcctctaggcagattctgcaggaggagggtccgacagctttctggaaaggacacgtcccagctca

SEQ ID NO: 183464 - DNA, 582 bp, Homo sapiens
  Payload ID: 16145
  Gene Symbol: SLC25A19
  Gene Name: solute carrier family 25 (mitochondrial thiamine pyrophosphate carrier), member 19
  ENST ID: ENST00000580273
  CDS Start-End: 329-582
gcacaaccattggtccagcgtctggcggggagctgcacggtgattggcccaggagcccgccagtttcgtccgagctcagtagagttttgctgttaagactgcgcgaggagctagagagagcggagagcgctgagccgggccgcacccgccgagccgtcttcagcatgagcgcctgtctcgcagtgaccccagcgcaaagtaccatggcatcctccaggcctctaggcagattctgcaggaggagggtccgacagctttctggaaaggacacgtcccagctcagattctctccataggctatggagctgtccaattcttgtcatttgaaatgctgacggagctggtccacagaggcagcgtgtatgacgcccgggaattctcagtgcactttgtatgtggtggcctggctgcctgtatggccaccctcactgtgcaccccgtggatgttctgcgcacccgctttgcagctcagggtgagcccaaggtctataatacgctgcgccacgccgtggggaccatgtataggagcgaaggcccccaggttttctacaaaggcttggctcccaccttgatcgccatctt

SEQ ID NO: 183465 - DNA, 717 bp, Homo sapiens
  Payload ID: 16145
  Gene Symbol: SLC25A19
  Gene Name: solute carrier family 25 (mitochondrial thiamine pyrophosphate carrier), member 19
  ENST ID: ENST00000581988
  CDS Start-End: 401-717
gagccgtgtgagtaacctctacctccgtccttctcgccgccctctcggggaccagcaccctcgctcctcagggtggtcgggagggagcacacgcacccgggcgctcacgagagggcggggactgtgtacacacgtgtcacaccagaccagagaagcatctccagggacaccggcggccgagccccgcgcacgcccttgagcacctgagctccagggcgtcccctcggactcaaggagaaaaaacacaccccgaggcacacgtggacacctagcccttctccctgtgatcagttaccaactacctgttgatgtgtgtggttacagacttctttctatgctttgtacaactctacagaccgtatcttgatactgatggacattgtgtgggccagaggcagggatggttggctatgaccccaaaccagatggcaggaataacaccaagttccaggtggcagtggctgggtctgtgtctggacttgttactcgggcgctgatcagtcccttcgacgtcatcaagatccgtttccagcttcagcatgagcgcctgtctcgcagtgaccccagcgcaaagtaccatggcatcctccaggcctctaggcagattctgcaggaggagggtccgacagctttctggaaaggacacgtcccagctcagattctctccataggctatggagctgtccaattcttgtcatttgaaatgctgacggagct

SEQ ID NO: 183466 - DNA, 855 bp, Homo sapiens
  Payload ID: 16145
  Gene Symbol: SLC25A19
  Gene Name: solute carrier family 25 (mitochondrial thiamine pyrophosphate carrier), member 19
  ENST ID: ENST00000579207
  CDS Start-End: 397-855
gccgcacccgccgagccgtgtgagtaacctctacctccgtccttctcgccgccctctcggggaccagcaccctcgctcctcagggtggtcgggagggagcacacgcacccgggcgctcacgagagggcggggactgtgtacacacgtgtcacaccagaccagagaagcatctccagggacaccggcggccgagccccgcgcacgcccttgagcacctgagctccagggcgtcccctcggactcaaggagaaaaaacacaccccgaggcacacgtggacacctaggaaaaaagtacatctcctggaagggatgctttttagctgagctctggtggatgagaggagctagccttgaaaaacttgatactgatggacattgtgtgggccagaggcagggatggttggctatgaccccaaaccagatggcaggaataacaccaagttccaggtggcagtggctgggtctgtgtctggacttgttactcgggcgctgatcagtcccttcgacgtcatcaagatccgtttccagcttcagcatgagcgcctgtctcgcagtgaccccagcgcaaagtaccatggcatcctccaggcctctaggcagattctgcaggaggagggtccgacagctttctggaaaggacacgtcccagctcagattctctccataggctatggagctgtccaattcttgtcatttgaaatgctgacggagctggtccacagaggcagcgtgtatgacgcccgggaattctcagtgcactttgtatgtggtggcctggctgcctgtatggccaccctcactgtgcaccccgtggatgttctgcgcacccgctttgcagctcagggtgagcccaag

SEQ ID NO: 183467 - DNA, 1554 bp, Homo sapiens
  Payload ID: 16145
  Gene Symbol: SLC25A19
  Gene Name: solute carrier family 25 (mitochondrial thiamine pyrophosphate carrier), member 19
  Uniprot ID: Q9HC21
  ENST ID: ENST00000580994
  CDS Start-End: 171-1133
tgcgcgaggagctagagagagcggagagcgctgagccgggccgcacccgccgagccgtgaaaaaagtacatctcctggaagggatgctttttagctgagctctggtggatgagaggagctagccttgaaaaacttgatactgatggacattgtgtgggccagaggcagggatggttggctatgaccccaaaccagatggcaggaataacaccaagttccaggtggcagtggctgggtctgtgtctggacttgttactcgggcgctgatcagtcccttcgacgtcatcaagatccgtttccagcttcagcatgagcgcctgtctcgcagtgaccccagcgcaaagtaccatggcatcctccaggcctctaggcagattctgcaggaggagggtccgacagctttctggaaaggacacgtcccagctcagattctctccataggctatggagctgtccaattcttgtcatttgaaatgctgacggagctggtccacagaggcagcgtgtatgacgcccgggaattctcagtgcactttgtatgtggtggcctggctgcctgtatggccaccctcactgtgcaccccgtggatgttctgcgcacccgctttgcagctcagggtgagcccaaggtctataatacgctgcgccacgccgtggggaccatgtataggagcgaaggcccccaggttttctacaaaggcttggctcccaccttgatcgccatcttcccctacgccgggctgcagttctcttgctacagctccttgaagcacctgtacaagtgggccataccagccgaaggaaagaaaaatgagaacctccaaaacctgctttgtggcagtggagctggtgtcatcagcaagaccctgacatatccgctggacctcttcaagaagcggctacaggttggagggtttgagcatgccagagctgcctttggccaggtacggagatacaagggcctcatggactgtgccaagcaggtgctgcaaaaggaaggcgccctgggcttcttcaagggcctgtcccccagcttgctgaaggctgccctctccacaggcttcatgttcttctcgtatgaattcttctgtaatgtcttccactgcatgaacaggacagccagccagcgctgagtgcaggaaggaccccaggtcttccctggaggcagcctcctgaaggaaggaagattcagtctccactgagaggtgccgtctggcccttccctgcaggccagctgccccaagcggggtagcagccttgaacccacccagctgggacaccaccagaaggtccagggctctccccatgagagaatcagagggaatgcaggacgtggtctatggtgagccaacgacacagtgagaaggagcaggaagttgctgtttctcctctgaccagcccacactccaaaggaaacagacgccatcctacacctatcagccctgcctgccaggagaacagaacacactcctggtctggatggggctgctgcttgagtgcagagggctgcggtaggccctttgcaggagtcaggtccctacacttggcctgttt

SEQ ID NO: 183468 - DNA, 569 bp, Homo sapiens
  Payload ID: 16145
  Gene Symbol: SLC25A19
  Gene Name: solute carrier family 25 (mitochondrial thiamine pyrophosphate carrier), member 19
  ENST ID: ENST00000584438
  CDS Start-End: 452-569
gctgttaagactgcgcgaggagctagagagagcggagagcgctgagccgggccgcacccgccgagccgtgtgagtaacctctacctccgtccttctcgccgccctctcggggaccagcaccctcgctcctcagggtggtcgggagggagcacacgcacccgggcgctcacgagagggcggggactgtgtacacacgtgtcacaccagaccagagaagcatctccagggacaccggcggccgagccccgcgcacgcccttgagcacctgagctccagggcgtcccctcggactcaaggagaaaaaacacaccccgaggcacacgtggacacctaggtacccacacggggacctctgcagatttgctcagctgagcccttgggcacatgggcacccgaacaccaggaagagcctgcttgatactgatggacattgtgtgggccagaggcagggatggttggctatgaccccaaaccagatggcaggaataacaccaagttccaggtggcagtggctgggtctgtgtctggacttgttactcgggcgctgatcagtcccttcgacgtcatca

SEQ ID NO: 183469 - DNA, 3854 bp, Homo sapiens
  Payload ID: 16146
  Gene Symbol: SLC25A33
  Gene Name: solute carrier family 25 (pyrimidine nucleotide carrier), member 33
  Uniprot ID: Q9BSK2
  ENST ID: ENST00000302692
  CDS Start-End: 211-1176
gcgccgcagaggccggtgaggcgccggcggccacgccgcggaaggcgcgggccgagcagagccgggcgttggagcccgcgcgcgcatggaggcgttgccggcagccccctgagggcagcggggagacaagacccggcgacctcgcgcatccctcgagccgccacgcgctctcgccaccgggcggcgacgggccgcggagccggcgcggccatggcgacgggcggccagcagaaggagaacacgctgcttcacctcttcgccggcgggtgtggaggcacagttggtgctattttcacttgtccactagaagtcattaagacacggttgcagtcttcaagattagctctccggacagtctactatcctcaggttcatctggggaccattagtggagctggaatggtgagaccaacatccgtgacacctggactctttcaggttctgaagtcgatcttggagaaagagggaccaaagtcactttttagaggcttgggtccaaatttggttggagttgcaccatcaagggctgtatactttgcatgttactccaaagccaaagagcaatttaatggcattttcgtgcctaacagcaatattgtgcatattttctcagctggctctgcagcttttatcacaaattccttaatgaatcctatatggatggttaaaacccgaatgcagctagaacagaaagtgaggggctctaagcagatgaatacactccagtgtgctcgttacgtttaccagaccgaaggcattcgtggcttctatagaggattaactgcctcgtatgctggaatttccgaaactataatctgctttgctatttatgaaagtttaaagaagtatctgaaagaagctccattagcctcttctgcaaatgggactgagaaaaattccacaagtttttttggacttatggcagctgctgctctttctaagggctgtgcctcctgcattgcttatccacacgaagtcataaggacgaggctccgggaagagggcaccaagtacaagtcttttgtccagacggcgcgcctggtgttccgggaagaaggctaccttgccttttatagaggactgtttgcccagcttatccggcagatcccaaatactgccattgtgttgtctacttatgagttaattgtgtacctgttagaagaccgtactcagtaacaggccggaaaattgtgctctagaagaataaaactgaaaaactctagagaattttttttccccattgatgtttagaaagtttgagactgaaacaggaaaggccataaaatatctggttcatatcacctgttggacatttccttttggattcatgctttctggaaggtttaaattcattaacgttaatagttaattataactttttttttaacttaagaggattcagggttaagcaccaactaaattaaatcatgctatttaatttaagtatacatttggcttgtgtcctcttttatgctcactatactatgaaggacttaagtaattcagataaacctgccctagaactgcagagaaaaatgataaagtgagaatacaacttgttttataatctgactttaagatcttgcactgctagacagggaagaagtgtcgcattttggctgggcactgtggctcacgcccgtaatcccagcactttgggaggccgaggcagatggatcacgtgaagtcaggagttccagaccagcctggccaacatggcgaaaccctgtctctactaaaaatacaaaaattagccggacgtgtgcctgtaatcccagctacttgggaggctgaggcaggagaatcacttgaaacccagggggcagaggttgcagcgagctgagatcacgtcacttcactccagcctggtcgacagagtgagactccatctcaaaaaaaaaaaaattgtgtcacattttggtggtggtgtgtggaccaggacaaacttcccagcaatttttcttctttgtacatttccaattacttgcagattgatcatctaagcgttcagactgctgagatgaatatatataactttctgagactcaatattttaagctataaaaaacttcctgaagttatccttttctccctactttgaaccaaaggcaagaatttttaaagaactgttttatcaatggcctggctcctggatatagttccggaagttaagaccagttgccttgttaagtgtgttgacagcacagctaccctgtttggctgtgaatccagaatgtgatgaagaacagtcattcccactgaggtctttagccctgttcttggacctctgctcttgcagaaaaggagcacaacgtaggactatggctcacccgtcagagagctcacattctgatagaaagcactgggattgtttaaatatcctagttcaacattaaaaaaaaaaaaaatttaatcccagcactttgggaggccaaggcgggcagatcacgaggtcaggagatcgagaccatcctggctaacacggtgaaaccccgtctctactaaaaaaatacaaaaaaattggccatgcgtggtggcgggcacccatagtcccagctactcgggaggctgaggcaggagaatggcgtgaacctgggaggcggagcttgcagtgagctgagatggcgccactgcactccagcctgggccacagagtgcgactccatctcaaaaaaaaaaaaaaaaccaggatgttacccccttggttttaaagcaaatttaataagggaacaaaaagatgatactaagaagaaggcaagtaaaacccctagtcttccattagctctttcactggaatttgagtatattgtacatgaaggttggttttcaatttgaacgtctagaaagatactcatttctaatacctatgcactgtagtttcaggtttacttgcagacaccctggtagggttaagaggaggatatttccaagttattttaaattgagtttacttttaactggggttcttgactctagtgtaattgctccaacaactacgtagaagtcaaaatgagtgactttagtgaagcttctgtactttacaatacatgacagtaatgctattccagaagttttgttttgttttgttttgagatggagtctcgctctgtctctcccaggctggagtgcagtggcacaatctcggctcactacagcctccacctcccggtttcaagcaattctcctgtcttagcctcctgagtagctgggactacaggcatgcgccaccacacctggctaattttgtatttttagtagagatggggtttcaccatgttggccaggctggtctcaaactcttgacctcaggtgatctacccgcctcggcctcccaaagtactgggattacaggagggagccaccatacctggcccgcgccgccccttcctttgttgttattgttgttttgagacaaggtatcactcgatcactgaagctggatacagtggcaagatcatagctcactgtaacctcaaactcctgggcacaagggatcctcgcatctcagcctcccaagtagcttggaccacaggaaagtaccaccatgcccagctaatgttttttcattttttgtgcagacgaggttttgctatgttgtccaggctggtctcagactactggccagaagcgatcttacctcctcagcctcccaaagcactggaattacagagtaacatctaattttaatattcacattcctattttaatattcatattcgatgatggcacttagcaacatcctcctatatccatattaaaacctgttttccaagattgtgtctaatatgaaggtgtaaaattgctttgttttcactccttcttgaatgaataaatttgatagtaaccaattataa

SEQ ID NO: 183470 - DNA, 1301 bp, Homo sapiens
  Payload ID: 16147
  Gene Symbol: SLC25A36
  Gene Name: solute carrier family 25 (pyrimidine nucleotide carrier), member 36
  Uniprot ID: Q96CQ1
  ENST ID: ENST00000324194
  CDS Start-End: 169-1104
gccgcggggagggctgtgccggttgctttctgcagccgcatctcggccagctctcctcgccgtccccggggcgctgtgcgtctccagtccgggaccgaagccgcctgccgtagcgggcggccagatccgcgtcccgcctcagcggccggaggacatgcgggagagagaatgagccagagggacacgctggtgcatctgtttgccggaggatgtggtggtacagtgggagctattctgacatgtccactggaagttgtaaaaacacgactgcagtcatcttctgtgacgctttatatttctgaagttcagctgaacaccatggctggagccagtgtcaaccgagtagtgtctcccggacctcttcattgcctaaaggtgatcttggaaaaagaagggcctcgttccttgtttagaggactaggccccaatttagtgggggtagccccttccagagcaatatactttgctgcttattcaaactgcaaggaaaagttgaatgatgtatttgatcctgattctacccaagtacatatgatttcagctgcaatggcaggttttactgcaatcacagcaaccaaccccatttggcttataaagactcggttacagcttgatgcaaggaaccgcggggaaaggcgaatgggtgcttttgaatgtgttcgtaaagtgtatcagacagatggactaaaaggattttataggggcatgtctgcttcatatgctggtatatcagagactgttatccattttgttatttatgaaagtataaaacaaaaactactggaatataagactgcttctacaatggaaaatgatgaagagtctgtgaaagaagcatcagattttgtgggaatgatgctagctgctgccacctcaaaaacttgtgccacaactatagcatatccacatgaagttgtaagaacaagactacgtgaagagggaacaaaatacagatctttttttcagactctatctttgcttgttcaagaagaaggttatgggtctctttatcgtggtctgacaactcatctagtgagacagattccaaacacagccattatgatggccacctatgaattggtggtttacctactcaatggatagcagcacgaggactgctgtactgcaaaaaaagaagaccaaaagattacagtggaccatgggatacagaagccagcatggcagacagaagaaaaatagtttgggaacatgtaactattctaagtggaagttttgttgtaggaattatagtaatcacaccacattacttggcctttcggtaatgtgaaaaaaaaaaaaaa

SEQ ID NO: 183471 - DNA, 1040 bp, Homo sapiens
  Payload ID: 16147
  Gene Symbol: SLC25A36
  Gene Name: solute carrier family 25 (pyrimidine nucleotide carrier), member 36
  ENST ID: ENST00000453248
  CDS Start-End: 155-1012
tgtgccggttgctttctgcagccgcatctcggccagctctcctcgccgtccccggggcgctgtgcgtctccagtccgggaccgaagccgcctgccgtagcgggcggccagatccgcgtcccgcctcagcggccggaggacatgcgggagagagaatgagccagagggacacgctggtgcatctgtttgccggaggatgtggtggtacagtgggagctattctgacatgtccactggaagttgtaaaaacacgactgcagtcatcttctgtgacgctttatatttctgaagttcagctgaacaccatggctggagccagtgtcaaccgagtagtgtctcccggacctcttcattgcctaaaagcaatatactttgctgcttattcaaactgcaaggaaaagttgaatgatgtatttgatcctgattctacccaagtacatatgatttcagctgcaatggcaggttttactgcaatcacagcaaccaaccccatttggcttataaagactcggttacagcttgatgcaaggaaccgcggggaaaggcgaatgggtgcttttgaatgtgttcgtaaagtgtatcagacagatggactaaaaggattttataggggcatgtctgcttcatatgctggtatatcagagactgttatccattttgttatttatgaaagtataaaacaaaaactactggaatataagactgcttctacaatggaaaatgatgaagagtctgtgaaagaagcatcagattttgtgggaatgatgctagctgctgccacctcaaaaacttgtgccacaactatagcatatccacatgaagttgtaagaacaagactacgtgaagagggaacaaaatacagatctttttttcagactctatctttgcttgttcaagaagaaggttatgggtctctttatcgtggtctgacaactcatctagtgagacagattccaaacacagccattatgatggccacctatgaattggtggtttacctactcaatggatagcagcacgaggactgctgtactgcaaaaa

SEQ ID NO: 183472 - DNA, 4638 bp, Homo sapiens
  Payload ID: 16147
  Gene Symbol: SLC25A36
  Gene Name: solute carrier family 25 (pyrimidine nucleotide carrier), member 36
  Uniprot ID: Q96CQ1
  ENST ID: ENST00000446041
  CDS Start-End: 226-1158
gctttcagcctctggtgaagggcggcgcgcttaggcaggcggtggcgcggctggagtgccgcggggagggctgtgccggttgctttctgcagccgcatctcggccagctctcctcgccgtccccggggcgctgtgcgtctccagtccgggaccgaagccgcctgccgtagcgggcggccagatccgcgtcccgcctcagcggccggaggacatgcgggagagagaatgagccagagggacacgctggtgcatctgtttgccggaggatgtggtggtacagtgggagctattctgacatgtccactggaagttgtaaaaacacgactgcagtcatcttctgtgacgctttatatttctgaagttcagctgaacaccatggctggagccagtgtcaaccgagtagtgtctcccggacctcttcattgcctaaaggtgatcttggaaaaagaagggcctcgttccttgtttagaggactaggccccaatttagtgggggtagccccttccagagcaatatactttgctgcttattcaaactgcaaggaaaagttgaatgatgtatttgatcctgattctacccaagtacatatgatttcagctgcaatggcaggttttactgcaatcacagcaaccaaccccatttggcttataaagactcggttacagcttgatgcaaggaaccgcggggaaaggcgaatgggtgcttttgaatgtgttcgtaaagtgtatcagacagatggactaaaaggattttataggggcatgtctgcttcatatgctggtatatcagagactgttatccattttgttatttatgaaagtataaaacaaaaactactggaatataagactgcttctacaatggaaaatgatgaagagtctgtgaaagaagcatcagattttgtgggaatgatgctagctgctgccacctcaaaaacttgtgccacaactatagcatatccacatgttgtaagaacaagactacgtgaagagggaacaaaatacagatctttttttcagactctatctttgcttgttcaagaagaaggttatgggtctctttatcgtggtctgacaactcatctagtgagacagattccaaacacagccattatgatggccacctatgaattggtggtttacctactcaatggatagcagcacgaggactgctgtactgcaaaaaaagaagaccaaaagattacagtggaccatgggatacagaagccagcatggcagacagaagaaaaatagtttgggaacatgtaactattctaagtggaagttttgttgtaggaattatagtaatcacaccacattacttggcctttcggtaatgtgaaaaaaaaaaaaaacctcagagcctccaaggaaatgcctttagaagcactcctctctcaaaattgccattttctctaccatgtcccccagacacagttgggttttgttgatttatggcagtcttctaaacaaagccatccttaattttacatactgtattgtaactatccaaagatagtattggcagtcataaatttataacttctggcctttgtttaattccagtaaaataacagcaatgacaatgagatcgtcagtattattttcacatttccctgagaggacctggcacaatattttaaatttaattatttggcagtagtcactgtttttgacaaccaatgaaatagcgtctaaatatcttgtatattttttagcatcaaaatgttttggtttccactgctgacaggtgcttgttgtttagcctaatgtggatatttaaattgttaacataccaaacacacatggtaatagtttgggacaaaataactagtaaaatgttgatttctcggctttttcactgactgcggcatgtcctcgtgtcttctctgattttgtggtacatgaatgaatgcatttatctttttagtgacttactagttacgaacttgaattatcacctctttgtcatacttaagtatcatttacataaagtgtaaaagattttttcacttttgaatctttacctacttgctttcacattaagaatttgaacttttgagttttttccaggtctatatataatagattacatttattttgtaaagaaaatagtaatttaaagttttgccattttaaggtgacaatatttgggacagtataaatattatagacaagggcccccttgctgtctgctttagcaggtagtgacattaattgacttatagttttgtgtaaatgaacaaactgcttttgacaagaaatttattctgtcctagtttcctgcgtggtaaatcatagaaagattcaagttcatttgggttaaatgtgctaataggatgtagcttttaaattctgctattgagtcagctgtaccttttaatactttaaatgtgttatttgtatggcccttataaaggtgtttgctgtaattctgttaaaagacttcgcctatgccatactggtgtataaaaactgccgcaattggacgccggtgtggtactcatttcagtatacctgaactgtacattttgtgcaatggctttatctaaaagaatgacgcttcgtgaaagcactttgtggccttttttgggggggagggtgagagagtaggagagaataccatgttaagattaaaaaaaaaaacaaaaacattggtcacgtattaggcagaaacagtgttcataacatttttctgggttttaaatatgttgtttcggatatccttaatataaatgttttaggtattctgtgtaccctgtcgtacccccaacattatagaatattgcagcgtgtcattgcaagctttctctgctgtcaccagtgaaacatagtgccctgttaaattcccccactttaacttccttgtgatcaacagtaactggatgtttttgaggtgctcaattggaataaaaatattccaatctatttggagaccaaaggcaaaatcagttttcttacctttggaattattcgtaccttttatggtaaatttcagctttgacatgtattatgaggaacgtaccaaaaaccggtttgtaacaaatctgtagagaaggtctgaatctatcgtgtttgccttttcaggtgccatttctactgcctaatacagtgccatttgccttgtgaagacccataaacattcattgtgttgaatgtaagatagagactctccctagtcttactgatctcagtaccccacaaatgattaagaatgatatgaaaaccagcagctaaggaacatcttattatttagttgtagcatattcataacaagtgtccttcaaggataaacatatattctctatttgtatttagcaagtaaaacttgtgttgacctttagtgcattatattcagcttttaacagtattatgtatgtactggaaagcaaagaaatcttagagtcttggacattgtttatttgtgcaacaactagaaaggagcaatgaagtttatttcagttgtatttttccctaagcacaatctgcaatagtttatgtatgacagagataattcaaaaaggaaaactatatataaaagttgtatataaagtttgtctctgaaatatttctttgaagtttttaaaaaatcgactcatgtttaaaaacaaaaacacatattcagagcattggacttttttaacttgttttcatctgtttatcatgacttttttatttctggtgtagagtccacattatttagtttgttgtacttttaaatttcaaagttcaaatctgaagaattagcgtttgtgatttcgggataccatgcagtggttttaatcccaggaaaaaaactatcaccaaaagttcgtttgattctcattatgtaactttgtagaaccatcctttctagatgggtccaccacagtgaatttgtaactttgaagtcaggatagaatatcattagattatctgtgagatagcattactatgttaggaccagcagagtttgggttggtaaaaataatgtttgctctattactgggttacagacatttcagcatttttaggttggttttaaatcactaaaaatatttattcggatttgaaggatttaagtgctaaaaatcaatccatttcttgcccttcaataattgtccatgcctgccttttgttgtttacatgctcttctgcccagactgttagtaatctagggaccccctttggagctgataagtacagttcagccttttctcctcaaatatataatgactttaacattcctaagaatataggtatttctgaatgatttaaatttgaggaattttaatacataaaatacaatgtacaaactttctgcccactcagatctcttctccatcatgtacttagtatttcccattaacctacacactgatttttatgctactccttgtagaaacaaaattctggtttgactcagtttttgtgtttataaacttttggaatgtgtaccccgtttatgtgaagaattatgacctatcagtcatagctaaatagtgaacctcaaaagtgttaacttttgactattcatgtgaggtttggtatcttgcatttatgtacatggctgtaaattatgtgcatttactctgtatttatgttatctagctgacttttacttgaattgttcaaattttaaaaattaaaatacgctca

SEQ ID NO: 183473 - DNA, 3537 bp, Homo sapiens
  Payload ID: 16147
  Gene Symbol: SLC25A36
  Gene Name: solute carrier family 25 (pyrimidine nucleotide carrier), member 36
  ENST ID: ENST00000507429
  CDS Start-End: 169-567
gccgcggggagggctgtgccggttgctttctgcagccgcatctcggccagctctcctcgccgtccccggggcgctgtgcgtctccagtccgggaccgaagccgcctgccgtagcgggcggccagatccgcgtcccgcctcagcggccggaggacatgcgggagagagaatgagccagagggacacgctggtgcatctgtttgccggaggatgtggtggtacagtgggagctattctgacatgtccactggaagttgtaaaaacacgactgcagtcatcttctgtgacgctttatatttctgaagttcagctgaacaccatggctggagccagtgtcaaccgagtagtgtctcccggacctcttcattgcctaaaggtgatcttggaaaaagaagggcctcgttccttgtttagaggactaggccccaatttagtgggggtagccccttccagagcaatatactttgctgcttattcaaactgcaaggaaaagttgaatgatgtatttgatcctgattctacccaagtacatatgatttcagctgcaatggcaggtatgaatgtataatattaaaaaaaaaaaaaactttctgaaacctagaggcttaatattgaattataagtttgtagtgaaaagttgatgattaatgtgcttttcattgattagatgatttttacgtttatcgatataaaccaaattaggtatatgtaaaatctgtcatcagttgacatttttgtagtcaggagtttacatgctagggtacaagtaatatatttatattgccttgtgtagtccactgaatgtttagtgatcattgttaacagttttaagaatccaaccataattacactataaataagttatggagctgtaatttactcttctctcctcaatttctgttagtgccttttccctttttgctgcatgttttggcttctgtctgaaatgtgtcggcaattcttggtaaagtattcattttgtcctgtgctcaaatgctgaaatttttgtgagtgatgtattattattgacaattcagttactatgtgtattttttaaaattgtttattattctacataattcacactagacagcacctgaaatttagacactggctatgtgtacatgcttactatagaaatgtttccaggaactctctgtttctgtcatcactgataagtatatatgattctgaattaaaataactagttttaggtctttaccctgccataaagataaacagttggtttgaccaatctggttctggaatcatttgctgctatgcatgttagacaaagccacgaactttgattttccattgaaaattctccctaatatctgagatttattgtatatttactcatatctcacattttcaaattatgctgtaactttataaactgtagctgctttcatcagctattgatcaataaattgaatgtcaattatgtgcttaataatgagtgccttaaactgttaaacacttttggtttagaaataaagtgaatcaatttgacctatatacttcatgaagtaagtaagtttgaaatacaaatttctgaaaggtcaatagcccttatcgtattacaaattgtttttaaggctttttgtatttattaattgtcagttgattcactgaagctttaaaactggaagggacaatccaaaggtcaaaagagtgaaatacaatcatttaccaataaggaaaccttgggcaaattatgtaatttatgtgaacctctcttagcttacccatggaatgagtcaagtggtctacatagatttggattttgagaattagttctttcatttagtgttatagagattatcttgttacaactagaattatttttaatgtaatttttacagatgttgaatattagtagataggatttttcccctacgaatttggatgtaaggtaaaggttggtggccagtgacaaaccttataaccactttatcaggttctttaaaaatatatttctgaattaccagtgattatgtttttggcttataacctcagataattataaagaaatgttaatcttatttgaaagaattggaatctagaaagttagatgagcagtcattttatattgatatttgttatatcagtatagcaaatgcagaggttcagaatatctttatttccactggaacatcttatttcattggagtatctcatcagaatttattactgtatttgtatcacattgcaaagaatttcagtagaattgtcagtttgcacttttttctcaaatgtgtacaaatgttaacatatagttcatttttatctgtacattgatgccatttcccaacttgaattcctcaagttttggtaaacttacaatctcatacttgttcagaggttattgcactgtacacttactgtgtagaaaatactgtttgaatttgtttgcagttacattgttctgagaactgtgctctcagagcttctgtgcactattcatgagcattaacacttagctttgcagttttatacataactatatggttagtaaaactgaatggtccaatgcagactcattaaagtaggcttttgccccctttgttcttgaaataatctagaccagattactcggggttttttttaggattatttttataggtctaaatatgaatgatttgggggtatgaagtacttaaagatagttctgtgaaaaatcattttcagctgtctattcaagggaaaaaatgctaaccttgtcactttactacacaaaaccacactaaaataaaccattaatgatactgcctgcaagattttaacacaccagatagcacacacattaaggatttataaggcactgtacgtaatttttattccaagtgacctctcaattcattttcattttgcattttatccatatgaactcatgtttaatttagataataaaaatttattttattaaaaggacagtttatttaaagtgggtctttttatttgttgtagtgcatactataagaatttgtaagcctctaaagttgagctataaattttcatgcattaaaaatttgtttcagttgtgaggatatttaatcagattaaataatgttgactcttaatattttgcctgccttttttttctcctacacatgacctttgacagactaagtatatctcagctattgagggtatctgttttgttgcctgtatattttgtttaaattaacttgtatattcctttgtatacacctaggcacagatgtatgcaaaaaaaatttgttaaattacttctttctttatactaattctcaatttttaaaagattttatctggcatgtatatacttttatatagaacattataaatgtaaaggaaatgaattctaattttaattggattatgtattcatacagttattctcaatttttaaaatactaataatgtaatcattgaatgtttcctacatacgtagtgggttttatttgctcacagcatacagttatttttcaatttatgtttttctattagacttaaatttcattataataaaggcttttactcattaaataca

SEQ ID NO: 183474 - DNA, 578 bp, Homo sapiens
  Payload ID: 16147
  Gene Symbol: SLC25A36
  Gene Name: solute carrier family 25 (pyrimidine nucleotide carrier), member 36
  ENST ID: ENST00000513887
  CDS Start-End: 378-578
tgattacccggacgccgctggacctggccgcacgccgcaatctagcaggcgtcggggatccagggccgctttgaggagcctggcttcggatttcgcgtaggttgcatggcccaaggggacggggcggaaagtgcggaggctgaggacaaaatgggcgccggagactcctttagccctcgctccttgcagcgctcgcttgggcctctgcacgtcactcacgccccacctcggacctcgggccgctcatttccgggctcggctttgcaagatgtggtggtacagtgggagctattctgacatgtccactggaagttgtaaaaacacgactgcagtcatcttctgtgacgctttatatttctgaagttcagctgaacaccatggctggagccagtgtcaaccgagtagtgtctcccggacctcttcattgcctaaaagcaatatactttgctgcttattcaaactgcaaggaaaagttgaatgatgtatttgatcctgattctacccaagtacatatgatttcagctgcaatggcaggttttactgcaatcacagcaaccaaccccatttggcttataaag

SEQ ID NO: 183475 - DNA, 1163 bp, Homo sapiens
  Payload ID: 16147
  Gene Symbol: SLC25A36
  Gene Name: solute carrier family 25 (pyrimidine nucleotide carrier), member 36
  Uniprot ID: Q96CQ1
  ENST ID: ENST00000502594
  CDS Start-End: 161-559
gagggctgtgccggttgctttctgcagccgcatctcggccagctctcctcgccgtccccggggcgctgtgcgtctccagtccgggaccgaagccgcctgccgtagcgggcggccagatccgcgtcccgcctcagcggccggaggacatgcgggagagagaatgagccagagggacacgctggtgcatctgtttgccggaggatgtggtggtacagtgggagctattctgacatgtccactggaagttgtaaaaacacgactgcagtcatcttctgtgacgctttatatttctgaagttcagctgaacaccatggctggagccagtgtcaaccgagtagtgtctcccggacctcttcattgcctaaaggtgatcttggaaaaagaagggcctcgttccttgtttagaggactaggccccaatttagtgggggtagccccttccagagcaatatactttgctgcttattcaaactgcaaggaaaagttgaatgatgtatttgatcctgattctacccaagtacatatgatttcagctgcaatggcaggtcacttcctgtagaaatatggactaacttaaacctcgttttactgcaatcacagcaaccaaccccatttggcttataaagactcggttacagcttgatgcaaggaaccgcggggaaaggcgaatgggtgcttttgaatgtgttcgtaaagtgtatcagacagatggactaaaaggattttataggggcatgtctgcttcatatgctggtatatcagagactgttatccattttgttatttatgaaagtataaaacaaaaactactggaatataagactgcttctacaatggaaaatgatgaagagtctgtgaaagaagcatcagattttgtgggaatgatgctagctgctgccacctcaaaaacttgtgccacaactatagcatatccacatgaagttgtaagaacaagactacgtgaagagggaacaaaatacagatctttttttcagactctatctttgcttgttcaagaagaaggttatgggtctctttatcgtggtctgacaactcatctagtgagacagattccaaacacagccattatgatggccacctatgaattggtggtttacctactcaatggatagcagcacgaggactgctgtactgcaaaaaaa

SEQ ID NO: 183476 - DNA, 727 bp, Homo sapiens
  Payload ID: 16147
  Gene Symbol: SLC25A36
  Gene Name: solute carrier family 25 (pyrimidine nucleotide carrier), member 36
  ENST ID: ENST00000512506
  CDS Start-End: 10-279
ctgaacaccatggctggagccagtgtcaaccgagtagtgtctcccggacctcttcattgcctaaaggtgatcttggaaaaagaagggcctcgttccttgtttagaggactaggccccaatttagtgggggtagccccttccagagcaatatactttgctgcttattcaaactgcaaggaaaagttgaatgatgtatttgatcctgattctacccaagtacatatgatttcagctgcaatggcaggcatttactgtacatttctcccgagaaaagagtgagatcgtgtcatctcatgctccccatccgcaggtcacttcctgtagaaatatggactaacttaaacctcgttttactgcaatcacagcaaccaaccccatttggcttataaagactcggttacagcttgatgcaaggaaccgcggggaaaggcgaatgggtgcttttgaatgtgttcgtaaagtgtatcagacagatggactaaaaggattttataggggcatgtctgcttcatatgctggtatatcagagactgttatccattttgttatttatgaaagtataaaacaaaaactactggaatataagactgcttctacaatggaaaatgatgaagagtctgtgaaagaagcatcagattttgtgggaatgatgctagctgctgccacctcaaaaacttgtgccacaactatagcatatccacatgaagttgtaagaacaagactacgt

SEQ ID NO: 183477 - DNA, 817 bp, Homo sapiens
  Payload ID: 16147
  Gene Symbol: SLC25A36
  Gene Name: solute carrier family 25 (pyrimidine nucleotide carrier), member 36
  ENST ID: ENST00000512023
  CDS Start-End: 112-372
agatgtggtggtacagtgggagctattctgacatgtccactggaagttgtaaaaacacgactgcagtcatcttctgtgacgctttatatttctgaagttcagctgaacaccatggctggagccagtgtcaaccgagtagtgtctcccggacctcttcattgcctaaaggtgatcttggaaaaagaagggcctcgttccttgtttagaggactaggccccaatttagtgggggtagccccttccagagcaatatactttgctgcttattcaaactgcaaggaaaagttgaatgatgtatttgatcctgattctacccaagtacatatgatttcagctgcaatggcagaacacaagaaattaaatacaaaataatgcaaaatatttcataagtatggatgtgcaatattactggccatagtgcaaaaggtgaaaggttttactgcaatcacagcaaccaaccccatttggcttataaagactcggttacagcttgatgcaaggaaccgcggggaaaggcgaatgggtgcttttgaatgtgttcgtaaagtgtatcagacagatggactaaaaggattttataggggcatgtctgcttcatatgctggtatatcagagactgttatccattttgttatttatgaaagtataaaacaaaaactactggaatataagactgcttctacaatggaaaatgatgaagagtctgtgaaagaagcatcagattttgtgggaatgatgctagctgctgccacctcaaaaacttgtgccacaactatagcatatccacatgaagttgtaagaacaagactacgtgaag

SEQ ID NO: 183478 - DNA, 620 bp, Homo sapiens
  Payload ID: 16147
  Gene Symbol: SLC25A36
  Gene Name: solute carrier family 25 (pyrimidine nucleotide carrier), member 36
  Uniprot ID: Q96CQ1
  ENST ID: ENST00000631654
  CDS Start-End: 62-460
ccgtagcgggcggccagatccgcgtcccgcctcagcggccggaggacatgcgggagagagaatgagccagagggacacgctggtgcatctgtttgccggaggatgtggtggtacagtgggagctattctgacatgtccactggaagttgtaaaaacacgactgcagtcatcttctgtgacgctttatatttctgaagttcagctgaacaccatggctggagccagtgtcaaccgagtagtgtctcccggacctcttcattgcctaaaggtgatcttggaaaaagaagggcctcgttccttgtttagaggactaggccccaatttagtgggggtagccccttccagagcaatatactttgctgcttattcaaactgcaaggaaaagttgaatgatgtatttgatcctgattctacccaagtacatatgatttcagctgcaatggcaggtcacttcctgtagaaatatggactaacttaaacctccctcaaattcttttgtgacttggaagagtattatggacagaagcttgggttttactgcaatcacagcaaccaaccccatttggcttataaagactcggttacagcttgatgcaaggaaccgcggggaaaggcgaatg

SEQ ID NO: 183479 - DNA, 1023 bp, Homo sapiens
  Payload ID: 16148
  Gene Symbol: SLC25A26
  Gene Name: solute carrier family 25 (S-adenosylmethionine carrier), member 26
  Uniprot ID: Q70HW3
  ENST ID: ENST00000336733
  CDS Start-End: 191-751
aaacatggcggcgcccagcgcgcgaggacgtgatccgcttctgctccggcttggattgtagccttgacgaggtctgagcgaccatggaccggccggggttcgtggcagcgctggtgctgctgcattttttatcacctatgaatatgtgaagtggtttttgcatgctgattcatcttcatatttgacacctatgaaacatatgttggctgcctctgctggagaagtggttgcctgcctgattcgagttccatctgaagtggttaagcagagggcacaggtatctgcttctacaagaacatttcagattttctctaacatcttatatgaagagggtatccaagggttgtatcgaggctataaaagcacagttttaagagagattcctttttctttggtccagtttcccttatgggagtccttaaaagccctctggtcctggaggcaggatcatgtggtggattcttggcagtcagcagtctgtggagcttttgcaggtggatttgccgctgcagtcaccacccctctagacgtggcaaagacaagaattacgctggcaaaggctggctccagcactgctgatgggaatgtgctctctgtcctgcatggggtctggcggtcacaggggctggcaggattatttgcaggtgtcttccctcgaatggcagccatcagtctgggaggtttcatctttctgggggcttatgaccgaacgcacagcttgctgttggaagttggcagaaagagtccttgaagcagagacaagcctcacctccacttctgtcaagagaggggcctgcagtgcaaaccctcttccgctgagcagctgtctgaactataggccccagtgctgaagaccagttgtgctaagataccggcatggagattgtgccatccgtggtataggctggctggtatgaagtcattggcctgtatgccagagagctaagagaagaaaacggggtctgtggcggtactctgaacaatttcctcagaacctcttaataaataagtttggtaatgctg

SEQ ID NO: 183480 - DNA, 2673 bp, Homo sapiens
  Payload ID: 16148
  Gene Symbol: SLC25A26
  Gene Name: solute carrier family 25 (S-adenosylmethionine carrier), member 26
  ENST ID: ENST00000354883
  CDS Start-End: 729-1553
aacctgaagctctcagagcttccctgtcttcatctatcagcccagggagaggaatcagtggttttccaaaagctgtacctctttccataaatacaaggatgaagggctgagatgatggcagttagaattatattgagaaatggtagcgggatctgagaaagcaaggccatgagttgaaagcagagagaaggcggttcgagtggagccctgatgaagttcatgctcatggttgcccagccattaacacgggctcatcacatctgtttccagattgcttctagaacttagctaccctcgttctataagatggaatgaaaatgcgtactacatacagatcatgaaaagacgcaaagaaaatgcatcttcacattgcagttcagaatcacgccggcctcattctaccgctgctctctcctggatctcggccacggatcttttgctcgcgaaagttcctccgtctagctgcacacaacgctgctgcaggaaaccgaggtaagggatttgccgagacttagctccaccacactccccgaggccccgcccctcctctctggccctcccctaggcccaggtgtctcgcgttgcacgtgcagttgttgtggttctacgtcacgtggtcccggaagttcaagacagacccgcctcaaacatggcggcgcccagcgcgcgaggacgtgatccgcttctgctccggcttggattgtagccttgacgaggtctgagcgaccatggaccggccggggttcgtggcagcgctggtggctggtggggtagcaggtgtttctgttgacttgatattatttcctctggataccattaaaaccaggctgcagagtccccaaggatttagtaaggctggtggttttcatggaatatatgctggcgttccttctgctgctattggatcctttcctaatgctgctgcattttttatcacctatgaatatgtgaagtggtttttgcatgctgattcatcttcatatttgacacctatgaaacatatgttggctgcctctgctggagaagtggttgcctgcctgattcgagttccatctgaagtggttaagcagagggcacaggtatctgcttctacaagaacatttcagattttctctaacatcttatatgaagagggtatccaagggttgtatcgaggctataaaagcacagttttaagagagattcctttttctttggtccagtttcccttatgggagtccttaaaagccctctggtcctggaggcaggatcatgtggtggattcttggcagtcagcagtctgtggagcttttgcaggtggatttgccgctgcagtcaccacccctctagacgtggcaaagacaagaattacgctggcaaaggctggctccagcactgctgatgggaatgtgctctctgtcctgcatggggtctggcggtcacaggggctggcaggattatttgcaggtgtcttccctcgaatggcagccatcagtctgggaggtttcatctttctgggggcttatgaccgaacgcacagcttgctgttggaagttggcagaaagagtccttgaagcagagacaagcctcacctccacttctgtcaagagaggggcctgcagtgcaaaccctcttccgctgagcagctgtctgaactataggccccagtgctgaagaccagttgtgctaagataccggcatggagattgtgccatccgtggtataggctggctggtatgaagtcattggcctgtatgccagagagctaagagaagaaaacggggtctgtggcggtactctgaacaatttcctcagaacctcttaataaataagtttggtaatgctgaggccaggccttttagagctttcatttgatctgtatctgatctttcatttcctgccacctgatggtggattcagcagaaggcaagatggttataattctaaaagaatagcttgtttgtttgtttgggaaaaggagacttggggaagagttgtgtatgtgggtgtttctccccctagttaattcctgttgtgtaagggtaggctttgttgaaaaagaaagaaagattgaactacaggtgcatagcaagcactctttctgggtaactaggctgctggttttaattaccctcagatttcacccataaaaacgcacaattgtattattttacagagatgtgtccagcgccccctgtggtgtgtgagagaaagcagctgcaactcaagtgactaggtgggcccagctggcttcgtgcaggagggcacggtgggtgagccattctcgccattctcatgtcagactgaaaggagggcctgggccagctttgaaaaggcaggatgaaatggaaaggtcaccacacttagggattttagaccttgactaacaagctccaggtgtagaaaaattcaaaacaaaatgtcaggaatctagcagtgttgtctgccctggagcaaacaaacagtatgtgattttgcttcgcctattttttttttcttttttgggggaagataattaaaggcagaatgactgcgtttgtaaaagaaggaccaccaactatactgacatttataaatgaacctttattaaagacacttcaatgccatttgttagacacttcaatattttacatggttttcaatgtacactgtaccaaaatttctataaataaataactttgtacataaaagtaa

SEQ ID NO: 183481 - DNA, 1096 bp, Homo sapiens
  Payload ID: 16148
  Gene Symbol: SLC25A26
  Gene Name: solute carrier family 25 (S-adenosylmethionine carrier), member 26
  ENST ID: ENST00000413054
  CDS Start-End: 75-707
ctgctgcattttttatcacctatgaatatgtgaagtggtttttgcatgctgattcatcttcatatttgacacctatgaaacatatgttggctgcctctgctggagaagtggttgcctgcctgattcgagttccatctgaagtggttaagcagagggcacaggtatctgcttctacaagaacatttcagattttctctaacatcttatatgaagagggtatccaagggttgtatcgaggctataaaagcacagttttaagagagattcctttttctttggtccagtttcccttatgggagtccttaaaagccctctggtcctggaggcaggatcatgtggtggattcttggcagtcagcagtctgtggagcttttgcaggtggatttgccgctgcagtcaccacccctctagacgtggcaaagacaagaattacgctggcaaaggctggctccagcactgctgatgggaatgtgctctctgtcctgcatggggtctggcggtcacaggggctggcaggggaccatataccagggattttcttgcaagagcaaagcagtggcctccctttgcagagggtcggtcggcagctgcctggacttcgggcgtctcagctggcagtgccacctcctcatcctgatgccgagttggatcacttatgtgattgtagtttttgtgtacctttggcagttttaatctcagctatttgatgatctggaggacatgaagtagattatttgcaggtgtcttccctcgaatggcagccatcagtctgggaggtttcatctttctgggggcttatgaccgaacgcacagcttgctgttggaagttggcagaaagagtccttgaagcagagacaagcctcacctccacttctgtcaagagaggggcctgcagtgcaaaccctcttccgctgagcagctgtctgaactataggccccagtgctgaagaccagttgtgctaagataccggcatggagattgtgccatccgtggtataggctggctggtatgaagtcattggcctgtatgccagagagctaagagaagaaaacggggtctgtggcggtactctgaacaatttcctcagaacctctt

SEQ ID NO: 183482 - DNA, 3879 bp, Homo sapiens
  Payload ID: 16148
  Gene Symbol: SLC25A26
  Gene Name: solute carrier family 25 (S-adenosylmethionine carrier), member 26
  ENST ID: ENST00000464350
  CDS Start-End: 139-399
ggattgtagccttgacgaggtctgagcgaccatggaccggccggggttcgtggcagcgctggtgctgctgcattttttatcacctatgaatatgtgaagtggtttttgcatgctgattcatcttcatatttgacacctatgaaacatatgttggctgcctctgctggagaagtggttgcctgcctgattcgagttccatctgaagtggttaagcagagggcacaggtatctgcttctacaagaacatttcagattttctctaacatcttatatgaagagggtatccaagggttgtatcgaggctataaaagcacagttttaagagagattcctttttctttggtccagtttcccttatgggagtccttaaaaggttggaagccatataactgcttttgaatagagcagctaaagaagtcccaagttgccctctggtcctggaggcaggatcatgtggtggattcttggcagtcagcagtctgtggagcttttgcaggtggatttgccgctgcagtcaccacccctctagacgtggcaaagacaagaattacgctggcaaaggctggctccagcactgctgatgggaatgtgctctctgtcctgcatggggtctggcggtcacaggggctggcaggattatttgcaggtgtcttccctcgaatggcagccatcagtctgggaggtttcatctttctgggggcttatgaccgaacgcacagcttgctgttggaagttggcagaaagagtccttgaagcagagacaagcctcacctccacttctgtcaagagaggggcctgcagtgcaaaccctcttccgctgagcagctgtctgaactataggccccagtgctgaagaccagttgtgctaagataccggcatggagattgtgccatccgtggtataggctggctggtatgaagtcattggcctgtatgccagagagctaagagaagaaaacggggtctgtggcggtactctgaacaatttcctcagaacctcttaataaataagtttgagatgtgtccagcgccccctgtggtgtgtgagagaaagcagctgcaactcaagtgactaggtgggcccagctggcttcgtgcaggagggcacgatccaagtcctgtgagcgactgatactccacatgggagttacaactatgtacagatgagtgacgcttgaacccaagcttcctcgcagcctctcctacctctctttcccgtagagattggtatgacaagaactgaggtagacaaaacctagctttttggtgccaacagcagtggcaccctctgtttcccggggagctgtcctgtcagtggcgtggactcgggactggcgtcacatgctttggggaggtggccattggaaacaagcaagtactgggcttccgcgcgctctggactgcctgaagttaatgaagatgcaggctgtagctctgtggagtccgggtgatacaaccttgctaaagtccaggaagaatcccctacaaggaaagaacgaacctgtcagacccccacttgaccgtttaagcagctcccaacccacctgttagaagacagtcaaaagttacctttcccatctagagatgccattggctttttcttcacagccgtcagcattctatcgtggttactggggtagagcgacccttggcactcggggcaggacccagcggcagtcctgctgcactggtgatgtggagaatgctcttggtcactcccacccggctccgggccatttggcgcacttggctgtgcgctgtctctggacacaggctgggggtggaaggcttgtcccctggagtaacagtccacttcggtgttgcagtcactgcatacgacccggccaccgtgttctgaaggacagcgccaaagatgggttagagtcactgctgtgggagtcttcgtccccacacagaggacaggctgctcagctccactgtgcaaggcaaaggtcatgggggagctgctgctgctggctgctgagcatgtaaaccggatgtccttgcccaccatagccatggtggtttctggctgggtgatgatctgtggcttcaggaagtcatctggggagagaagggtcaactgtaaagcgctgggttcttggtacacagaggaaccagctgctgttcatgctaacagaaactgacacagacaccaagcaggaaccagagcttgaggtccctgtgcatcctcagccccaccaaccagatgccgtaagagttgcaccatggacatctgacctcatctaattagaagtctgtgagtactgatcacctttatgatcacactccttgattagaaattaacccaccacttctcagttctcaaaccagccagccggcagtttccttaagacaactggctctgcctgctgactttcacacaaaacagtcaggcaccactggtcatgactgcagagatcttacccacaaaccttactccaaaaggagggggtgtaaaacacttccaaaatgtcagaataaggacctccaaaaatctgcacctccattaaaacaaggaaaacacctggaaaaatggtcaaaagcaactttttcagaattctggaaaaccaaaggcttacaacaatccatggattgttgattcaagcaaatagcaacatctcagaaatgtgagctttgtggtattttaacttatccaaagccccattcttccctccccagctccatggtagccttgaaacccagcagcctagcaaccactcaagggtcagaatgggctccccaaaagccccatcctcagaactgacaccatgtggcctatctggcagcaacacggaaagccccattcacaggatttgcattgatttgccctgatctagtttgccgagcaggagaagccctagccccagggcacatgactacaacaatcagtagccactgttcaacagcgcagctgtctgaggggacaatacccatggggcaaacaagcagctggccaaaaaactataaaggaaaatgtggggaatacagtgttaatggtgggctttgaaaaggtccaatacattcctggggatctagacagccacatgcaggtgcaaggccatgtgcacacccaggaaagacgtgagggggtcctcatttgtcacctgtggctgagcatgactgtctacacaaataggaagtgatggcacaccccaacacaaacacacaagccgtcggtaaaggataggagacagtggttgtggtgacttctctgtccaaccattagctaaccactaaactaaacaagcagggacttaaggggacggactttatatagcctttgtccaggaaaagtcactaggcaagctgtaacaataaacagcaacagcagcaaatcctgggggaggagaaagggaatatccaatttccagagttgccacattattttattttaaatgcccaattttcaacaaaatattatgaaacactcaaacaggaaaaaaagcagtcaacagaaactgtctctgagggagcccagacttagattcactaaataaactttttaaatcggcaattataggcatattcaaacacctcaaggaaaccatgtcttaaaaaaaatatcgaaggatagtggccaggtggggtggctcacgcctataatcccagcactttgggaggctgaggcaggaggatcatgaggtcaggagatcaagaccatcctggctaacatggggaaaccctgtctctactaaaaatacaaaaaaaaaaaaaaaattagccgggtgtggtggcaggtgcctgtagtcccagctactagggaggccgaggcaggagaatggcatgaacccaggaggcggagcttgcagtgagccaagatcacgccactgccctccagcctgggtgacagagcaagactctgtctcaaaaaaaaaa

SEQ ID NO: 183483 - DNA, 1840 bp, Homo sapiens
  Payload ID: 16148
  Gene Symbol: SLC25A26
  Gene Name: solute carrier family 25 (S-adenosylmethionine carrier), member 26
  ENST ID: ENST00000483224
  CDS Start-End: 1-275
ctgctgcattttttatcacctatgaatatgtgaagtggtttttgcatgctgattcatcttcatatttgacacctatgaaacatatgttggctgcctctgctggagaagtggttgcctgcctgattcgagttccatctgaagtggttaagcagagggcacaggtatctgcttctacaagaacatttcagattttctctaacatcttatatgaagagggtatccaagggttgtatcgaggctataaaagcacagttttaagagaggaggaggattagagtcaaaggtgtggggaggcttgtgagcttctgtgagttgttgtgtgtggcttgtatacatgctgttatactgattcctttttctttggtccagtttcccttatgggagtccttaaaagccctctggtcctggaggcaggatcatgtggtggattcttggcagtcagcagtctgtggagcttttgcaggtggatttgccgctgcagtcaccacccctctagacgtggcaaagacaagaattacgctggcaaaggctggctccagcactgctgatgggaatgtgctctctgtcctgcatggggtctggcggtcacaggggctggcaggattatttgcaggtgtcttccctcgaatggcagccatcagtctgggaggtttcatctttctgggggcttatgaccgaacgcacagcttgctgttggaagttggcagaaagagtccttgaagcagagacaagcctcacctccacttctgtcaagagaggggcctgcagtgcaaaccctcttccgctgagcagctgtctgaactataggccccagtgctgaagaccagttgtgctaagataccggcatggagattgtgccatccgtggtataggctggctggtatgaagtcattggcctgtatgccagagagctaagagaagaaaacggggtctgtggcggtactctgaacaatttcctcagaacctcttaataaataagtttggtaatgctgaggccaggccttttagagctttcatttgatctgtatctgatctttcatttcctgccacctgatggtggattcagcagaaggcaagatggttataattctaaaagaatagcttgtttgtttgtttgggaaaaggagacttggggaagagttgtgtatgtgggtgtttctccccctagttaattcctgttgtgtaagggtaggctttgttgaaaaagaaagaaagattgaactacaggtgcatagcaagcactctttctgggtaactaggctgctggttttaattaccctcagatttcacccataaaaacgcacaattgtattattttacagagatgtgtccagcgccccctgtggtgtgtgagagaaagcagctgcaactcaagtgactaggtgggcccagctggcttcgtgcaggagggcacggtgggtgagccattctcgccattctcatgtcagactgaaaggagggcctgggccagctttgaaaaggcaggatgaaatggaaaggtcaccacacttagggattttagaccttgactaacaagctccaggtgtagaaaaattcaaaacaaaatgtcaggaatctagcagtgttgtctgccctggagcaaacaaacagtatgtgattttgcttcgcctattttttttttcttttttgggggaagataattaaaggcagaatgactgcgtttgtaaaagaaggaccaccaactatactgacatttataaatgaacctttattaaagacacttcaatgccatttgttagacacttcaatattttacatggttttcaatgtacactgtaccaaaatttctataaataaataactttgtacataaaagtaa

SEQ ID NO: 183484 - DNA, 3879 bp, Homo sapiens; identical to SEQ ID NO: 183482
  Payload ID: 16148
  Gene Symbol: SLC25A26
  Gene Name: Solute carrier family 25 (S-adenosylmethionine carrier), member 26
  ENST ID: ENST00000634032
  CDS Start-End: 139-399

SEQ ID NO: 183485 - DNA, 1840 bp, Homo sapiens; identical to SEQ ID NO: 183483
  Payload ID: 16148
  Gene Symbol: SLC25A26
  Gene Name: Solute carrier family 25 (S-adenosylmethionine carrier), member 26
  ENST ID: ENST00000632740
  CDS Start-End: 1-275

SEQ ID NO: 183486 - DNA, 1096 bp, Homo sapiens; identical to SEQ ID NO: 183481
  Payload ID: 16148
  Gene Symbol: SLC25A26
  Gene Name: Solute carrier family 25 (S-adenosylmethionine carrier), member 26
  ENST ID: ENST00000633238
  CDS Start-End: 75-707

SEQ ID NO: 183487 - DNA, 2673 bp, Homo sapiens; identical to SEQ ID NO: 183480
  Payload ID: 16148
  Gene Symbol: SLC25A26
  Gene Name: Solute carrier family 25 (S-adenosylmethionine carrier), member 26
  ENST ID: ENST00000633701
  CDS Start-End: 729-1553

SEQ ID NO: 183488 - DNA, 1023 bp, Homo sapiens; identical to SEQ ID NO: 183479
  Payload ID: 16148
  Gene Symbol: SLC25A26
  Gene Name: Solute carrier family 25 (S-adenosylmethionine carrier), member 26
  ENST ID: ENST00000632575
  CDS Start-End: 191-751

SEQ ID NO: 183489 - DNA, 2963 bp, Homo sapiens
  Payload ID: 16149
  Gene Symbol: SLC25A27
  Gene Name: solute carrier family 25, member 27
  Uniprot ID: O95847
  ENST ID: ENST00000371347
  CDS Start-End: 253-1224
gactacattgcccagtaacctcctgggctccgctgtgtttttctattctggggtgtaaggggcagctggaccactccagctgggactgctaggaaggttgcgggtccacccggccgagccgaacgagggaaatggtcctcacccggccactcgccggttgaaaaggggccgccctggcagggaagcggccgccgcggcgcggtgcagcgcagcggcgagaaggagtgcgttatcgtcttgcgctactgctgaatgtccgtcccggaggaggaggagaggcttttgccgctgacccagagatggccccgagcgagcaaattcctactgtccggctgcgcggctaccgtggccgagctagcaacctttcccctggatctcacaaaaactcgactccaaatgcaaggagaagcagctcttgctcggttgggagacggtgcaagagaatctgccccctataggggaatggtgcgcacagctctagggatcattgaagaggaaggctttctaaagctttggcaaggagtgacacccgccatttacagacacgtagtgtattctggaggtcgaatggtcacatatgaacatctccgagaggttgtgtttggcaaaagtgaagatgagcattatcccctttggaaatcagtcattggagggatgatggctggtgttattggccagtttttagccaatccaactgacctagtgaaggttcagatgcaaatggaaggaaaaaggaaactggaaggaaaaccattgcgatttcgtggtgtacatcatgcatttgcaaaaatcttagctgaaggaggaatacgagggctttgggcaggctgggtacccaatatacaaagagcagcactggtgaatatgggagatttaaccacttatgatacagtgaaacactacttggtattgaatacaccacttgaggacaatatcatgactcacggtttatcaagtttatgttctggactggtagcttctattctgggaacaccagccgatgtcatcaaaagcagaataatgaatcaaccacgagataaacaaggaaggggacttttgtataaatcatcgactgactgcttgattcaggctgttcaaggtgaaggattcatgagtctatataaaggctttttaccatcttggctgagaatgaccccttggtcaatggtgttctggcttacttatgaaaaaatcagagagatgagtggagtcagtccattttaaacccctaaagatgcaacccttaaagatacagtgttcagtattattgaaatatgggcatctgcaacacataccccctattatttctacctctttaggaagacacctattccacagagactgatttatagggggcagcactttatttttttctggaaacccaagttctctttgactcctctttttgtccaaaagtgatctggtcggatctcacaaggccatccaatgagaccccgcacagcattttctaaagaagaatcgaagcctgaccactttcaccttgggcaagaaggtttggcctttgagttgctattctatgctgaagagcctgcttagaggaggagtaccaggagggagccagcatttcagatctgaagtagacgataggaatgtggaagaacacatacatagtgcttaagaaatacatttaacctgttatgtcagtatttatcaatgaagtttgataattcacttttctgtcattgttaaagcgtacatactgtaaattaaagggaggtgaatggaaattaatgaataaacattttgagtttccctagtgttgaaggaaggtgtactttttcttgtcagaaagataaaaaaaatcaagttgagatgatgtttgaatttcaagaaaagaggctgctttctgtcagtgccctctcattagatctgtgttaattagttagcactccactgcacatgctaatgacttcctctgacagccacacaccgaatcttgatgaaaaaagagaagagcatttgccttgttacatagtctgttacaagccagatatgttgctagctctcaagagttgtaatatattaagaactacaacttatttgattaaaactcagctgtatagatccttttataaagcaccttttgttaaacatcagcctttcattggtattttaaaagcaaggcagatagatatgaagtcagccaactctgacatgcgtcctttcttatctcccttacctgacactaggggctctagagaggcagagagagcactcacaaatcacactaaaactgccagcggcctgactcttactcagtttagcaaaaattcttgcctaaaaagtgataagtaaaaatctgtttatggtatacagttatgtctcgaatctttgaatcaaatccatgttcttattttagaaaggtaagagttcttcaaattcagctacataccaccggctctcccaacctcagacggtgggcatttctggatggatggctgcggttatggataaaggctgtaactgttaacacagaaaaacatgaaaagctcaggcccaagaaaggccttggagccagccaaacagaatttgttctaatggacatggatgatgttgaacagaaaaaagtttacaagtgctttgtggttgcactaatgtatactcactgccattttaagagggggaagtacattttaaaatatatttgaatgtcatgtactgatatgcagtagcttattgtttttctagttgcagagaatgtgaagtttaatctcttaaaatatttagatggtctactttttcattgaatttgtcaatatgtaattgcgttgtaaaatattatatatatatatatatatatatatatatatatatgcttaacttcccaagtgttctgcattgaaccacttagggaaaattttgtttgtttttatgttttgtaatttttaaaattaagtaaagactggatcaaaataattgcatccaacctggaccgtgaacaa

SEQ ID NO: 183490 - DNA, 2526 bp, Homo sapiens
  Payload ID: 16149
  Gene Symbol: SLC25A27
  Gene Name: solute carrier family 25, member 27
  Uniprot ID: O95847
  ENST ID: ENST00000411689
  CDS Start-End: 279-1016
aatcagagacgtagcggagcccggcggactacattgcccagtaacctcctgggctccgctgtgtttttctattctggggtgtaaggggcagctggaccactccagctgggactgctaggaaggttgcgggtccacccggccgagccgaacgagggaaatggtcctcacccggccactcgccggttgaaaaggggccgccctggcagggaagcggccgccgcggcgcggtgcagcgcagcggcgagaaggagtgcgttatcgtcttgcgctactgctgaatgtccgtcccggaggaggaggagaggcttttgccgctgacccagagatggccccgagcgagcaaattcctactgtccggctgcgcggctaccgtggccgagctagcaacctttcccctggatctcacaaaaactcgactccaaatgcaaggagaagcagctcttgctcggttgggagacggtgcaagagaatctgccccctataggggaatggtgcgcacagctctagggatcattgaagaggaaggctttctaaagctttggcaaggagtgacacccgccatttacagacacgtagtgtattctggaggtcgaatggtcacatatgaacatctccgagaggttgtgtttggcaaaagtgaagatgagcattatcccctttggaaatcagtcattggagggatgatggctggtgttattggccagtttttagccaatccaactgacctagtgaaggttcagatgcaaatggaaggaaaaaggaaactggaaggaaaaccattgcgatttcgtggtgtacatcatgcatttgcaaaaatcttagctgaaggaggaatacgagggctttgggcaggctgggtacccaatatacaaagagcagcactggtgaatatgggagatttaaccacttatgatacagtgaaacactacttggtattgaatacaccacttgaggacaatatcatgactcacggtttatcaagtgatctggtcggatctcacaaggccatccaatgagaccccgcacagcattttctaaagaagaatcgaagcctgaccactttcaccttgggcaagaaggtttggcctttgagttgctattctatgctgaagagcctgcttagaggaggagtaccaggagggagccagcatttcagatctgaagtagacgataggaatgtggaagaacacatacatagtgcttaagaaatacatttaacctgttatgtcagtatttatcaatgaagtttgataattcacttttctgtcattgttaaagcgtacatactgtaaattaaagggaggtgaatggaaattaatgaataaacattttgagtttccctagtgttgaaggaaggtgtactttttcttgtcagaaagataaaaaaaatcaagttgagatgatgtttgaatttcaagaaaagaggctgctttctgtcagtgccctctcattagatctgtgttaattagttagcactccactgcacatgctaatgacttcctctgacagccacacaccgaatcttgatgaaaaaagagaagagcatttgccttgttacatagtctgttacaagccagatatgttgctagctctcaagagttgtaatatattaagaactacaacttatttgattaaaactcagctgtatagatccttttataaagcaccttttgttaaacatcagcctttcattggtattttaaaagcaaggcagatagatatgaagtcagccaactctgacatgcgtcctttcttatctcccttacctgacactaggggctctagagaggcagagagagcactcacaaatcacactaaaactgccagcggcctgactcttactcagtttagcaaaaattcttgcctaaaaagtgataagtaaaaatctgtttatggtatacagttatgtctcgaatctttgaatcaaatccatgttcttattttagaaaggtaagagttcttcaaattcagctacataccaccggctctcccaacctcagacggtgggcatttctggatggatggctgcggttatggataaaggctgtaactgttaacacagaaaaacatgaaaagctcaggcccaagaaaggccttggagccagccaaacagaatttgttctaatggacatggatgatgttgaacagaaaaaagtttacaagtgctttgtggttgcactaatgtatactcactgccattttaagagggggaagtacattttaaaatatatttgaatgtcatgtactgatatgcagtagcttattgtttttctagttgcagagaatgtgaagtttaatctcttaaaatatttagatggtctactttttcattgaatttgtcaatatgtaattgcgttgtaaaatattatatatatatatatatatatatatatatatatatgcttaacttcccaagtgttctgcattgaaccacttagggaaaattttgtttgtttttatgttttgtaatttttaaaattaagtaaagactggatcaaaataattgcatccaacctggaccgtgaa

SEQ ID NO: 183491 - DNA, 650 bp, Homo sapiens
  Payload ID: 16149
  Gene Symbol: SLC25A27
  Gene Name: solute carrier family 25, member 27
  ENST ID: ENST00000604616
  CDS Start-End: 1-296
tgaatatgggagatttaaccacttatgatacagtgaaacactacttggtattgaatacaccacttgaggacaatatcatgactcacggtttatcaagtttatgttctggactggtagcttctattctgggaacaccagccgatgtcatcaaaagcagaataatgaatcaaccacgagataaacaaggaaggggacttttgtataaatcatcgactgactgcttgattcaggctgttcaaggtgaaggattcatgagtctatataaaggctttttaccatcttggctgagaatgtgatctggtcggatctcacaaggccatccaatgagaccccgcacagcattttctaaagaagaatcgaagcctgaccactttcaccttgggcaagaaggtttggcctttgagttgctattctatgctgaagagcctgcttagaggaggagtaccaggagggagccagcatttcagatctgaagtagacgataggaatgtggaagaacacatacatagtgcttaagaaatacatttaacctgttatgtcagtatttatcaatgaagtttgataattcacttttctgtcattgttaaagcgtacatactgtaaattaaagggaggtgaatggaaattaatgaataaacattttgagtttc

SEQ ID NO: 183492 - DNA, 433 bp, Homo sapiens
  Payload ID: 16149
  Gene Symbol: SLC25A27
  Gene Name: solute carrier family 25, member 27
  ENST ID: ENST00000604217
  CDS Start-End: 1-433
aatggaaggaaaaaggaaactggaaggaaaaccattgcgatttcgtggtgtacatcatgcatttgcaaaaatcttagctgaaggaggaatacgagggctttgggcaggctgggtacccaatatacaaagagcagcactggtgaatatgggagatttaaccacttatgatacagtgaaacactacttggtattgaatacaccacttgaggacaatatcatgactcacggtttatcaagtttatgttctggactggtagcttctattctgggaacaccagccgatgtcatcaaaagcagaataatgaatcaaccacgagataaacaaggaaggggacttttgtataaatcatcgactgactgcttgattcaggctgttcaaggtgaaggattcatgagtctatataaaggctttttaccatcttggctgagaatg

SEQ ID NO: 183493 - DNA, 659 bp, Homo sapiens
  Payload ID: 16149
  Gene Symbol: SLC25A27
  Gene Name: solute carrier family 25, member 27
  ENST ID: ENST00000603486
  CDS Start-End: 212-659
ctgaaaaacatgtttttgagttgagtcctgaaagacaaggagatgttagtaaagcagagaagggagaattcattctagaaagatcagacagtgtgtgggaagggcagagtctgaaaagagcatgccccatttggagaagcatcaagaagcccacgtgttagaagcaccggccccatgagacaaagacacagctagagagattgactaggccatgtcggaatgtcctcttattttatacatacataagcatatagatacatatagccaaagttacctttttaatgatcttttttacccagtgtattctggaggtcgaatggtcacatatgaacatctccgagaggttgtgtttggcaaaagtgaagatgagcattatcccctttggaaatcagtcattggagggatgatggctggtgttattggccagtttttagccaatccaactgacctagtgaaggttcagatgcaaatggaaggaaaaaggaaactggaaggaaaaccattgcgatttcgtggtgtacatcatgcatttgcaaaaatcttagctgaaggaggaatacgagggctttgggcaggctgggtacccaatatacaaagagcagcactggtgaatatgggagatttaaccacttatgatacagtgaaacactacttggtat

SEQ ID NO: 183494 - DNA, 837 bp, Homo sapiens
  Payload ID: 16149
  Gene Symbol: SLC25A27
  Gene Name: solute carrier family 25, member 27
  ENST ID: ENST00000604127
  CDS Start-End: 1-436
aatggaaggaaaaaggaaactggaaggaaaaccattgcgatttcgtggtgtacatcatgcatttgcaaaaatcttagctgaaggaggaatacgagggctttgggcaggctgggtacccaatatacaaagagcagcactggtgaatatgggagatttaaccacttatgatacagtgaaacactacttggtattgaatacaccacttgaggacaatatcatgactcacggtttatcaagtttatgttctggactggtagcttctattctgggaacaccagccgatgtcatcaaaagcagaataatgaatcaaccacgagataaacaaggaaggggacttttgtataaatcatcgactgactgcttgattcaggctgttcaaggtgaaggattcatgagtctatataaaggctttttaccatcttggctgagaatgtgatctggtcggatctcacaaggccatccaatgagaccccgcacagcattttctaaagaagaatcgaagcctgaccactttcaccttgggcaagaagaaaggtaagagttcttcaaattcagctacataccaccggctctcccaacctcagacggtgggcatttctggatggatggctgcggttatggataaaggctgtaactgttaacacagaaaaacatgaaaagctcaggcccaagaaaggccttggagccagccaaacagaatttgttctaatggacatggatgatgttgaacagaaaaaagtttacaagtgctttgtggttgcactaatgtatactcactgccattttaagagggggaagtacattttaaaatatatttgaatgtcatgtactgatatg

SEQ ID NO: 183495 - DNA, 1094 bp, Homo sapiens
  Payload ID: 16150
  Gene Symbol: SLC25A30
  Gene Name: solute carrier family 25, member 30
  ENST ID: ENST00000310862
  CDS Start-End: 341-454
ttttccttttctccagcggcctcaggttcttgttacaactgagtccgggttggaggaggtgtggggccgctgccgccagggtgttactgtgttgcccaggctggtcttgaaatcctgggttgaaacaattctcctaccttggcctctcaaaatgctgggattacaggcgtgagccatcatggctgctgcaaatacttattgcatgaagaatagatttaagataaaatagacttcccagagaacagcttccgctgcactacactgaatacatacacgcataccaaggaaaaacagcactggaggcaatgtttctataaatcaaagaagagacagtgtgagaatgtcagccctcaactggaagccgtttgtgtacggggggctggcctccatcactgctgagtgcggattgcccccgcgatgttacgccaggcatcctatggcaccatcaagataggcacttaccagagcttgaagcgactattcattgaacgcccagaagatgaaactctaccgataaatgtgatatgtggaattctgtctggagtcatatcttcaaccattgctaatccaactgatgttttgaaaattcggatgcaagcgcaaagcaacaccattcaaggaggaatgataggcaacttcatgaacatttaccagcaagaggggacaagaggactgtggaagggtgtgtcccttactgcgcagagggctgctattgttgttggtgtggagctgccggtctatgacatcaccaagaagcatcttattctctcaggcctgatgggagacactgtgtatacccacttcctctcaagcttcacctgtggtctggcaggggccctggcctcaaaccctgttgatgttgtgaggacacgtatgatgaatcagagagtgcttcgagatggcagatgttctggctacacaggaaccctggattgcttgttacagacatggaagaatgaagggttttttgctctctataaaggcttttggccaaattggttgagacttggtccttggaatatcattttctttgtgacatacgagcagttgaagaaattggatttgtgacaagccaaggctgcatgagacatctt

SEQ ID NO: 183496 - DNA, 426 bp, Homo sapiens
  Payload ID: 16150
  Gene Symbol: SLC25A30
  Gene Name: solute carrier family 25, member 30
  ENST ID: ENST00000463262
  CDS Start-End: 137-250
ttttttccttttctccagcggcctcaggttcttgttacaactgagtccgggttggaggaggtgtggggccgctgccgccaggaaaaacagcactggaggcaatgtttctataaatcaaagaagagacagtgtgagaatgtcagccctcaactggaagccgtttgtgtacggggggctggcctccatcactgctgagtgcggattgcccccgcgatgttacgccaggcatcctatggcaccatcaagataggcacttaccagagcttgaagcgactattcattgaacgcccagaagatgaaactctaccgataaatgtgatatgtggaattctgtctggagtcatatcttcaaccattgctaatccaactgatgttttgaaaattcggatgcaagcgcaaagcaacaccattcaaggaggaatgata

SEQ ID NO: 183497 - DNA, 3670 bp, Homo sapiens
  Payload ID: 16150
  Gene Symbol: SLC25A30
  Gene Name: solute carrier family 25, member 30
  Uniprot ID: Q5SVS4
  ENST ID: ENST00000519676
  CDS Start-End: 137-1012
ttttttccttttctccagcggcctcaggttcttgttacaactgagtccgggttggaggaggtgtggggccgctgccgccaggaaaaacagcactggaggcaatgtttctataaatcaaagaagagacagtgtgagaatgtcagccctcaactggaagccgtttgtgtacggggggctggcctccatcactgctgagtgcggtacatttccaattgatttaaccaagacacggctccagattcaaggccagacgaatgatgcaaaatttaaggaaattagataccgaggaatgttgcacgcattagtgaggataggcagagaagaagggctgaaagcactctactcggggattgcccccgcgatgttacgccaggcatcctatggcaccatcaagataggcacttaccagagcttgaagcgactattcattgaacgcccagaagatgaaactctaccgataaatgtgatatgtggaattctgtctggagtcatatcttcaaccattgctaatccaactgatgttttgaaaattcggatgcaagcgcaaagcaacaccattcaaggaggaatgataggcaacttcatgaacatttaccagcaagaggggacaagaggactgtggaagggtgtgtcccttactgcgcagagggctgctattgttgttggtgtggagctgccggtctatgacatcaccaagaagcatcttattctctcaggcctgatgggagacactgtgtatacccacttcctctcaagcttcacctgtggtctggcaggggccctggcctcaaaccctgttgatgttgtgaggacacgtatgatgaatcagagagtgcttcgagatggcagatgttctggctacacaggaaccctggattgcttgttacagacatggaagaatgaagggttttttgctctctataaaggcttttggccaaattggttgagacttggtccttggaatatcattttctttgtgacatacgagcagttgaagaaattggatttgtgacaagccaaggctgcatgagacatctttctgaaaatggtaacttctgaaacagcaaagcttcctgtgtttcactctgcttctcactgcttggctcatcacagattctgggatgtgagcaacagatgaagactgggttagttgagattgctgtgtgttggcattggatgctcttcatcaaacgtttaatggcataaactaacatccaaacactagtctttaccactgaagtgcccttcaacatcaaagataatatgtgaaatgcatgtttcttgctaaagaaaacttgcaagaaaatcaggagcgatgtattgttttattcagggagagtagctcctgatgcatctcagctcatgactgagaatcagactgctctagaaaagctcactggaaccatggaatggagcctccgagaaggtgttatggtttctgaatttctgggagattttgctccttgtcaactgaagaaatttcatgtatggagacctggactgttcaaccccaggtataaacggtgcaggaaatggatcctaggaatatcacactgctttatcatttcctattttggcaggatcttccacttataataagtgattttaagctttgaagacttgacatttgtgagaaattgttacaaagtaataatctctaaattcgtggtggtgttatgtgttggctttgaaggttgcaaggtctgtattggtggggggtgttttcaagcagcttaggttctgtcttaggtcatgttagtaattagctttatgatttttagcaaagcatatgtatttctcaatgagtaaaatggggataataacgtctattgatgtagagggtcaaatgaagaacaaatagtagctgctgctacttgactggaaaggtaaatgtgtttacatcatgctgtggaacagctctaaacagtctatgtagaagaggggcatgttctcatgggcttctcatggtaattgtgaatgaagccctttgttaaggtcttgttgaagaaagaacactgtataagttcaggctttagtacattttccttagcaaaatgttggtagtgaatcaaagagttgatttttccaggtttccagtttttactttagtttatgttgtgcctgtcttggactttctgtttagtttggatggaaaatacctgcttgaaattttaaaaatgatttctttagtgcatctatttagctagtttctgataggtggtatgtaatattttccctttttctttccttctgtagacacaataagtcattctccctcttctttttttctttttctattttcttattctttactctaacctgcttcagagaaagagccctcttccttcttgtcttcatcttagtcttttcaaaataaaagatgactgtgagaaccccaagaacttccacttctgggaggcagccacaggacagggaacatatttatttgggtctcttcagttccccctttgagaacaacattaaatacatgttagctggggctccagggcattctccttccacagtagtgcggccaaattcccagtctggccagtctctttgttgagactgaatagaaggactgcaggtttttttggaggatgagataatttttcctcgcaggcatttttcccttgccttccttatgcatgaatggtccctttgaatattatttccaaaagtgagagctaagacaaagtcatcaaaaagagaggataacagaaggtgggggcgggggcggggtgcagtggggtagggttacctgttaattgctgagactcagatgaaagtccagctctccctgggcaaccctagagggcagcagaggaccccagagctcattcaggccttgctgcttgttctaaactacaccttaggattttttcttctttccaaaacattccattgattttataaagactttctatagagaggctttcacttttgagttctttgagtttaaagattgcttttcttgaaatgctctttttttaatgtagaaaaattttactttttcaaatatgcatacaatttttaaaacagtagaagcaaattcattttaatgaccatgtaaagagcgaatgtcagacagtattattaccagtttattcaaattacatacatgttcctaccaaggtggaaagaaattcaaacctcatggtaaaacttaagcacgatttaagataaaagcatagtatttcttcagtgtagacttattaagtgccttattgaacaggatcttaacctgctttttctgtttttttgaaagagttaatgcaattgttgaagcttctaaccaagaaacaacttaaggaattgggagacttggtcccctcgttgtcagggttctggctataagtacctccccacctttgggttttcttaaatatgccaaaaggaattctagtttttataaccaatgggtttttttgtttgtgtgcttatggatttgtgtaatcattgatgcttaatgttgtggattcataatataaaaagtggctcctgtcctttatatttattcatgtgctagaaatagtatgcattatataaagagtatgaagttttcataagcctttatatttcaagctctttatttaaacattgttggaatatgtggcataagccttgtttcatttatttaataaactggagtaatatataataataaaaa

SEQ ID NO: 183498 - DNA, 582 bp, Homo sapiens
  Payload ID: 16150
  Gene Symbol: SLC25A30
  Gene Name: solute carrier family 25, member 30
  ENST ID: ENST00000519547
  CDS Start-End: 171-582
ttttttccttttctccagcggcctcaggttcttgttacaactgagtccgggttggaggaggtgtggggccgctgccgccaggtacatttccaattgatttaaccaagacacggctccagattcaaggccagacgaatgatgcaaaatttaaggaaattagataccgaggaatgttgcacgcattagtgaggataggcagagaagaagggctgaaagcactctactcggggattgcccccgcgatgttacgccaggcatcctatggcaccatcaagataggcacttaccagagcttgaagcgactattcattgaacgcccagaagatgaaactctaccgataaatgtgatatgtggaattctgtctggagtcatatcttcaaccattgctaatccaactgatgttttgaaaattcggatgcaagcgcaaagcaacaccattcaaggaggaatgataggcaacttcatgaacatttaccagcaagaggggacaagaggactgtggaagggtgtgtcccttactgcgcagagggctgctattgttgttggtgtggagctgccggtctatgacatcaccaagaagc

SEQ ID NO: 183499 - DNA, 453 bp, Homo sapiens
  Payload ID: 16150
  Gene Symbol: SLC25A30
  Gene Name: solute carrier family 25, member 30
  ENST ID: ENST00000522438
  CDS Start-End: 170-453
gcgtgtttgcgcggacggggcggggcggcgcggggctgcgtgcaggctcgtgggtctgccccgcccgcgacggcattttttccttttctccagcggcctcaggttcttgttacaactgagtccgggttggaggaggtgtggggccgctgccgccaggattgcccccgcgatgttacgccaggcatcctatggcaccatcaagataggcacttaccagagcttgaagcgactattcattgaacgcccagaagatgaaactctaccgataaatgtgatatgtggaattctgtctggagtcatatcttcaaccattgctaatccaactgatgttttgaaaattcggatgcaagcgcaaagcaacaccattcaaggaggaatgataggcaacttcatgaacatttaccagcaagaggggacaagaggactgtggaagggtgtgtcccttactgcgca

SEQ ID NO: 183500 - DNA, 3608 bp, Homo sapiens
  Payload ID: 16150
  Gene Symbol: SLC25A30
  Gene Name: solute carrier family 25, member 30
  Uniprot ID: Q5SVS4
  ENST ID: ENST00000539591
  CDS Start-End: 246-968
gcgtgtttgcgcggacggggcggggcggcgcggggctgcgtgcaggctcgtgggtctgccccgcccgcgacggcattttttccttttctccagcggcctcaggttcttgttacaactgagtccgggttggaggaggtgtggggccgctgccgccaggtacatttccaattgatttaaccaagacacggctccagattcaaggccagacgaatgatgcaaaatttaaggaaattagataccgaggaatgttgcacgcattagtgaggataggcagagaagaagggctgaaagcactctactcggggattgcccccgcgatgttacgccaggcatcctatggcaccatcaagataggcacttaccagagcttgaagcgactattcattgaacgcccagaagatgaaactctaccgataaatgtgatatgtggaattctgtctggagtcatatcttcaaccattgctaatccaactgatgttttgaaaattcggatgcaagcgcaaagcaacaccattcaaggaggaatgataggcaacttcatgaacatttaccagcaagaggggacaagaggactgtggaagggtgtgtcccttactgcgcagagggctgctattgttgttggtgtggagctgccggtctatgacatcaccaagaagcatcttattctctcaggcctgatgggagacactgtgtatacccacttcctctcaagcttcacctgtggtctggcaggggccctggcctcaaaccctgttgatgttgtgaggacacgtatgatgaatcagagagtgcttcgagatggcagatgttctggctacacaggaaccctggattgcttgttacagacatggaagaatgaagggttttttgctctctataaaggcttttggccaaattggttgagacttggtccttggaatatcattttctttgtgacatacgagcagttgaagaaattggatttgtgacaagccaaggctgcatgagacatctttctgaaaatggtaacttctgaaacagcaaagcttcctgtgtttcactctgcttctcactgcttggctcatcacagattctgggatgtgagcaacagatgaagactgggttagttgagattgctgtgtgttggcattggatgctcttcatcaaacgtttaatggcataaactaacatccaaacactagtctttaccactgaagtgcccttcaacatcaaagataatatgtgaaatgcatgtttcttgctaaagaaaacttgcaagaaaatcaggagcgatgtattgttttattcagggagagtagctcctgatgcatctcagctcatgactgagaatcagactgctctagaaaagctcactggaaccatggaatggagcctccgagaaggtgttatggtttctgaatttctgggagattttgctccttgtcaactgaagaaatttcatgtatggagacctggactgttcaaccccaggtataaacggtgcaggaaatggatcctaggaatatcacactgctttatcatttcctattttggcaggatcttccacttataataagtgattttaagctttgaagacttgacatttgtgagaaattgttacaaagtaataatctctaaattcgtggtggtgttatgtgttggctttgaaggttgcaaggtctgtattggtggggggtgttttcaagcagcttaggttctgtcttaggtcatgttagtaattagctttatgatttttagcaaagcatatgtatttctcaatgagtaaaatggggataataacgtctattgatgtagagggtcaaatgaagaacaaatagtagctgctgctacttgactggaaaggtaaatgtgtttacatcatgctgtggaacagctctaaacagtctatgtagaagaggggcatgttctcatgggcttctcatggtaattgtgaatgaagccctttgttaaggtcttgttgaagaaagaacactgtataagttcaggctttagtacattttccttagcaaaatgttggtagtgaatcaaagagttgatttttccaggtttccagtttttactttagtttatgttgtgcctgtcttggactttctgtttagtttggatggaaaatacctgcttgaaattttaaaaatgatttctttagtgcatctatttagctagtttctgataggtggtatgtaatattttccctttttctttccttctgtagacacaataagtcattctccctcttctttttttctttttctattttcttattctttactctaacctgcttcagagaaagagccctcttccttcttgtcttcatcttagtcttttcaaaataaaagatgactgtgagaaccccaagaacttccacttctgggaggcagccacaggacagggaacatatttatttgggtctcttcagttccccctttgagaacaacattaaatacatgttagctggggctccagggcattctccttccacagtagtgcggccaaattcccagtctggccagtctctttgttgagactgaatagaaggactgcaggtttttttggaggatgagataatttttcctcgcaggcatttttcccttgccttccttatgcatgaatggtccctttgaatattatttccaaaagtgagagctaagacaaagtcatcaaaaagagaggataacagaaggtgggggcgggggcggggtgcagtggggtagggttacctgttaattgctgagactcagatgaaagtccagctctccctgggcaaccctagagggcagcagaggaccccagagctcattcaggccttgctgcttgttctaaactacaccttaggattttttcttctttccaaaacattccattgattttataaagactttctatagagaggctttcacttttgagttctttgagtttaaagattgcttttcttgaaatgctctttttttaatgtagaaaaattttactttttcaaatatgcatacaatttttaaaacagtagaagcaaattcattttaatgaccatgtaaagagcgaatgtcagacagtattattaccagtttattcaaattacatacatgttcctaccaaggtggaaagaaattcaaacctcatggtaaaacttaagcacgatttaagataaaagcatagtatttcttcagtgtagacttattaagtgccttattgaacaggatcttaacctgctttttctgtttttttgaaagagttaatgcaattgttgaagcttctaaccaagaaacaacttaaggaattgggagacttggtcccctcgttgtcagggttctggctataagtacctccccacctttgggttttcttaaatatgccaaaaggaattctagtttttataaccaatgggtttttttgtttgtgtgcttatggatttgtgtaatcattgatgcttaatgttgtggattcataatataaaaagtggctcctgtcctttatatttattcatgtgctagaaatagtatgcattatataaagagtatgaagttttcataagcctttatatttcaagctctttatttaaacattgttggaatatgtggcataagccttgtttcatttatttaataaactggagt

SEQ ID NO: 183501 - DNA, 525 bp, Homo sapiens
  Payload ID: 16150
  Gene Symbol: SLC25A30
  Gene Name: solute carrier family 25, member 30
  ENST ID: ENST00000618165
  CDS Start-End: 1-359
cgcaaagcaacaccattcaaggaggaatgataggcaacttcatgaacatttaccagcaagaggggacaagaggactgtggaagggtgtgtcccttactgcgcagagggctgctattgttgttggtgtggagctgccggtctatgacatcaccaagaagcatcttattctctcaggcctgatgggagacactgtgtatacccacttcctctcaagcttcacctgtggtctggcaggggccctggcctcaaaccctgttgatgttgtgaggacacgtatgatgaatcagagagtgcttcgagatggcagatgttctggctacacaggaaccctggattgcttgttacaggtgttgccttaatgaagcaaagacacttatcgtattcatccacctgacatcttgggaaatagtggtactctgaatgatatctctaccactattgcttctttatttgtgacctgttcaggagcccacatggcacggaagcaacagaccgtaattggaattaaatctaattttttcctca

SEQ ID NO: 183502 - DNA, 2986 bp, Homo sapiens
  Payload ID: 16151
  Gene Symbol: SLC25A34
  Gene Name: solute carrier family 25, member 34
  Uniprot ID: Q6PIV7
  ENST ID: ENST00000294454
  CDS Start-End: 82-996
tacagacagcctaaacgccaccaccacagggcctgtgccgtgcccctgacccgggcacagaaggccactggcccggaggccatggagacggtgcccccagcagtggacctggtgctgggtgcttctgcctgctgcctggcctgtgtcttcaccaaccccctggaggtggtgaagacgcggctgcagctgcagggggagctgcaggcccggggcacctacccacggccctaccatggcttcatagcctctgtcgctgctgtggcccgagcagacgggctgtggggcctgcagaaggggctggctgccggccttctgtaccaaggcctcatgaatggcgttcgtttctactgctacagcctggcgtgccaggctggcctcacgcagcaaccaggtggcaccgtggttgcgggagccgtggcgggggcactgggagccttcgtggggagccctgcttacctgatcaaaacgcagctgcaagctcagacagtggccgcagtggccgtgggacaccagcacaatcaccagactgtcctgggtgccttggagaccatctggcggcagcaagggctcttggggctgtggcagggcgttggtggggctgtgccccgagtcatggtgggctcagctgcccagctggccaccttcgcctctgccaaggcctgggtacagaagcaacagtggctccctgaggacagctggctggtggccctggctgggggcatgatcagcagcatagccgtggttgtcgtcatgactcccttcgatgtggtcagcacgcggctatacaatcagccggtggacacagctggcaggggccagctctatgggggcctcaccgactgcatggtgaagatctggcggcaggagggccccctggcactctacaagggcctgggccccgcctacctgcgcctgggcccccacaccatcctcagcatgctcttctgggacgagcttcggaaactggctgggcgggcccagcacaagggcacctagacgacggccctcacccccacgtcctgacacggccggcacttggccggaagtgagagcctgctccaggacaactggctgtcccggggcgggccatgggcccaggccctgccagaggtcccgggagagtgtggacagctctggtccatccagccccttggcccacccaggtccagagcatccacttcaagttaccacccattctgtcttccagacagttctcttccttctctgtactgcgtactgggtcaccacatcccagagccttgctcagttatagcaactgctgcgggcgtgcacatggcataggcccagtaacttacatacatcggctcacttaggcctcagacagcagcacgaggcaggcacttttacttcttttaccattagaaagccaaggcctagagtggtgggctttgaccacagccacacaattttgaagtggcagagccaggactggagcttagccctgctcaccctagacctatgcgcttgacaagtgcgtgactgtgacaggcccatgggcccggactgcccataggggtcactgtaccatggcaaaggctgaggtgcaccaggaggctgtggcgtcgtcacctgccttatttgctggagaagctgtagcaaagaaccacagactgggcgacttagacaatagaaatgtattttctcacagttctggaggctggatgctggagaccaaggtgtcagtgggctggtttcttctgaggcctctgtccatggcttgcagatgctgctttctctctgtgtctgcacatggtggtccctcgatgtgcgtctgggtcctgatctcctcctcttataaggacacaaatcatgttggcttagggcccaccctcatgaccccactttaatttttttttttttttttgagatgaagtctcactctgccacccaagctggagtgcagtggcacgatctcggttcactgcaaccttggcctcctaggttcaagcaattctcctgccccagcctcctgagtagctgggattacaggtgtgtgccaccacacccggccaatttttgtatctttagtagagatggggttttgccatgttggccagactggtctcgaactcctgacctcaagtgatccactggccttggcctcccaaagtgctgggattacaggcatgagccacctcacttggcccaattttaacttaattatctctgtcaagagcctatctccatatacagtcacatcctgagctactagggggtaggacttcaacatgcacttctgcaggggccgcagttcagccaacatcatctttttttttgagatggagtctcgctttgttgcccaggctggagtgcggtggtgcaatctcggctcaccacaacctccacctcccaggttcaagtgattctcctgcctcagcctcccgagttgctgggactataggtgtgcgccaccatgcccagctaattttgtatttttagtagagacaggctttcgctgtgttggccaggctggtcttgaatgcctgaccttgccgcccgcctcggcctcccaaaatgctgggattacaggcgtgagccaccgcgcctggcctcagccaacatcatctaagggctctcacggagggcctcccagctgcccgccctgtgggcatttgcacatatcctgacaagcctgaaagaagctccgggtgcccattgttcagtccaggtgcccattgttcccgggactgaggcccgggaaagggaagcgacgtggcagggccagcagcagaccctgggcctttctctagactgagcaccattccccgtgggtgtgctctcagcgccgcaccgaccttcacactgcagagatggatgccaactccctggcaggggcaggactgctgccgagcagccccacctgccctcccagccacaccccaagtctgtaagggccgctcccaggaacacctgctactgcacactccaaaccaataaagttttatattttgtttacttcaacgac

SEQ ID NO: 183503 - DNA, 2785 bp, Homo sapiens
  Payload ID: 16152
  Gene Symbol: SLC25A35
  Gene Name: solute carrier family 25, member 35
  Uniprot ID: Q3KQZ1
  ENST ID: ENST00000380067
  CDS Start-End: 46-933
ttactttcttactcttgggtcagttcctgctacagctatcccaccatggacttcttgatgagtggcctggcagcctgcggggcctgtgtattcaccaatcccctggaggtggtgaagaccaggatgcagttgcaaggagaactgcaggcccctggcacataccagcggcactaccgaaatgtcttccatgccttcatcaccatcggcaaggtggatggccttgctgccctgcagaaaggcctggcccccgccctcttgtaccagttcctgatgaatggcatccgactgggcacctatgggctggctgaggctgggggctacctgcacacagccgaaggcacccacagtcctgcccgcagcgcagcagctggggccatggctggggtcatgggagcctacttggggagccccatctacatggtgaagacacacctgcaggcacaggcagcctcagaaattgctgtagggcaccagtataagcatcagggcatgtttcaggcgctaaccgagattggccagaaacatggtctggtggggttatggcgtggggctctgggcggcctgccccgagttatcgtcggttcctccacccagctgtgcaccttctcatccaccaaggacctcctgagccagtgggagatctttcctccccagagctggaagttggcgctggtggctgccatgatgagtggcattgcagttgtcttggccatggcaccctttgatgtggcctgcacaaggctctacaaccagcccacagatgcacagggcaagaaccgagtccccaagttctcagcaacatcatgcagtgcttcagcgcctttactggggaccaaagatgttaggatcgtgaagggtcagactggtcaccagctgttcaaagtcacccaggctccagggtgcagcccgattctcctgggaacccagtcatgagatacccgcccgttccttcctccttacgggggctgattgaaggtaagcaagagatcagtctggtactggggcagcctcagcaaggcctgatgaagtgtcacgtcctttgctacctaaggggatcagagtcaggatgcttacctggatctctgcgtccccgctaccgcccttccaggacattacacactctcgggccctcacctgctggttttccttagctatctgctgcttgccagagaggacccaggcttcttgacagcggcccctcagggccaggttctccaaactgagaggctgaacagactccacatggacagccctagccccctgcacgccaccaacatcctcaaagtggtacctggagtagggaagcggggtcaggaagggacatctctggtcgcctccccgggagcatctttaagttgcaggcctggctcccggcccgtgcgtggtctcaccgcccggattaaccgtcggccgcgggccccgcccactggtccgaccccgcccctgccattggccagccgggggccattccctcaccgcgcagccgcttcgccccgtacgtgggcctgcagctcgagaagttccactatcaggctctggtccgtcacgggatggcagaaaacttcttgattgtccgggaccggtcggaggtcgctggagtgaggcgaggcagaccctggttgaccccggtctcttcccacaacccacccagtcagccgcccctgggcgccccggccttctcaccttacgtcaatggcccccatggggaggatggcggaaaaggcgcccccgaacagcgggcagtctctcgtgggctccatgggtctgaggctgggttatgggcattagaaaggtttaaaagaagtccacattgggtcacgtggcatcggctccctgggtttcgcagctgccaccgccacccgggtctggcttagctcccggatcctttaagatttggctccgccctgcgctctcgttggccaatcggcgccaagaccctgggggcgggggtcagcggctttgctccggaagccgcgctcttaggagtgcgcctggcgggacggtggggtctgccttggggttggacttagggttagggtctatgtcgcccccggtggtcacgagcatgctcccgccagcctcctcttgattgattgattgattgattgattgacaggtctcgctgtgtcgcccaggctgtaatgcagtggcgcgatcaccgctcactgcagtctccacctccaggactcaagtgatactcctgcctcagcctcttgagtggctcctgctcccgccaccacgcccggctaaatttttaattacttgtagaaatggggcggggtggggagtgtctcccaatcttgcccaggctggcctcaaactcctggactcaagcgatcctcccgcctcggctccctaagtgctggaattacaggcgagagccacagcgcctggcctcctcgtccttttcaagtggtcacaccttccaagaaggtcgcctgagaccctcctgaggggcaggtgctcgtcaaaggggcccacgtctaggtagggtctcttgagtcaggaaagcatagtttcacggtgttctgggcctctgaaagaagaatgggctgccacccagaccgctaattcatagatctgctgctgggaattaggggaacaatgcgtccaggttaggattcaggtctcacatcttcctgaaagtgagagccaacctgggtattagaaatctaattcctctcaaatatttgccttgggaatgctcccgggcaggtgcaaccccacccccagctccacacacctggacagaagcacagattaaaccctcttttgtttgtctttt

SEQ ID NO: 183504 - DNA, 2136 bp, Homo sapiens
  Payload ID: 16152
  Gene Symbol: SLC25A35
  Gene Name: solute carrier family 25, member 35
  Uniprot ID: Q3KQZ1
  ENST ID: ENST00000579192
  CDS Start-End: 537-1424
gagctccggtggctgcctggggacgctcagggacgctcattcctggccagagtcctgacttctttctcggatcgagatctcgttgctggctcgaggaaatcaccggctcttctcccggatccttttcttctctcacttgctggctttcttcttcctgcctccctggcttccatctcccaaccccgcgattccctcctctactcccgtgctcccgtcgcccgccatcctgagccatcccacctgcaaccttctgtcttttgcccctccttgacctcagagggtcctgccttaagcttctcaccagaatctcctagatttctatctcttccctgcttgccagctcttgactcccaaattccagctgacgtttgaccacttgacatttgaccctgacacccttgactgcaaatctaaattcttatcttctgcaacctgtactgctgaaacaggccttccccctgtcttccaaccccgctttctgacacccatttttactttcttactcttgggtcagttcctgctacagctatcccaccatggacttcttgatgagtggcctggcagcctgcggggcctgtgtattcaccaatcccctggaggtggtgaagaccaggatgcagttgcaaggagaactgcaggcccctggcacataccagcggcactaccgaaatgtcttccatgccttcatcaccatcggcaaggtggatggccttgctgccctgcagaaaggcctggcccccgccctcttgtaccagttcctgatgaatggcatccgactgggcacctatgggctggctgaggctgggggctacctgcacacagccgaaggcacccacagtcctgcccgcagcgcagcagctggggccatggctggggtcatgggagcctacttggggagccccatctacatggtgaagacacacctgcaggcacaggcagcctcagaaattgctgtagggcaccagtataagcatcagggcatgtttcaggcgctaaccgagattggccagaaacatggtctggtggggttatggcgtggggctctgggcggcctgccccgagttatcgtcggttcctccacccagctgtgcaccttctcatccaccaaggacctcctgagccagtgggagatctttcctccccagagctggaagttggcgctggtggctgccatgatgagtggcattgcagttgtcttggccatggcaccctttgatgtggcctgcacaaggctctacaaccagcccacagatgcacagggcaagaaccgagtccccaagttctcagcaacatcatgcagtgcttcagcgcctttactggggaccaaagatgttaggatcgtgaagggtcagactggtcaccagctgttcaaagtcacccaggctccagggtgcagcccgattctcctgggaacccagtcatgagatacccgcccgttccttcctccttacgggggctgattgaaggtctcgctgtgtcgcccaggctgtaatgcagtggcgcgatcaccgctcactgcagtctccacctccaggactcaagtgatactcctgcctcagcctcttgagtggctcctgctcccgccaccacgcccggctaaatttttaattacttgtagaaatggggcggggtggggagtgtctcccaatcttgcccaggctggcctcaaactcctggactcaagcgatcctcccgcctcggctccctaagtgctggaattacaggcgagagccacagcgcctggcctcctcgtccttttcaagtggtcacaccttccaagaaggtcgcctgagaccctcctgaggggcaggtgctcgtcaaaggggcccacgtctaggtagggtctcttgagtcaggaaagcatagtttcacggtgttctgggcctctgaaagaagaatgggctgccacccagaccgctaattcatagatctgctgctgggaattaggggaacaatgcgtccaggttaggattcaggtctcacatcttcctgaaagtgagagccaacctgggtattagaaatctaattcctctcaaatatttgccttgggaatgctcccgggcaggtgcaaccccacccccagctccacacacctggacagaagcacagattaaaccctcttttgtttgtctttta

SEQ ID NO: 183505 - DNA, 1541 bp, Homo sapiens
  Payload ID: 16152
  Gene Symbol: SLC25A35
  Gene Name: solute carrier family 25, member 35
  Uniprot ID: Q3KQZ1
  ENST ID: ENST00000580340
  CDS Start-End: 32-919
ttgggtcagttcctgctacagctatcccaccatggacttcttgatgagtggcctggcagcctgcggggcctgtgtattcaccaatcccctggaggtggtgaagaccaggatgcagttgcaaggagaactgcaggcccctggcacataccagcggcactaccgaaatgtcttccatgccttcatcaccatcggcaaggtggatggccttgctgccctgcagaaaggcctggcccccgccctcttgtaccagttcctgatgaatggcatccgactgggcacctatgggctggctgaggctgggggctacctgcacacagccgaaggcacccacagtcctgcccgcagcgcagcagctggggccatggctggggtcatgggagcctacttggggagccccatctacatggtgaagacacacctgcaggcacaggcagcctcagaaattgctgtagggcaccagtataagcatcagggcatgtttcaggcgctaaccgagattggccagaaacatggtctggtggggttatggcgtggggctctgggcggcctgccccgagttatcgtcggttcctccacccagctgtgcaccttctcatccaccaaggacctcctgagccagtgggagatctttcctccccagagctggaagttggcgctggtggctgccatgatgagtggcattgcagttgtcttggccatggcaccctttgatgtggcctgcacaaggctctacaaccagcccacagatgcacagggcaagaaccgagtccccaagttctcagcaacatcatgcagtgcttcagcgcctttactggggaccaaagatgttaggatcgtgaagggtcagactggtcaccagctgttcaaagtcacccaggctccagggtgcagcccgattctcctgggaacccagtcatgagatacccgcccgttccttcctccttacgggggctgattgaaggacattacacactctcgggccctcacctgctggttttccttagctatctgctgcttgccagagaggacccaggcttcttgacagcggcccctcagggccaggttctccaaactgagaggctgaacagactccacatggacagccctagccccctgcacgccaccaacatcctcaaagtggtacctggagtagggaagcggggtcaggaagggacatctctggtcgcctccccgggagcatctttaagttgcaggcctggctcccggcccgtgcgtggtctcaccgcccggattaaccgtcggccgcgggccccgcccactggtccgaccccgcccctgccattggccagccgggggccattccctcaccgcgcagccgcttcgccccgtacgtgggcctgcagctcgagaagttccactatcaggctctggtccgtcacgggatggcagaaaacttcttgattgtccgggaccggtcggaggtcgctggagtgaggcgaggcagaccctggttgaccccggtctcttcccacaacccacccagtcagccgcccctgggcgccccggccttctcaccttac

SEQ ID NO: 183506 - DNA, 1573 bp, Homo sapiens
  Payload ID: 16152
  Gene Symbol: SLC25A35
  Gene Name: solute carrier family 25, member 35
  Uniprot ID: Q3KQZ1
  ENST ID: ENST00000585311
  CDS Start-End: 30-905
gggtcagttcctgctacagctatcccaccatggacttcttgatgagtggcctggcagcctgcggggcctgtgtattcaccaatcccctggaggtggtgaagaccaggatgcagttgcaaggagaactgcaggcccctggcacataccagcggcactaccgaaatgtcttccatgccttcatcaccatcggcaaggtggatggccttgctgccctgcagaaaggcctggcccccgccctcttgtaccagttcctgatgaatggcatccgactgggcacctatgggctggctgaggctgggggctacctgcacacagccgaaggcacccacagtcctgcccgcagcgcagcagctggggccatggctggggtcatgggagcctacttggggagccccatctacatggtgaagacacacctgcaggcacaggcagcctcagaaattgctgtagggcaccagtataagcatcagggcatgtttcaggcgctaaccgagattggccagaaacatggtctggtggggttatggcgtggggctctgggcggcctgccccgagttatcgtcggttcctccacccagctgtgcaccttctcatccaccaaggacctcctgagccagtgggagatctttcctccccagagctggaagttggcgctggtggctgccatgatgagtggcattgcagttgtcttggccatggcaccctttgatgtggcctgcacaaggctctacaaccagcccacagatgcacagggcaagggcctcatgtaccgggggatactggacgctctgctgcagacagctcggaccgagggcatttttggcatgtacaaggaaccgagtccccaagttctcagcaacatcatgcagtgcttcagcgcctttactggggaccaaagatgttaggatcgtgaagggtcagactggtcaccagctgttcaaagtcacccaggctccagggtgcagcccgattctcctgggaacccagtcatgagatacccgcccgttccttcctccttacgggggctgattgaagctatctgctgcttgccagagaggacccaggcttcttgacagcggcccctcagggccaggttctccaaactgagaggctgaacagactccacatggacagccctagccccctgcacgccaccaacatcctcaaagtggtacctggagtagggaagcggggtcaggaagggacatctctggtcgcctccccgggagcatctttaagttgcaggcctggctcccggcccgtgcgtggtctcaccgcccggattaaccgtcggccgcgggccccgcccactggtccgaccccgcccctgccattggccagccgggggccattccctcaccgcgcagccgcttcgccccgtacgtgggcctgcagctcgagaagttccactatcaggctctggtccgtcacgggatggcagaaaacttcttgattgtccgggaccggtcggaggtcgctggagtgaggcgaggcagaccctggttgaccccggtctcttcccacaacccacccagtcagccgcccctgggcgccccggccttctcaccttacg

SEQ ID NO: 183507 - DNA, 1860 bp, Homo sapiens
  Payload ID: 16152
  Gene Symbol: SLC25A35
  Gene Name: solute carrier family 25, member 35
  Uniprot ID: Q3KQZ1
  ENST ID: ENST00000577745
  CDS Start-End: 512-1414
ctcagggacgctcattcctggccagagtcctgacttctttctcggatcgagatctcgttgctggctcgaggaaatcaccggctcttctcccggatccttttcttctctcacttgctggctttcttcttcctgcctccctggcttccatctcccaaccccgcgattccctcctctactcccgtgctcccgtcgcccgccatcctgagccatcccacctgcaaccttctgtcttttgcccctccttgacctcagagggtcctgccttaagcttctcaccagaatctcctagatttctatctcttccctgcttgccagctcttgactcccaaattccagctgacgtttgaccacttgacatttgaccctgacacccttgactgcaaatctaaattcttatcttctgcaacctgtactgctgaaacaggccttccccctgtcttccaaccccgctttctgacacccatttttactttcttactcttgggtcagttcctgctacagctatcccaccatggacttcttgatgagtggcctggcagcctgcggggcctgtgtattcaccaatcccctggaggtggtgaagaccaggatgcagttgcaaggagaactgcaggcccctggcacataccagcggcactaccgaaatgtcttccatgccttcatcaccatcggcaaggtggatggccttgctgccctgcagaaaggcctggcccccgccctcttgtaccagttcctgatgaatggcatccgactgggcacctatgggctggctgaggctgggggctacctgcacacagccgaaggcacccacagtcctgcccgcagcgcagcagctggggccatggctggggtcatgggagcctacttggggagccccatctacatggtgaagacacacctgcaggcacaggcagcctcagaaattgctgtagggcaccagtataagcatcagggcatgtttcaggcgctaaccgagattggccagaaacatggtctggtggggttatggcgtggggctctgggcggcctgccccgagttatcgtcggttcctccacccagctgtgcaccttctcatccaccaaggacctcctgagccagtgggagatctttcctccccagagctggaagttggcgctggtggctgccatgatgagtggcattgcagttgtcttggccatggcaccctttgatgtggcctgcacaaggctctacaaccagcccacagatgcacagggcaagggcctcatgtaccgggggatactggacgctctgctgcagacagctcggaccgagggcatttttggcatgtacaagggtataggtgcctcctacttccgcctcggcccccacaccatcctctccctcttcttctgggaccagctgcgctccctctactacacagacactaaataacagccgctttcccagtctccaccaaatgagcactccttggccacttgtgcctccaccactatgtcctggtgactactgattaggtgacctttcatccatccatgggggacagccaaccccactccccatctgttctcagggttgaatcactacaagagatgagtttcccttctttccttgggtgttgctttaaaccttccctacccattccctgggtaactcacacccctctctcagggctgaacgagtcatcccaaagtgtatttcctcccactcaccactgccacccttgagtccctcctgctcccatgcacagttttaaactcctccctccaaaaccaaagggaatcgagagacccaattcccaggcgtctgggacccaggtgtcctgttagattcaaaggcacagagattatattgattataaagcaagtttattctgaaga

SEQ ID NO: 183508 - DNA, 952 bp, Homo sapiens
  Payload ID: 16152
  Gene Symbol: SLC25A35
  Gene Name: solute carrier family 25, member 35
  Uniprot ID: Q3KQZ1
  ENST ID: ENST00000579681
  CDS Start-End: 1-864
atggacttcttgatgagtggcctggcagcctgcggggcctgtgtattcaccaatcccctggaggtggtgaagaccaggatgcagttgcaaggagaactgcaggcccctggcacataccagcggcactaccgaaatgtcttccatgccttcatcaccatcggcaaggtggatggccttgctgccctgcagaaaggcctggcccccgccctcttgtaccagttcctgatgaatggcatccgactgggcacctatgggctggctgaggctgggggctacctgcacacagccgaaggcacccacagtcctgcccgcagcgcagcagctggggccatggctggggtcatgggagcctacttggggagccccatctacatggtgaagacacacctgcaggcacaggcagcctcagaaattgctgtagggcaccagtataagcatcagggcatgtttcaggcgctaaccgagattggccagaaacatggtctggtggggttatggcgtggggctctgggcggcctgccccgagttatcgtcggttcctccacccagctgtgcaccttctcatccaccaaggacctcctgagccagtgggagatctttcctccccagagctggaagttggcgctggtggctgccatgatgagtggcattgcagttgtcttggccatggcaccctttgatgtggcctgcacaaggctctacaaccagcccacagatgcacagggcaagggcctcatgtaccgggggatactggacgctctgctgcagacagctcggaccgagggcatttttgaaccgagtccccaagttctcagcaacatcatgcagtgcttcagcgcctttactggggaccaaagatgttaggatcgtgaagggtcagactggtcaccagctgttcaaagtcacccaggctccagggtgcagcccgattctcctgggaacccagtcatga

SEQ ID NO: 183509 - DNA, 2123 bp, Homo sapiens
  Payload ID: 16153
  Gene Symbol: SLC25A38
  Gene Name: solute carrier family 25, member 38
  Uniprot ID: Q96DW6
  ENST ID: ENST00000273158
  CDS Start-End: 378-1292
gaagcgaaatctccccttctacagagttcctccggcgcttcctccaccccgggatacacagaacctcatctcctacggtgctgaagcctgcagcagggcaggatgggcaggagagcagagccgcggagtctgcggcgcgggtgaagagcggcgcgtaattcccgcagcaagattgttccgcgcccgcagcccctggactagcaggatccgaaccccggcggctgcgtgcttataggcgcagacgtcagagagcccgcggcttaaagcgcgtcgcctggctagcgccaccccctagccttcttcaaggcctccagggctgggcccaagcgcccgtcgacggcaccctgggcccagaggactcgcgggcctcatctccaatgattcagaactcacgtccgtcgctgctgcaaccccaagatgtcggagacacggtggaaacgcttatgttacatccggtgatcaaggctttcctgtgtggctccatcagtgggacctgctctaccctccttttccaacctctggatctccttaaaacacgcctgcaaaccctccagccctcagatcatgggtctagacgtgttgggatgttggctgtactcttgaaggtggttcgcacggagagtcttttgggcctttggaaagggatgtccccttccattgtgagatgtgtccctggcgttggaatctactttggcactctctactctttgaagcagtatttcttgcgaggccatcccccaaccgccctggagtcagtcatgctgggggtgggctctcgctctgttgcaggggtctgtatgtcacctatcactgtaatcaagacgcgctatgagagtgggaaatatggctatgagagtatctacgctgccctgaggagcatctatcacagtgaggggcaccggggcctcttcagtggcctgacagcaactctccttcgagatgcgcccttctcaggaatctacctgatgttttacaaccagaccaaaaatatagtgcctcatgaccaggtggatgcaacccttattcctattacaaatttcagctgtgggatatttgctggtattctggcctcactggtaactcaacctgcggatgttatcaaaactcatatgcagctttatccactgaagtttcaatggattggccaagcagtgacacttattttcaaagactatggactacgtggcttcttccaaggtggcatcccccgagccctccgcagaactctaatggcagcaatggcgtggacggtgtatgaagagatgatggccaagatgggcctgaagtcctgaccaagagaggactgggaacgggtgaaatctgttgccctgcttggtttctgccaagggctgctgcttcttactattctgcagtaagatgaagtcctacctggaaaaccaggcagaaattgtgttgcctttgccttcagtaatccccttaaggagaaaatatatggacctgatttcagccttcagaatctccaaaagaggagtcatcaattcatagagcacactagggtgttaggagagagctttgcatactctgagaggctacttggaaaggcattttcccaggagagctctgtcaggtggctgcgcttcagccccacccctacaccacagggtctccttgggtatgttcttgggcaagcaatcacaaagccagagaagctgtaagctgcctgccgggcctgaggagctccaaccagggaagactggatgtgaggagaggagtcactgtcaccaggtcacagactgactgaggtgatggtaggatgaggaggaacagatgcccttctttaattggttctcagttaacttctcagaggctctggagaacgggacagtggctttctagcctctgaatgttccaaataaaattttttggtcttggcccctgtactgttttacctctaaattctggcatttttttttccctgcaattaaagtgctgtactttatttattgaactttatcattgaaagctgtttggaaaacctaaaagatgttgtcacacttctgttttctttacctgtgccttataaaaatggaccaaacccttttctaaaataaaatagttctagggtggctggttattgacctatgtaggtccctaaaacctaa

SEQ ID NO: 183510 - DNA, 820 bp, Homo sapiens
  Payload ID: 16153
  Gene Symbol: SLC25A38
  Gene Name: solute carrier family 25, member 38
  ENST ID: ENST00000431510
  CDS Start-End: 377-820
ctccaccccgggatacacagaacctcatctcctacggtgctgaagcctgcagcagggcaggatgggcaggagagcagagccgcggagtctgcggcgcgggtgaagagcggcgcgtaattcccgcagcaagattgttccgcgcccgcagcccctggactagcaggatccgaaccccggcggctgcgtgcttataggcgcagacgtcagagagcccgcggcttaaagcgcgtcgcctggctagcgccaccccctagccttcttcaaggcctccagggctgggcccaagcgcccgtcgacggcaccctgggcccagaggactcgcgggcctcatctccaatgattcagaactcacgtccgtcgctgctgcaaccccaagatgtcggagacacggtggaaacgcttatggtatgaagaaaacatgaggcaccaccagttacatccggtgatcaaggctttcctgtgtggctccatcagtgggacctgctctaccctccttttccaacctctggatctccttaaaacacgcctgcaaaccctccagccctcagatcatgggtctagacgtgttgggatgttggctgtactcttgaaggtggttcgcacggagagtcttttgggcctttggaaagggatgtccccttccattgtgagatgtgtccctggcgttggaatctactttggcactctctactctttgaagcagtatttcttgcgaggccatcccccaaccgccctggagtcagtcatgctgggggtgggctctcgctctgttgcaggggtctgtatgtcacctatcactgtaatcaagacgcgctatgag

SEQ ID NO: 183511 - DNA, 1607 bp, Homo sapiens
  Payload ID: 16154
  Gene Symbol: SLC25A39
  Gene Name: solute carrier family 25, member 39
  Uniprot ID: Q9BZJ4
  ENST ID: ENST00000225308
  CDS Start-End: 176-1231
ggggcctcgtggcgcggtgtaggggcggggcccccttggctgctttcggcgtcggcctaggtgcgctgcgagcgcgcgcggaccgcgcacaggcggcggagccggtatgggcccgcctgaccctgggcgccgcgccgcacgagcaccagcctagagccaggactgaagcttcaagatggctgaccaggaccctgcgggcatcagccccctccagcaaatggtggcctcaggcaccggggctgtggttacctctctcttcatgacacccctggacgtggtgaaggttcgcctgcagtctcagcggccctccatggccagcgagctgatgccttcctccagactgtggagcctctcctataccaaatggaagtgcctcctgtattgcaatggtgtcctggagcctctgtacctgtgcccaaatggtgcccgctgtgccacctggtttcaagaccctacccgcttcactggcaccatggatgccttcgtgaagatcgtgaggcacgagggcaccaggaccctctggagcggcctccccgccaccctggtgatgactgtgccagctaccgccatctacttcactgcctatgaccaactgaaggccttcctgtgtggtcgagccctgacctctgacctctacgcacccatggtggctggcgcgctggcccgcctgggcaccgtgactgtgatcagccccctggagcttatgcggacaaagctgcaggctcagcatgtgtcgtaccgggagctgggtgcctgtgttcgaactgcagtggctcagggtggctggcgctcactgtggctgggctggggccccactgcccttcgagatgtgcccttctcagccctgtactggttcaactatgagctggtgaagagctggctcaatgggttcaggccgaaggaccagacttctgtgggcatgagctttgtggctggtggcatctcagggacggtggctgcagtgctgactctaccctttgacgtggtaaagacccaacgccaggtcgctctgggagcgatggaggctgtgagagtgaaccccctgcatgtggactccacctggctgctgctgcggaggatccgggccgagtcgggcaccaagggactctttgcaggcttccttcctcggatcatcaaggctgccccctcctgtgccatcatgatcagcacctatgagttcggcaaaagcttcttccagaggctgaaccaggaccggcttctgggcggctgaaaggggcaaggaggcaaggaccccgtctctcccacggatggggagagggcaggaggagacccagccaagtgccttttcctcagcactgagggagggggcttgtttcccttccctcccggcgacaagctccagggcagggctgtccctctgggcggcccagcacttcctcagacacaacttcttcctgctgctccagtcgtggggatcatcacttacccaccccccaagttcaagaccaaatcttccagctgcccccttcgtgtttccctgtgtttgctgtagctgggcatgtctccaggaaccaagaagccctcagcctggtgtagtctccctgacccttgttaattccttaagtctaaagatgatgaacttctgc

SEQ ID NO: 183512 - DNA, 1565 bp, Homo sapiens
  Payload ID: 16154
  Gene Symbol: SLC25A39
  Gene Name: solute carrier family 25, member 39
  Uniprot ID: Q9BZJ4
  ENST ID: ENST00000377095
  CDS Start-End: 121-1200
cctaggtgcgctgcgagcgcgcgcggaccgcgcacaggcggcggagccggtatgggcccgcctgaccctgggcgccgcgccgcacgagcaccagcctagagccaggactgaagcttcaagatggctgaccaggaccctgcgggcatcagccccctccagcaaatggtggcctcaggcaccggggctgtggttacctctctcttcatgacacccctggacgtggtgaaggttcgcctgcagtctcagcggccctccatggccagcgagctgatgccttcctccagactgtggagcctctcctataccaaattgccctcctctctccaatccacagggaagtgcctcctgtattgcaatggtgtcctggagcctctgtacctgtgcccaaatggtgcccgctgtgccacctggtttcaagaccctacccgcttcactggcaccatggatgccttcgtgaagatcgtgaggcacgagggcaccaggaccctctggagcggcctccccgccaccctggtgatgactgtgccagctaccgccatctacttcactgcctatgaccaactgaaggccttcctgtgtggtcgagccctgacctctgacctctacgcacccatggtggctggcgcgctggcccgcctgggcaccgtgactgtgatcagccccctggagcttatgcggacaaagctgcaggctcagcatgtgtcgtaccgggagctgggtgcctgtgttcgaactgcagtggctcagggtggctggcgctcactgtggctgggctggggccccactgcccttcgagatgtgcccttctcagccctgtactggttcaactatgagctggtgaagagctggctcaatgggttcaggccgaaggaccagacttctgtgggcatgagctttgtggctggtggcatctcagggacggtggctgcagtgctgactctaccctttgacgtggtaaagacccaacgccaggtcgctctgggagcgatggaggctgtgagagtgaaccccctgcatgtggactccacctggctgctgctgcggaggatccgggccgagtcgggcaccaagggactctttgcaggcttccttcctcggatcatcaaggctgccccctcctgtgccatcatgatcagcacctatgagttcggcaaaagcttcttccagaggctgaaccaggaccggcttctgggcggctgaaaggggcaaggaggcaaggaccccgtctctcccacggatggggagagggcaggaggagacccagccaagtgccttttcctcagcactgagggagggggcttgtttcccttccctcccggcgacaagctccagggcagggctgtccctctgggcggcccagcacttcctcagacacaacttcttcctgctgctccagtcgtggggatcatcacttacccaccccccaagttcaagaccaaatcttccagctgcccccttcgtgtttccctgtgtttgctgtagctgggcatgtctccaggaaccaagaagccctcagcctggtgtagtctccctgacccttgttaattccttaagtctaaagatga

SEQ ID NO: 183513 - DNA, 1274 bp, Homo sapiens
  Payload ID: 16154
  Gene Symbol: SLC25A39
  Gene Name: solute carrier family 25, member 39
  ENST ID: ENST00000537904
  CDS Start-End: 133-1143
tttcggcgtcggcctaggtgcgctgcgagcgcgcgcggaccgcgcacaggcggcggagccggtatgggcccgcctgaccctgggcgccgcgccgcacgagcaccagcctagagccaggactgaagcttcaagatggctgaccaggaccctgcgggcatcagccccctccagcaaatggtggcctcaggcaccggggctgtggttacctctctcttcatgacacccctggacgtggtgaaggttcgcctgcagtctcagcggccctccatggccagcgggaagtgcctcctgtattgcaatggtgtcctggagcctctgtacctgtgcccaaatggtgcccgctgtgccacctggtttcaagaccctacccgcttcactggcaccatggatgccttcgtgaagatcgtgaggcacgagggcaccaggaccctctggagcggcctccccgccaccctggtgatgactgtgccagctaccgccatctacttcactgcctatgaccaactgaaggccttcctgtgtggtcgagccctgacctctgacctctacgcacccatggtggctggcgcgctggcccgcctgggcaccgtgactgtgatcagccccctggagcttatgcggacaaagctgcaggctcagcatgtgtcgtaccgggagctgggtgcctgtgttcgaactgcagtggctcagggtggctggcgctcactgtggctgggctggggccccactgcccttcgagatgtgcccttctcagccctgtactggttcaactatgagctggtgaagagctggctcaatgggttcaggccgaaggaccagacttctgtgggcatgagctttgtggctggtggcatctcagggacggtggctgcagtgctgactctaccctttgacgtggtaaagacccaacgccaggtcgctctgggagcgatggaggctgtgagagtgaaccccctgcatgtggactccacctggctgctgctgcggaggatccgggccgagtcgggcaccaagggactctttgcaggcttccttcctcggatcatcaaggctgccccctcctgtgccatcatgatcagcacctatgagttcggcaaaagcttcttccagaggctgaaccaggaccggcttctgggcggctgaaaggggcaaggaggcaaggaccccgtctctcccacggatggggagagggcaggaggagacccagccaagtgccttttcctcagcactgagggagggggcttgtttcccttccctcccggcgacaagctcca

SEQ ID NO: 183514 - DNA, 839 bp, Homo sapiens
  Payload ID: 16154
  Gene Symbol: SLC25A39
  Gene Name: solute carrier family 25, member 39
  ENST ID: ENST00000588049
  CDS Start-End: 347-839
cggcctaggtgcgctgcgagcgcgcgcggaccgcgcacaggcggcggagccggtatgggcccgcctgaccctgggcgccgcgccgcacgagcaccagcctagagccaggcgtggtggtgcgcgcctgtagtcccagctacttgggaggctgaagcaagagaaccgcttgaacgggggtggatgttgcagtgagccaagatggtgccactgcactccagcctggcaacagtgcgcagagcgagacgccgtctcaaaacaaaagtctcacagtggcccagcctcctttcctgccatccctggagttgtggtctgtttgaggtttggttttcaggactgaagcttcaagatggctgaccaggaccctgcgggcatcagccccctccagcaaatggtggcctcaggcaccggggctgtggttacctctctcttcatgacacccctggacgtggtgaaggttcgcctgcagtctcagcggccctccatggccagcgagctgatgccttcctccagactgtggagcctctcctataccaaatggaagtgcctcctgtattgcaatggtgtcctggagcctctgtacctgtgcccaaatggtgcccgctgtgccacctggtttcaagaccctacccgcttcactggcaccatggatgccttcgtgaagatcgtgaggcacgagggcaccaggaccctctggagcggcctccccgccaccctggtgatgactgtgccagctaccgccatctacttcactgcctatgaccaactgaaggccttcctgtgtggtcgagccctgacctctgacctctacgcacccatggtggctggcgcgctggcccgcc

SEQ ID NO: 183515 - DNA, 561 bp, Homo sapiens
  Payload ID: 16154
  Gene Symbol: SLC25A39
  Gene Name: solute carrier family 25, member 39
  ENST ID: ENST00000585636
  CDS Start-End: 133-561
tttcggcgtcggcctaggtgcgctgcgagcgcgcgcggaccgcgcacaggcggcggagccggtatgggcccgcctgaccctgggcgccgcgccgcacgagcaccagcctagagccaggactgaagcttcaagatggctgaccaggaccctgcgggcatcagccccctccagcaaatggtggcctcaggcaccggggctgtggttacctctctcttcatgacacccctggacgtggtgaaggttcgcctgcagtctcagcggccctccatggccagcgtgccctcctctctccaatccacagggaagtgcctcctgtattgcaatggtgtcctggagcctctgtacctgtgcccaaatggtgcccgctgtgccacctggtttcaagaccctacccgcttcactggcaccatggatgccttcgtgaagatcgtgaggcacgagggcaccaggaccctctggagcggcctccccgccaccctggtgatgactgtgccagctaccgccatctacttcactgcctatgaccaactgaaggccttcctgtgtggtcgagccctgacc

SEQ ID NO: 183516 - DNA, 566 bp, Homo sapiens
  Payload ID: 16154
  Gene Symbol: SLC25A39
  Gene Name: solute carrier family 25, member 39
  ENST ID: ENST00000586633
  CDS Start-End: 270-566
gcgtcggcctaggtgcgctgcgagcgcgcgcggaccgcgcacaggcggcggagccggtatgggcccgcctgaccctgggcgccgcgccgcacgagcaccagcctagagccagtgagccaagatggtgccactgcactccagcctggcaacagtgcgcagagcgagacgccgtctcaaaacaaaagtctcacagtggcccagcctcctttcctgccatccctggagttgtggtctgtttgaggtttggttttcaggactgaagcttcaagatggctgaccaggaccctgcgggcatcagccccctccagcaaatggtggcctcaggcaccggggctgtggttacctctctcttcatgacacccctggacgtggtgaaggttcgcctgcagtctcagcggccctccatggccagcgagctgatgccttcctccagactgtggagcctctcctataccaaatggaagtgcctcctgtattgcaatggtgtcctggagcctctgtacctgtgcccaaatggtgcccgctgtgccacctggtttcaagaccctacccgcttcactggcacc

SEQ ID NO: 183517 - DNA, 574 bp, Homo sapiens
  Payload ID: 16154
  Gene Symbol: SLC25A39
  Gene Name: solute carrier family 25, member 39
  ENST ID: ENST00000585523
  CDS Start-End: 359-574
tgctttcggcgtcggcctaggtgcgctgcgagcgcgcgcggaccgcgcacaggcggcggagccggtatgggcccgcctgaccctgggcgccgcgccgcacgagcaccagcctagagccaggcgtggtggtgcgcgcctgtagtcccagctacttgggaggctgaagcaagagaaccgcttgaacgggggtggatgttgcagtgagccaagatggtgccactgcactccagcctggcaacagtgcgcagagcgagacgccgtctcaaaacaaaagtctcacagtggcccagcctcctttcctgccatccctggagttgtggtctgtttgaggtttggttttcaggactgaagcttcaagatggctgaccaggaccctgcgggcatcagccccctccagcaaatggtggcctcaggcaccggggctgtggttacctctctcttcatgacacccctggacgtggtgaaggttcgcctgcagtctcagcggccctccatggccagcgagctgatgccttcctccagactgtggagcctctcctataccaaattgccctcctctctccaatccacaggg

SEQ ID NO: 183518 - DNA, 807 bp, Homo sapiens
  Payload ID: 16154
  Gene Symbol: SLC25A39
  Gene Name: solute carrier family 25, member 39
  ENST ID: ENST00000588767
  CDS Start-End: 1-801
gaccctacccgcttcactggcaccatggatgccttcgtgaagatcgtgaggcacgagggcaccaggaccctctggagcggcctccccgccaccctggtgatgactgtgccagctaccgccatctacttcactgcctatgaccaactgaaggccttcctgtgtggtcgagccctgacctctgacctctacgcacccatggtggctggcgcgctggcccgcctgggcaccgtgactgtgatcagccccctggagcttatgcggacaaagctgcaggctcagcatgtgtcgtaccgggagctgggtgcctgtgttcgaactgcagtggctcagggtggctggcgctcactgtggctgggctggggccccactgcccttcgagatgtgcccttctcagtgcatcccccaccccaagccctgtactggttcaactatgagctggtgaagagctggctcaatgggttcaggccgaaggaccagacttctgtgggcatgagctttgtggctggtggcatctcagggacggtggctgcagtgctgactctaccctttgacgtggtaaagacccaacgccaggtcgctctgggagcgatggaggctgtgagagtgaaccccctgcatgtggactccacctggctgctgctgcggaggatccgggccgagtcgggcaccaagggactctttgcaggcttccttcctcggatcatcaaggctgccccctcctgtgccatcatgatcagcacctatgagttcggcaaaagcttcttccagaggctgaaccaggaccggcttctgggcggctgaaagggg

SEQ ID NO: 183519 - DNA, 1156 bp, Homo sapiens
  Payload ID: 16154
  Gene Symbol: SLC25A39
  Gene Name: solute carrier family 25, member 39
  ENST ID: ENST00000586016
  CDS Start-End: 145-828
acaggcggcggagccggtatgggcccgcctgaccctgggcgccgcgccgcacgagcaccagcctagagccaggatgccttcgtgaagatcgtgaggcacgagggcaccaggaccctctggagcggcctccccgccaccctggtgatgactgtgccagctaccgccatctacttcactgcctatgaccaactgaaggccttcctgtgtggtcgagccctgacctctgacctctacgcacccatggtggctggcgcgctggcccgcctgggcaccgtgactgtgatcagccccctggagcttatgcggacaaagctgcaggctcagcatgtgtcgtaccgggagctgggtgcctgtgttcgaactgcagtggctcagggtggctggcgctcactgtggctgggctggggccccactgcccttcgagatgtgcccttctcagccctgtactggttcaactatgagctggtgaagagctggctcaatgggttcaggccgaaggaccagacttctgtgggcatgagctttgtggctggtggcatctcagggacggtggctgcagtgctgactctaccctttgacgtggtaaagacccaacgccaggtcgctctgggagcgatggaggctgtgagagtgaaccccctgcatgtggactccacctggctgctgctgcggaggatccgggccgagtcgggcaccaagggactctttgcaggcttccttcctcggatcatcaaggctgccccctcctgtgccatcatgatcagcacctatgagttcggcaaaagcttcttccagaggctgaaccaggaccggcttctgggcggctgaaaggggcaaggaggcaaggaccccgtctctcccacggatggggagagggcaggaggagacccagccaagtgccttttcctcagcactgagggagggggcttgtttcccttccctcccggcgacaagctccagggcagggctgtccctctgggcggcccagcacttcctcagacacaacttcttcctgctgctccagtcgtggggatcatcacttacccaccccccaagttcaagaccaaatcttccagctgcccccttcgtgtttccctgtgtttgctgtagctgggcatgtctccaggaaccaagaagccctcagcctggtgtagtc

SEQ ID NO: 183520 - DNA, 1542 bp, Homo sapiens
  Payload ID: 16154
  Gene Symbol: SLC25A39
  Gene Name: solute carrier family 25, member 39
  Uniprot ID: Q9BZJ4
  ENST ID: ENST00000590194
  CDS Start-End: 128-1183
tgcgctgcgagcgcgcgcggaccgcgcacaggcggcggagccggtatgggcccgcctgaccctgggcgccgcgccgcacgagcaccagcctagagccaggtttggttttcaggactgaagcttcaagatggctgaccaggaccctgcgggcatcagccccctccagcaaatggtggcctcaggcaccggggctgtggttacctctctcttcatgacacccctggacgtggtgaaggttcgcctgcagtctcagcggccctccatggccagcgagctgatgccttcctccagactgtggagcctctcctataccaaatggaagtgcctcctgtattgcaatggtgtcctggagcctctgtacctgtgcccaaatggtgcccgctgtgccacctggtttcaagaccctacccgcttcactggcaccatggatgccttcgtgaagatcgtgaggcacgagggcaccaggaccctctggagcggcctccccgccaccctggtgatgactgtgccagctaccgccatctacttcactgcctatgaccaactgaaggccttcctgtgtggtcgagccctgacctctgacctctacgcacccatggtggctggcgcgctggcccgcctgggcaccgtgactgtgatcagccccctggagcttatgcggacaaagctgcaggctcagcatgtgtcgtaccgggagctgggtgcctgtgttcgaactgcagtggctcagggtggctggcgctcactgtggctgggctggggccccactgcccttcgagatgtgcccttctcagccctgtactggttcaactatgagctggtgaagagctggctcaatgggttcaggccgaaggaccagacttctgtgggcatgagctttgtggctggtggcatctcagggacggtggctgcagtgctgactctaccctttgacgtggtaaagacccaacgccaggtcgctctgggagcgatggaggctgtgagagtgaaccccctgcatgtggactccacctggctgctgctgcggaggatccgggccgagtcgggcaccaagggactctttgcaggcttccttcctcggatcatcaaggctgccccctcctgtgccatcatgatcagcacctatgagttcggcaaaagcttcttccagaggctgaaccaggaccggcttctgggcggctgaaaggggcaaggaggcaaggaccccgtctctcccacggatggggagagggcaggaggagacccagccaagtgccttttcctcagcactgagggagggggcttgtttcccttccctcccggcgacaagctccagggcagggctgtccctctgggcggcccagcacttcctcagacacaacttcttcctgctgctccagtcgtggggatcatcacttacccaccccccaagttcaagaccaaatcttccagctgcccccttcgtgtttccctgtgtttgctgtagctgggcatgtctccaggaaccaagaagccctcagcctggtgtagtctccctgacccttgttaattccttaagtctaa

SEQ ID NO: 183521 - DNA, 837 bp, Homo sapiens
  Payload ID: 16154
  Gene Symbol: SLC25A39
  Gene Name: solute carrier family 25, member 39
  ENST ID: ENST00000592857
  CDS Start-End: 558-837
gccggtatgggcccgcctgaccctgggcgccgcgccgcacgagcaccagcctagagccaggtaggcggcactgggccggggctgggggcggagacggaagcgggggtctccgggcggccgtgcgagccagggcaggtgctggggccgtcgagctggcgtggtccccctcacctggcggctctccgccgttcggggccgggagtgtcgccgagggtcggggagacgtcctggtcctacgttcctacttcccgctctcccggctgcgccccgggcctgcattttggggcgggaacccagagactgctctttctctccgggccccgggtctggcccgtccggccgggcggggagggccgggcatcccagcccgcagtcctgaggaggcgacgggcccttcttggtcaccggatctgtttacacgtcaccctcgatgcccggccgtccctccacgcccagtaacttgggctctcaggaggtgcgcagtggacacgtgcgaggtggacgagggaaggaccctggctcctactgcattcgagcgataggactgaagcttcaagatggctgaccaggaccctgcgggcatcagccccctccagcaaatggtggcctcaggcaccggggctgtggttacctctctcttcatgacacccctggacgtggtgaaggttcgcctgcagtctcagcggccctccatggccagcgagctgatgccttcctccagactgtggagcctctcctataccaaatggaagtgcctcctgtattgcaatggtgtcctggagcctctgtacctgtgcccaaatggtgcccgctgtgccacctggtttcaagacccta

SEQ ID NO: 183522 - DNA, 797 bp, Homo sapiens
  Payload ID: 16154
  Gene Symbol: SLC25A39
  Gene Name: solute carrier family 25, member 39
  ENST ID: ENST00000593166
  CDS Start-End: 1-186
actgcctatgaccaactgaaggccttcctgtgtggtcgagccctgacctctgacctctacgcacccatggtggctggcgcgctggcccgccgtgagcatagtcttgggcctttgacctccctctgtccccacctcggcccaaacccagtcagtcccagctcccagccccaacctctgccagcctagggataggggggtgttctaggtccccagacctgggacagcagccctgtactggttcaactatgagctggtgaagagctggctcaatgggttcaggccgaaggaccagacttctgtgggcatgagctttgtggctggtggcatctcagggacggtggctgcagtgctgactctaccctttgacgtggtaaagacccaacgccaggtcgctctgggagcgatggaggctgtgagagtgaaccccctgcatgtggactccacctggctgctgctgcggaggatccgggccgagtcgggcaccaagggactctttgcaggcttccttcctcggatcatcaaggctgccccctcctgtgccatcatgatcagcacctatgagttcggcaaaagcttcttccagaggctgaaccaggaccggcttctgggcggctgaaaggggcaaggaggcaaggaccccgtctctcccacggatggggagagggcaggaggagacccagccaagtgccttttcctcagcactgagggagggggcttgtttcccttccctcccggcgacaagctccagggcagggctgtccctctgggcggcccagcacttcctcagacacaacttc

SEQ ID NO: 183523 - DNA, 4045 bp, Homo sapiens
  Payload ID: 16155
  Gene Symbol: SLC25A40
  Gene Name: solute carrier family 25, member 40
  Uniprot ID: Q8TBP6
  ENST ID: ENST00000341119
  CDS Start-End: 348-1364
gcctcgctctggccctgcaggttgtgtttccgcctctaccccgcctccattccgttgctctctcagtctcagacccgggctctcggtccgccgcttcaggtcttggcgcagcctcagagagttggcgcggctctgtgttgaccaaacctagtggatgcagttagcgccggagcccggccccgcccgtcaccagggttattcccgccttctaggtttgccaggactgccggccctgcagctgccttctgccccaggtttttggctactgatgttacaaacaataaaatattggagcatagagttgaagaacagactcaaaccaggtttttatttaattagttaaaaatatggatcctgagacaaggggacaagagattatcaaagtgacacctcttcaacaaatgcttgcctcatgtactggagctatactgacatcagtaatagtgacacccctggatgttgttaaaattagactccaagcccaaaacaacccactccccaaaggaaaatgttttgtatatagtaatggactcatggatcatctatgtgtctgtgaagagggaggcaacaaactatggtataagaagccaggaaatttccagggaacattggatgcattttttaaaatcattcgaaatgagggcattaaatctctatggagtggccttcctcctaccctagtgatggcagttcctgccacagttatttattttacctgctatgatcaattaagtgctcttctgagatctaagttaggagaaaatgaaacctgcataccaattgttgctggaattgtagccagatttggtgcagtaactgtgataagtccactagaattgattagaaccaagatgcagtccaagaagttttcttacgtggaactgcatcgatttgtcagcaagaaagtatctgaagatggttggatttccctttggaggggctgggctcctactgttcttagagatgtacctttctcagcaatgtactggtataactatgaaattttaaagaagtggttatgtgagaaatctggtttatatgagccaacatttatgatcaactttacttcaggggcattgtctggttcttttgctgctgttgcaactttaccatttgatgtagtaaaaacacaaaagcagacacaactttggacatatgaaagtcataaaatttctatgcctttgcatatgtcaacctggattataatgaagaacattgttgctaaaaatggattttccggattattttcaggcctaattcctcgcttaattaaaattgctcctgcttgtgccattatgatcagtacatatgaatttggaaaggcttttttccagaaacaaaatgttcgaaggcagcaatactagtgatgctgtttcaacttgaaacaacaactatagccaaagaagatggagactcttaggcaagaatgtttttcaccattattctctcacaatgattttatgtctttctttcctataatttaaataaataatttcagctctacctctaaatcataattttaaaataaattttatcttatttttggtgatattgaaaaagatattctagaaatcaccaccattgagcattcttgtaaaaatagattactccttagcatcaaaagcagtctcttgaaagtttaatattatatgtttcagtgtaacataatcttactgggagtgtgttgaatacaccagaactttttgaattgtgtgctgaatgatgtacatagtctagaagaaaaaagcccaagtcttgtgcacatttaaatcgtgtacataagtatttccgtatttcagtaaagtagataaagcactcgttaaatagcattgtttacatcgaccaaatattgcctgtttcctttaattcaaatgcattaggttcccgcctccctctccttccccgccatgttgctgttttaaggcttcatatgtattaacatttctctgatcaaaattgtggctgttttccttatgaaccataatataatcatttgtgtgatgtacattgtgccatttttgatgactaaatgtctatatttctgccattcctgtaagagagggagttttttactgatagtagcaaatgttcacttcagtcaaacttgggtgttcagtggtaaaccatatagtatttagactggtaaaaatagtttgcacacaggaatagcctctgatttttagctctcttgtaatccaagtatcattgttcatggaattctctaggtcatttttattgtgttgttctaacaagacagattattgctacaacaatagttacaagatatttctaaaatatcctttgatttttactctaagtatggtagagtaagaggctaaacaagaagctgtttccttgaagacattgctttcagtcaccatacatgtctaaataatttagcttatcattcattctatgtaggaatgagataagaaaggatatgatggcaggaaaagaaatgctattcattttttatactttagttttattttcttaggatctatatcctatatatatatattttttaaagcactaatttattgcagtctttattttagaaaaatgtgaagcatttttttctcccctaaaatgaatatatttagatgacaagtctttagtgctggtagaggaactaattgattttgtactatagtaggaaagtgtttatatgtttcaccagaaataaaatatgtagggtttgtatgtaatcttctgtgtttatcctatgttgatttaccttaaatttgcaacatacatatccacataaatattcatgactttcttatatttcattaaaatgttttatggcttcttaaaatcatcactgtgcttctaaatatttttacgtaaaatcattgtataatgctatactgtgatatacatgaaagtttatcttgaacagtgctctttaacaatattaaatttaaatttatcttggttttgctatgcttatgggtaattcatagaaaacagaaaaaatactgttcccaaaaggcagttatatatttcagtttaatatcacctataagtatgagaaaggtttccatgtctcctacccctcactgcacttaggaaaattcttatttatgaataaagtaagataagtaaatctaattgcctagtcgtttttttaacacatatacatgcaatgtatctggatgaatagaaggctgaattgaagctttctttatatttaagaggtaaaaagaaatattaatacttttaaaatatactaacaaccaaaaagtgttcagaattttgctataataataatttgtattaaaatagtacctagaaaaattcagtctatggaataggtaaaattttaaaattttaatttgctctcagagttctgtctgataaaataattgaactataattggcatgatgaatattcccaggttttacttcagtatataaatttaactctcagccacatgggctttccagacttttcaatacatatgatgttgcaggaattgcaatatttgcaaacatgtgccacaacagtgttcttggtgatgtttctaaaacagtttttattctattaatgttaaattttctaacataaacatttaattgattaatgtaaaattttaggaaggaacatctttaattttcaatatgagatggttgcaacctttaaagtagtacatatttgattttttttaaaaggcaatatttttttttctaggaaaactattcattatggttatttaactgcatatgttttttaaatttttccctcttggaacaacatgtactggggcctatcaaagggtggagggtgggaggagggagaggaacaggaaaaataactaatgggtactaggcttaatacctgggtgatgaaataatctgtataataaatccccatgacacaaaagtttacctgtgtaacaaacctgcatatgtacccctaaacttaaattcttccctctttttgtcttgggcacaagtttttgggatatggaaaagtttattgtatcccttttgaattttcttctaagatgaactttttaaataaaagatattactgctttta

SEQ ID NO: 183524 - DNA, 636 bp, Homo sapiens
  Payload ID: 16155
  Gene Symbol: SLC25A40
  Gene Name: solute carrier family 25, member 40
  ENST ID: ENST00000446236
  CDS Start-End: 4-117
gcaatgtactggtataactatgaaattttaaagaagtggttatgtgagaaatctggtttatatgagccaacatttatgatcaactttacttcaggggcattgtctggttctgaataatagaacacaaaggagcgtgagaaattgtgaatgctggtagtggagtcagagaggcttggttggaattgtggctctgcaactagtagctgtgtgacctcaggaaatttgctgctgttgcaactttaccatttgatgtagtaaaaacacaaaagcagacacaactttggacatatgaaagtcataaaatttctatgcctttgcatatgtcaacctggattataatgaagaacattgttgctaaaaatggattttccggattattttcaggcctaattcctcgcttaattaaaattgctcctgcttgtgccattatgatcagtacatatgaatttggaaaggcttttttccagaaacaaaatgttcgaaggcagcaatactagtgatgctgtttcaacttgaaacaacaactatagccaaagaagatggagactcttaggcaagaatgtttttcaccattattctctcacaatgattttatgtctttctttcctataatttaaataaataatttcagctcta

SEQ ID NO: 183525 - DNA, 1077 bp, Homo sapiens
  Payload ID: 16155
  Gene Symbol: SLC25A40
  Gene Name: solute carrier family 25, member 40
  ENST ID: ENST00000429674
  CDS Start-End: 52-162
tagagttgaagaacagactcaaaccaggtttttatttaattagttaaaaatatggatcctgagacaaggggacaagagattatcaaagtgacacctcttcaacaaatgcttgcctcatgtactggagctatactgacatcagtaatagataccactcgctaattgaaacttaacatatcttcatagtgacacccctggatgttgttaaaattagactccaagcccaaaacaacccactccccaaaggaaaatgttttgtatatagtaatggactcatggatcatctatgtgtctgtgaagagggaggcaacaaactatggtataagaagccaggaaatttccagggaacattggatgcattttttaaaatcattcgaaatgagggcattaaatctctatggagtggccttcctcctaccctagtgatggcagttcctgccacagttatttattttacctgctatgatcaattaagtgctcttctgagatctaagttaggagaaaatgaaacctgcataccaattgttgctggaattgtagccagatttggtgcagtaactgtgataagtccactagaattgattagaaccaagatgcagtccaagaagttttcttacgtggaactgcatcgatttgtcagcaagaaagtatctgaagatggttggatttccctttggaggggctgggctcctactgttcttagagatgtacctttctcagtttgctgctgttgcaactttaccatttgatgtagtaaaaacacaaaagcagacacaactttggacatatgaaagtcataaaatttctatgcctttgcatatgtcaacctggattataatgaagaacattgttgctaaaaatggattttccggattattttcaggcctaattcctcgcttaattaaaattgctcctgcttgtgccattatgatcagtacatatgaatttggaaaggcttttttccagaaacaaaatgttcgaaggcagcaatactagtgatgctgtttcaacttgaaacaacaactatagccaaagaagatggagactcttaggcaagaatgtttttcaccattattc

SEQ ID NO: 183526 - DNA, 702 bp, Homo sapiens
  Payload ID: 16155
  Gene Symbol: SLC25A40
  Gene Name: solute carrier family 25, member 40
  ENST ID: ENST00000444363
  CDS Start-End: 454-564
cttctcgcgcctcgctctggccctgcaggttgtgtttccgcctctaccccgcctccattccgttgctctctcagtctcagacccgggctctcggtccgccgcttcaggtcttggcgcagcctcagagagttggcgcggctctgtgttgaccaaacctagtggatgcagttagcgccggagcccggccccgcccgtcaccagggttattcccgccttctaggtttgccaggactgccggccctgcagctgccttctgccccaggtttttggctactgatgttacaaacaataaaatattggagcatagagttgaagaacagactcaaaccaggctggagtgcagtaatgcgatcttggctcattgcaacttctgcctcctgggttaaagggattctcatgcctcagtcccccacggaactgggactacaggtttttatttaattagttaaaaatatggatcctgagacaaggggacaagagattatcaaagtgacacctcttcaacaaatgcttgcctcatgtactggagctatactgacatcagtaatagataccactcgctaattgaaacttaacatatcttcatagtgacacccctggatgttgttaaaattagactccaagcccaaaacaacccactccccaaaggaaaatgttttgtatatagtaatggactcatggatcatctatgtgtctgtgaag

SEQ ID NO: 183527 - DNA, 1532 bp, Homo sapiens
  Payload ID: 16156
  Gene Symbol: SLC25A41
  Gene Name: solute carrier family 25, member 41
  Uniprot ID: Q8N5S1
  ENST ID: ENST00000321510
  CDS Start-End: 70-1182
ctcccgcatggtagctggagcagcaaacaactgcttagggatttgaagccaggtgtcctaacttcctccatgggcgctcagcctggggaacctcagaacacttgctctaggatccagacactgtttaggagggtcaagaccttactcatcaaagccccgcctcccccccaacctccgcctccacccccatcctggaaccctggctgtacacacgtgtatgggtacgcgtttggccacatgcatgacaacaaccttgaacatctcccgtcacagcaggtactggacacaggagagcagctgatggtccccgtggaagtcctggaagtggataacaaggaggccttgtggaagtttctactctcaggagctatggccggggcggtgtctcgcacgggcacggcacctctggacagagccaaggtgtacatgcaggtctactcctccaagacgaacttcaccaacctgctgggggggctacagagcatggtccaggagggcggcttccgctccctgtggcggggcaacggcatcaacgtgctcaagattgctcctgagtatgccatcaagttctccgtattcgagcagtgcaagaattacttctgtggaatacaagggtccccgcccttccaggagcgtctccttgctggctccctggctgtggccatctcccagaccctcatcaaccccatggaggtgctgaagacgcggttgaccttgcgtcggacgggccagtacaaggggctgctggactgcgccaggcagatcttgcagcgagagggcacccgcgccctttaccgcggctacctgcccaatatgctcggcatcatcccctatgcctgcaccgacctggctgtctatgagatgctccagtgcttctgggtgaagtcaggcagggatatgggggaccccagtggcctggtcagtctgtcgtctgtgacgctatccacgacctgtggccagatggccagctacccactgactctggtgcgcaccaggatgcaggcccaagataccgtggagggctcaaatcccaccatgcgcggagtcctccagcggatcctggcccagcagggctggctagggctgtaccgaggcatgacccccacgctactgaaggtcttaccagcaggtggcatcagctatgtggtgtacgaagccatgaagaaaaccctgggcatataggctgtgagctggacgacacagcctaggcagaaatgggacaggaggacctgatgacccctggccccaaagagccctcgaggcctcaaggttcaggccctggggcagtttttggtggcaaaagcaggctgggggtgggggtggggctctgggtcagaagattcctgaagctggggttggtggtgggtggaggggggcagtgctgggtcagaaaactcctgggactccctccccagggtgcagcctgagacaagaaacgtggactccagtctggccccttgtgggtcgtcctggctccagggcgaaatggtgaacatgtcacacaacaaggaataaagagatggtttttgctg

SEQ ID NO: 183528 - DNA, 1630 bp, Homo sapiens
  Payload ID: 16156
  Gene Symbol: SLC25A41
  Gene Name: solute carrier family 25, member 41
  Uniprot ID: Q8N5S1
  ENST ID: ENST00000458275
  CDS Start-End: 70-798
ctcccgcatggtagctggagcagcaaacaactgcttagggatttgaagccaggtgtcctaacttcctccatgggcgctcagcctggggaacctcagaacacttgctctaggatccagacactgtttaggagggtcaagaccttactcatcaaagccccgcctcccccccaacctccgcctccacccccatcctggaaccctggctgtacacacgtgtatgggtacgcgtttggccacatgcatgacaacaaccttgaacatctcccgtcacagcaggtactggacacaggagagcagctgatggtccccgtggaagtcctggaagtggataacaaggaggccttgtggaagtttctactctcaggagctatggccggggcggtgtctcgcacgggcacggcacctctggacagagccaaggtgtacatgcagctactcgggaggctgaggcaggagaatcgcctgaacctgggaggcggaggttgcagtgagccgagatcccccgaccgcactccagcctgggcgacagagtctactcctccaagacgaacttcaccaacctgctgggggggctacagagcatggtccaggagggcggcttccgctccctgtggcggggcaacggcatcaacgtgctcaagattgctcctgagtatgccatcaagttctccgtattcgagcagtgcaagaattacttctgtggaatacaagggtccccgcccttccaggagcgtctccttgctggctccctggctgtggccatctcccagaccctcatcaaccccatggaggtgctgaagacgcggttgaccttgcgtcggacgggccagtacaaggggctgctggactgcgccaggcagatcttgcagcgagagggcacccgcgccctttaccgcggctacctgcccaatatgctcggcatcatcccctatgcctgcaccgacctggctgtctatgagatgctccagtgcttctgggtgaagtcaggcagggatatgggggaccccagtggcctggtcagtctgtcgtctgtgacgctatccacgacctgtggccagatggccagctacccactgactctggtgcgcaccaggatgcaggcccaagataccgtggagggctcaaatcccaccatgcgcggagtcctccagcggatcctggcccagcagggctggctagggctgtaccgaggcatgacccccacgctactgaaggtcttaccagcaggtggcatcagctatgtggtgtacgaagccatgaagaaaaccctgggcatataggctgtgagctggacgacacagcctaggcagaaatgggacaggaggacctgatgacccctggccccaaagagccctcgaggcctcaaggttcaggccctggggcagtttttggtggcaaaagcaggctgggggtgggggtggggctctgggtcagaagattcctgaagctggggttggtggtgggtggaggggggcagtgctgggtcagaaaactcctgggactccctccccagggtgcagcctgagacaagaaacgtggactccagtctggccccttgtgggtcgtcctggctccagggcgaaatggtgaacatgtcacacaacaaggaataaagagatggtttttgctg

SEQ ID NO: 183529 - DNA, 1405 bp, Homo sapiens
  Payload ID: 16156
  Gene Symbol: SLC25A41
  Gene Name: solute carrier family 25, member 41
  Uniprot ID: Q8N5S1
  ENST ID: ENST00000597558
  CDS Start-End: 87-1199
aatcctcccactagacactcccgcatggtagctggagcagcaaacaactgcttagggatttgaagccaggtgtcctaacttcctccatgggcgctcagcctggggaacctcagaacacttgctctaggatccagacactgtttaggagggtcaagaccttactcatcaaagccccgcctcccccccaacctccgcctccacccccatcctggaaccctggctgtacacacgtgtatgggtacgcgtttggccacatgcatgacaacaaccttgaacatctcccgtcacagcaggtactggacacaggagagcagctgatggtccccgtggaagtcctggaagtggataacaaggaggccttgtggaagtttctactctcaggagctatggccggggcggtgtctcgcacgggcacggcacctctggacagagccaaggtgtacatgcaggtctactcctccaagacgaacttcaccaacctgctgggggggctacagagcatggtccaggagggcggcttccgctccctgtggcggggcaacggcatcaacgtgctcaagattgctcctgagtatgccatcaagttctccgtattcgagcagtgcaagaattacttctgtggaatacaagggtccccgcccttccaggagcgtctccttgctggctccctggctgtggccatctcccagaccctcatcaaccccatggaggtgctgaagacgcggttgaccttgcgtcggacgggccagtacaaggggctgctggactgcgccaggcagatcttgcagcgagagggcacccgcgccctttaccgcggctacctgcccaatatgctcggcatcatcccctatgcctgcaccgacctggctgtctatgagatgctccagtgcttctgggtgaagtcaggcagggatatgggggaccccagtggcctggtcagtctgtcgtctgtgacgctatccacgacctgtggccagatggccagctacccactgactctggtgcgcaccaggatgcaggcccaagataccgtggagggctcaaatcccaccatgcgcggagtcctccagcggatcctggcccagcagggctggctagggctgtaccgaggcatgacccccacgctactgaaggtcttaccagcaggtggcatcagctatgtggtgtacgaagccatgaagaaaaccctgggcatataggctgtgagctggacgacacagcctaggcagaaatgggacaggaggacctgatgacccctggccccaaagagccctcgaggcctcaagggtgcagcctgagacaagaaacgtggactccagtctggccccttgtgggtcgtcctggctccagggcgaaatggtgaacatgtcacacaacaaggaataaagagatggtttttgctgaa

SEQ ID NO: 183530 - DNA, 3120 bp, Homo sapiens
  Payload ID: 16157
  Gene Symbol: SLC25A42
  Gene Name: solute carrier family 25, member 42
  Uniprot ID: Q86VD7
  ENST ID: ENST00000318596
  CDS Start-End: 152-1108
ggggccgtggcggctggaggtagcggcggcggcgacgcgtccgggccggtgagggggcgcggggggcgccgggggggcccaagcgtcagcggcccgcgcctgtcgggctgaactgaggaccgagtctcctgccattccgagcaggcctggtatgggtaatggtgtgaaggaaggcccggtgcgattgcatgaggatgctgaggctgtcctgtcctcgtccgtctcatcaaagcgtgaccacaggcaagtgctcagctccctgctgtctggggccctggctggtgcccttgccaaaacagcggtagctcccctggaccgaaccaaaatcatcttccaagtgtcttcaaaaagattttctgccaaggaggccttccgggtcctctactacacctacctcaacgagggatttctcagcttgtggcgcgggaactcggccaccatggtgcgcgtggtgccctacgccgccatccagttcagcgcacacgaggagtacaagcgcatcctgggcagctactatggcttccgtggagaagccctgcccccttggcctcgcctcttcgccggcgcactggctggaacgacagccgcttcactgacctaccccctggacctggtcagagcgcggatggccgtaaccccgaaggaaatgtacagcaacatctttcatgtcttcatccgcatctcgagagaagaggggctgaagactctctaccatggatttatgcccaccgtgctgggggtcattccctacgctggcctgagcttcttcacctatgagacgctcaagagcttgcacagagagtacagcggccgccggcagccctaccccttcgagcgcatgatcttcggcgcctgcgctggcctcatcgggcagtcggcctcgtacccgctggatgtggtgcggcggcgcatgcagacggccggcgtcacgggctacccgcgcgcctccatcgcccgcacgctgcgcaccatcgtgcgggaggagggcgccgtgcgcggcctctacaaaggcttgagcatgaactgggtcaagggtcccatcgccgtgggcatcagcttcaccaccttcgacctcatgcagatcctgctgcggcacctgcagagctaggggaccctgagctgctctcaggacggtggaccggtgacccctttgtattctgggcccatggaacggtgggggggtgcgcttgattctacttcaggaggcacatggggcgctttatggaacgagcaggtgggcctgaggggcctgggctcagagtccacgtccaaacgcaaagctggcagccctggaagtgcagtgttggggcgatggtgtggggggtcccgcagctcccctcttccttcctctgcagacgctggcgctgtctgccggaggtgttgcccaaaaggccctagtggggcgtggtcagctccacctcctgatcctgtgtgtcctccgacatgctgctgattctagtgacccctgtccccaccaggctcagagccagaccgcgcctggaccttcttgttctgactccacgtgcctgcccggcctccagggtgcgggggcgcctttcttgcaggcggaccctgcccaggatggggccagcctcgtgctcagctttggccacaaatgcagcccctggcccaccccaccctgccggccctgccttctccagtatttcccacatggccacgactcctcagtcactagagcctcctgctgggaacagtgtcccccagagcctcatgtctatcctagaccctgcaagcagctgggtccccaagagtgcatctccccctagagttgcctgcccatgcccacctgctttgtaaccttcccaggagattcatgcttgctctgcacagcagggctcgaggcccaggccatgacacggaactgcctcaggtttgggtcagacctgcatcctggggcatctgctgaaatgtgagcacacaaaccacctcctttggcccagaagccccccaggcctagcatctcagtgccccaaccctctgcccagctgtggtatccagcaggtccttgggtccccacttgagcaggcacttggctgggatatggagcaatttaaagcccacaggggttgttcagtttctatgaaatggagcatggggtgcctgctagcctcaatcccccgaagtgggagcctcatgatagagtatagcttgggggtgggaggtgaggaaaatctgaggtacccaggggaacccccagctaactggtctctcagaggagtcccccagggcccgccagctatcacagggactcagaaacacccatttcctaatgacatggtgagtttcttgatttcttttttttgtttgttttgttttggttttcaacttggctgaccccgggtctatgatctattcacatcgaacccctgactggtctgcctggtgccagggtgagcgtgaccgtgagtgttgctttcgacagctggctcagcacacgctgtgtgaagggatctgagcttgttcatctccagtcgtgacttcatttcccttccttctgtcctcctcctgttcttgccttggacctgcaggtgtgcagaccgctctctctgccttccttgcatgtggccaccagccatccctgatcttgtccccagaggcccaggcagcctgtgatggctgtgaggggctgtcccactgtgtgggtatcccttacccagcacttaaacttggcaggagaggcagggcaaccctcacagggagatgggagggcacccaactcccacaagcatgcaacagcagtaggaattgggggtctgccccaggtgggtgagaccaaatgagtggatttggggccacaggctaggcaggagagacaaggggtaggtgggagggtcccccagtccctgctgaccccagtgtgtctccccggagatggctcctagctgagtgggacccggcaggagttggggacagtgctgtcccccacccctgcacacagccaggccctcaggctctgcggtcactcgcctccctgctggtcactggtcttggtctggagttatattttgatgccatgaagacactgtttatatctaatgtttatatattttaaagatttgtgccaagagagtatatttaataaaaacttaaatgacttct

SEQ ID NO: 183531 - DNA, 2783 bp, Homo sapiens
  Payload ID: 16158
  Gene Symbol: SLC25A43
  Gene Name: solute carrier family 25, member 43
  Uniprot ID: Q8WUT9
  ENST ID: ENST00000217909
  CDS Start-End: 345-1370
cagggaggggcggcgggggcgcactgaacatttaggaagcaagatgtctagcaggctgggccttgagagaacagtaactgtttcgcaactgaaagtcgctactcgagccttgccaactggggagactatgcccatgatatccgcggcctcggaccccggaccctccaggccctcgcgccccacccccgaccagcctcgggccaggctagggcgtagacggggcttcccgtccctcacgcgggcccgccccatgccgggcggggcctggggcccgccacctccgcccgtggccggagagccccaggcccgagccacgcggtcttccgggcccgggtcggggctcgatggctacgtggaggcgggacggccgactgacaggcggccaaaggctgctgtgcgctgggctggcggggacgctcagcctcagcctcaccgcgcccctggagctcgccaccgtgctggcccaggttggcgtcgtgcgaggccacgcccggggaccgtgggccacagggcaccgggtgtggcgggcagaggggctccgggccctgtggaaggggaacgcggtggcgtgcctgcgcctcttcccctgcagcgccgtgcagctcgccgcctaccgcaaatttgttgtgctgttcacagatgacctgggccacatttcccagtggagctccatcatggctgggagtctcgcaggcatggtttccaccattgtaacatatcctacagacctcatcaaaacccggttgatcatgcagaacatactggaaccatcgtacagggggctcctccatgctttttctactatttaccaacaggaagggttccttgccctttatcgaggggtttccctcactgttgtaggtgctctcccgttctctgctggctcccttcttgtttacatgaacctggagaaaatctggaacggaccccgagatcagttctctctcccacagaactttgctaatgtctgtctggctgctgcagtgacccagaccctctcctttccctttgagaccgtgaagagaaagatgcaggctcagagcccctacctcccacacagtggaggagtagatgtccatttctcaggagcagtggactgcttccggcagatagtgaaggcccagggggtcctggggctctggaatggattgacagccaatttactgaagatagttccatattttggaattatgtttagcacctttgagttctgcaagagaatctgtctttatcaaaatggttacattctgtctccactgagctataaattgaccccaggagtcgatcagagtttgcagccccaggaattacgagaattaaagaagttcttcaaaacgagaaaaccgaagcctaaaaaaccaactctataaaatggaatggaactagaagtgcactgactgacagcatgttgcaatcacagataaatgtagcctcataactgtgcacctgaggagggatgagaagctactgctatctgctgctctgggaaatgagatggtttggccatgcaccacctcagatctccaaactgatgtccctgtgaacacctgcactatgagaaggtttcccaacaagagtgtatcatgatggcattccacgagattttataaccagagtctagcagtgataaaatgtacaatttacgctctgaatagaaacatgacaccaaagaaagggcattgccatgacatctcaaagcaacaggtaattgaagtggctgagtggataccacgttgtgaggtcagccactgggtcacttgtagtcaatgcaaagcttgcacaaaccaacgtcagcctagtttcactcagtttgacctgagactttccaatacaatctgttgttttgttttgtttttagagacagggtcttgctctgtcacccagactggagtacaatgacacaatcatagctcactgcagcctttaactactgggctcaagacatcctcctgcttcagcctccagagagttgggaccataggtgcacaccaccacacctagctaattttttggggaggtcttgctatgttgcccaggctggtcttgaactcctgggctcatgcaatcctcctgccttggcctcccaaagcgctaggattagaggtgtgagccgctgcaccctgccccagtacaatcttttttgaactcaaatttttgctgacatctgagtgcacacaccacagtgtaaattatgccttatcagaatctaaatgaaaatagcgaacatttaaaagctatcaccattgtagtagaatcatccttcttttttgaaatttgaagcatcccaggcttaaaatcttgtgtttcagaaagacagtttataccatgactgcttaattatccccccaaagaccttctgattgaagtcatgtacagttcagtggcctaaattctctgcctttttaacttgctttgcaagcctactctgaaaataagttatttagtcaagttattctcaaagatgtcccagttgcctagaaaggatcaaatggaacatttgacacacatactcaaaaaaatgtaactgactataaacactttaacctaatcatctgtatcaaactttctaaaaatcaaatctcaggattgttccactttagagattctatgtaaagtttatataactatacttgtcaaatagcacctatctatgcatttaaaaatgcattaatatctaacataaaattgttaatttatacacacacatacactcatacatagagagagattttcggtatgttgcaagtattttttccgattaaatttattttccaaagaaaaaa

SEQ ID NO: 183532 - DNA, 3482 bp, Homo sapiens
  Payload ID: 16159
  Gene Symbol: SLC25A44
  Gene Name: solute carrier family 25, member 44
  Uniprot ID: Q96H78
  ENST ID: ENST00000359511
  CDS Start-End: 173-1117
tttccggttccggcagtaccggtagcccagtcgagatggaggaagatgcgaccggcagacggcattcgctgggaacgacggatagactgggggctgcggcctagaggtccgggcttggagttcgcctcagacgcggtggagccgccggagtctgagaaggtcttcaggcaccatggaggacaaacgcaacatccagatcatcgagtgggaacacctggacaagaagaagttctacgtgtttggtgtggcaatgacaatgatgatccgtgtcagtgtctacccattcaccctcatccgcacccggttgcaagttcagaaggggaagagcctctaccatgggaccttcgatgccttcatcaagatcctgcgagcagatggtatcactggcctctaccgagggttcctggtcaataccttcaccctcatctctggccagtgttatgtcaccacttatgagctcacccggaagtttgtagctgactacagccagagtaacacagtcaaatcactggtggctggtggctcagcctcccttgtggcccagagcatcacagtgcccattgatgtagtctcccagcacctgatgatgcaacgcaagggtgagaaaatgggccgctttcaggtgcgggggaacccagagggacaaggggtagttgcctttggccaaaccaaggacatcatcaggcagatcctgcaggctgatggacttcgcggcttctatcgaggctatgtggcttcactgcttacctatatcccaaacagtgctgtctggtggcccttctatcacttctatgcagagcagctctcctacctgtgtcctaaggagtgccctcacattgtctttcaagctgtctcggggcccctggctgcagccactgcctccatcctcaccaatcccatggatgtcatacgaacccgtgtgcaggttgagggcaagaactccatcatcctgaccttcagacagctgatggcagaagaagggccttggggcctcatgaagggcctctcggccagaatcatctcagccacaccttccaccattgtcattgtggtgggctatgagagcctcaagaaactcagcctccgacctgagctggtggactcgagacactggtaaccagtggtggggagagaagcctgctgttttccacactaccgtgggtcaggggcagagtggagaggacagcaccctctccaggtgctcccaccacacacccagccctgccctgggccaagtggcctatctgggatagggatagagactttgaactgctcttgctgaagaggctccacgcctggatcccttgcccccactatttaaaattctcttctgagctgggctccctcactcagtccctgtatttgatactggcctaaagaccccaccccccaccctgccagcccttcttctggcttccccttccatctgtgtccctgagaccctgagaagagctgtacatagagcttgcttactaccactggttcttcctcttgggctttcagcccagactccaagcagctgctatcaaccctctctcccttcatctcttagccttgcttatttttattttgggaccgagctgcccactagatgactctgcttttccctgcatttggggctaaggtgccaggtacttatttgcacagggagcaggagcagcaaaaaatctctggttctccagagcactcgtcctctctttggaggggttattaggttgggagaaatgttgatacttttgttttgtgtgtgtgtgtgtgtgtgtgtgtgtgtgtgtgtgtgtgtgtgttttaacatctgtgaaccaggctattagtcctgctaaagcgccaatcctgctgtcagagctcacccccttcctaagacaggtagaaaaatgtaatgtagctttttccacaagccacttccctgtcccttcagtctcaggagccctaggagagtctaagctggggcatcccctggcccagaggactcccgtggtgggcacagttctaagtggatcaggctgtcttgggtgcactggacttggagcactaccttgagaagtcaggttgagaaagtagttgatctagaaggcaacaagtgggcatgtgttccccagcacattacccaggccagcagagccaaacctaggagagggcagtgggtagattctctgccccaggcagccatgacatacacataaataccccaatcactcagacttacggcaacaagtgttgtctcactatggtgatctctaagatccacatcactggatgcgtagtcatcccagtcatggtaccctgtggaggaatgctggaagaacataaagagcagttcagaaagtcacccaataccaggaccactgcatttaccagcctgatactgccaagattatctgatgctctcctcaggagctaggagaggagtgctccttcctccctaccgctactctccccaagcctgtgttgcaggtagagaggtgcagcaaatagagaaggcatgtcaaaccctgcatttctacctgagacgtgtgacctggatgatcctccaaaccctattggtcccaccccctgggaaaggccatggtgccagtttgaaaggtgctagctacctgaagccttgatatttcttcatggctgccgcacattcttccaccttggccagaacaggttctgaaaaccacttctctaccttcaccaccaccactgcccatcttgatctctttgagggttttcccatttcacttgatcttatttttgtttatcccttcctgcactttgtcaagagagtcctccagtttctatccaggaatgttcacatccaaagggttggacccacggatcattctgaatcttcctgcccctcctcactgcttaaccctgagaaccacaaatataatggaagcagttccccccaccctcaccccatctctttaagctcatcctagcaagacctctagagaccctagagactcgactttagtccttccccgccatggcacagtggggaaggtgtcaatggggagtgtcacggacaggaggtaggatcctgccgctcgcgtcttagtgtttctccctcaagactttccttctgttttgttgtcttgtgcagtattttacagcccctcttgtgtttttctttatttctcgtacacacacgcagttttaagggtgatgtgtgtataattaaaaggacccttggcccatactttcctaattctttagggactgggattgggtttgactgaaatatgttttggtggggatgggacggtggacttccattctccctaaactggagttttggtcggtaatcaaaactaaaagaaacctctgggagactggaaacctgattggagcactgaggaacaagggaatgaaaaggcagactctctgaacgtttgatgaaatggactcttgtgaaaattaacagtgaatattcactgttgcactgtacgaagtctctgaaatgtaattaaaagtttttattgagcccccga

SEQ ID NO: 183533 - DNA, 3662 bp, Homo sapiens
  Payload ID: 16159
  Gene Symbol: SLC25A44
  Gene Name: solute carrier family 25, member 44
  ENST ID: ENST00000423538
  CDS Start-End: 330-1298
actgcccaaatccaagatggctaccaggaggccgtcagttctcggaagtgcggcacatcctcactcctgggaggctcaaaggctcaaacgccattggcagaatccccgacagctcatcctccgccccctgcagggggcggtaatgacagagtcctaatttccggttccggcagtaccggtagcccagtcgagatggaggaagatgcgaccggcagacggcattcgctgggaacgacggatagactgggggctgcggcctagaggtccgggcttggagttcgcctcagacgcggtggagccgccggagtctgagaaggtcttcaggcaccatggaggacaaacgcaacatccagatcatcgagtgggaacacctggacaagaagaagttctacgtgtttggtgtggcaatgacaatgatgatccgtgtcagtgtctacccattcaccctcatccgcacccggttgcaagttcagaaggggaagagcctctaccatgggaccttcgatgccttcatcaagatcctgcgagcagatggtatcactggcctctaccgagggttcctggtcaataccttcaccctcatctctggccagtgttatgtcaccacttatgagctcacccggaagtttgtagctgactacagccagagtaacacagtcaaatcactggtggctggtggctcagcctcccttgtggcccagagcatcacagtgcccattgatgtagtctcccagcacctgatgatgcaacgcaagggtgagaaaatgggccgctttcaggtgcgggggaacccagagggacaaggggtagttgcctttggccaaaccaaggacatcatcaggcagatcctgcaggctgatggacttcgcggcttctatcgaggctatgtggcttcactgcttacctatatcccaaacagtgctgtctggtggcccttctatcacttctatgcagccattgtctttccctggattccagagcagctctcctacctgtgtcctaaggagtgccctcacattgtctttcaagctgtctcggggcccctggctgcagccactgcctccatcctcaccaatcccatggatgtcatacgaacccgtgtgcaggttgagggcaagaactccatcatcctgaccttcagacagctgatggcagaagaagggccttggggcctcatgaagggcctctcggccagaatcatctcagccacaccttccaccattgtcattgtggtgggctatgagagcctcaagaaactcagcctccgacctgagctggtggactcgagacactggtaaccagtggtggggagagaagcctgctgttttccacactaccgtgggtcaggggcagagtggagaggacagcaccctctccaggtgctcccaccacacacccagccctgccctgggccaagtggcctatctgggatagggatagagactttgaactgctcttgctgaagaggctccacgcctggatcccttgcccccactatttaaaattctcttctgagctgggctccctcactcagtccctgtatttgatactggcctaaagaccccaccccccaccctgccagcccttcttctggcttccccttccatctgtgtccctgagaccctgagaagagctgtacatagagcttgcttactaccactggttcttcctcttgggctttcagcccagactccaagcagctgctatcaaccctctctcccttcatctcttagccttgcttatttttattttgggaccgagctgcccactagatgactctgcttttccctgcatttggggctaaggtgccaggtacttatttgcacagggagcaggagcagcaaaaaatctctggttctccagagcactcgtcctctctttggaggggttattaggttgggagaaatgttgatacttttgttttgtgtgtgtgtgtgtgtgtgtgtgtgtgtgtgtgtgtgtgtgtgttttaacatctgtgaaccaggctattagtcctgctaaagcgccaatcctgctgtcagagctcacccccttcctaagacaggtagaaaaatgtaatgtagctttttccacaagccacttccctgtcccttcagtctcaggagccctaggagagtctaagctggggcatcccctggcccagaggactcccgtggtgggcacagttctaagtggatcaggctgtcttgggtgcactggacttggagcactaccttgagaagtcaggttgagaaagtagttgatctagaaggcaacaagtgggcatgtgttccccagcacattacccaggccagcagagccaaacctaggagagggcagtgggtagattctctgccccaggcagccatgacatacacataaataccccaatcactcagacttacggcaacaagtgttgtctcactatggtgatctctaagatccacatcactggatgcgtagtcatcccagtcatggtaccctgtggaggaatgctggaagaacataaagagcagttcagaaagtcacccaataccaggaccactgcatttaccagcctgatactgccaagattatctgatgctctcctcaggagctaggagaggagtgctccttcctccctaccgctactctccccaagcctgtgttgcaggtagagaggtgcagcaaatagagaaggcatgtcaaaccctgcatttctacctgagacgtgtgacctggatgatcctccaaaccctattggtcccaccccctgggaaaggccatggtgccagtttgaaaggtgctagctacctgaagccttgatatttcttcatggctgccgcacattcttccaccttggccagaacaggttctgaaaaccacttctctaccttcaccaccaccactgcccatcttgatctctttgagggttttcccatttcacttgatcttatttttgtttatcccttcctgcactttgtcaagagagtcctccagtttctatccaggaatgttcacatccaaagggttggacccacggatcattctgaatcttcctgcccctcctcactgcttaaccctgagaaccacaaatataatggaagcagttccccccaccctcaccccatctctttaagctcatcctagcaagacctctagagaccctagagactcgactttagtccttccccgccatggcacagtggggaaggtgtcaatggggagtgtcacggacaggaggtaggatcctgccgctcgcgtcttagtgtttctccctcaagactttccttctgttttgttgtcttgtgcagtattttacagcccctcttgtgtttttctttatttctcgtacacacacgcagttttaagggtgatgtgtgtataattaaaaggacccttggcccatactttcctaattctttagggactgggattgggtttgactgaaatatgttttggtggggatgggacggtggacttccattctccctaaactggagttttggtcggtaatcaaaactaaaagaaacctctgggagactggaaacctgattggagcactgaggaacaagggaatgaaaaggcagactctctgaacgtttgatgaaatggactcttgtgaaaattaacagtgaatattcactgttgcactgtacgaagtctctgaaatgtaattaaaagtttttattgagcccccg

SEQ ID NO: 183534 - DNA, 2196 bp, Homo sapiens
  Payload ID: 16160
  Gene Symbol: SLC25A45
  Gene Name: solute carrier family 25, member 45
  Uniprot ID: Q8N413
  ENST ID: ENST00000294187
  CDS Start-End: 243-983
agaatggtgccattgcagatcaacacgcactttaaataatcaaaacccctatctttcccctgggaaggaggaagccgaggaaggctgtgtttctgactcacacgggggagtcgggggagtcgtaaacaaccctgaagagaacagccaggcctggcgctctgggcttggtcctgggacacccgtttgacactgtaaaggtgaggctgcagacccagaccacctaccggggcatcgttgattgcatggtcaagatttaccgccatgagtccctcctgggcttcttcaagggaatgagcttccccattgccagcatagctgtggtcaactctgtcctgtttggggtctatagcaacaccctgctggtgctcacggccacctcccaccaggagcggcgggcccagccgcccagctacatgcacatcttcctagcgggctgcaccggggggttcctgcaggcctactgtctggctccttttgacctcatcaaagtccggctacaaaaccagacagagccaagggcccagccagggagccccccaccccggtaccaggggcccgtgcactgtgcagcctccatcttccgggaggaggggccccgggggctgttccgaggagcctgggccctgacgctgagggacacccccacggtggggatctacttcatcacctatgaagggctctgtcgccagtacacaccagaaggccagaatcccagctcagccacggtgctggtggcagggggctttgcaggcattgcttcctgggtggcagccacgcccttagacatgatcaagtcccggatgcagatggatggactgagacgcagagtgtaccaggggatgctggactgcatggtgagcagcatccggcaggaaggactgggagtcttcttccggggggtcaccatcaacagtgcccgcgcctttcccgtcaatgctgtcaccttcctcagctacgaatatctcctccgctggtggggatgagccctgcggcaatgccagcagctccccatcaggcccacggcctggaggccagtttgagattggaggccaggttgaaagcttgcaaatcagtgcaagaggctcagcccttcctaaccaaggtgcctcccacccgcgcagatctgggctgggcagacacctgtgggagccggaagccagggggcctgtgcagcctccctgtgtagctggccttgactcctttgcctcccacatctgtgaaacagggagcatgaggcacaagtgagctggcaagtggtgctggtgacatcccagctcctgtcctgtgccttcacctctttttttttttttttttttttttgagatggagtctttctctgtcacccaggctggaatgcagtggcgtgatctcggctcactgcaacctccgcctttccaccttccgggttcaagcaactctcctgcctcagcctcccaagtagctgggactataggcgcccgccaccacacccagctaaatttttgtatttttagtagagacagggtttcaccatgtcagccaggatggtcttgatctcctgactttgtgatccgcccgcgtcggcctctcaaagtgctgggattacaggcgtgagccaccgcgcccggctgccttcacctcttaaggagctctgagactccacttctgagagtccctgcggcctcccacctccctgcctttcaaagctctctcccccatgacccaggataaccctatgtctcctcccccagaatccttcagtggctctcatcaccttcaggaaaagcccaaactccttccaccctccaggttcctccctccccacgaggctttgttctcctggggttgcttcctggaccctgaacaagttgtgctctcattggccgggcctggccagcagtgcacagtgcctggcaggttgactctaccatccccggggctggccccgctctcctccgagacccaggctgagcccagtcccctcacccttccttgacttacctccccacctgaggctgactttggggttcccagacaccctacccacacacatgccttgatcatagcacttgcctgcgcttcttcagagtcattaatttgcttctcggcttccccactggactgtgagctgcctgaggtcagggattgcgctttggatggtttccagcctgagcctggtgcttgaacagacgtgtgcaataaatgctcgttaaatga

SEQ ID NO: 183535 - DNA, 2286 bp, Homo sapiens
  Payload ID: 16160
  Gene Symbol: SLC25A45
  Gene Name: solute carrier family 25, member 45
  Uniprot ID: Q8N413
  ENST ID: ENST00000398802
  CDS Start-End: 205-1071
agatccttgaaagggttttggttttgactgagcagaatggtgccattgcagatcaacacgcactttaaataatcaaaacccctatctttcccctgggaaggaggaagccgaggaaggctgtgtttctgactcacacgggggagtcgggggagtcgtaaacaaccctgaagagaacagccaggcctgttcccgcaagcccagacaatgccggtggaggaatttgtggctggctggatctctggcgctctgggcttggtcctgggacacccgtttgacactgtaaaggtgaggctgcagacccagaccacctaccggggcatcgttgattgcatggtcaagatttaccgccatgagtccctcctgggcttcttcaagggaatgagcttccccattgccagcatagctgtggtcaactctgtcctgtttggggtctatagcaacaccctgctggtgctcacggccacctcccaccaggagcggcgggcccagccgcccagctacatgcacatcttcctagcgggctgcaccggggggttcctgcaggcctactgtctggctccttttgacctcatcaaagtccggctacaaaaccagacagagccaagggcccagccagggagccccccaccccggtaccaggggcccgtgcactgtgcagcctccatcttccgggaggaggggccccgggggctgttccgaggagcctgggccctgacgctgagggacacccccacggtggggatctacttcatcacctatgaagggctctgtcgccagtacacaccagaaggccagaatcccagctcagccacggtgctggtggcagggggctttgcaggcattgcttcctgggtggcagccacgcccttagacatgatcaagtcccggatgcagatggatggactgagacgcagagtgtaccaggggatgctggactgcatggtgagcagcatccggcaggaaggactgggagtcttcttccggggggtcaccatcaacagtgcccgcgcctttcccgtcaatgctgtcaccttcctcagctacgaatatctcctccgctggtggggatgagccctgcggcaatgccagcagctccccatcaggcccacggcctggaggccagtttgagattggaggccaggttgaaagcttgcaaatcagtgcaagaggctcagcccttcctaaccaaggtgcctcccacccgcgcagatctgggctgggcagacacctgtgggagccggaagccagggggcctgtgcagcctccctgtgtagctggccttgactcctttgcctcccacatctgtgaaacagggagcatgaggcacaagtgagctggcaagtggtgctggtgacatcccagctcctgtcctgtgccttcacctctttttttttttttttttttttttgagatggagtctttctctgtcacccaggctggaatgcagtggcgtgatctcggctcactgcaacctccgcctttccaccttccgggttcaagcaactctcctgcctcagcctcccaagtagctgggactataggcgcccgccaccacacccagctaaatttttgtatttttagtagagacagggtttcaccatgtcagccaggatggtcttgatctcctgactttgtgatccgcccgcgtcggcctctcaaagtgctgggattacaggcgtgagccaccgcgcccggctgccttcacctcttaaggagctctgagactccacttctgagagtccctgcggcctcccacctccctgcctttcaaagctctctcccccatgacccaggataaccctatgtctcctcccccagaatccttcagtggctctcatcaccttcaggaaaagcccaaactccttccaccctccaggttcctccctccccacgaggctttgttctcctggggttgcttcctggaccctgaacaagttgtgctctcattggccgggcctggccagcagtgcacagtgcctggcaggttgactctaccatccccggggctggccccgctctcctccgagacccaggctgagcccagtcccctcacccttccttgacttacctccccacctgaggctgactttggggttcccagacaccctacccacacacatgccttgatcatagcacttgcctgcgcttcttcagagtcattaatttgcttctcggcttccccactggactgtgagctgcctgaggtcagggattgcgctttggatggtttccagcctgagcctggtgcttgaacagacgtgtgcaataaatgctcgttaaatgatg

SEQ ID NO: 183536 - DNA, 561 bp, Homo sapiens
  Payload ID: 16160
  Gene Symbol: SLC25A45
  Gene Name: solute carrier family 25, member 45
  ENST ID: ENST00000530936
  CDS Start-End: 208-561
cacagatccttgaaagggttttggttttgactgagcagaatggtgccattgcagatcaacacgcactttaaataatcaaaacccctatctttcccctgggaaggaggaagccgaggaaggctgtgtttctgactcacacgggggagtcgggggagtcgtaaacaaccctgaagagaacagccaggcctgttcccgcaagcccagacaatgccggtggaggaatttgtggctggctggatctctggcgctctgggcttggtcctgggacacccgtttgacactgtaaaggtgaggctgcagacccagaccacctaccggggcatcgttgattgcatggtcaagatttaccgccatgagtccctcctgggcttcttcaagggaatgagcttccccattgccagcatagctgtggtcaactctgtcctgtttggggtctatagcaacaccctgctggtgctcacggccacctcccaccaggagcggcgggcccagccgcccagctacatgcacatcttcctagcgggctgcaccggggggttcctgcaggcctactgtctggct

SEQ ID NO: 183537 - DNA, 2432 bp, Homo sapiens
  Payload ID: 16160
  Gene Symbol: SLC25A45
  Gene Name: solute carrier family 25, member 45
  Uniprot ID: Q8N413
  ENST ID: ENST00000534028
  CDS Start-End: 423-1217
atgggggcggccatgccccttggtggagatgaatgggagtggagctgggctggctgggcaggcaggggcttgcctcttgctgactaaggcagccctggaggggcccgaccatggggcaggaacccagttgccatcctcagagcgaggatcattggccgggctcggggatcagggcctctgtggtcccggcacgcctggcccgtgagactgtactctgcacgactcctccaggtggccagggtcaccggaactggctcgctctcctctgccagttgccggaggtctgggcaccaggccaattctcaccttcccgccagggttaaacattagtgggaggttatcagcgtgggccaggggagggagaggggggaattcaactctgtctcctctgctggagccaccagttcccgcaagcccagacaatgccggtggaggaatttgtggctggctggatctctggcgctctgggcttggtcctgggacacccgtttgacactgtaaagctcctgggcttcttcaagggaatgagcttccccattgccagcatagctgtggtcaactctgtcctgtttggggtctatagcaacaccctgctggtgctcacggccacctcccaccaggagcggcgggcccagccgcccagctacatgcacatcttcctagcgggctgcaccggggggttcctgcaggcctactgtctggctccttttgacctcatcaaagtccggctacaaaaccagacagagccaagggcccagccagggagccccccaccccggtaccaggggcccgtgcactgtgcagcctccatcttccgggaggaggggccccgggggctgttccgaggagcctgggccctgacgctgagggacacccccacggtggggatctacttcatcacctatgaagggctctgtcgccagtacacaccagaaggccagaatcccagctcagccacggtgctggtggcagggggctttgcaggcattgcttcctgggtggcagccacgcccttagacatgatcaagtcccggatgcagatggatggactgagacgcagagtgtaccaggggatgctggactgcatggtgagcagcatccggcaggaaggactgggagtcttcttccggggggtcaccatcaacagtgcccgcgcctttcccgtcaatgctgtcaccttcctcagctacgaatatctcctccgctggtggggatgagccctgcggcaatgccagcagctccccatcaggcccacggcctggaggccagtttgagattggaggccaggttgaaagcttgcaaatcagtgcaagaggctcagcccttcctaaccaaggtgcctcccacccgcgcagatctgggctgggcagacacctgtgggagccggaagccagggggcctgtgcagcctccctgtgtagctggccttgactcctttgcctcccacatctgtgaaacagggagcatgaggcacaagtgagctggcaagtggtgctggtgacatcccagctcctgtcctgtgccttcacctctttttttttttttttttttttttgagatggagtctttctctgtcacccaggctggaatgcagtggcgtgatctcggctcactgcaacctccgcctttccaccttccgggttcaagcaactctcctgcctcagcctcccaagtagctgggactataggcgcccgccaccacacccagctaaatttttgtatttttagtagagacagggtttcaccatgtcagccaggatggtcttgatctcctgactttgtgatccgcccgcgtcggcctctcaaagtgctgggattacaggcgtgagccaccgcgcccggctgccttcacctcttaaggagctctgagactccacttctgagagtccctgcggcctcccacctccctgcctttcaaagctctctcccccatgacccaggataaccctatgtctcctcccccagaatccttcagtggctctcatcaccttcaggaaaagcccaaactccttccaccctccaggttcctccctccccacgaggctttgttctcctggggttgcttcctggaccctgaacaagttgtgctctcattggccgggcctggccagcagtgcacagtgcctggcaggttgactctaccatccccggggctggccccgctctcctccgagacccaggctgagcccagtcccctcacccttccttgacttacctccccacctgaggctgactttggggttcccagacaccctacccacacacatgccttgatcatagcacttgcctgcgcttcttcagagtcattaatttgcttctcggcttccccactggactgtgagctgcctgaggtcagggattgcgctttggatggtttccagcctgagcctggtgcttgaacagacgtgtgcaataaatgctcgttaaatgatg

SEQ ID NO: 183538 - DNA, 1012 bp, Homo sapiens
  Payload ID: 16160
  Gene Symbol: SLC25A45
  Gene Name: solute carrier family 25, member 45
  ENST ID: ENST00000533629
  CDS Start-End: 165-275
tgccattgcagatcaacacgcactttaaataatcaaaacccctatctttcccctgggaaggaggaagccgaggaaggctgtgtttctgactcacacgggggagtcgggggagtcgtaaacaaccctgaagagaacagccaggcctgttcccgcaagcccagacaatgccggtggaggaatttgtggctggctggatctctggtgagacatttttcttccttctgtcacatcacacccaatggcgctctgggcttggtcctgggacacccgtttgacactgtaaaggtgaggctgcagacccagaccacctaccggggcatcgttgattgcatggtcaagatttaccgccatgagtccctcctgggcttcttcaagggaatgagcttccccattgccagcatagctgtggtcaactctgtcctgtttggggtctatagcaacaccctgctggtgctcacggccacctcccaccaggagcggcgggcccagccgcccagctacatgcacatcttcctagcgggctgcaccggggggttcctgcaggtatgctcactgccggctttagggaggccagaaaccaacctgctcctgcaaaaagaatccaggcttgttctgagtgcctgctgtaggccaggcctactgtctggctccttttgacctcatcaaagtccggctacaaaaccagacagagccaagggcccagccagggagccccccaccccggtaccaggggcccgtgcactgtgcagcctccatcttccgggaggaggggccccgggggctgttccgaggagcctgggccctgacgctgagggacacccccacggtggggatctacttcatcacctatgaagggctctgtcgccagtacacaccagaaggccagaatcccagctcagccacggtgctggtggcagggggctttgcaggcattgcttcctgggtggcagccacgcccttagacatgatcaagtcccggatgcagatggatggactgagacgcagagtgtac

SEQ ID NO: 183539 - DNA, 603 bp, Homo sapiens
  Payload ID: 16160
  Gene Symbol: SLC25A45
  Gene Name: solute carrier family 25, member 45
  ENST ID: ENST00000524438
  CDS Start-End: 207-350
acagatccttgaaagggttttggttttgactgagcagaatggtgccattgcagatcaacacgcactttaaataatcaaaacccctatctttcccctgggaaggaggaagccgaggaaggctgtgtttctgactcacacgggggagtcgggggagtcgtaaacaaccctgaagagaacagccaggcctgttcccgcaagcccagacaatgccggtggaggaatttgtggctggctggatctctggtgagacatttttcttccttctgtcacatcacacccaatgggccctgcagttctgcgtggccagctggcagcagggcctgctctggatcccggcgacgacattatgagttgaagaaagaagagtaaagctctcggagaggcgctctgggcttggtcctgggacacccgtttgacactgtaaaggtgaggctgcagacccagaccacctaccggggcatcgttgattgcatggtcaagatttaccgccatgagtccctcctgggcttcttcaagggaatgagcttccccattgccagcatagctgtggtcaactctgtcctgtttggggtctatagcaacaccctgctggtgctcacggcc

SEQ ID NO: 183540 - DNA, 572 bp, Homo sapiens
  Payload ID: 16160
  Gene Symbol: SLC25A45
  Gene Name: solute carrier family 25, member 45
  ENST ID: ENST00000526259
  CDS Start-End: 28-138
agccaccagttcccgcaagcccagacaatgccggtggaggaatttgtggctggctggatctctggtgagacatttttcttccttctgtcacatcacacccaatggcgctctgggcttggtcctgggacacccgtttgacactgtaaaggtgaggctgcagacccagaccacctaccggggcatcgttgattgcatggtcaagatttaccgccatgagtccctcctgggcttcttcaagggaatgagcttccccattgccagcatagctgtggtcaactctgtcctgtttggggtctatagcaacaccctgctggtgctcacggccacctcccaccaggagcggcgggcccagccgcccagctacatgcacatcttcctagcgggctgcaccggggggttcctgcaggcctactgtctggctccttttgacctcatcaaagtccggctacaaaaccagacagagccaagggcccagccagggagccccccaccccggtaccaggggcccgtgcactgtgcagcctccatcttccgggaggaggggccccgggggctgttccgaggagcctggg

SEQ ID NO: 183541 - DNA, 3088 bp, Homo sapiens
  Payload ID: 16160
  Gene Symbol: SLC25A45
  Gene Name: solute carrier family 25, member 45
  ENST ID: ENST00000526898
  CDS Start-End: 812-955
actgcaacagctgcctctcgggttcaagcgattctcctgcctcagcatcccaagtagctgggactacaggcgcccgtcatcacacccggctaatttttgtatttttggtagagatggggtttcactatgttggtcaggctggtctcgaactcctgacctcaggtggtccttccgcctcggcctcccaaagtgctgggattacaggcgtgagccactgcgcctggcctgtatcagttatagtttttgcaaaggcagtttcaggaataagaagcagaaccaggactgcagcccaagccaccacgagaggccagtctttggggatggtcttttaggatgatctttgggggtggcccaaggagccccaggcagctccagaggcaggagtcactcaggatttattgagagcccaccctgtgccacccgctgtgcacagaacacccagagatccctgtccagacagacaagttcttcccatcgtatgttggcgtgataactgtgatggagaaagagaggaagagccagcagtgcctccggctggggaggcggggcagacctcacccaggtggtgacatttgagccccagctggaggggtgccagggcaagagtgcccaggaagagggaagagccagtccacaggcctggagacagaaggctgactgaagaagagtctggaggctcgggtggctgcagcagagaaagcaagggggaggaagccgaggaaggctgtgtttctgactcacacgggggagtcgggggagtcgtaaacaaccctgaagagaacagccaggcctgttcccgcaagcccagacaatgccggtggaggaatttgtggctggctggatctctggtgagacatttttcttccttctgtcacatcacacccaatgggccctgcagttctgcgtggccagctggcagcagggcctgctctggatcccggcgacgacattatgagttgaagaaagaagagtaaagctctcggagagacttgcttcctgggcctggcacgagggccctcactcatagcaccctcttgtcaccacaggcgctctgggcttggtcctgggacacccgtttgacactgtaaaggtgaggctgcagacccagaccacctaccggggcatcgttgattgcatggtcaagatttaccgccatgagtccctcctgggcttcttcaagggaatgagcttccccattgccagcatagctgtggtcaactctgtcctgtttggggtctatagcaacaccctgctggtgctcacggccacctcccaccaggagcggcgggcccagccgcccagctacatgcacatcttcctagcgggctgcaccggggggttcctgcaggcctactgtctggctccttttgacctcatcaaagtccggctacaaaaccagacagagccaagggcccagccagggagccccccaccccggtaccaggggcccgtgcactgtgcagcctccatcttccgggaggaggggccccgggggctgttccgaggagcctgggccctgacgctgagggacacccccacggtggggatctacttcatcacctatgaagggctctgtcgccagtacacaccagaaggccagaatcccagctcagccacggtgctggtggcagggggctttgcaggcattgcttcctgggtggcagccacgcccttagacatgatcaagtcccggatgcagatggatggactgagacgcagagtgtaccaggggatgctggactgcatggtgagcagcatccggcaggaaggactgggagtcttcttccggggggtcaccatcaacagtgcccgcgcctttcccgtcaatgctgtcaccttcctcagctacgaatatctcctccgctggtggggatgagccctgcggcaatgccagcagctccccatcaggcccacggcctggaggccagtttgagattggaggccaggttgaaagcttgcaaatcagtgcaagaggctcagcccttcctaaccaaggtgcctcccacccgcgcagatctgggctgggcagacacctgtgggagccggaagccagggggcctgtgcagcctccctgtgtagctggccttgactcctttgcctcccacatctgtgaaacagggagcatgaggcacaagtgagctggcaagtggtgctggtgacatcccagctcctgtcctgtgccttcacctctttttttttttttttttttttttgagatggagtctttctctgtcacccaggctggaatgcagtggcgtgatctcggctcactgcaacctccgcctttccaccttccgggttcaagcaactctcctgcctcagcctcccaagtagctgggactataggcgcccgccaccacacccagctaaatttttgtatttttagtagagacagggtttcaccatgtcagccaggatggtcttgatctcctgactttgtgatccgcccgcgtcggcctctcaaagtgctgggattacaggcgtgagccaccgcgcccggctgccttcacctcttaaggagctctgagactccacttctgagagtccctgcggcctcccacctccctgcctttcaaagctctctcccccatgacccaggataaccctatgtctcctcccccagaatccttcagtggctctcatcaccttcaggaaaagcccaaactccttccaccctccaggttcctccctccccacgaggctttgttctcctggggttgcttcctggaccctgaacaagttgtgctctcattggccgggcctggccagcagtgcacagtgcctggcaggttgactctaccatccccggggctggccccgctctcctccgagacccaggctgagcccagtcccctcacccttccttgacttacctccccacctgaggctgactttggggttcccagacaccctacccacacacatgccttgatcatagcacttgcctgcgcttcttcagagtcattaatttgcttctcggcttccccactggactgtgagctgcctgaggtcagggattgcgctttggatggtttccagcctgagcctggtgcttgaacagacgtgtgcaataaatgctcgttaaatg

SEQ ID NO: 183542 - DNA, 569 bp, Homo sapiens
  Payload ID: 16160
  Gene Symbol: SLC25A45
  Gene Name: solute carrier family 25, member 45
  ENST ID: ENST00000529962
  CDS Start-End: 179-331
actgagcagaatggtgccattgcagatcaacacgcactttaaataatcaaaacccctatctttcccctgggaaggaggaagccgaggaaggctgtgtttctgactcacacgggggagtcgggggagtcgtaaacaaccctgaagagaacagccaggcctgttcccgcaagcccagacaatgccggtggaggaatttgtggctggctggatctctggtgagacatttttcttccttctgtcacatcacacccaatgttctgcgtggccagctggcagcagggcctgctctggatcccggcgacgacattatgagttgaagaaagaagagtaaagctctcggagaggcgctctgggcttggtcctgggacacccgtttgacactgtaaaggtgaggctgcagacccagaccacctaccggggcatcgttgattgcatggtcaagatttaccgccatgagtccctcctgggcttcttcaagggaatgagcttccccattgccagcatagctgtggtcaactctgtcctgtttggggtctatagcaacaccctgctggtgctcacggccacct

SEQ ID NO: 183543 - DNA, 2138 bp, Homo sapiens
  Payload ID: 16160
  Gene Symbol: SLC25A45
  Gene Name: solute carrier family 25, member 45
  Uniprot ID: Q8N413
  ENST ID: ENST00000527174
  CDS Start-End: 57-923
ggggaattcaactctgtctcctctgctggagccaccagttcccgcaagcccagacaatgccggtggaggaatttgtggctggctggatctctggcgctctgggcttggtcctgggacacccgtttgacactgtaaaggtgaggctgcagacccagaccacctaccggggcatcgttgattgcatggtcaagatttaccgccatgagtccctcctgggcttcttcaagggaatgagcttccccattgccagcatagctgtggtcaactctgtcctgtttggggtctatagcaacaccctgctggtgctcacggccacctcccaccaggagcggcgggcccagccgcccagctacatgcacatcttcctagcgggctgcaccggggggttcctgcaggcctactgtctggctccttttgacctcatcaaagtccggctacaaaaccagacagagccaagggcccagccagggagccccccaccccggtaccaggggcccgtgcactgtgcagcctccatcttccgggaggaggggccccgggggctgttccgaggagcctgggccctgacgctgagggacacccccacggtggggatctacttcatcacctatgaagggctctgtcgccagtacacaccagaaggccagaatcccagctcagccacggtgctggtggcagggggctttgcaggcattgcttcctgggtggcagccacgcccttagacatgatcaagtcccggatgcagatggatggactgagacgcagagtgtaccaggggatgctggactgcatggtgagcagcatccggcaggaaggactgggagtcttcttccggggggtcaccatcaacagtgcccgcgcctttcccgtcaatgctgtcaccttcctcagctacgaatatctcctccgctggtggggatgagccctgcggcaatgccagcagctccccatcaggcccacggcctggaggccagtttgagattggaggccaggttgaaagcttgcaaatcagtgcaagaggctcagcccttcctaaccaaggtgcctcccacccgcgcagatctgggctgggcagacacctgtgggagccggaagccagggggcctgtgcagcctccctgtgtagctggccttgactcctttgcctcccacatctgtgaaacagggagcatgaggcacaagtgagctggcaagtggtgctggtgacatcccagctcctgtcctgtgccttcacctctttttttttttttttttttttttgagatggagtctttctctgtcacccaggctggaatgcagtggcgtgatctcggctcactgcaacctccgcctttccaccttccgggttcaagcaactctcctgcctcagcctcccaagtagctgggactataggcgcccgccaccacacccagctaaatttttgtatttttagtagagacagggtttcaccatgtcagccaggatggtcttgatctcctgactttgtgatccgcccgcgtcggcctctcaaagtgctgggattacaggcgtgagccaccgcgcccggctgccttcacctcttaaggagctctgagactccacttctgagagtccctgcggcctcccacctccctgcctttcaaagctctctcccccatgacccaggataaccctatgtctcctcccccagaatccttcagtggctctcatcaccttcaggaaaagcccaaactccttccaccctccaggttcctccctccccacgaggctttgttctcctggggttgcttcctggaccctgaacaagttgtgctctcattggccgggcctggccagcagtgcacagtgcctggcaggttgactctaccatccccggggctggccccgctctcctccgagacccaggctgagcccagtcccctcacccttccttgacttacctccccacctgaggctgactttggggttcccagacaccctacccacacacatgccttgatcatagcacttgcctgcgcttcttcagagtcattaatttgcttctcggcttccccactggactgtgagctgcctgaggtcagggattgcgctttggatggtttccagcctgagcctggtgcttgaacagacgtgtgcaataaatgctcgttaaatgatg

SEQ ID NO: 183544 - DNA, 894 bp, Homo sapiens
  Payload ID: 16160
  Gene Symbol: SLC25A45
  Gene Name: solute carrier family 25, member 45
  ENST ID: ENST00000526432
  CDS Start-End: 1-681
atgccggtggaggaatttgtggctggctggatctctggcgctctgggcttggtcctgggacacccgtttgacactgtaaaggtgaggctgcagacccagaccacctaccggggcatcgttgattgcatggtcaagatttaccgccatgagtccgcctactgtctggctccttttgacctcatcaaagtccggctacaaaaccagacagagccaagggcccagccagggagccccccaccccggtaccaggggcccgtgcactgtgcagcctccatcttccgggaggaggggccccgggggctgttccgaggagcctgggccctgacgctgagggacacccccacggtggggatctacttcatcacctatgaagggctctgtcgccagtacacaccagaaggccagaatcccagctcagccacggtgctggtggcagggggctttgcaggcattgcttcctgggtggcagccacgcccttagacatgatcaagtcccggatgcagatggatggactgagacgcagagtgtaccaggggatgctggactgcatggtgagcagcatccggcaggaaggactgggagtcttcttccggggggtcaccatcaacagtgcccgcgcctttcccgtcaatgctgtcaccttcctcagctacgaatatctcctccgctggtggggatgagccctgcggcaatgccagcagctccccatcaggcccacggcctggaggccagtttgagattggaggccaggttgaaagcttgcaaatcagtgcaagaggctcagcccttcctaaccaaggtgcctcccacccgcgcagatctgggctgggcagacacctgtgggagccggaagccagggggcctgtgcagcctccctgtgtagctggccttga

SEQ ID NO: 183545 - DNA, 2385 bp, Homo sapiens
  Payload ID: 16161
  Gene Symbol: SLC25A46
  Gene Name: solute carrier family 25, member 46
  Uniprot ID: Q96AG3
  ENST ID: ENST00000355943
  CDS Start-End: 127-1383
acttccggttgtcagaatttacccctgacgcggcggcggccgacgggaagctgtgtgtgcttaggtcgtggtggccccggtggtggtgggctccgggcgggctcgcgtcatcctgcccccgctgcgatgcatccgcggcgcccggacggatttgatggcttgggctaccggggtggtgcccgggacgagcagggctttggcggcgccttccctgcaaggtccttcagcaccgggtcggacctgggccactgggtgacgactcccccagatatccccggcagccgcaacctgcactggggcgagaagagcccgccctacggcgtgcccaccacctccaccccgtacgaaggccccacggaggaacccttttccagtggcggcggcggcagtgtgcaggggcagagcagtgaacagctgaatagatttgctggatttggtattggacttgcaagtctctttacagaaaatgtattggcacatccttgcattgttctacgccgccaatgtcaggttaattaccatgctcagcattaccatctcactccatttacagtcatcaatattatgtacagtttcaacaaaactcagggacctagagccctgtggaaaggaatgggaagtacatttattgtccagggagtcacacttggagcagaaggcataattagtgaatttacacctttgccaagggaggttttacataaatggagtcctaaacaaataggagaacaccttctactgaaatccctaacttacgtggtggcaatgcctttttattcagcaagtctgattgaaacagtgcagagtgagataattcgagataatactggcattttggagtgtgttaaagaaggaattggaagagtgataggcatgggagtgcctcatagcaaacgacttcttccgcttctttccttgatcttccctacggtgcttcatggagttcttcattacatcatcagctcagttattcagaagtttgtcctactaattctaaagagaaagacttacaatagccacctagctgagagcactagccctgtgcagagtatgttggatgcttattttccagaacttattgctaactttgctgccagtctttgttctgacgttatactttacccattggaaacagttttgcaccgccttcacattcaaggaacacgcacaataattgacaatacagaccttggctatgaagtgcttccaattaatacacaatatgagggaatgagagactgtatcaataccataaggcaggaggaaggagtgtttggtttttataaagggtttggtgctgttataatacagtacacactgcatgcagctgttttacagattaccaaaattatttactctacacttcttcaaaataacatttgagatttaggttccttcactgagtagtctggaagatataatctggataatttgctatgaagttatgagggatacaagtgaaatactggggaagaaaatggattggaaagtaaaattggtactaaagcccatactgattatcttgactttgttttttaaggcataggtatatattttggatcaaaatccttccaaatttgaaaactcaataaaaataacacttattaaattctagttagtgtagcactcatgctgaagtaaacatgatcgtaggcagaagcaaaattttattataaaatctaaaacaaaactttatagagttgaatctattccatctgacttcaatatttgccaaacgtttattttacctcctagattgatgttggtatagtatccttaatacagtgtagtatattaatgtccttaatacaatcaggaggtttttacctttaagcaaataaattatgtcattattgaaaaagacttaagggatgattagacttggcaatctgtaagcaggagtataaatgttttaaattgcattgtccctatgtaactatcttaatggctatatatatgtattttataaagccatttatgtatacacatgtaacttggaatttccttcatccctacacattttctacacttacatcaccttattgcataaaacaaagtcacgcgctttctgcttgaacatcaaaatatcaaaaaccaaggtacccaaaagatacaagtcagagacaacatccttgtccatatccaaacccagtgtttcagtgctagcaacttaatttctcatacatttatagagtttggtttgctttgctagttgtgtgaatcattgggctgtttttagagccactgttaagagagaatataaaataatcatgacaattactactgtttccacatttacaaattgtgtacttaaatgaacctcatttcccttttatttctgaatggcttgtctgagaggaaacaaaattaaaattcatctgggaa

SEQ ID NO: 183546 - DNA, 1575 bp, Homo sapiens
  Payload ID: 16161
  Gene Symbol: SLC25A46
  Gene Name: solute carrier family 25, member 46
  Uniprot ID: Q96AG3
  ENST ID: ENST00000447245
  CDS Start-End: 80-1093
aagctgtgtgtgcttaggtcgtggtggccccggtggtggtgggctccgggcgggctcgcgtcatcctgcccccgctgcgatgcatccgcggcgcccggacggatttgatggcttgggctaccggggtggtgcccgggacgagcagggctttggcggcgccttccctgcaaggtccttcagcaccgggtcggacctgggccactgggtgacgactcccccagatatccccggcagccgcaacctgcactggggcgagaagagcccgccctacggcgtgcccaccacctccaccccgtacgaaggccccacggaggaacccttttccagtggcggcggcggcagtgtgcaggggcagagcagtgaacagctgaatagatttgctggatttggtattggacttgcaagtctctttacagaaaatgtattggcacatccttgcattgttctacgccgccaatgtcaggttaattaccatgctcagcattaccatctcactccatttacagtcatcaatattatgtacagtttcaacaaaactcagggacctagagccctgtggaaaggaatgggaagtacatttattgtccagggagtcacacttggagcagaaggcataattagtgaatttacacctttgccaagggaggttttacataaatggagtcctaaacaaataggagaacaccttctactgaaatccctaacttacgtggtggcaatgcctttttattcagcaagtctgattgaaacagtgcagagtatgttggatgcttattttccagaacttattgctaactttgctgccagtctttgttctgacgttatactttacccattggaaacagttttgcaccgccttcacattcaaggaacacgcacaataattgacaatacagaccttggctatgaagtgcttccaattaatacacaatatgagggaatgagagactgtatcaataccataaggcaggaggaaggagtgtttggtttttataaagggtttggtgctgttataatacagtacacactgcatgcagctgttttacagattaccaaaattatttactctacacttcttcaaaataacatttgagatttaggttccttcactgagtagtctggaagatataatctggataatttgctatgaagttatgagggatacaagtgaaatactggggaagaaaatggattggaaagtaaaattggtactaaagcccatactgattatcttgactttgttttttaaggcataggtatatattttggatcaaaatccttccaaatttgaaaactcaataaaaataacacttattaaattctagttagtgtagcactcatgctgaagtaaacatgatcgtaggcagaagcaaaattttattataaaatctaaaacaaaactttatagagttgaatctattccatctgacttcaatatttgccaaacgtttattttacctcctagattgatgttggtatagtatccttaatacagtgtagtatattaatgtccttaatacaatcaggaggtttttacctttaagcaaataaattatgtcattattgaaaaagact

SEQ ID NO: 183547 - DNA, 1546 bp, Homo sapiens
  Payload ID: 16161
  Gene Symbol: SLC25A46
  Gene Name: solute carrier family 25, member 46
  ENST ID: ENST00000513807
  CDS Start-End: 291-1061
gaaggaacataggatgaaaccatggaagtcttcctcagatctggggagggagcctggcccaagagcccgtggagctaatgaaaacagaacagctgaatagatttgctggatttggtattggacttgcaagtctctttacagaaaatgtattggcacatccttgcattgttctacgccgccaatgtcaggttaattaccatgctcagcattaccatctcactccatttacagtcatcaatattatgtacagtttcaacaaaactcagggacctagagccctgtggaaaggaatgggaagtacatttattgtccagggagtcacacttggagcagaaggcataattagtgaatttacacctttgccaagggaggttttacataaatggagtcctaaacaaataggagaacaccttctactgaaatccctaacttacgtggtggcaatgcctttttattcagcaagtctgattgaaacagtgcagagtgagataattcgagataatactggcattttggagtgtgttaaagaaggaattggaagagtgataggcatgggagtgcctcatagcaaacgacttcttccgcttctttccttgatcttccctacggtgcttcatggagttcttcattacatcatcagctcagttattcagaagtttgtcctactaattctaaagagaaagacttacaatagccacctagctgagagcactagccctgtgcagagtatgttggatgcttattttccagaacttattgctaactttgctgccagtctttgttctgacgttatactttacccattggaaacagttttgcaccgccttcacattcaaggaacacgcacaataattgacaatacagaccttggctatgaagtgcttccaattaatacacaatatgagggaatgagagactgtatcaataccataaggcaggaggaaggagtgtttggtttttataaagggtttggtgctgttataatacagtacacactgcatgcagctgttttacagattaccaaaattatttactctacacttcttcaaaataacatttgagatttaggttccttcactgagtagtctggaagatataatctggataatttgctatgaagttatgagggatacaagtgaaatactggggaagaaaatggattggaaagtaaaattggtactaaagcccatactgattatcttgactttgttttttaaggcataggtatatattttggatcaaaatccttccaaatttgaaaactcaataaaaataacacttattaaattctagttagtgtagcactcatgctgaagtaaacatgatcgtaggcagaagcaaaattttattataaaatctaaaacaaaactttatagagttgaatctattccatctgacttcaatatttgccaaacgtttattttacctcctagattgatgttggtatagtatccttaatacagtgtagtatattaatgtccttaatacaatcaggaggtttttacctttaagcaaataaattatgtcattattgaaaaagacttaa

SEQ ID NO: 183548 - DNA, 2345 bp, Homo sapiens
  Payload ID: 16161
  Gene Symbol: SLC25A46
  Gene Name: solute carrier family 25, member 46
  Uniprot ID: Q96AG3
  ENST ID: ENST00000504098
  CDS Start-End: 525-1343
acagtttttgaaatagttgtccaggactttaaaattggaagcttttatataaaatgagaatatctttttttgaaaaaattacaacttcaaaaccctgggcccacactctaatgtggcaacaatgaattggagtgaaagcgtaattgtgctttaaacactctacaccttgcaatttgccacagaccccagcagagtccttcattcatttaaattatttacctggcccctatcagaatttgactttgaggtttaaatgaacagcaggttaataaaataaattttttaaaattgttttgagactaaacctaaattgtcagtaattggttatcagtaatcttatttttttatttctatttttttttactttagaacagctgaatagatttgctggatttggtattggacttgcaagtctctttacagaaaatgtattggcacatccttgcattgttctacgccgccaatgtcaggttaattaccatgctcagcattaccatctcactccatttacagtcatcaatattatgtacagtttcaacaaaactcagggacctagagccctgtggaaaggaatgggaagtacatttattgtccagggagtcacacttggagcagaaggcataattagtgaatttacacctttgccaagggaggttttacataaatggagtcctaaacaaataggagaacaccttctactgaaatccctaacttacgtggtggcaatgcctttttattcagcaagtctgattgaaacagtgcagagtgagataattcgagataatactggcattttggagtgtgttaaagaaggaattggaagagtgataggcatgggagtgcctcatagcaaacgacttcttccgcttctttccttgatcttccctacggtgcttcatggagttcttcattacatcatcagctcagttattcagaagtttgtcctactaattctaaagagaaagacttacaatagccacctagctgagagcactagccctgtgcagagtatgttggatgcttattttccagaacttattgctaactttgctgccagtctttgttctgacgttatactttacccattggaaacagttttgcaccgccttcacattcaaggaacacgcacaataattgacaatacagaccttggctatgaagtgcttccaattaatacacaatatgagggaatgagagactgtatcaataccataaggcaggaggaaggagtgtttggtttttataaagggtttggtgctgttataatacagtacacactgcatgcagctgttttacagattaccaaaattatttactctacacttcttcaaaataacatttgagatttaggttccttcactgagtagtctggaagatataatctggataatttgctatgaagttatgagggatacaagtgaaatactggggaagaaaatggattggaaagtaaaattggtactaaagcccatactgattatcttgactttgttttttaaggcataggtatatattttggatcaaaatccttccaaatttgaaaactcaataaaaataacacttattaaattctagttagtgtagcactcatgctgaagtaaacatgatcgtaggcagaagcaaaattttattataaaatctaaaacaaaactttatagagttgaatctattccatctgacttcaatatttgccaaacgtttattttacctcctagattgatgttggtatagtatccttaatacagtgtagtatattaatgtccttaatacaatcaggaggtttttacctttaagcaaataaattatgtcattattgaaaaagacttaagggatgattagacttggcaatctgtaagcaggagtataaatgttttaaattgcattgtccctatgtaactatcttaatggctatatatatgtattttataaagccatttatgtatacacatgtaacttggaatttccttcatccctacacattttctacacttacatcaccttattgcataaaacaaagtcacgcgctttctgcttgaacatcaaaatatcaaaaaccaaggtacccaaaagatacaagtcagagacaacatccttgtccatatccaaacccagtgtttcagtgctagcaacttaatttctcatacatttatagagtttggtttgctttgctagttgtgtgaatcattgggctgtttttagagccactgttaagagagaatataaaataatcatgacaattactactgtttccacatttacaaattgtgtacttaaatgaacctcatttcccttttatttctgaatggcttgtctgagaggaaacaaaattaaaattcatctgggaa

SEQ ID NO: 183549 - DNA, 1596 bp, Homo sapiens
  Payload ID: 16161
  Gene Symbol: SLC25A46
  Gene Name: solute carrier family 25, member 46
  ENST ID: ENST00000509432
  CDS Start-End: 548-1165
ttttaatcctgttctttgtttccatatctattctctttcttttaaccaatcatcttaattttcttcctttaatttctcatgtttactttcataatcagttgtgcctcttgcttctctgccagccccttctatcagcacgtatgaaaacaccttgtatttttttctctcaaaccatcacagttgtttacactgtgttctagaaaagaaaatgttcaccattagaatatatttctcctacagattgaaaaaaattagaagttgattactgttttgaaaattgggctaattccagatgttttaaataacatggcttttgttttatttaagtttatttttatgttttagggaggttttacataaatggagtcctaaacaaataggagaacaccttctactgaaatcattgtgaattggaaatcccccagcttgctggctccctcagtgggacattccagcacattattacttagtgatgttccattcaccttgaaaaccactacttgccaggacctggcccataagggttagcctaacttacgtggtggcaatgcctttttattcagcaagtctgattgaaacagtgcagagtgagataattcgagataatactggcattttggagtgtgttaaagaaggaattggaagagtgataggcatgggagtgcctcatagcaaacgacttcttccgcttctttccttgatcttccctacggtgcttcatggagttcttcattacatcatcagctcagttattcagaagtttgtcctactaattctaaagagaaagacttacaatagccacctagctgagagcactagccctgtgcagagtatgttggatgcttattttccagaacttattgctaactttgctgccagtctttgttctgacgttatactttacccattggaaacagttttgcaccgccttcacattcaaggaacacgcacaataattgacaatacagaccttggctatgaagtgcttccaattaatacacaatatgagggaatgagagactgtatcaataccataaggcaggaggaaggagtgtttggtttttataaagggtttggtgctgttataatacagtacacactgcatgcagctgttttacagattaccaaaattatttactctacacttcttcaaaataacatttgagatttaggttccttcactgagtagtctggaagatataatctggataatttgctatgaagttatgagggatacaagtgaaatactggggaagaaaatggattggaaagtaaaattggtactaaagcccatactgattatcttgactttgttttttaaggcataggtatatattttggatcaaaatccttccaaatttgaaaactcaataaaaataacacttattaaattctagttagtgtagcactcatgctgaagtaaacatgatcgtaggcagaagcaaaattttattataaaatctaaaacaaaactttatagagttgaatctattccatctgacttcaatatttgccaaacgtttattttacctcctagattgatgttggtatagtatccttaatacagtgtagtatattaatgtccttaatacaatc

SEQ ID NO: 183550 - DNA, 1738 bp, Homo sapiens
  Payload ID: 16162
  Gene Symbol: SLC25A47
  Gene Name: solute carrier family 25, member 47
  Uniprot ID: Q6Q0C1
  ENST ID: ENST00000361529
  CDS Start-End: 79-1005
gagctgttgaggccaccctggtggcaccaaagccctctcaggcaggcagacccagggcctccccgccacaccttgttcatggattttgtcgctggagccatcggaggcgtctgcggtgttgctgtgggctaccccctggacacggtgaaggtcaggatccagacggagccaaagtacacaggcatctggcactgcgtccgggatacgtatcaccgagagcgcgtgtggggcttctaccggggcctctcgctgcccgtgtgcacggtgtccctggtatcttccgtgtcttttggcacctaccgccactgcctggcgcacatctgccggctccggtacggcaaccctgacgccaagcccaccaaggccgacatcacgctctcgggatgcgcctccggcctcgtccgcgtgttcctgacgtcgcccactgaggtggccaaagtccgcttgcagacgcagacacaggcgcagaagcagcagcggcggctttcggcctcggggccgttggctgtgccccccatgtgtcctgtgcccccagcctgcccagagcccaagtaccgcgggccactgcactgcctggccacggtagcccgtgaggaggggctgtgcggcctctacaagggcagctcggccctggtcttacgggacggccactcctttgccacctacttcctttcctacgcggtcctctgcgagtggctcagccccgctggccacagccggccagatgtcccgggcgtgctggtggccgggggctgtgcaggagtcctggcctgggctgtggccacccccatggacgtgatcaagtcgagactgcaggcagacgggcagggccagaggcgctaccggggtctcctgcactgtatggtgaccagcgttcgagaggagggaccccgggtccttttcaaggggctggtactcaattgctgccgcgccttccctgtcaacatggtggtcttcgtcgcctatgaggcagtgctgaggctcgcccggggtctgctcacatagccggtccccacgcccagcggcccacccaccagcagctgctggaggtcgtagtggctggaggaggcaaggggtagtgtggctgggttcgggaccccacagggccattgcccaggagaatgaggagcctccctgcagtgttgtcggccgaggcctgagctcgccctgcccagctactgacctcaggtcgaggggcccgccagccatcagccagggttggcctagggtggcaggagccagggaggagtgggcctctttgatgagagcgttgagttgcatggagtcggttgttcatcccagcctccccatggccctcgcctcccatgtctttgaagcacccctccagggagtcaggtgtgtgctcagccaccctctgccccattcctagaccctcacccccaccactgttcctgtgtcttcacgagctgtcccttacaggcaggggcttcccacaggctgggggcctcggggcggggagcatgagctgggctggcaccacgactgagggctcccggctcggcttcttccccacagcaggctgctcagagggggtgctgccgggactgccatgcccacctgagaggggcctggggtggccgtcctcggccggttagggaatttggggtgaggttcctcaggagccctcactctgcctgtggacgctgcacctgccacttaaagaccccaaagactctgttgggaactgttgtcaataaaatgtttctgaggatgttca

SEQ ID NO: 183551 - DNA, 1552 bp, Homo sapiens
  Payload ID: 16162
  Gene Symbol: SLC25A47
  Gene Name: solute carrier family 25, member 47
  ENST ID: ENST00000557052
  CDS Start-End: 573-1061
gttgaggccaccctggtggcaccaaagccctctcaggcaggcagacccagggcctccccgccacaccttgttcatggattttgtcgctggagccatcggaggcgtctgcggtgttgctgtgggctaccccctggacacggtgaagggcctgctggccttgccctaggcctggagccgctcgtgcctgaagcccacttctcctgcaggtcaggatccagacggagccaaagtacacaggcatctggcactgcgtccgggatacgtatcaccgagagcgcgtgtggggcttctaccggggcctctcgctgcccgtgtgcacggtgtccctggtatcttccgtgtcttttggcacctaccgccactgcctggcgcacatctgccggctccggtacggcaaccctgacgccaagcccaccaaggccgacatcacgctctcgggatgcgcctccggcctcgtccgcgtgttcctgacgtcgcccactgaggtggccaaagtccgcttgcagacgcagacacaggcgcagaagcagcagcggcggctttcggcctcggggccgttggctgtgccccccatgtgtcctgtgcccccagcctgcccagagcccaagtaccgcgggccactgcactgcctggccacggtagcccgtgaggaggggctgtgcggcctctacaagggcagctcggccctggtcttacgggacggccactcctttgccacctacttcctttcctacgcggtcctctgcgagtggctcagccccgctggccacagccggccagatgtcccgggcgtgctggtggccgggggctgtgcaggagtcctggcctgggctgtggccacccccatggacgtgatcaagtcgagactgcaggcagacgggcagggccagaggcgctaccggggtctcctgcactgtatggtgaccagcgttcgagaggagggaccccgggtccttttcaaggggctggtactcaattgctgccgcgccttccctgtcaacatggtggtcttcgtcgcctatgaggcagtgctgaggctcgcccggggtctgctcacatagccggtccccacgcccagcggcccacccaccagcagctgctggaggtcgtagtggctggaggaggcaaggggtagtgtggctgggttcgggaccccacagggccattgcccaggagaatgaggagcctccctgcagtgttgtcggccgaggcctgagctcgccctgcccagctactgacctcaggtcgaggggcccgccagccatcagccagggttggcctagggtggcaggagccagggaggagtgggcctctttgatgagagcgttgagttgcatggagtcggttgttcatcccagcctccccatggccctcgcctcccatgtctttgaagcacccctccagggagtcaggtgtgtgctcagccaccctctgccccattcctagaccctcacccccaccactgttcctgtgtcttcacgagctgtcccttacaggcaggggcttcccacaggctgggggcctcggggcggggagcatgagctgggctggc

SEQ ID NO: 183552 - DNA, 1880 bp, Homo sapiens
  Payload ID: 16163
  Gene Symbol: SLC25A48
  Gene Name: solute carrier family 25, member 48
  Uniprot ID: Q6ZT89
  ENST ID: ENST00000274513
  CDS Start-End: 173-1048
agcgcggcagcccgcgcagccggtgactgggggactgggtttggagtaggacctgcggcgtgctcgagactccgacttcggtcttgcggcgcgctcgcgcccgcgggccatgccccactgactctaagtgggcactgccccggctccgggagggcgagaccgagcgccggccatgggaagcttccagctggaagactttgcggcgggctggatcggaggtgcagccagtgtcatcgttggccaccctctggacacagtcaagactcgcctgcaggctggcgttggctacggaaacaccctcagctgcatccgcgtggtgtacaggagggagagtatgttcggcttcttcaagggcatgtccttccccctcgccagcattgccgtctacaactccgtggtgtttggggtcttcagtaacacgcagcggttcctcagccagcaccgctgcggggagccagaggccagtcctccccgcacgctgtcagacctgctcctggccagcatggtggccggcgtggtctctgtcgggctgggagggcccgtggacctcatcaagatccggttgcagatgcagacacaaccgtttcgggacgccaacctcggtttgaagtccagggcagtggctcctgcggagcagccagcataccaggggccagtgcactgcattacaaccattgtgaggaatgagggcctggcggggctataccggggggccagtgccatgctgctgagggatgtcccaggctattgcctctacttcatcccctacgtgttcctgagtgagtggatcacacctgaggcctgcacaggccccagcccctgtgccgtgtggctggcgggcggcatggcaggtaagggcagcagcagctggagccgcacccctgtgcaggccacagcagtgggacagctggggaactgccatgcccttctcagcccagggggagggcaggacacatttaggtactcacccaacaattctttgttaggtacctactctgtccccggccctctcccacctcagtctcatcccttccctatgcagctatgagaatggcagttcccatttgactttcaggcaacagatatattttgaacacatactctgtgtcaggcattactaagctttggaaaggaaatccattatcatggttcagtttattaaatgcaatctttgtaatgtaaggatgccattagttctacaaggtaggaatcggtttccccatttcacagatgagaaaactcaggtccagaaatgttaagtagccaatcccaggtcatacagctggagctgacagtatagcaggactctgcagtcagaaagatttaagttcaaatccacacttcatcattttgtgaccatggacttgttgcttaacctccctgctcagaatcctgcaccacatccttctttcatttaaggtaaaagttgatatctttgcaatggttttccaggccctcagtgatctagctccctgttccccacccacctcacttctactcctctccccttcctcactttctccagtcacactggtctctgctgcaacttgaccatgcctggcccttccctgaccacagggcctttgtacctgctactcaccacctcctgaatttaacaacgtggagaccactggggattttggcaagggccatttgatggagagaagggtgtaaaaacctgatgaagtgggataaagaaagaatgggatgaaggatattggtgcacccaagtatacacaactcttctgagggttctgctatgctgtaatgaggaacagagaaacagagccatagccagaagggcctttggaagccaagagaggatactttttaagaaggctgacatcatgacatgtttgatgtgatgggaaagatctaac

SEQ ID NO: 183553 - DNA, 1111 bp, Homo sapiens
  Payload ID: 16163
  Gene Symbol: SLC25A48
  Gene Name: solute carrier family 25, member 48
  ENST ID: ENST00000433282
  CDS Start-End: 297-1070
gtttggagtaggacctgcggcgtgctcgagactccgacttcggtcttgcggcgcgctcgcgcccgcgggccatgccccactgactctaagtgggcactgccccggctccgggagggcgagaccgagcgccggccatgggaagcttccagctggaagactttgcggcgggctggatcggaggtgcagccagtgtcatcgttggccaccctctggacacagtcaagactcgcctgcaggctggcgttggctacggaaacaccctcagctgcatccgcgtggtgtacaggagggagagtatgttcggcttcttcaagggcatgtccttccccctcgccagcattgccgtctacaactccgtggtgtttggggtcttcagtaacacgcagcggttcctcagccagcaccgctgcggggagccagaggccagtcctccccgcacgctgtcagacctgctcctggccagcatggtggccggcgtggtctctgtcgggctgggagggcccgtggacctcatcaagatccggttgcagatgcagacacaaccgtttcgggacgccaacctcggtttgaagtccagggcagtggctcctgcggagcagccagcataccaggggccagtgcactgcattacaaccattgtgaggaatgagggcctggcggggctataccggggggccagtgccatgctgctgagggatgtcccaggctattgcctctacttcatcccctacgtgttcctgagtgagtggatcacacctgaggcctgcacaggccccagcccctgtgccgtgtggctggcgggcggcatggcaggagcaatttcttgggggacagcgactcctatggatgtcgtgaaaagtcgactccaagctgatggggtttatttaaacaaatataaaggtgtcctggactgtatctcccagagttaccagaaggaaggtcttaaagtgtttttcagaggcatcactgtgaacgcggtgcggggcttccccatgagtgcggccatgttccttgggtacgagctgtcgctgcaggctatccgcggggaccacgcagtgacgagcccataagcgccaggtcagtgtgcttccatcctggccaattgtgcctc

SEQ ID NO: 183554 - DNA, 2062 bp, Homo sapiens
  Payload ID: 16163
  Gene Symbol: SLC25A48
  Gene Name: solute carrier family 25, member 48
  ENST ID: ENST00000425402
  CDS Start-End: 200-415
agccgccctccggcacttggagaggtgagcgcggcagcccgcgcagccggtgactgggggactgggtttggagtaggacctgcggcgtgctcgagactccgacttcggtcttgcggcgcgctcgcgcccgcgggccatgccccactgactctaagtgggcactgccccggctccgggagggcgagaccgagcgccggccatgggaagcttccagctggaagactttgcggcgggctggatcggaggtgcagccagtgtcatcgttggccaccctctggacacagtcaagactcgcctgcaggctggcgttggctacggaaacaccctcagctgcatccgcgtggaggcagcctccaacacgtttccctgggctgtgtctcctctgttcttcctacagctcaagagcttaacttaacacacaccccttcccaccacctgaaaaggtgctgccccaggatagaccagacttccatgtctggtgtccaaggtaatacacagattcatcaccctccgcaggaactatcctgctggctcttgcttgcacgggctccttgctttcttggtgtggctcttagagtcagcagacatgggttcaaagtcagatgtagctactgtgagctggcaggatccaagcaagcagcttcatgtctcagggcctcagtttctcccagaatgatcatcccttccatgaagggcggggcatttgtgggttaatacaaaaagcactccattcaatatgtaacccatagggaagagttaaccatttctcatttgcattagtattatcagtgttgatttttttagcaccggtattaccctggagctctgagtcttttctcacatggctgccccaccccaggccctgccagatgaatctgccccatccttccaggcccagtgcagtccgctgccattcccaggatccatgtccttggcttgcttctcctgtacctctctcaaggggcttctcacacaccaccacgggcaacagctatttctatactgccccttctctgcctcttacagcaagttttctgacgtcctgttttactctctcccccaacttgggaaagatccagagttggatgacccagtgttgaggtaaataactaacatgccacatgagagggacaagatccaaaagctagatcaaagggccacactaaaagacagaactaccagaagtcactgtaaagtccagcccttagtattcaatcatggatcaatcatctctgtagaggatggggcaatccgatttgatgaaggcttctagggaaaaatgcctaagggctttagttttcaaatgcttatttttagagcacctagtatgtggtaggcacagttctaggagctggggacagagcagtaagcaaaagagaaaaagcccattctctgatcagctaatgttggcagtgagcgaacagtgagacctgtcctaaggttgcattaatagaagtacagtgggtagaataagggaggtggaggcctctgccctgaccagattgcagctggaatgttgcatccacctttggtcactacccattaagcaagaccctagtggtgccctgggaatgaagagcaggatatcatagcatgtgaggagaagctggaccctggttagtataagaagatgtgatacggaggaaacttgagttctgtctttatgttttaaggatggagaaactcaaagctttcctattctcattattttaaattccttttttaaatttttaacaagagctgctctgacagaagggtgaagcccagccctggtgcggcctcaattgtcttttgtatcttttttttcttcttcttttttttttttttttttttttttttttttagcagaaatacagtttgtgattcagccaatgagtatagagggatataaaagtgtttcaagtggatgattcatttttatttgagatgtttttgtctacttccccaaatattaatgtgtcataattcgtaaaaagtctgtagaggcaaaatatattgctgatattatttcctctgaaaattactgtgctcttttaaaaaaatgaagtcctggaagtcagct

SEQ ID NO: 183555 - DNA, 1148 bp, Homo sapiens
  Payload ID: 16163
  Gene Symbol: SLC25A48
  Gene Name: solute carrier family 25, member 48
  Uniprot ID: Q6ZT89
  ENST ID: ENST00000412661
  CDS Start-End: 122-595
cctgcggcgtgctcgagactccgacttcggtcttgcggcgcgctcgcgcccgcgggccatgccccactgactctaagtgggcactgccccggctccgggagggcgagaccgagcgccggccatgggaagcttccagctggaagactttgcggcgggctggatcggaggtgcagccagtgtcatcgttggccaccctctggacacagtcaagactcgcctgcaggctggcgttggctacggaaacaccctcagctgcatccgcgtggtgtacaggagggagagtatgttcggcttcttcaagggcatgtccttccccctcgccagcattgccgtctacaactccgtggtgtttggggtcttcagtaacacgcagcggttcctcagccagcaccgctgcggggagccagaggccagtcctccccgcacgctgtcagacctgctcctggccagcatggtggccggcgtggtctctgtcgggctgggagggcccgtggacctcatcaagatccggttgcagatgcagacacaaccgtttcgggacggaggtgaacacaggatgactacagtgttccctgggcctcatctctgcatgtgaagccctgagagctgcagatgtttggcctttggacctccaagtggacatcaattagcaagcgtgggctaggatggtgcagacactgacgtggcccttctgatgcctgggatgcctcatgagtcactgattcaagccctccaaggttctgatccccaatgcccactctgctaggctggcatcaaagagctttccaagaaatgtttggtccagctgagaagtcctgaccatgagcaccagggagccagaaaccacccagagaaacgttgcttcactcctctgtctgaggatggggaggggccagtgagctctgggctcagccactccctccagtctcaagtaacacgtccccgtgcctccagtctcctctcagcaccgaccaggtttttccccgctcctgcacccgtggatcctgaggacagcggtagcgccttcctcaccgcacgctgagtccagtgcgtgctcctcactgtgcacttattagtgtctgttgagtgattaaatcacatcctcaggtctgcagcaaataaatgaaagtttctttattttttattaa

SEQ ID NO: 183556 - DNA, 587 bp, Homo sapiens
  Payload ID: 16163
  Gene Symbol: SLC25A48
  Gene Name: solute carrier family 25, member 48
  ENST ID: ENST00000462340
  CDS Start-End: 43-246
gagcttctgatttgctcattaagttaggatccgtgggacttgatgaggtgcagccagtgtcatcgttggccaccctctggacacagtcaagactcgcctgcaggctggcgttggctacggaaacaccctcagctgcatccgcgtggtgtacaggagggagagtatgttcggcttcttcaagggcatgtccttccccctcgccagcattgccgtctacaactccgtggtgtttggggtcttcagtaacacgcagcggttcctcagccagcaccgctgcggggagccagaggccagtcctccccgcacgctgtcagacctgctcctggccagcatggtggccggcgtggtctctgtcgggctgggagggcccgtggacctcatcaagatccggttgcagatgcagacacaaccgtttcgggacgccaacctcggtttgaagtccagggcagtggctcctgcggagcagccagcataccaggggccagtgcactgcattacaaccattgtgaggaatgagggcctggcggggctataccggggggccagtgccatgctgctgagggatgtcccaggctattgcctctact

SEQ ID NO: 183557 - DNA, 1130 bp, Homo sapiens
  Payload ID: 16164
  Gene Symbol: SLC25A51
  Gene Name: solute carrier family 25, member 51
  Uniprot ID: Q9H1U9
  ENST ID: ENST00000242275
  CDS Start-End: 231-1124
ggtcacagtctgcgcctgcgcgggccccggctcgctagccgtcctgcgggacgccggcgctgatgggaaatccagttatcaaaattgactcaagaagagagaacctaacagaacaataacaatggaagaaattgggaacattatcacaaagctatcatcctgccaaactccaggctcagatgtcacaggttaaaaaaagtccttcatgaaaaagaaagatcttaagcagcatgatggattcagaagctcatgaaaagaggccaccaatactaacatcttcaaaacaagatatatcacctcatattacaaatgttggtgagatgaagcattacttgtgtggctgctgtgcagccttcaacaatgtcgcaatcacatttcccattcagaaggtcctctttcgacaacagctgtatggcatcaaaacccgggatgcaatacttcagttgagaagggatggatttcgaaatttgtatcgtggaatccttcccccattgatgcagaagacaactacgcttgcacttatgtttggtctgtatgaggatttatcctgccttctccacaagcatgtcagtgctccagagtttgcaaccagtggcgtggcggcagtgcttgcagggacaacagaagcaattttcactccactggaaagagttcagacattgcttcaagaccacaagcatcatgacaaatttaccaacacttaccaggctttcaaggcactgaaatgtcatggaattggagagtattatcgaggcttggtgcccattcttttccggaatggactcagcaatgtcttgtttttcggccttcgaggtcccattaaggagcatctgcctaccgcaacgactcacagtgctcatctggtcaatgattttatctgtggaggtctattgggtgccatgttgggattcttgttttttccaattaatgttgtaaaaactcgcatacagtctcagattggtggggaatttcagtctttccccaaggttttccaaaaaatctggctggaacgggacagaaaactgataaatcttttcagaggtgcccatctgaattaccatcggtccctcatctcttggggcataatcaatgcaacttatgagttcttgttaaaggttatatgaaaaaac

SEQ ID NO: 183558 - DNA, 1691 bp, Homo sapiens
  Payload ID: 16164
  Gene Symbol: SLC25A51
  Gene Name: solute carrier family 25, member 51
  Uniprot ID: Q9H1U9
  ENST ID: ENST00000377716
  CDS Start-End: 745-1638
gccccggctcgctagccgtcctgcgggacgccggcgctgatgggtgagtgtgggacgagcgtggggaagcaccgggctttcttcgcatgaggttggagggaggggaaacgcgctgaagggcccgctggggcaggctgccgccctgggggcccatccctgtcttctgcgcgctccggctgccctggcccggtccctgcgggccccacccaggcggcgcgggcggaatcagttctgagcctcctcggctccgggctcccccgcctgccgcgggtgtttgtccggctgctgggcgacctttcccgcgaaggcgctgtcccttcattcgggcgcgccctgggctggggaggcacctccctggtgcacaggaaccgcaggggcggggaggagccgggagctgcctgcgcccgggggacagcggggatggcaccgcgcaagggcctctgcgtcccgggagactgggatttcggcctcacctcgggacccctgactgtgaagtgtcagaaacggaagaggacttagtgatcttgtccaaccccctccccgcctttcacaggttggggaaatggacgcctggagaacggaaatccagttatcaaaattgactcaagaagagagaacctaacagaacaataacaatggaagaaattgggaacattatcacaaagctatcatcctgccaaactccaggctcagatgtcacaggttaaaaaaagtccttcatgaaaaagaaagatcttaagcagcatgatggattcagaagctcatgaaaagaggccaccaatactaacatcttcaaaacaagatatatcacctcatattacaaatgttggtgagatgaagcattacttgtgtggctgctgtgcagccttcaacaatgtcgcaatcacatttcccattcagaaggtcctctttcgacaacagctgtatggcatcaaaacccgggatgcaatacttcagttgagaagggatggatttcgaaatttgtatcgtggaatccttcccccattgatgcagaagacaactacgcttgcacttatgtttggtctgtatgaggatttatcctgccttctccacaagcatgtcagtgctccagagtttgcaaccagtggcgtggcggcagtgcttgcagggacaacagaagcaattttcactccactggaaagagttcagacattgcttcaagaccacaagcatcatgacaaatttaccaacacttaccaggctttcaaggcactgaaatgtcatggaattggagagtattatcgaggcttggtgcccattcttttccggaatggactcagcaatgtcttgtttttcggccttcgaggtcccattaaggagcatctgcctaccgcaacgactcacagtgctcatctggtcaatgattttatctgtggaggtctattgggtgccatgttgggattcttgttttttccaattaatgttgtaaaaactcgcatacagtctcagattggtggggaatttcagtctttccccaaggttttccaaaaaatctggctggaacgggacagaaaactgataaatcttttcagaggtgcccatctgaattaccatcggtccctcatctcttggggcataatcaatgcaacttatgagttcttgttaaaggttatatgaaaaaaccatcagttaagtgccatttatcaactgaatagaccttctaagaagaa

SEQ ID NO: 183559 - DNA, 1538 bp, Homo sapiens
  Payload ID: 16164
  Gene Symbol: SLC25A51
  Gene Name: solute carrier family 25, member 51
  Uniprot ID: Q9H1U9
  ENST ID: ENST00000380590
  CDS Start-End: 45-938
aggttaaaaaaagtccttcatgaaaaagaaagatcttaagcagcatgatggattcagaagctcatgaaaagaggccaccaatactaacatcttcaaaacaagatatatcacctcatattacaaatgttggtgagatgaagcattacttgtgtggctgctgtgcagccttcaacaatgtcgcaatcacatttcccattcagaaggtcctctttcgacaacagctgtatggcatcaaaacccgggatgcaatacttcagttgagaagggatggatttcgaaatttgtatcgtggaatccttcccccattgatgcagaagacaactacgcttgcacttatgtttggtctgtatgaggatttatcctgccttctccacaagcatgtcagtgctccagagtttgcaaccagtggcgtggcggcagtgcttgcagggacaacagaagcaattttcactccactggaaagagttcagacattgcttcaagaccacaagcatcatgacaaatttaccaacacttaccaggctttcaaggcactgaaatgtcatggaattggagagtattatcgaggcttggtgcccattcttttccggaatggactcagcaatgtcttgtttttcggccttcgaggtcccattaaggagcatctgcctaccgcaacgactcacagtgctcatctggtcaatgattttatctgtggaggtctattgggtgccatgttgggattcttgttttttccaattaatgttgtaaaaactcgcatacagtctcagattggtggggaatttcagtctttccccaaggttttccaaaaaatctggctggaacgggacagaaaactgataaatcttttcagaggtgcccatctgaattaccatcggtccctcatctcttggggcataatcaatgcaacttatgagttcttgttaaaggttatatgaaaaaaccatcagttaagtgccatttatcaactgaatagaccttctaagaagaatgcagtttggcctcttttttttttttttttaaaggaaatcccaatcttattatggaaagccatcaactgggtgtggggagtaggtcagagggttagtgaaagtccaggggatttctcctccaagtcctaccacacaaaggaaagtctcaagcctctattcaccccttctcaatcctcacaaaatagggggttgttcaatattgtcttcaatgataaaaactttgtggttaaaagtttctccttaggactagtgacaaagttaggcttatacttttttttttttttttgaggcagagtcttgctctgttgcccaggctggagtgcagtggcacgatcttggctcactgcaacctccgcctccagggttcaagcaattctcctgccttagcctcctaagtagtcctagctactcgggaggctgaggcaggagaatctctttcttaattggccaaatataagttggtgtcgtaactccaggccacagtgagttatgggcaaagcttttttccttaagcatcaacaaaataggataaaaggttccaatagg

SEQ ID NO: 183560 - DNA, 1319 bp, Homo sapiens
  Payload ID: 16165
  Gene Symbol: SLC25A52
  Gene Name: solute carrier family 25, member 52
  ENST ID: ENST00000269205
  CDS Start-End: 190-1113
gcagtcctgcggggcgccggcggcgatgggttggggaaatggacgcctggagaacggaaatccagttatcaaaatggactcgggaagagagaacctaacagaacaataacaatggaagaaattgggaacattatcacaaagctatcatcctgccaaactccaggctcagatgatgtcacaggttaaaaaatgcccttcatgagaaagatcttaagcaacatgatagattcagaagctcatgaaaagaggccaccaatacttacatcttcaaaacaagatatatcacctcatattacaaatgttggtgaaatgaagcattacttgtgtggctgctgtgcagccttcaacaacgtcgcaatcacatatcccattcagaaggtcctctttcggcaacagctgtatggcatcaaaacccgggatgcagtacttcagttgagaagggatggatttcgaaatttgtatcgtggaatccttcccccattgatgcagaagacaactacgcttgcacttatgtttggtctgtatgaggatttatcctgccttctccggaagcatgtccgtgctccagagtttgcaacccatggcgtggcggcagtgcttgcagggacagcagaagcaattttcactccactggaaagagttcagacattgcttcaaaaccacaagcatcatgacaaatttaccaacacttatcaggctttcaaggcactgaaatgtcatggaattggagagtattatcgaggcttggtgcccattcttttccggaatggactcagcaatgtcttgtttttcggccttcgaggtcccattaaggagcatctgcctaccgcaacgactcacagtgctcatttggtcaatgattttatcggtggaggtctattgggtgccatgttgggattcttgtgttttccaattaatgttgtaaaaactcgcctacagtctcagattggtggggaatttcagtctttccccaaggttttccaaaaaatctggctggaacgggacagaaaactgataaatcttttcagaggtgcccatctgaattaccatcggtccctcatctcttggggcataatcaatgcaacttatgagttcttgttaaaatttatatgaaaaaaaaccatcagttaagtgccatttatcaactgaatagaccttctaagaagaatgcagtttggcctctttcttaattggccaaatacaagttcgtgtcataactccaggccacagtgagttacgggcaaagctgttttccttaagcatcaacaaaacagaataaaaggttccaataggaaaatgtaagggtttttttttgtttt

SEQ ID NO: 183561 - DNA, 6225 bp, Homo sapiens
  Payload ID: 16166
  Gene Symbol: SLC25A53
  Gene Name: solute carrier family 25, member 53
  Uniprot ID: Q5H9E4
  ENST ID: ENST00000594199
  CDS Start-End: 182-1105
ggaagcaaagaggattgtgggagctccgttgtgcgtcgcttaagtgagggcggcggatgggcgaaggtccggtgactgcgactgtcgctgctttctgaggccacaggaaaggggccgtcggtcgccgccatgacagcgagcgaggcggagtttcttccatctgcacccagttgtcttcagcatgggggagcagaaccactctcccgggaaggagcttcagcacaggacgcgagcagaggctccaggaaagaaaagctggcattcccaggcctatgcccttggggccgtttccaactttatgtctacttttctgacctttcctatctataaggttgtgttccggcaacagatccatgccatggcagtgtcagaggctgtgagacagctttggcatgaaggtcctcaatacttctaccggggaatctaccctcctcttctctccaagacgttgcaagggactcttctgtttgggacttatgatagcctgctgtgctttctctctcctgttgggccacacaccctgggacaccgctgggctgccgggctcatgtctggcgtggtggaggccgtggcactcagcccctttgaaagggtgcaaaatgtgctccaggatggtcgcaagcaagctcgcttccccagcaccttcagcattctcaaggaattcaattcttatgggctttgggggcggctgtcactgggctactatcgtggtttctggcctgtcctggccaggaacagcctggggagtgctctatatttttctttcaaggaccccatccaggatggcctggcagagcaaggcctgccccactgggttcctgccttggtgtctggtagtgtcaatggaacaatcacctgcctagttctgtatcctctgattgtgctggttgctaatatgcagtcccatattggatggcagaacatgccaagcctgtgggcctctgcccaggatgtatggaacactcggggccgaaagctgctcctgatctaccgtggaggctccctagtcatcctaaggtccagtgtgacatggggcctcactacggcaatccatgacttcctgcagaggaagtcgcactccaggaaagagctgaagactgactagctgcagaaagtgtggcatggcagctttgttattctaaatcttccctggttggttctatatagcttacttctttggctaggttgcctaatacagccatcctttagcatctataaactcattgcatgggagaagttcccaactaccaacctgttgagcaaggacaaagcccaaaagtattccttagtcaaaaagaaacgttcaccccagtctctccacagtttcagtagcctcagagccaggaggcctttaaataacatgtaacccagattaagtgtcattcctttaaggaattccttggcaataaacagaaacttaaaaagatgaccttacttaggcactctgagctctgggacccctctaggtgtcctccagaccaaactgagtggaactccaatttcaaagaactatgcttgactcttaggatgggaattccataaaacttctcagatggctacattttcatgatattgttcactgcctctaccaccacctctcacttctcaaggctgtgggtcctactttcagggtagcagctgtggctggaaatcctaaattaggcttgcatgaactcgtcaggtgccacaagaactagtggggctggagatgggagtgagaagaggcgtggcccatggatggaaagaataaaaactttgaaagaaaagatttaattacatgcaaaatagaaacatttgctatagtctgcttggtgttatctgctaggacatttctgagagcaaggtgataacattgcctagaaaccgtttgagtttccctaagaaacctggaagtgaagtgaccatatctcttcacagaaaattgcatattttgttgatgtggttaaatgtagttactatgacataaagatcagaaatcttagcctgtcattcagagccattcaaaatatggtcatcatataactttcaacatattgtcactccacttacataaaccccaaacactagccataatgaactattgttctctccccagacattccatgaactttcccatggccatactctggcccacactattctttccacctgcagtgctccttcttcacatgccagtctaccaaaatccttccagttccttgaagcccagctcagaggtcaccttctctatggagttcttgattttccccaactgaatgtgacattagtctctgtgatgcccctttcttttttttttttttgagacggagtttcgctcttgttgcccaggctggagtgccaatggtgtgatctcagctcactgcaacctccacctcccggattcaagtgattctcctgcctcagcctcccgagtagctggaattacaggcgcccaccaccatgcctggctaattttgtatttttagtagagatggggtctctccatgttggtcaggctggtctcgaactcccaacctcatcaggtgatccacccacctcggtctcccaaagtgctgggattacaggcgtgagccaccgcgcccagcctctgtgatgcccctttctaacagcacttcatacagggtactgattccattatgtcactaatctcatgtgaccctttgttcttgtattcttcaatacctcctactagactgtaaaactcattgaaagcagggatttttgtatgcattttaaaatcttccattgtgcctaggtgctcaataacgttggtcaaattactgagttgattatcaagctgtgatatggtatatcctcagggtgctgtcccttgtacatgacgataaagttattgactcactgtcagcaagacacgtgcctttgggctgtgtttttgctttcttttaataattgatttagttttgtgctaatgataatgatgctgctactgataataataataacaataataaaaattactttcaactggcacatttgatgagtttatattactgatggcatgtttgctattagcaccagttcaggaactgaaatttcacaaacagaatcacactgtacaactgtaccatttgtttcaactctggaattttgaggatttccaagatgacatgtgttatagtttccccctacagatatcttagtaatgccctcctcttgcatctccttactgaaccaaatttgtcctgtatttgtcttacttggttgtagatttagcagtgagaacttctcactgaatgccacagaaattaaagacatggttgttggaggtatgatgtcagagagcatttgccaccaaggttggcagaaaatggctggtccaggagagctgaagatgagcttccacatctgcagatcgggatgtgttgggacagtactcaacttgtggattcaaggaagtatgaacacagagtctgcataaggaaaggaaaaagatgcattcatctcccaagtacactggtgatttccacttatgtcattctgtccatccatgtccctttcttcattttaacttcttatttaaaaataatttcaaacatttaaaaatgttgcaagcataaataaagcttaaagaacacccatgtcccctttaccctaattcccctattattaatgtttctccccatttgctttattatttaagtgtgcactctgtctatacacacacaggatattttttccctgaactatctgagagttgcatacatcagttttcaatattcctagattcaatgtttgtagatccaaattattttttaagagaccgtgttttatctctgacaatgggacagttattacagaatataataaaatgaaaactcacacaatatatgtgatattgtgaaatatatacttggtctttgatcctgtttcttggcatacaactcctaaaatccttagaatttccaaagtgatatctttttgtatgctaataattgactgatggctggcagcctctggttgcttcaggatgggaactagtcaccaggaagaccaaggcaccattagagggttgggacttaacagcctcattcccgacctccagggaggggagagggatggaaggttaagttgatcaccagtggccaatgatttaatcaatcatgcctacgcaatgaagcttccataaaaaccccaaagcactgggtttggagagcttccagatagctgaacatgtggaggttcctggagggtggtgacccagggagggcacagaagctctgagccccttccgcagtacctcaccctatgcatctcttcatctctatcctttgatatatcctttataataaagtggtaaacgttaagtatttccccaagttctgtgaccctttctggcaaattaaacccaaagaaggggtcatgtgaactcaaacttgaagcccatctgtcagaagttctggaggcttggatttgcgactggtgtctgaagggcctgggaacagtcttgtgaaacctagtcctcagcttgtgggatatgacgctatctccaggtagattgtgtcagaatggaattggagtacacccagctggtgttcgctgcagaactgattgctcacttagtgtgtgggaaaactccacacatctggacatggaaatattctgtgctgattgccgtggtgtaagagcaatgcaaaaagtttgggtattttcccctcggagtatattttaaagctaaattgctaataattgcttaaatttactatatttgcctttataaaaactttatgtatgttgaagcttgaagctatgcaattataatataaacatggatttacaactaaagcatgttataatttaaataattgagtttttcaaatcggttcatatgaaatcctaggcaatattgtaaaattatacagacctgtcaactttttccacttaaaagttgtgagcaaaatttaagggcatagtcgttttcaagtaattttaaatgtcaatgttaatatttagtttagtgatgttaatggagctatgttttctgatattaaaaatgagttttaggagttgagaccaataaaataaggaggtaataaatatctatatctgtttaaacacataaaatatacaatttaacactaaaattacttggtataaaaagtcaaaaaaaagaataaaaagccatcatacaacacaatatatgcgtgatatatatttttctctaaatataaactacatcagcttttataaagctcaagttgaaataataacgttttatgacaaatcattatatggtatattctgacttaattttgcatttacaatttatttttaaacactaaatagcattataattttactgggataactatatatagtgtagtatattaaagttaataaaatgacgttgcatatgagagaaaaagcataataaatcagaaacaatataaaaagctttcagaaaagataaaaatattgtatttctctagtctgttcactctccagtgtctctggttctttcatatcatcttcctttcctcaaatcttttaatactccctccctcatcatttccaactagtgaccctactttctatttcattaagaaaacagatacattcagaagagaactgccagtttaaagaacatttacaaagccatcacccatgtaataaccagccagagcaagaaatagagccctttaataacctactcttctccccccaccactgatgacaccgctccctccatcttaggtgtagcccccatgctgacttttgtaataataatttctttgcttttgtttataagttttcttccttataagcatctctaaacaacagttttgttttacagatgttcaaacattaaatgctttttagacttggaattgtgactatcttgtttcactccacattgcttgtgagactcattgatattgcagatagctgtagttgatccatttttattgttgtacagtttaccattgtataaatataccatgatttattcatgataactttgaggaacattctggttgtttgcaggttttatttttacagttcattagttttattgatgtataataattgtatatgtttatggggtatatgtgatattttgatacatgtgtacaatgtgtaatgattaaatcaaggtaattgggatatccatcagctcaaacatttatcatttctttgcattgggaacattccaaatcttctcttctagctattttgaaatacacaataaattgaatactgtggtca

SEQ ID NO: 183562 - DNA, 3660 bp, Homo sapiens
  Payload ID: 16167
  Gene Symbol: SLC26A1
  Gene Name: solute carrier family 26 (anion exchanger), member 1
  Uniprot ID: Q9H2B4
  ENST ID: ENST00000361661
  CDS Start-End: 379-2484
accactgcctgcaggttggcgccaccacccccactctccccgctgctcgcgggagccagagggccctgcggtcctcggtggtcttgccagcccctcgtcatcccagggccctccgcgcctgtgaggactccctcagcgtgcaaacagcaggctcagcccaggctccagggtgtcctgggcacctggtgtcctgggagcaaagtctttgcctaacgtcgctgagaagaatgtttaaagtgaaagtacattggagtctgcaaacaggacagacccgaggcctcacgtgggaccagtcaggcctctaagcaccgcctccctaacgccacggtgttttccgagatcaagggaaaggtcggccacgggacctgacgcaacaggatggacgagtcccctgagcctctgcagcagggcagagggccggtgccggtccgacggcagcgcccagcaccccggggtctgcgtgagatgctgaaggccaggctgtggtgcagctgctcgtgcagtgtgctgtgcgtccgggcgctggtgcaggacctgctccccgccacgcgctggctgcgtcagtaccgcccgcgggagtacctggcaggcgacgtcatgtctgggctggtcatcggcatcatcctggtgccgcaggccatcgcctactcattgctggccgggctgcagcccatctacagcctctatacgtccttcttcgccaacctcatctacttcctcatgggcacctcacggcatgtctccgtgggcatcttcagcctgctttgcctcatggtggggcaggtggtggaccgggagctccagctggccggctttgacccctcccaggacggcctgcagcccggagccaacagcagcaccctcaacggctcggctgccatgctggactgcgggcgtgactgctacgccatccgtgtcgccaccgccctcacgctgatgaccgggctttaccaggtcctcatgggcgtcctccggctgggcttcgtgtccgcctacctctcacagccactgctcgatggctttgccatgggggcctccgtgaccatcctgacctcgcagctcaaacacctgctgggcgtgcggatcccgcggcaccaggggcccggcatggtggtcctcacatggctgagcctgctgcgcggcgccgggcaggccaacgtgtgcgacgtggtcaccagcacggtgtgcctggcggtgctgctagccgcgaaggagctctcagaccgctaccgacaccgcctgagggtgccgctgcccacggagctgctggtcatcgtggtggccacactcgtgtcgcacttcgggcagctccacaagcgctttggctcgagcgtggctggcgacatccccacgggtttcatgccccctcaggtcccagagcccaggctgatgcagcgtgtggctttggatgccgtggccctggccctcgtggctgccgccttctccatctcgctggcggagatgttcgcccgcagtcacggctactctgtgcgtgccaaccaggagctgctggctgtgggctgctgcaacgtgctacccgccttcctccactgcttcgccaccagcgccgccctggccaagagcctggtgaagacagccactggctgccggacacagctgtccagcgtggtcagcgccaccgtggtgctgctggtgctgctggcgctggcaccgctgttccacgacctacagcgaagcgtgctggcctgcgtcatcgtggtcagcctgcggggggccctgcgcaaggtgtgggacctcccgcggctgtggcggatgagcccggctgacgcgctggtctgggcaggcaccgcggccacctgtatgctggtcagcacagaggccgggctgctggctggcgtcatcctctcgctgctcagcctggccggccgcacccaacgcccacgcaccgccctgctggcccgcatcggggacacggccttctacgaggatgccacagagttcgagggcctcgtccctgagcccggcgtgcgggtgttccgctttggggggccgctgtactatgccaacaaggacttcttcctgcagtcactctacagcctcacggggctggacgcagggtgcatggctgccaggaggaaggaggggggctcagagacgggggtcggtgagggaggccctgcccagggcgaggacctgggcccggttagcaccagggctgcgctggtgcccgcagcggccggcttccacacagtggtcatcgactgcgccccgctgctgttcctagacgcagccggtgtgagcacgctgcaggacctgcgccgagactacggggccctgggcatcagcctgctgctagcctgctgcagcccgcctgtgagagacattctgagcagaggaggcttcctcggggagggccccggggacacggctgaggaggagcagctgttcctcagtgtgcacgatgccgtgcagacagcacgagcccgccacagggagctggaggccaccgatgcccatctgtagcagggccaggcctgcccagcagcctctgctccctcctggggacccacagcagacgtctgcaagccactgctgagacccttcccagggaggagccacccaagagctgcactcttgtgccacagctgccctggggaaaccggggaaccccaactgggaaaggaggccctctgatcacacgcaggacccaaacactcagaaatcaagaacctctgcctccgagacaggctggcccacagtgctggctgggccccaatgcaccgtccctcagctcaggagggatgggcctgacctgacgctcagggttgacatcttatttgaacaagggtcccccgccatcatgcagcctccaaggtgccaagaggactccctatgcccaggcctgcccggtgcccaccctgctggtaggagccagcggctctggccaagtgcacgagggtctctgtgtttccagaaggccccacacacccaagtgcccctcacacctcgtgcctccccctcacagggtggccacctgcaccagcgtcagggcccagggtgctgtgaccgatgagacctcagctcagccctcaggtgcagtggccctacccagcctggccagcagacacacacagggatgctcacgggtgcaccaggagccaggtgcggcgcagccaaccctgagcctgcagggagacctgcaggaagcccaccgtgccccatgcaggggctccctccagcacacagccctcaccccagcacagccagcaaggacacgctctccccaacagggtgcttcggcgggaggtgggggaacaaggggtcttccgagcagcccccagccctcccctcccatctgtgcctctgtaaggggctctgggacgcccagaccctgcccgccgcccacctggtggtgacaagctccagcagccagtgggtccggacctgcttgatgccgcggtgagggacggcgcccacataggcgaggttgagctgctggtcccagctgaggacgtactggtcagcctggctgtgtggcagcggggggctggggacaacaaaggggcggctcagtcccgagcctcagcatggctggcagcgcggctgacacacacgttcaagcccaggactgcccgggcgcaggatccaggcgctgcccgtgcgttcagtgactaataaaatgacccttagggccaggaa

SEQ ID NO: 183563 - DNA, 3109 bp, Homo sapiens
  Payload ID: 16167
  Gene Symbol: SLC26A1
  Gene Name: solute carrier family 26 (anion exchanger), member 1
  Uniprot ID: Q9H2B4
  ENST ID: ENST00000398516
  CDS Start-End: 168-2273
acagaccactgcctgcaggttggcgccaccacccccactctccccgctgctcgcgggagccagagggccctgcggtcctcggtggtcttgccagcccctcgtcatcccagggccctccgcgcctgtgaggactccctcaggtcggccacgggacctgacgcaacaggatggacgagtcccctgagcctctgcagcagggcagagggccggtgccggtccgacggcagcgcccagcaccccggggtctgcgtgagatgctgaaggccaggctgtggtgcagctgctcgtgcagtgtgctgtgcgtccgggcgctggtgcaggacctgctccccgccacgcgctggctgcgtcagtaccgcccgcgggagtacctggcaggcgacgtcatgtctgggctggtcatcggcatcatcctggtgccgcaggccatcgcctactcattgctggccgggctgcagcccatctacagcctctatacgtccttcttcgccaacctcatctacttcctcatgggcacctcacggcatgtctccgtgggcatcttcagcctgctttgcctcatggtggggcaggtggtggaccgggagctccagctggccggctttgacccctcccaggacggcctgcagcccggagccaacagcagcaccctcaacggctcggctgccatgctggactgcgggcgtgactgctacgccatccgtgtcgccaccgccctcacgctgatgaccgggctttaccaggtcctcatgggcgtcctccggctgggcttcgtgtccgcctacctctcacagccactgctcgatggctttgccatgggggcctccgtgaccatcctgacctcgcagctcaaacacctgctgggcgtgcggatcccgcggcaccaggggcccggcatggtggtcctcacatggctgagcctgctgcgcggcgccgggcaggccaacgtgtgcgacgtggtcaccagcacggtgtgcctggcggtgctgctagccgcgaaggagctctcagaccgctaccgacaccgcctgagggtgccgctgcccacggagctgctggtcatcgtggtggccacactcgtgtcgcacttcgggcagctccacaagcgctttggctcgagcgtggctggcgacatccccacgggtttcatgccccctcaggtcccagagcccaggctgatgcagcgtgtggctttggatgccgtggccctggccctcgtggctgccgccttctccatctcgctggcggagatgttcgcccgcagtcacggctactctgtgcgtgccaaccaggagctgctggctgtgggctgctgcaacgtgctacccgccttcctccactgcttcgccaccagcgccgccctggccaagagcctggtgaagacagccactggctgccggacacagctgtccagcgtggtcagcgccaccgtggtgctgctggtgctgctggcgctggcaccgctgttccacgacctacagcgaagcgtgctggcctgcgtcatcgtggtcagcctgcggggggccctgcgcaaggtgtgggacctcccgcggctgtggcggatgagcccggctgacgcgctggtctgggcaggcaccgcggccacctgtatgctggtcagcacagaggccgggctgctggctggcgtcatcctctcgctgctcagcctggccggccgcacccaacgcccacgcaccgccctgctggcccgcatcggggacacggccttctacgaggatgccacagagttcgagggcctcgtccctgagcccggcgtgcgggtgttccgctttggggggccgctgtactatgccaacaaggacttcttcctgcagtcactctacagcctcacggggctggacgcagggtgcatggctgccaggaggaaggaggggggctcagagacgggggtcggtgagggaggccctgcccagggcgaggacctgggcccggttagcaccagggctgcgctggtgcccgcagcggccggcttccacacagtggtcatcgactgcgccccgctgctgttcctagacgcagccggtgtgagcacgctgcaggacctgcgccgagactacggggccctgggcatcagcctgctgctagcctgctgcagcccgcctgtgagagacattctgagcagaggaggcttcctcggggagggccccggggacacggctgaggaggagcagctgttcctcagtgtgcacgatgccgtgcagacagcacgagcccgccacagggagctggaggccaccgatgcccatctgtagcagggccaggcctgcccagcagcctctgctccctcctggggacccacagcagacgtctgcaagccactgctgagacccttcccagggaggagccacccaagagctgcactcttgtgccacagctgccctggggaaaccggggaaccccaactgggaaaggaggccctctgatcacacgcaggacccaaacactcagaaatcaagaacctctgcctccgagacaggctggcccacagtgctggctgggccccaatgcaccgtccctcagctcaggagggatgggcctgacctgacgctcagggttgacatcttatttgaacaagggtcccccgccatcatgcagcctccaaggtgccaagaggactccctatgcccaggcctgcccggtgcccaccctgctggtaggagccagcggctctggccaagtgcacgagggtctctgtgtttccagaaggccccacacacccaagtgcccctcacacctcgtgcctccccctcacagggtggccacctgcaccagcgtcagggcccagggtgctgtgaccgatgagacctcagctcagccctcaggtgcagtggccctacccagcctggccagcagacacacacagggatgctcacgggtgcaccaggagccaggtgcggcgcagccaaccctgagcctgcagggagacctgcaggaagcccaccgtgccccatgcaggggctccctccagcacacagccctcaccccagcacagccagcaaggacacgctctccccaacagggtgcttcggcgggaggtgggggaacaaggggtcttccgagcagcccccagccctcccctcccatctgt

SEQ ID NO: 183564 - DNA, 1111 bp, Homo sapiens
  Payload ID: 16167
  Gene Symbol: SLC26A1
  Gene Name: solute carrier family 26 (anion exchanger), member 1
  Uniprot ID: Q9H2B4
  ENST ID: ENST00000398520
  CDS Start-End: 104-778
gggccctgcggtcctcggtggtcttgccagcccctcgtcatcccagggccctccgcgcctgtgaggactccctcaggtcggccacgggacctgacgcaacaggatggacgagtcccctgagcctctgcagcagggcagagggccggtgccggtccgacggcagcgcccagcaccccggggtctgcgtgagatgctgaaggccaggctgtggtgcagctgctcgtgcagtgtgctgtgcgtccgggcgctggtgcaggacctgctccccgccacgcgctggctgcgtcagtaccgcccgcgggagtacctggcaggcgacgtcatgtctgggctggtcatcggcatcatcctggtgccgcaggccatcgcctactcattgctggccgggctgcagcccatctacagcctctatacgtccttcttcgccaacctcatctacttcctcatgggcacctcacggcatgtctccgtgggcatcttcagcctgctttgcctcatggtggggcaggtggtggaccgggagctccagctggccggctttgacccctcccaggacggcctgcagcccggagccaacagcagcaccctcaacggctcggctgccatgctggactgcgggcgtgactgctacgccatccgtgtcgccaccgccctcacgctgatgaccgggctttaccagacgtcctggggtagaaacagcttccagcaacacccatggcaattaacacagaggagtgactcgcaggaacttctggaagaggaggaaagatcttgctgatttaacaggaaatgccgacatcaacgacatcgagaatgcgggaccctcacaccagcctcacgagaagccggtggatacagcttattccagagggaggcttggatcagcacctggggaaaaaaggcagcccctcaacctggccagcctgcagaggagagaagcctgagcaagcgtcctccaaatttcacaacaggctttaccatgtggatgatgtaaccagtcatcagtacatttctgtaaagcaaagcacacttttaaaaaccagccatgctagtgggcctgaggattacctttcgtcttcctctttcctctgtggaagatgatattgcaaaa

SEQ ID NO: 183565 - DNA, 1057 bp, Homo sapiens
  Payload ID: 16167
  Gene Symbol: SLC26A1
  Gene Name: solute carrier family 26 (anion exchanger), member 1
  Uniprot ID: Q9H2B4
  ENST ID: ENST00000622731
  CDS Start-End: 383-1057
acagaccactgcctgcaggttggcgccaccacccccactctccccgctgctcgcgggagccagagggccctgcggtcctcggtggtcttgccagcccctcgtcatcccagggccctccgcgcctgtgaggactccctcagcgtgcaaacagcaggctcagcccaggctccagggtgtcctgggcacctggtgtcctgggagcaaagtctttgcctaacgtcgctgagaagaatgtttaaagtgaaagtacattggagtctgcaaacaggacagacccgaggcctcacgtgggaccagtcaggcctctaagcaccgcctccctaacgccacggtgttttccgagatcaagggaaaggtcggccacgggacctgacgcaacaggatggacgagtcccctgagcctctgcagcagggcagagggccggtgccggtccgacggcagcgcccagcaccccggggtctgcgtgagatgctgaaggccaggctgtggtgcagctgctcgtgcagtgtgctgtgcgtccgggcgctggtgcaggacctgctccccgccacgcgctggctgcgtcagtaccgcccgcgggagtacctggcaggcgacgtcatgtctgggctggtcatcggcatcatcctggtgccgcaggccatcgcctactcattgctggccgggctgcagcccatctacagcctctatacgtccttcttcgccaacctcatctacttcctcatgggcacctcacggcatgtctccgtgggcatcttcagcctgctttgcctcatggtggggcaggtggtggaccgggagctccagctggccggctttgacccctcccaggacggcctgcagcccggagccaacagcagcaccctcaacggctcggctgccatgctggactgcgggcgtgactgctacgccatccgtgtcgccaccgccctcacgctgatgaccgggctttaccagacgtcctggggtagaaacagcttccagcaacacccatggcaattaacacagaggagtgactcgcaggaacttctggaagaggaggaaagatcttgctga

SEQ ID NO: 183566 - DNA, 2885 bp, Homo sapiens
  Payload ID: 16168
  Gene Symbol: SLC26A11
  Gene Name: solute carrier family 26 (anion exchanger), member 11
  Uniprot ID: Q86WA9
  ENST ID: ENST00000361193
  CDS Start-End: 281-2101
tccccggcgattcctgcggacccagctgcggcgacgccaggagaccccaagctgcatcgccgagtggaagcaactagaactccagggctgtgaaagccacaggtgggggctgagcgaggcgtggcctcaggagcggaggacccccccactctccctcgagcgccgcagtccaccgtagcgggtggagcccgccttggtgcgcagttggaaaacctcggagccccgctggatctcctggctgccacccgcaccccccgccagcctacgccccaccgtagagatgccttcttcggtgacggcgctgggtcaggccaggtcctctggccccgggatggccccgagcgcctgctgctgctcccctgcggccctgcagaggaggctgcccatcctggcgtggctgcccagctactccctgcagtggctgaagatggatttcgtcgccggcctctcagttggcctcactgccattccccaggcgctggcctatgctgaagtggctggactcccgccccagtatggcctctactctgccttcatgggctgcttcgtgtatttcttcctgggcacctcccgggatgtgactctgggccccaccgccattatgtccctcctggtctccttctacaccttccatgagcccgcctacgctgtgctgctggccttcctgtccggctgcatccagctggccatgggggtcctgcgtttggggttcctgctggacttcatttcctaccccgtcattaaaggcttcacctctgctgctgccgtcaccatcggctttggacagatcaagaacctgctgggactacagaacatccccaggccgttcttcctgcaggtgtaccacaccttcctcaggattgcagagaccagggtaggtgacgccgtcctggggctggtctgcatgctgctgctgctggtgctgaagctgatgcgggaccacgtgcctcccgtccaccccgagatgccccctggtgtgcggctcagccgtgggctggtctgggctgccacgacagctcgcaacgccctggtggtctccttcgcagccctggttgcgtactccttcgaggtgactggataccagcctttcatcctaacaggggagacagctgaggggctccctccagtccggatcccgcccttctcagtgaccacagccaacgggacgatctccttcaccgagatggtgcaggacatgggagccgggctggccgtggtgcccctgatgggcctcctggagagcattgcggtggccaaagccttcgcatctcagaataattaccgcatcgatgccaaccaggagctgctggccatcggtctcaccaacatgttgggctccctcgtctcctcctacccggtcacaggcagctttggacggacagccgtgaacgctcagtcgggggtgtgcaccccggcggggggcctggtgacgggagtgctggtgctgctgtctctggactacctgacctcactgttctactacatccccaagtctgccctggctgccgtcatcatcatggccgtggccccgctgttcgacaccaagatcttcaggacgctctggcgtgttaagaggctggacctgctgcccctgtgcgtgaccttcctgctgtgcttctgggaggtgcagtacggcatcctggccggggccctggtgtctctgctcatgctcctgcactctgcagccaggcctgagaccaaggtgtcagaggggccggttctggtcctgcagccggccagcggcctgtccttccctgccatggaggctctgcgggaggagatcctaagccgggccctggaagtgtccccgccacgctgcctggtcctggagtgcacccatgtctgcagcatcgactacactgtggtgctgggactcggcgagctcctccaggacttccagaagcagggcgtcgccctggcctttgtgggcctgcaggtccccgttctccgtgtcctgctgtccgctgacctgaaggggttccagtacttctctaccctggaagaagcagagaagcacctgaggcaggagccagggacccagccctacaacatcagagaagactccattctggaccaaaaggttgccctgctcaaggcataatggggccacccgtgggcatccacagtttgcagggtgttccggaaggttcttgtcactgtgattggatgctggatgccgcctgatagacatgctggcctggctgagaaacccctgagcaggtaacccagggaagagaaggaagccaggcctggaggtccacggcagtgggagtggggctcactggcttcctgtgggatgactggaaaatgacctcgctgctgttccctggcatgaccctctttggaagagtggtttggagagagccttctagaatgacagactgtgcgaggaagcaggggcaggggtttccagcccgggctgtgcgaggcatcctggggctggcagcaccttcccggctcaccagtgccacctgcgggggagggacggggcaggcaggagtctgggaggcgggtccgctcctcttgtctgcggcatctgtgctctccgagagaaaaccaaggtgtgtcaaatgacgtcaagtctctatttaaaaataattttgtgttttctaaatggaaaaagtgatagctttggtgattttgtaaaagtcataaatgcttattgtaaaaaatacaggaaaccacccctcaccctgtccacttgggtgatcattccagacccctccccaaacatgcatatgtacctgtccgtcagtgtgtggatgtatgtttacagttctacataaatgggatcattttatacatggtgctctggaacccacatttttcatgcagtcatttgcagtgaattatttattgtgataataaatagcattagaatacaa

SEQ ID NO: 183567 - DNA, 2872 bp, Homo sapiens
  Payload ID: 16168
  Gene Symbol: SLC26A11
  Gene Name: solute carrier family 26 (anion exchanger), member 11
  Uniprot ID: Q86WA9
  ENST ID: ENST00000411502
  CDS Start-End: 270-2090
gattcctgcggacccagctgcggcgacgccaggagaccccaagctgcatcgccgagtggcaactagaactccagggctgtgaaagccacaggtgggggctgagcgaggcgtggcctcaggagcggaggacccccccactctccctcgagcgccgcagtccaccgtagcgggtggagcccgccttggtgcgcagttggaaaacctcggagccccgctggatctcctggctgccacccgcaccccccgccagcctacgccccaccgtagagatgccttcttcggtgacggcgctgggtcaggccaggtcctctggccccgggatggccccgagcgcctgctgctgctcccctgcggccctgcagaggaggctgcccatcctggcgtggctgcccagctactccctgcagtggctgaagatggatttcgtcgccggcctctcagttggcctcactgccattccccaggcgctggcctatgctgaagtggctggactcccgccccagtatggcctctactctgccttcatgggctgcttcgtgtatttcttcctgggcacctcccgggatgtgactctgggccccaccgccattatgtccctcctggtctccttctacaccttccatgagcccgcctacgctgtgctgctggccttcctgtccggctgcatccagctggccatgggggtcctgcgtttggggttcctgctggacttcatttcctaccccgtcattaaaggcttcacctctgctgctgccgtcaccatcggctttggacagatcaagaacctgctgggactacagaacatccccaggccgttcttcctgcaggtgtaccacaccttcctcaggattgcagagaccagggtaggtgacgccgtcctggggctggtctgcatgctgctgctgctggtgctgaagctgatgcgggaccacgtgcctcccgtccaccccgagatgccccctggtgtgcggctcagccgtgggctggtctgggctgccacgacagctcgcaacgccctggtggtctccttcgcagccctggttgcgtactccttcgaggtgactggataccagcctttcatcctaacaggggagacagctgaggggctccctccagtccggatcccgcccttctcagtgaccacagccaacgggacgatctccttcaccgagatggtgcaggacatgggagccgggctggccgtggtgcccctgatgggcctcctggagagcattgcggtggccaaagccttcgcatctcagaataattaccgcatcgatgccaaccaggagctgctggccatcggtctcaccaacatgttgggctccctcgtctcctcctacccggtcacaggcagctttggacggacagccgtgaacgctcagtcgggggtgtgcaccccggcggggggcctggtgacgggagtgctggtgctgctgtctctggactacctgacctcactgttctactacatccccaagtctgccctggctgccgtcatcatcatggccgtggccccgctgttcgacaccaagatcttcaggacgctctggcgtgttaagaggctggacctgctgcccctgtgcgtgaccttcctgctgtgcttctgggaggtgcagtacggcatcctggccggggccctggtgtctctgctcatgctcctgcactctgcagccaggcctgagaccaaggtgtcagaggggccggttctggtcctgcagccggccagcggcctgtccttccctgccatggaggctctgcgggaggagatcctaagccgggccctggaagtgtccccgccacgctgcctggtcctggagtgcacccatgtctgcagcatcgactacactgtggtgctgggactcggcgagctcctccaggacttccagaagcagggcgtcgccctggcctttgtgggcctgcaggtccccgttctccgtgtcctgctgtccgctgacctgaaggggttccagtacttctctaccctggaagaagcagagaagcacctgaggcaggagccagggacccagccctacaacatcagagaagactccattctggaccaaaaggttgccctgctcaaggcataatggggccacccgtgggcatccacagtttgcagggtgttccggaaggttcttgtcactgtgattggatgctggatgccgcctgatagacatgctggcctggctgagaaacccctgagcaggtaacccagggaagagaaggaagccaggcctggaggtccacggcagtgggagtggggctcactggcttcctgtgggatgactggaaaatgacctcgctgctgttccctggcatgaccctctttggaagagtggtttggagagagccttctagaatgacagactgtgcgaggaagcaggggcaggggtttccagcccgggctgtgcgaggcatcctggggctggcagcaccttcccggctcaccagtgccacctgcgggggagggacggggcaggcaggagtctgggaggcgggtccgctcctcttgtctgcggcatctgtgctctccgagagaaaaccaaggtgtgtcaaatgacgtcaagtctctatttaaaaataattttgtgttttctaaatggaaaaagtgatagctttggtgattttgtaaaagtcataaatgcttattgtaaaaaatacaggaaaccacccctcaccctgtccacttgggtgatcattccagacccctccccaaacatgcatatgtacctgtccgtcagtgtgtggatgtatgtttacagttctacataaatgggatcattttatacatggtgctctggaacccacatttttcatgcagtcatttgcagtgaattatttattgtgataataaatagcattagaatac

SEQ ID NO: 183568 - DNA, 2807 bp, Homo sapiens
  Payload ID: 16168
  Gene Symbol: SLC26A11
  Gene Name: solute carrier family 26 (anion exchanger), member 11
  Uniprot ID: Q86WA9
  ENST ID: ENST00000546047
  CDS Start-End: 203-2023
gattcctgcggacccagctgcggcgacgccaggagaccccaagctgcatcgccgagtggagccgttcgcccccctggggaggggagacccatagtgacctctcctgacacccgccgaccctgaccagtgttgccgggttcttcaaaggccacgctctgactgctggtctgtgtcacctgcaccccccagccccaccgtagagatgccttcttcggtgacggcgctgggtcaggccaggtcctctggccccgggatggccccgagcgcctgctgctgctcccctgcggccctgcagaggaggctgcccatcctggcgtggctgcccagctactccctgcagtggctgaagatggatttcgtcgccggcctctcagttggcctcactgccattccccaggcgctggcctatgctgaagtggctggactcccgccccagtatggcctctactctgccttcatgggctgcttcgtgtatttcttcctgggcacctcccgggatgtgactctgggccccaccgccattatgtccctcctggtctccttctacaccttccatgagcccgcctacgctgtgctgctggccttcctgtccggctgcatccagctggccatgggggtcctgcgtttggggttcctgctggacttcatttcctaccccgtcattaaaggcttcacctctgctgctgccgtcaccatcggctttggacagatcaagaacctgctgggactacagaacatccccaggccgttcttcctgcaggtgtaccacaccttcctcaggattgcagagaccagggtaggtgacgccgtcctggggctggtctgcatgctgctgctgctggtgctgaagctgatgcgggaccacgtgcctcccgtccaccccgagatgccccctggtgtgcggctcagccgtgggctggtctgggctgccacgacagctcgcaacgccctggtggtctccttcgcagccctggttgcgtactccttcgaggtgactggataccagcctttcatcctaacaggggagacagctgaggggctccctccagtccggatcccgcccttctcagtgaccacagccaacgggacgatctccttcaccgagatggtgcaggacatgggagccgggctggccgtggtgcccctgatgggcctcctggagagcattgcggtggccaaagccttcgcatctcagaataattaccgcatcgatgccaaccaggagctgctggccatcggtctcaccaacatgttgggctccctcgtctcctcctacccggtcacaggcagctttggacggacagccgtgaacgctcagtcgggggtgtgcaccccggcggggggcctggtgacgggagtgctggtgctgctgtctctggactacctgacctcactgttctactacatccccaagtctgccctggctgccgtcatcatcatggccgtggccccgctgttcgacaccaagatcttcaggacgctctggcgtgttaagaggctggacctgctgcccctgtgcgtgaccttcctgctgtgcttctgggaggtgcagtacggcatcctggccggggccctggtgtctctgctcatgctcctgcactctgcagccaggcctgagaccaaggtgtcagaggggccggttctggtcctgcagccggccagcggcctgtccttccctgccatggaggctctgcgggaggagatcctaagccgggccctggaagtgtccccgccacgctgcctggtcctggagtgcacccatgtctgcagcatcgactacactgtggtgctgggactcggcgagctcctccaggacttccagaagcagggcgtcgccctggcctttgtgggcctgcaggtccccgttctccgtgtcctgctgtccgctgacctgaaggggttccagtacttctctaccctggaagaagcagagaagcacctgaggcaggagccagggacccagccctacaacatcagagaagactccattctggaccaaaaggttgccctgctcaaggcataatggggccacccgtgggcatccacagtttgcagggtgttccggaaggttcttgtcactgtgattggatgctggatgccgcctgatagacatgctggcctggctgagaaacccctgagcaggtaacccagggaagagaaggaagccaggcctggaggtccacggcagtgggagtggggctcactggcttcctgtgggatgactggaaaatgacctcgctgctgttccctggcatgaccctctttggaagagtggtttggagagagccttctagaatgacagactgtgcgaggaagcaggggcaggggtttccagcccgggctgtgcgaggcatcctggggctggcagcaccttcccggctcaccagtgccacctgcgggggagggacggggcaggcaggagtctgggaggcgggtccgctcctcttgtctgcggcatctgtgctctccgagagaaaaccaaggtgtgtcaaatgacgtcaagtctctatttaaaaataattttgtgttttctaaatggaaaaagtgatagctttggtgattttgtaaaagtcataaatgcttattgtaaaaaatacaggaaaccacccctcaccctgtccacttgggtgatcattccagacccctccccaaacatgcatatgtacctgtccgtcagtgtgtggatgtatgtttacagttctacataaatgggatcattttatacatggtgctctggaacccacatttttcatgcagtcatttgcagtgaattatttattgtgataataaatagcattagaatacaa

SEQ ID NO: 183569 - DNA, 591 bp, Homo sapiens
  Payload ID: 16168
  Gene Symbol: SLC26A11
  Gene Name: solute carrier family 26 (anion exchanger), member 11
  ENST ID: ENST00000571215
  CDS Start-End: 1-591
ctgctgctgctggtgctgaagctgatgcgggaccacgtgcctcccgtccaccccgagatgccccctggtgtgcggctcagccgtgggctggtctgggctgccacgacagctcgcaacgccctggtggtctccttcgcagccctggttgcgtactccttcgaggtgactggataccagcctttcatcctaacaggggagacagctgaggggctccctccagtccggatcccgcccttctcagtgaccacagccaacgggacgatctccttcaccgagatggtgcaggggcgcttctcctgttttggactccagctgaggatgaatttaccgtgttcctcccagcacctggcgcctcttcagacaaggaggcggatcctgcagctgacaagcacttgctcctgttacctgtggggcggggacatgggagccgggctggccgtggtgcccctgatgggcctcctggagagcattgcggtggccaaagccttcgcatctcagaataattaccgcatcgatgccaaccaggagctgctggccatcggtctcaccaacatgttgggctccctcgtctcctcctacccggtcacaggc

SEQ ID NO: 183570 - DNA, 762 bp, Homo sapiens
  Payload ID: 16168
  Gene Symbol: SLC26A11
  Gene Name: solute carrier family 26 (anion exchanger), member 11
  ENST ID: ENST00000577155
  CDS Start-End: 304-762
agcacggtgcttgctctggaggaacctggggtttctgagagggactggggttgggggagacggtggtgggtgggtggtggagggctgtgcccttgggataagggaaaagacagctgagacacaggctctggggtcggaaatgagagccaggagggcaccctgtctgcagtctctggggaccggagcaccagcccctcctctgggatcccctcccaagagggatttgagatccgtggacccctgagccctggctgggcagggtcagaggagggtgggacaggcggcacgagccccaccgtagagatgccttcttcggtgacggcgctgggtcaggccaggtcctctggccccgggatggccccgagcgcctgctgctgctcccctgcggccctgcagaggaggctgcccatcctggcgtggctgcccagctactccctgcagtggctgaagatggatttcgtcgccggcctctcagttggcctcactgccattccccaggcgctggcctatgctgaagtggctggactcccgccccagtatggcctctactctgccttcatgggctgcttcgtgtatttcttcctgggcacctcccgggatgtgactctgggccccaccgccattatgtccctcctggtctccttctacaccttccatgagcccgcctacgctgtgctgctggccttcctgtccggctgcatccagctggccatgggggtcctgcgtttggggttcctgctggacttcatttcctaccccgtc

SEQ ID NO: 183571 - DNA, 845 bp, Homo sapiens
  Payload ID: 16168
  Gene Symbol: SLC26A11
  Gene Name: solute carrier family 26 (anion exchanger), member 11
  ENST ID: ENST00000571176
  CDS Start-End: 216-845
gatgagggacggggtgggccttccagtcttggcccagtccccatcttgcacacattgttggcttcctcttagagccgttcgcccccctggggaggggagacccatagtgacctctcctgacacccgccgaccctgaccagtgttgccgggttcttcaaaggccacgctctgactgctggtctgtgtcacctgcaccccccagccccaccgtagagatgccttcttcggtgacggcgctgggtcaggccaggtcctctggccccgggatggccccgagcgcctgctgctgctcccctgcggccctgcagaggaggctgcccatcctggcgtggctgcccagctactccctgcagtggctgaagatggatttcgtcgccggcctctcagttggcctcactgccattccccaggcgctggcctatgctgaagtggctggactcccgccccagtatggcctctactctgccttcatgggctgcttcgtgtatttcttcctgggcacctcccgggatgtgactctgggccccaccgccattatgtccctcctggtctccttctacaccttccatgagcccgcctacgctgtgctgctggccttcctgtccggctgcatccagctggccatgggggtcctgcgtttggggttcctgctggacttcatttcctaccccgtcattaaaggcttcacctctgctgctgccgtcaccatcggctttggacagatcaagaacctgctgggactacagaacatccccaggccgttcttcctgcaggtgtaccacaccttcctcaggattgcagagaccagggtaggtgacgccgtcctggggctggtctgcatgctg

SEQ ID NO: 183572 - DNA, 492 bp, Homo sapiens
  Payload ID: 16168
  Gene Symbol: SLC26A11
  Gene Name: solute carrier family 26 (anion exchanger), member 11
  ENST ID: ENST00000575019
  CDS Start-End: 1-176
ctctgctcatgctcctgcactctgcagccaggcctgagaccaaggtgtcagaggggccggttctggtcctgcagccggccagcggcctgtccttccctgccatggaggctctgcgggaggagatcctaagccgggccctggaaggtccccgttctccgtgtcctgctgtccgctgacctgaaggggttccagtacttctctaccctggaagaagcagagaagcacctgaggcaggagccagggacccagccctacaacatcagagaagactccattctggaccaaaaggttgccctgctcaaggcataatggggccacccgtgggcatccacagtttgcagggtgttccggaaggttcttgtcactgtgattggatgctggatgccgcctgatagacatgctggcctggctgagaaacccctgagcaggtaacccagggaagagaaggaagccaggcctggaggtccacggcagtgggagtggggctcactg

SEQ ID NO: 183573 - DNA, 472 bp, Homo sapiens
  Payload ID: 16168
  Gene Symbol: SLC26A11
  Gene Name: solute carrier family 26 (anion exchanger), member 11
  ENST ID: ENST00000576126
  CDS Start-End: 73-472
gattcctgcggacccagctgcggcgacgccaggagaccccaagctgcatcgccgagtggccccaccgtagagatgccttcttcggtgacggcgctgggtcaggccaggtcctctggccccgggatggccccgagcgcctgctgctgctcccctgcggccctgcagaggaggctgcccatcctggcgtggctgcccagctactccctgcagtggctgaagatggatttcgtcgccggcctctcagttggcctcactgccattccccaggcgctggcctatgctgaagtggctggactcccgccccagggttcctgctggacttcatttcctaccccgtcattaaaggcttcacctctgctgctgccgtcaccatcggctttggacagatcaagaacctgctgggactacagaacatccccaggccgttcttcctgcaggtgtaccacaccttcctcaggattgcagagaccag

SEQ ID NO: 183574 - DNA, 1862 bp, Homo sapiens
  Payload ID: 16168
  Gene Symbol: SLC26A11
  Gene Name: solute carrier family 26 (anion exchanger), member 11
  Uniprot ID: Q86WA9
  ENST ID: ENST00000572725
  CDS Start-End: 42-1862
ggagaccccaagctgcatcgccgagtggccccaccgtagagatgccttcttcggtgacggcgctgggtcaggccaggtcctctggccccgggatggccccgagcgcctgctgctgctcccctgcggccctgcagaggaggctgcccatcctggcgtggctgcccagctactccctgcagtggctgaagatggatttcgtcgccggcctctcagttggcctcactgccattccccaggcgctggcctatgctgaagtggctggactcccgccccagtatggcctctactctgccttcatgggctgcttcgtgtatttcttcctgggcacctcccgggatgtgactctgggccccaccgccattatgtccctcctggtctccttctacaccttccatgagcccgcctacgctgtgctgctggccttcctgtccggctgcatccagctggccatgggggtcctgcgtttggggttcctgctggacttcatttcctaccccgtcattaaaggcttcacctctgctgctgccgtcaccatcggctttggacagatcaagaacctgctgggactacagaacatccccaggccgttcttcctgcaggtgtaccacaccttcctcaggattgcagagaccagggtaggtgacgccgtcctggggctggtctgcatgctgctgctgctggtgctgaagctgatgcgggaccacgtgcctcccgtccaccccgagatgccccctggtgtgcggctcagccgtgggctggtctgggctgccacgacagctcgcaacgccctggtggtctccttcgcagccctggttgcgtactccttcgaggtgactggataccagcctttcatcctaacaggggagacagctgaggggctccctccagtccggatcccgcccttctcagtgaccacagccaacgggacgatctccttcaccgagatggtgcaggacatgggagccgggctggccgtggtgcccctgatgggcctcctggagagcattgcggtggccaaagccttcgcatctcagaataattaccgcatcgatgccaaccaggagctgctggccatcggtctcaccaacatgttgggctccctcgtctcctcctacccggtcacaggcagctttggacggacagccgtgaacgctcagtcgggggtgtgcaccccggcggggggcctggtgacgggagtgctggtgctgctgtctctggactacctgacctcactgttctactacatccccaagtctgccctggctgccgtcatcatcatggccgtggccccgctgttcgacaccaagatcttcaggacgctctggcgtgttaagaggctggacctgctgcccctgtgcgtgaccttcctgctgtgcttctgggaggtgcagtacggcatcctggccggggccctggtgtctctgctcatgctcctgcactctgcagccaggcctgagaccaaggtgtcagaggggccggttctggtcctgcagccggccagcggcctgtccttccctgccatggaggctctgcgggaggagatcctaagccgggccctggaagtgtccccgccacgctgcctggtcctggagtgcacccatgtctgcagcatcgactacactgtggtgctgggactcggcgagctcctccaggacttccagaagcagggcgtcgccctggcctttgtgggcctgcaggtccccgttctccgtgtcctgctgtccgctgacctgaaggggttccagtacttctctaccctggaagaagcagagaagcacctgaggcaggagccagggacccagccctacaacatcagagaagactccattctggaccaaaaggttgccctgctcaaggcataa

SEQ ID NO: 183575 - DNA, 523 bp, Homo sapiens
  Payload ID: 16168
  Gene Symbol: SLC26A11
  Gene Name: solute carrier family 26 (anion exchanger), member 11
  ENST ID: ENST00000573809
  CDS Start-End: 331-523
ctgtccccggcgattcctgcggacccagctgcggcgacgccaggagaccccaagctgcatcgccgagtggaagcaactagaactccagggctgtgaaagccacaggtgggggctgagcgaggcgtggcctcaggagcggaggacccccccactctccctcgagcgccgcagtccaccgtagcgggtggagcccgccttggtgcgcagttggaaaacctcggagccccgctggatctcctggctgccacccgcaccccccgccagcctacggcgctggcctatgctgaagtggctggactcccgccccagtatggcctctactctgccttcatgggctgcttcgtgtatttcttcctgggcacctcccgggatgtgactctgggccccaccgccattatgtccctcctggtctccttctacaccttccatgagcccgcctacgctgtgctgctggccttcctgtccggctgcatccagctggccatgggggtcctgcgtttggggttcctgctggacttcattt

SEQ ID NO: 183576 - DNA, 547 bp, Homo sapiens
  Payload ID: 16168
  Gene Symbol: SLC26A11
  Gene Name: solute carrier family 26 (anion exchanger), member 11
  ENST ID: ENST00000574967
  CDS Start-End: 315-547
gattcctgcggacccagctgcggcgacgccaggagaccccaagctgcatcgccgagtggaagcaactagaactccagggctgtgaaagccacaggtgggggctgagcgaggcgtggcctcaggagcggaggacccccccactctccctcgagcgccgcagtccaccgtagcgggtggagcccgccttggtgcgcagttggaaaacctcggagccccgctggatctcctggctgccacccgcaccccccgccagcctacggccacgctctgactgctggtctgtgtcacctgcaccccccagccccaccgtagagatgccttcttcggtgacggcgctgggtcaggccaggtcctctggccccgggatggccccgagcgcctgctgctgctcccctgcggccctgcagaggaggctgcccatcctggcgtggctgcccagctactccctgcagtggctgaagatggatttcgtcgccggcctctcagttggcctcactgccattccccaggcgctggcctatgctgaagtggctggactcccgcccca

SEQ ID NO: 183577 - DNA, 8080 bp, Homo sapiens
  Payload ID: 16169
  Gene Symbol: SLC26A2
  Gene Name: solute carrier family 26 (anion exchanger), member 2
  Uniprot ID: P50443
  ENST ID: ENST00000286298
  CDS Start-End: 269-2488
gtgacggcctcggccgcgggcgtttacactggctctgcctccggcatctcttcgccggtgcgtcctcgccgcgcccgtaggtcccggcagccgggccccgcctccttcggagtccgagcgatgggcggggaaagggacaggcaggtatagctctgtcggcgccgcggtgtccacctcagtcaggccacggtggaagacgcgtgccgcggcgcctggttgcctgcagcggcccggacccgagaggaagctgaaccatctatctccagaaatgtcttcagaaagtaaagagcaacataacgtttcacccagagactcagctgaaggaaatgacagttatccatctgggatccatctggaacttcaaagggaatcaagtactgacttcaagcaatttgagaccaatgatcaatgcagaccttatcataggatccttattgagcgtcaagagaaatcagatacaaacttcaaggagtttgttattaaaaagctgcagaagaattgccagtgcagtccagccaaagccaaaaatatgattttaggtttccttcctgttttgcagtggctcccaaaatacgacctaaagaaaaacattttaggggatgtgatgtcaggcttgattgtgggcatattattggtgccccagtccattgcttattccctgctggctggccaagaacctgtctatggtctgtacacatctttttttgccagcatcatttattttctcttgggtacctcccgtcacatctctgtgggcatttttggagtactgtgccttatgattggtgagacagttgaccgagaactacagaaagctggctatgacaatgcccatagtgctccttccttaggaatggtttcaaatgggagcacattattaaatcatacatcagacaggatatgtgacaaaagttgctatgcaattatggttggcagcactgtaacctttatagctggagtttatcaggtagcgatgggcttctttcaagtgggttttgtttctgtctacctctcagatgccttgctgagtggatttgtcactggtgcctccttcactattcttacatctcaggccaagtatcttcttgggctcaaccttcctcggactaatggtgtgggctcactcatcactacctggatacatgtcttcagaaacatccataagaccaatctctgtgatcttatcaccagccttttgtgccttttggttcttttgccaaccaaagaactcaatgaacacttcaaatccaagcttaaggcaccgattcctattgaacttgttgttgttgtagcagccacattagcctctcattttggaaaactacatgaaaattataattctagtattgctggacatattcccactgggtttatgccacccaaagtaccagaatggaacctaattcctagtgtggctgtagatgcaatagctatttccatcattggttttgctatcactgtatcactttctgagatgtttgccaagaaacatggttacacagtcaaagcaaaccaggaaatgtatgccattggcttttgtaatatcatcccttccttcttccactgttttactactagtgcagctcttgcaaagacattggttaaagaatcaacaggctgccatactcagctttctggtgtggtaacagccctggttcttttgttggtcctcctagtaatagctcctttgttctattcccttcaaaaaagtgtccttggtgtgatcacaattgtaaatctacggggagcccttcgtaaatttagggatcttcccaaaatgtggagtattagtagaatggatacagttatctggtttgttactatgctgtcctctgcactgctaagtactgaaataggcctacttgttggggtttgtttttctatattttgtgtcatcctccgcactcagaagccaaagagttcactgcttggcttggtggaagagtctgaggtctttgaatctgtgtctgcttacaagaaccttcagattaagccaggcatcaagattttccgctttgtagcccctctctactacataaacaaagaatgctttaaatctgctttatacaaacaaactgtcaacccaatcttaataaaggtggcttggaagaaggcagcaaagagaaagatcaaagaaaaagtagtgactcttggtggaatccaggatgaaatgtcagtgcaactttcccatgatcccttggagctgcatactatagtgattgactgcagtgcaattcaatttttagatacagcagggatccacacactgaaagaagttcgcagagattatgaagccattggaatccaggttctgctggctcagtgcaatcccactgtgagggattccctaaccaacggagaatattgcaaaaaggaagaagaaaaccttctcttctatagtgtgtatgaagcgatggcttttgcagaagtatctaaaaatcagaaaggagtatgtgttcccaatggtctgagtcttagtagtgattaattgagaaggtagatagaagaatgtctagccaataggttaaaatttcaagtgtccaacatttcccagttccacagtgggaaattttgcacacttgaaattttaaccaagtggctagatattattcctcctttgaagctaatggcatttgtatatacacactgcagcagagcttgtagctggacagagtcaaaaagaagaaaatacggtttcaggctttcttgcagatatgaagtattcttggaatgcaataagtatgtattgaactgtactgtaaagtagctccaaaacttaattactctcctgttttaggggttatacatttggactgtgcattctccaagagatgaagcggtgaagttgggatttacattggaagtgctgtagacttctttatgtggctcagtggagagagggaaagaatgttgcacctgctctagtaccataggtcaagaggcttctggatcacaaagtcataactagacaggtttgttcttgtagttttctatccccagtctttgctccccagatggcagtagtttttagtaggaaagtgccattcctgtccttaaggcacagtctcatcagaagtctaatacctgggcaggtttataacatcctgagagccagcctgacattagacagaataccctttgtaatacattggaaatttttactcatgcctttttgtttaggataaataggtaagcacaaagagctcttcaaaatcagaaaaaacaataggagtccttccttgtcttttctgtgatctctgtccttgtttctgagactttctctaccattaagctctattttagctttcagttattctagtttgtttcccatggaatctgtcctaaactggtgtttttgtcagtgacagtcttgccagtcagcaatttctaacagcattttaaatgagtttgatgtacagtaaatattgatgacaatgacagcttttaactcttcaagtcacctaaagctattatgcaggaggatttagaagtcacattcataaaacccaagtgctatgggtgtattattcatgatagctggcccacaggtcatgaattgaggaggaatttgctttcaaaaagcaagaatgtccaacactgaaagtttatagttttatatttggaccttgaaaggtaagaaaaaaccaggttctccaaagttaggaatagggaactaatttatgaaacagccatcttaaaaaaaaaaaaagtaaactgcaaaagtacaaaatcatttttcaatctgttcccagtttctaaacaattttaaatatttatgagaagcaaaccctatgtgtagggcatctgttggagtgggatgcttttagacatatattaagtatgtacatgtttaatatgtatatttaaaatgcatatatattttattatatctatattatcctatatagatatatgtaacttagctttattgttagctccataagctgccagtgttgcttttctgttggtagagctctcccatttggtgacatggaaaatacctttccattatcacaacaaagcagttgctcagtagaaagtctagatttctgtcttataggtgatttctgtcttataggtgattataatcaagtgtaggcttcctgaattttgacatccttttagaacttgggtctggaattccagaaatgttaattgctgcttgtatttgttcttgtttgttttttagccagtatttgccctttctatccagccttatgaataatagcagtaaaatcacagtatcttggtcagtctttatttttttccttttttcttttttaagagacagtcatccaggccagagtgcagtttgatgatagcttactgaagcttcccactcctgggctcaagttatccttccattttggcctcctgagtagctagaccataggtatgcatcaccacaccctgctaattttttaaatttttttctagagagagggtctcactgtgttgcccaggctggtctcaaactccaggctcaagcaatccttcagcctcagcctcccagagtgttgggattacaggcgtgagccactgcacttggccaagttatttatttttaatctctcttgcccttctcccaaggcaggcttaagttgagactattataggtgtctaataacctgtgacagagtaatgagtacatgcttaagatgttataattagccaacaccaacacagcaaaaaatataattccagccaaagattctggaaaatccctcagaaggagggataacaggatttgacctttaccagcgatttctgtccatatgtggatgtaaacagttctggaacgttatgcatgcagttagcgaatccttgaattatgttctggtttgtacttgtcccatccatccaaacaagagattctgcttttggtagccatctgtagaaacatttaagatgtcactagaatttacatttcatcctctctacttgggttgaggttgcctatacttgcatattgttaaaatgttttggttgctgatattcagaggaatgaaacctggaaccaaagcctaatttgccgataaaaaaactgttttcggccaggtgcagtggctcatgcctgtaatcccagcacgttgggaggccgaggcgggtggatcacctgaagtcaggagttcgagaccatcctggctaacactgtgaaaccccgtctctactaaaaatacaaaaaattagcggggcatggtggcacgcgcctgtagtcccagctactcaggaggctgaggcaggagaattacttgaacccgggaggcggaggttgcagtaagcagagattgtgccactggactccagcctgggtgacagagcgagactccgtctcaaacaaacaaacaaaaaactgttttcatttgctctcttgaccaaaggataggactttagttctttaagcattattttaaacactatattgatacaaaaatatcttgcttactctaaactttagagtctaaatgaagctttttctcagtacaagattctgagtatcataaaatggttatttaattgaaacgtagtgtggtatactcttgatggttagaactcttacagccttatttatttttaagtttgttacagccaaagggttggagtgtgccagtgcacaggtagactaaggaaaacattatagaggagtgaagagaacagaccattgaaaagactattatctgaccagcggaggcagaaaagagaggaacccagttgaataggatccaatccctggttagcctctacacaataatagggagacaaggattaggagccatacctcccagagcaaggtatctttctagagcaaatttctctttctagaaggggagggtcacagggtcacagattcaccaaagctgaaagggctgaggagctcatggtagcctgggctgacctactctggagcacggtgtcttccttctaaactgagtgactgtagtactatctgtgcctctgatggtaataaaactgacaagatgtctaatttttttttaagtaggaccaaaggaaaacaagatttagatagtctgactttgcttttgaacaacagacattgcaagtcaaaattgttgtcaaatttacatatggtaaatgatgaactttaaaaatgtgtccaggtgttagatgagttcattagactcttttaatgctaatggctagtacgtttaaacaaaacagcagttctctgctgcaatattcccattgaccacttaaatgaccataagtggtcatttaagaacatgttagggttagccctgatctgaatataaaagtgagaaaagggctacagtgcatttcttggtaacttaaactgagtcttgaagttataatgatccattcgagttctgtgatccttattgttcttaattgtgtttctctacgtattgttacagatgagccatacgtttctttgtatcaatgtagacatgacttcagatacctctgaggacctacccagcagtctaggaccctgggccaagtgctgggactatggtactaaatccagtagatgggctgtgtagcaactctcccagggaacacactagggtacttagggaggtgctttgtggagcatgttgaagctttgagatctgagcaggaggcagtgatgtccctggtctattcagggaaagatttcagtgtgaaatggtaaacatccaattgacaggatttagattttgcttagtttttctgctttttaatgtttctatcccccatctcagtgttttctttatccatcccagtgatgccttatttgaaactgggcttaaactgcaaaaagaatgaagttggatttaggaagctgttagatcattgagtggtgttgagagtgaagtttcactagcagggaagtttccttgagcctaaaataaaaagaaaaaattaaaaagaatcagtttttttaattaaaaaaatagaaagctgttaggctcctaattcgtggggtttttttttgtaaaaacagtttagataatcctgaatgcaatcattaacttggttgctaattacaagaatgaaaattataatggaaaaggacaaaataatataccagctggtttgttattatagtccgtgtattaaaatactattgaaatacgttaaaggtaaatttttaaggtttaaaaaaaatttagtaacttacagggatggagaatttagatgtcagaggtggggagatttatttttataaggtaatttttatcctgataaggacttaaaaaaaagttttgcaactgaaattttaaagtaaacatgttaagtacagttaaaaagtaagcattgtagtaaatagtggattctctggtgtgtattttttatctcagtgttgaaaattggaaaagaatggactgaagtctaaaaactggaataatgaaggacactaaatgcctttattgtagatactatgtttgtaagtctatagctaagcaacttaagccaaaaaggtctttcaactgaagctttaatcaacttattttggagatgttctcttcccttatctcatgcgtcatccctaaaataataagatacatgggatcaaatagcccttgccttttcaacacaaatcagttggaaaattatggtttgagtcctgttgctgccatggcttctgtttctcagaaatgagtgtgtatgaacataccaatctatgtaataggctacctttttttgtcttctttggaactttgtacacaaaccaagacaatatcagggtgacaggtgaatgaacttaaattctcagtcttgtctattcaccaaaaaagtatactgcctgttttttctttaattattcaaggttgatgacttttaggaacatgttttatactgtattttttaattaaagcaagtgccttgatgtaattccatgtaaatcattgcttaaccctcttatgggatgaggatgagttattaatgtattgcagcctactggaaaggagggggagttggttaatagcagatacttttcttctagaagcttatgttttatgctgtttattatgtaagatcctgtatgtgtgttgagatttagaggtttcatttgttttgtctgctaataaattgttactctaataatacatta

SEQ ID NO: 183578 - DNA, 570 bp, Homo sapiens
  Payload ID: 16169
  Gene Symbol: SLC26A2
  Gene Name: solute carrier family 26 (anion exchanger), member 2
  ENST ID: ENST00000433184
  CDS Start-End: 501-570
tcttcgccggtgcgtcctcgccgcgcccgtaggtcccggcagccgggccccgcctccttcggagtccgagcgatgggcggggaaagggacaggcaggtatagctctgtcggcgccgcggtgtccacctcagtcaggccacggtggaagacgcgtgccgcggcgcctggttgcctgcagcggcccggacccgagaggtcagaaattgatgctgagtacagtgaagttttacaaaaccattgccatatgactgctgagcagtatagctgggatctgaacagagatctgtttgacttccagaacacatccagtgattctccaagtgtggtcctaagctcactcgttcagcatcatctagcgtgtggagtcctggatctcatccttggatttgcagggatggtcctaagaagctaacggctctctgtatttgacaattattgtactgtaatgtgctgcctcctaggggaagatctagaggaagctgaaccatctatctccagaaatgtcttcagaaagtaaagagcaacataacgtttcacccagagactcagctgaaggaaatgacagttatc

SEQ ID NO: 183579 - DNA, 618 bp, Homo sapiens
  Payload ID: 16169
  Gene Symbol: SLC26A2
  Gene Name: solute carrier family 26 (anion exchanger), member 2
  ENST ID: ENST00000503336
  CDS Start-End: 1-375
ggggatgtgatgtcaggcttgattgtgggcatattattggtgccccagtccattgcttattccctgctggctggccaagaacctgtctatggtctgtacacatctttttttgccagcatcatttattttctcttgggtacctcccgtcacatctctgtgggcatttttggagtactgtgccttatgattggtgagacagttgaccgagaactacagaaagctggctatgacaatgcccatagtgctccttccttaggaatggtttcaaatgggagcacattattaaatcatacatcagacaggatatgtgacaaaagttgctatgcaattatggttggcagcactgtaacctttatagctggagtttatcagtgattgttttgttaatgtggaagcaacattttctatgattaatctgctgttacctgttttgactgagctactacaaaaagaaaaatcactgaattgctatgggtttctgaaatatccaaaaaattaacctgaagcagggggaaaaatgacatcacaccattagcaggtattgtgtgaaacttctaaaaatgaaactgacatttatctgacttattaggaataaatactctctaatgaactctctaa

SEQ ID NO: 183580 - DNA, 2863 bp, Homo sapiens
  Payload ID: 16170
  Gene Symbol: SLC26A3
  Gene Name: solute carrier family 26 (anion exchanger), member 3
  Uniprot ID: P40879
  ENST ID: ENST00000340010
  CDS Start-End: 186-2480
cctgagtggatggacactgcctcttagaactagaacttagaactttatcttgaaaatgtaccactgttgcagaagctcctcacagagtatgtgtcaggcatttttaacctgctaaaggcaagaagaagtgttcaccacatagttgcaaaggtcttcaacttgccacagccaacagaaaaatcaaaatgattgaaccctttgggaatcagtatattgtggccaggccagtgtattctacaaatgcttttgaggaaaatcataaaaagacaggaagacatcataagacatttctggatcatctcaaagtgtgttgtagctgttccccacaaaaggccaagagaattgtcctctctttgttccccatagcatcttggttgccagcataccggcttaaagaatggttgctcagtgatattgtttctggtatcagcacagggattgtggccgtactacaaggtttagcatttgctctgctggtcgacattcccccagtctatgggttgtatgcatcctttttcccagccataatctaccttttcttcggcacttccagacacatatccgtgggtccgtttccgattctgagtatgatggtgggactagcagtttcaggagcagtttcaaaagcagtcccagatcgcaatgcaactactttgggattgcctaacaactcgaataattcttcactactggatgacgagagggtgagggtggcggcggcggcatcagtcacagtgctttctggaatcatccagttggcttttgggattctgcggattggatttgtagtgatatacctgtctgagtccctcatcagtggcttcactactgctgctgctgttcatgttttggtttcccaactcaaattcatttttcagttgacagtcccgtcacacactgatccagtttcaattttcaaagtactatactctgtattctcacaaatagagaagactaatattgcagacctggtgacagctctgattgtccttttggttgtatccattgttaaagaaataaatcagcgcttcaaagacaaacttccagtgcccattccaatcgaattcattatgaccgtgattgcagcaggtgtatcctacggctgtgactttaaaaacaggtttaaagtggctgtggttggggacatgaatcctggatttcagccccctattacacctgacgtggagactttccaaaacaccgtaggagattgcttcggcatcgcaatggttgcatttgcagtggccttttcagttgccagcgtctattccctcaaatacgattatccacttgatggcaatcaggagttaatagccttgggactgggtaacatagtctgtggagtattcagaggatttgctgggagtactgccctctccagatcagcagttcaggagagcacaggaggcaaaacacagattgctgggcttattggtgccatcatcgtgctgattgtcgttctagccattggatttctcctggcgcctctacaaaagtccgtcctggcagctttagcattgggaaacttaaagggaatgctgatgcagtttgctgaaataggcagattgtggcgaaaggacaaatatgattgtttaatttggatcatgaccttcatcttcaccattgtcctgggactcgggttaggcctggcagctagtgtggcatttcaactgctaaccatcgtgttcaggacccaatttccaaaatgcagcacgctggctaatattggaagaaccaacatctataagaataaaaaagattattatgatatgtatgagccagaaggagtgaaaattttcagatgtccatctcctatctactttgcaaacattggtttctttaggcggaaacttatcgatgctgttggctttagtccacttcgaattctacgcaagcgcaacaaagctttgaggaaaatccgaaaactgcagaagcaaggcttgctacaagtgacaccaaaaggatttatatgtactgttgacaccataaaagattctgacgaagagctggacaacaatcagatagaagtactggaccagccaatcaataccacagacctgcctttccacattgactggaatgatgatcttcctctcaacattgaggtccccaaaatcagcctccacagcctcattcttgacttttcagcagtgtcctttcttgatgtttcttcagtgaggggccttaaatcgattttgcaagaatttatcaggatcaaggtagatgtgtatatcgttggaactgatgatgacttcattgagaagcttaaccggtatgaattttttgatggtgaagtgaaaagctcaatatttttcttaacaatccatgatgctgttttgcatattttgatgaagaaagattacagtacttcaaagtttaatcccagtcaggaaaaagatggaaaaattgattttaccataaatacaaatggaggattacgtaatcgggtatatgaggtgccagttgaaacaaaattctaatcaacatataattcagaaggatcttcatctgactatgacataaaaacaactttatacccagaaagttattgataagttcatacattgtacgaagagtatttttgacagaatatgtttcaaactttggaacaagatggttctagcatggcatatttttcacatatctagtatgaaattatataagtattctaaattttatatcttgtagctttatcaaagggtgaaaattattttgttcatacatatttttgtagcactgacagatttccatcctagtcactaccttcatgcataggtttagcagtatagtggcgccactgttttgaatctcataatttatacaggtcatattaatatatttccattaaaaaatcagttgtaca

SEQ ID NO: 183581 - DNA, 2602 bp, Homo sapiens
  Payload ID: 16170
  Gene Symbol: SLC26A3
  Gene Name: solute carrier family 26 (anion exchanger), member 3
  ENST ID: ENST00000379083
  CDS Start-End: 204-362
gcacacagagcctgtagacctgagtggatggacactgcctcttagaactagaacttagaactttatcttgaaaatgtaccactgttgcagaagctcctcacagagtatgtgtcaggcatttttaacctgctaaaggcaagaagaagtgttcaccacatagttgcaaaggtcttcaacttgccacagccaacagaaaaatcaaaatgattgaaccctttgggaatcagtatattgtggccaggccagtgtattctacaaatgcttttgaggaaaatcataaaaagacaggaagacatcataagacatttctggatcatctcaaagtgtgttgtagcatcttggttgccagcataccggcttaaagaatggttgctcagtgatattgtttctggtatcagcacagggattgtggccgtactacaaggtttagcatttgctctgctggtcgacattcccccagtctatgggttgtatgcatcctttttcccagccataatctaccttttcttcggcacttccagacacatatccgtgggtccgtttccgattctgagtatgatggtgggactagcagtttcaggagcagtttcaaaagcagtcccagatcgcaatgcaactactttgggattgcctaacaactcgaataattcttcactactggatgacgagagggtgagggtggcggcggcggcatcagtcacagtgctttctggaatcatccagttggcttttgggattctgcggattggatttgtagtgatatacctgtctgagtccctcatcagtggcttcactactgctgctgctgttcatgttttggtttcccaactcaaattcatttttcagttgacagtcccgtcacacactgatccagtttcaattttcaaagtactatactctgtattctcacaaatagagaagactaatattgcagacctggtgacagctctgattgtccttttggttgtatccattgttaaagaaataaatcagcgcttcaaagacaaacttccagtgcccattccaatcgaattcattatgaccgtgattgcagcaggtgtatcctacggctgtgactttaaaaacaggtttaaagtggctgtggttggggacatgaatcctggatttcagccccctattacacctgacgtggagactttccaaaacaccgtaggagattgcttcggcatcgcaatggttgcatttgcagtggccttttcagttgccagcgtctattccctcaaatacgattatccacttgatggcaatcaggagttaatagccttgggactgggtaacatagtctgtggagtattcagaggatttgctgggagtactgccctctccagatcagcagttcaggagagcacaggaggcaaaacacagattgctgggcttattggtgccatcatcgtgctgattgtcgttctagccattggatttctcctggcgcctctacaaaagtccgtcctggcagctttagcattgggaaacttaaagggaatgctgatgcagtttgctgaaataggcagattgtggcgaaaggacaaatatgattgtttaatttggatcatgaccttcatcttcaccattgtcctgggactcgggttaggcctggcagctagtgtggcatttcaactgctaaccatcgtgttcaggacccaatttccaaaatgcagcacgctggctaatattggaagaaccaacatctataagaataaaaaagattattatgatatgtatgagccagaaggagtgaaaattttcagatgtccatctcctatctactttgcaaacattggtttctttaggcggaaacttatcgatgctgttggctttagtccacttcgaattctacgcaagcgcaacaaagctttgaggaaaatccgaaaactgcagaagcaaggcttgctacaagtgacaccaattttgcaagaatttatcaggatcaaggtagatgtgtatatcgttggaactgatgatgacttcattgagaagcttaaccggtatgaattttttgatggtgaagtgaaaagctcaatatttttcttaacaatccatgatgctgttttgcatattttgatgaagaaagattacagtacttcaaagtttaatcccagtcaggaaaaagatggaaaaattgattttaccataaatacaaatggaggattacgtaatcgggtatatgaggtgccagttgaaacaaaattctaatcaacatataattcagaaggatcttcatctgactatgacataaaaacaactttatacccagaaagttattgataagttcatacattgtacgaagagtatttttgacagaatatgtttcaaactttggaacaagatggttctagcatggcatatttttcacatatctagtatgaaattatataagtattctaaattttatatcttgtagctttatcaaagggtgaaaattattttgttcatacatatttttgtagcactgacagatttccatcctagtcactaccttcatgcataggtttagcagtatagtggcgccactgttttgaatctcataatttatacaggtcatattaatatatttccattaaaaaatcagttgtacagtgga

SEQ ID NO: 183582 - DNA, 552 bp, Homo sapiens
  Payload ID: 16170
  Gene Symbol: SLC26A3
  Gene Name: solute carrier family 26 (anion exchanger), member 3
  ENST ID: ENST00000453332
  CDS Start-End: 193-552
gcacacagagcctgtagacctgagtggatggacactgcctcttagaactagaacttagaactttatcttgaaaatgtaccactgttgcagaagctcctcacagagcatttttaacctgctaaaggcaagaagaagtgttcaccacatagttgcaaaggtcttcaacttgccacagccaacagaaaaatcaaaatgattgaaccctttgggaatcagtatattgtggccaggccagtgtattctacaaatgcttttgaggaaaatcataaaaagacaggaagacatcataagacatttctggatcatctcaaagtgtgttgtagctgttccccacaaaaggccaagagaattgtcctctctttgttccccatagcatcttggttgccagcataccggcttaaagaatggttgctcagtgatattgtttctggtatcagcacagggattgtggccgtactacaaggtttagcatttgctctgctggtcgacattcccccagtctatgggttgtatgcatcctttttcccagccataatctaccttttcttcggc

SEQ ID NO: 183583 - DNA, 4930 bp, Homo sapiens
  Payload ID: 16171
  Gene Symbol: SLC26A4
  Gene Name: solute carrier family 26 (anion exchanger), member 4
  Uniprot ID: O43511
  ENST ID: ENST00000265715
  CDS Start-End: 225-2567
ctcagccttcccggttcgggaaaggggaagaatgcaggaggggtaggatttctttcctgataggatcggttgggaaagaccgcagcctgtgtgtgtctttcccttcgaccaaggtgtctgttgctccgtaaataaaacgtcccactgccttctgagagcgctataaaggcagcggaagggtagtccgcggggcattccgggcggggcgcgagcagagacaggtcatggcagcgccaggcggcaggtcggagccgccgcagctccccgagtacagctgcagctacatggtgtcgcggccggtctacagcgagctcgctttccagcaacagcacgagcggcgcctgcaggagcgcaagacgctgcgggagagcctggccaagtgctgcagttgttcaagaaagagagcctttggtgtgctaaagactcttgtgcccatcttggagtggctccccaaataccgagtcaaggaatggctgcttagtgacgtcatttcgggagttagtactgggctagtggccacgctgcaagggatggcatatgccctactagctgcagttcctgtcggatatggtctctactctgcttttttccctatcctgacatactttatctttggaacatcaagacatatctcagttggaccttttccagtggtgagtttaatggtgggatctgttgttctgagcatggcccccgacgaacactttctcgtatccagcagcaatggaactgtattaaatactactatgatagacactgcagctagagatacagctagagtcctgattgccagtgccctgactctgctggttggaattatacagttgatatttggtggcttgcagattggattcatagtgaggtacttggcagatcctttggttggtggcttcacaacagctgctgccttccaagtgctggtctcacagctaaagattgtcctcaatgtttcaaccaaaaactacaatggagttctctctattatctatacgctggttgagatttttcaaaatattggtgataccaatcttgctgatttcactgctggattgctcaccattgtcgtctgtatggcagttaaggaattaaatgatcggtttagacacaaaatcccagtccctattcctatagaagtaattgtgacgataattgctactgccatttcatatggagccaacctggaaaaaaattacaatgctggcattgttaaatccatcccaagggggtttttgcctcctgaacttccacctgtgagcttgttctcggagatgctggctgcatcattttccatcgctgtggtggcttatgctattgcagtgtcagtaggaaaagtatatgccaccaagtatgattacaccatcgatgggaaccaggaattcattgcctttgggatcagcaacatcttctcaggattcttctcttgttttgtggccaccactgctctttcccgcacggccgtccaggagagcactggaggaaagacacaggttgctggcatcatctctgctgcgattgtgatgatcgccattcttgccctggggaagcttctggaacccttgcagaagtcggtcttggcagctgttgtaattgccaacctgaaagggatgtttatgcagctgtgtgacattcctcgtctgtggagacagaataagattgatgctgttatctgggtgtttacgtgtatagtgtccatcattctggggctggatctcggtttactagctggccttatatttggactgttgactgtggtcctgagagttcagtttccttcttggaatggccttggaagcatccctagcacagatatctacaaaagtaccaagaattacaaaaacattgaagaacctcaaggagtgaagattcttagattttccagtcctattttctatggcaatgtcgatggttttaaaaaatgtatcaagtccacagttggatttgatgccattagagtatataataagaggctgaaagcgctgaggaaaatacagaaactaataaaaagtggacaattaagagcaacaaagaatggcatcataagtgatgctgtttcaacaaataatgcttttgagcctgatgaggatattgaagatctggaggaacttgatatcccaaccaaggaaatagagattcaagtggattggaactctgagcttccagtcaaagtgaacgttcccaaagtgccaatccatagccttgtgcttgactgtggagctatatctttcctggacgttgttggagtgagatcactgcgggtgattgtcaaagaattccaaagaattgatgtgaatgtgtattttgcatcacttcaagattatgtgatagaaaagctggagcaatgcgggttctttgacgacaacattagaaaggacacattctttttgacggtccatgatgctatactctatctacagaaccaagtgaaatctcaagagggtcaaggttccattttagaaacgatcactctcattcaggattgtaaagatacccttgaattaatagaaacagagctgacggaagaagaacttgatgtccaggatgaggctatgcgtacacttgcatcctgaaagtgggttcgggaggtctctatgagcaaggaatacaagacaaaacttcctcaatgcattgactatttcttcagactcaaaacactcattcttttttctattaagccattgaaagagaagcactaagactgcttctaggctttatttataaaataaacaccttatccctaacatgggcaaaatggctagaattattcagacgatttggcagcgtccagggtaagctggtgttataatacgctgctgatctacatcacagatttgctaataatgttcacgtgggccctggcatatctctgttcagttagagtgagtgctgacccaacagcctctgtggtcaagcgagtcacgaatgattaatcataaagaaaaatcagtttttgactgacctggatatccatgagctgcactgatcaccatgtaaggtcacatttagtaaatgctgaaataaaatgattaatgcatttatcaataaaagcctttgaaaatactttggataataaattggagttttaaaaatgcaaatttgcttagtatctaataatgaagtgttattacatatagccggaattgaggatctctttgatcctggaaatggtttacctaaaagctacagaaccaggccaatatattttgaaatattgatgcagacaaatgaaataataaagagattttcatggtttataaaaatcttttttgatatgataataatcatgatcacaactgagatcaaaaaaatatatgacagattattttgtttaaaaatgcagttttaattatcttagtctatagaaatgatcattgcatggaggcatgtataggtatgatctgtgtaaaatctgacataaaaacagtgctattctgagtgaaaatttttttgatgtgcttacataaccatggtgattaaaatgagtttatattttttctcaaaaattttagcagtgtgtaaagtaagtaatctttaactgaactctgaccacttaaaaaaaaatctaaaaattgaactacctatagtagtctgtgtttaaagtgaatttttaaagacaaagcattctaaatgaactcaatataaaaacattcatttggaatgtacatactgaaaaatacaggtttttttgaccaaaagtttttatatcttttctttttatttatttttttcctaagtgccaacaattttctagatattatatacaacacaggctttgatcttggggacttttcccatatatttcacactggagtgaatgaagttgtacttcatttctagagaaaagttatacccaggtccccaattgagaatgtcttgcttgattgaaaacgacatcatcccttggtatactccagggattggtttcaggacccctgcatttaccaaaatttgtgcacactcaagtcctgcagtcacccctgcctaaagatagaatggcttctctgtttttcttctgaaatacaaccagaaacaatgtgtctatttctgaaagaataggattaatgatcatacaaatgggttaatcctgaattctggttgtaaatctggttacagcataactaggattataatgctgcctcattttcacagcactacttgcttatattgacaacaaatcatctcgctaaagagtgaatgtaggccaggcgcggtggctcatgcctgtaatcccagcactttgggaggccgaggcgggtggatcacgaggtcaggagatcgagaccatcctggctaacatggtaaaaccccgtctctactaaaaatagaaaaaaagaaattagcctagcgtggtggctggcgggcgcctgtagtcccagctatttgggaggctaaggcaggagaatggcgtgaacccgggaggcggagcttgcagtgagccgaggtcgtgccactgcactccagcctgggcgacagagcaagactccgtctcaaaaaaaaaaaaaaaaaaaaaaaaagagtgaatgtaatagtcttgcagaaaatgaatgaatacctttgttcaataaaggaaatatgcactgctcacttttttgaaggaaatgccaaagttacgttttacaacaaggctagagtttgtaaattctgggttcatttgtgatgacataagtcagcaaactgcgggaatactgtctcttctatgtattttgtgaatagtaagcataattttagttttgtattatcaatgaaaatttcacttgaaattaaagctgccttttgttatatttttaacctataggataagattccagtattgtatatgagttttaacaaattaaaaaatcaaatcatgtacatttgaaaatatttgcacacatttaaaaataaatgtaaagttgtcttttaaactactcggatgtgtcctttctgaacaaaa

SEQ ID NO: 183584 - DNA, 600 bp, Homo sapiens
  Payload ID: 16171
  Gene Symbol: SLC26A4
  Gene Name: solute carrier family 26 (anion exchanger), member 4
  ENST ID: ENST00000440056
  CDS Start-End: 208-600
aggctgctcggaaaacaggacgaggggagagacttgctcaataagctgaaagttctgcccccgagagggctgcgacagctgctggaatgtgcctgcagcgtccgcctcttggggacccgcggagcgcgccctgacggttccacgcctggcccgggggtctgcacctctcctccagtgcgcacctggagctgcgtcccgggtcaggtcatggcagcgccaggcggcaggtcggagccgccgcagctccccgagtacagctgcagctacatggtgtcgcggccggtctacagcgagctcgctttccagcaacagcacgagcggcgcctgcaggagcgcaagacgctgcgggagagcctggccaagtgctgcagttgttcaagaaagagagcctttggtgtgctaaagactcttgtgcccatcttggagtggctccccaaataccgagtcaaggaatggctgcttagtgacgtcatttcgggagttagtactgggctagtggccacgctgcaagggatggcatatgccctactagctgcagttcctgtcggatatggtctctactctgcttttttccctatcctgacatactttatctttgga

SEQ ID NO: 183585 - DNA, 2689 bp, Homo sapiens
  Payload ID: 16172
  Gene Symbol: SLC26A5
  Gene Name: solute carrier family 26 (anion exchanger), member 5
  Uniprot ID: P58743
  ENST ID: ENST00000306312
  CDS Start-End: 263-2497
acctggaggcagcgcgcgcgtcgaagaggcagcggctgtggagcgcggcggggcggctccgcccagggcagcccgggctgggccaaggagcgagctctcccttctcctgctctcagcctcagtgatcaaggcttcagtgaactgcactggagctcccagcgggggatcttgtcccctgtcccgacttttgtgctgcacattggatctggtgacactcaggaaatgcttgtctccggctgttaaggaataatttcagagtactatggatcatgctgaagaaaatgaaatccttgcagcaacccagaggtactatgtggaaaggcctatctttagtcatccggtcctccaggaaagactacacacaaaggacaaggttcctgattccattgcggataagctgaaacaggcattcacatgtactcctaaaaaaataagaaatatcatttatatgttcctacccataactaaatggctgccagcatacaaattcaaggaatatgtgttgggtgacttggtctcaggcataagcacaggggtgcttcagcttcctcaaggcttagcctttgcaatgctggcagctgtgcctccaatatttggcctgtactcttcattttaccctgttatcatgtattgttttcttggaacctccagacacatatccataggtccttttgctgttattagcctgatgattggtggtgtagctgttcgattagtaccagatgatatagtcattccaggaggagtaaatgcaaccaatggcacagaggccagagatgccttgagagtgaaagtcgccatgtctgtgaccttactttcaggaatcattcagttttgcctaggtgtctgtaggtttggatttgtggccatatatctcacagagcctctggtccgtgggtttaccaccgcagcagctgtgcatgtcttcacctccatgttaaaatatctgtttggagttaaaacaaagcggtacagtggaatcttttccgtggtgtatagtacagttgctgtgttgcagaatgttaaaaacctcaacgtgtgttccctaggcgtcgggctgatggtttttggtttgctgttgggtggcaaggagtttaatgagagatttaaagagaaattgccggcgcctattcctttagagttctttgcggtcgtaatgggaactggcatttcagctgggtttaacttgaaagaatcatacaatgtggatgtcgttggaacacttcctctagggctgctacctccagccaatccggacaccagcctcttccaccttgtgtacgtagatgccattgccatagccatcgttggattttcagtgaccatctccatggccaagaccttagcaaataaacatggctaccaggttgacggcaatcaggagctcattgccctgggactgtgcaattccattggctcactcttccagaccttttcaatttcatgctccttgtctcgaagccttgttcaggagggaaccggtgggaagacacagcttgcaggttgtttggcctcattaatgattctgctggtcatattagcaactggattcctctttgaatcattgccccaggctgtgctgtcggccattgtgattgtcaacctgaagggaatgtttatgcagttctcagatctcccctttttctggagaaccagcaaaatagagctgaccatctggcttaccacttttgtgtcctccttgttcctgggattggactatggtttgatcactgctgtgatcattgctctgctgactgtgatttacagaacacagagtccaagctacaaagtccttggaaagcttcctgaaactgatgtgtatattgatatagacgcatatgaggaggtgaaagaaattcctggaataaaaatatttcaaataaatgcaccaatttactatgcaaatagcgacttgtatagcaatgcattaaaacgaaagactggagtgaacccagcagtcatcatgggagcaaggagaaaggccatgcggaagtacgctaaggaagtcggaaatgcaaatatggccaacgcaactgttgtcaaagcagatgcagaagtagatggagaggatgctaccaagcctgaagaagaggatggtgaagtaaaatatcccccaatagtgatcaaaagcacatttcctgaggaaatgcaaagatttatgcccccaggggataacgtccacactgtcattttggatttcactcaagtcaattttattgattctgttggagtgaaaactctggcagggattgtaaaagaatatggagacgtcggtatatatgtatacttagcaggatgcagtgcacaagttgtgaatgacctcactcggaatagattttttgaaaatcctgccctatgggagctgctgttccacagcattcatgatgcagttttaggcagccaacttagagaggcacttgctgaacaggaagcctcggctcccccttcccaggaggacttggagcccaatgccactcctgccactcctgaggcatagatgaggacctcaccctaggatggggttataagcctctcatgaagttcataatttacacgttttaaatactagacgctagatttttttttctaagggtgaatactagtagtccaggcttgatttggagggtgaatgacgcctagcaagatgtattgtacttgtgtttttttaattgaatacttcaaagataaa

SEQ ID NO: 183586 - DNA, 2474 bp, Homo sapiens
  Payload ID: 16172
  Gene Symbol: SLC26A5
  Gene Name: solute carrier family 26 (anion exchanger), member 5
  Uniprot ID: P58743
  ENST ID: ENST00000339444
  CDS Start-End: 237-2294
aggcagcggctgtggagcgcggcggggcggctccgcccagggcagcccgggctgggccaaggagcgagctctcccttctcctgctctcagcctcagtgatcaaggcttcagtgaactgcactggagctcccagcgggggatcttgtcccctgtcccgacttttgtgctgcacattggatctggtgacactcaggaaatgcttgtctccggctgttaaggaataatttcagagtactatggatcatgctgaagaaaatgaaatccttgcagcaacccagaggtactatgtggaaaggcctatctttagtcatccggtcctccaggaaagactacacacaaaggacaaggttcctgattccattgcggataagctgaaacaggcattcacatgtactcctaaaaaaataagaaatatcatttatatgttcctacccataactaaatggctgccagcatacaaattcaaggaatatgtgttgggtgacttggtctcaggcataagcacaggggtgcttcagcttcctcaaggcttagcctttgcaatgctggcagctgtgcctccaatatttggcctgtactcttcattttaccctgttatcatgtattgttttcttggaacctccagacacatatccataggtccttttgctgttattagcctgatgattggtggtgtagctgttcgattagtaccagatgatatagtcattccaggaggagtaaatgcaaccaatggcacagaggccagagatgccttgagagtgaaagtcgccatgtctgtgaccttactttcaggaatcattcagttttgcctaggtgtctgtaggtttggatttgtggccatatatctcacagagcctctggtccgtgggtttaccaccgcagcagctgtgcatgtcttcacctccatgttaaaatatctgtttggagttaaaacaaagcggtacagtggaatcttttccgtggtgtatagtacagttgctgtgttgcagaatgttaaaaacctcaacgtgtgttccctaggcgtcgggctgatggtttttggtttgctgttgggtggcaaggagtttaatgagagatttaaagagaaattgccggcgcctattcctttagagttctttgcggtcgtaatgggaactggcatttcagctgggtttaacttgaaagaatcatacaatgtggatgtcgttggaacacttcctctagggctgctacctccagccaatccggacaccagcctcttccaccttgtgtacgtagatgccattgccatagccatcgttggattttcagtgaccatctccatggccaagaccttagcaaataaacatggctaccaggttgacggcaatcaggagctcattgccctgggactgtgcaattccattggctcactcttccagaccttttcaatttcatgctccttgtctcgaagccttgttcaggagggaaccggtgggaagacacagcttgcaggttgtttggcctcattaatgattctgctggtcatattagcaactggattcctctttgaatcattgccccaggctgtgctgtcggccattgtgattgtcaacctgaagggaatgtttatgcagttctcagatctcccctttttctggagaaccagcaaaatagagctgaccatctggcttaccacttttgtgtcctccttgttcctgggattggactatggtttgatcactgctgtgatcattgctctgctgactgtgatttacagaacacagagtccaagctacaaagtccttggaaagcttcctgaaactgatgtgtatattgatatagacgcatatgaggaggtgaaagaaattcctggaataaaaatatttcaaataaatgcaccaatttactatgcaaatagcgacttgtatagcaatgcattaaaacgaaagactggagtgaacccagcagtcatcatgggagcaaggagaaaggccatgcggaagtacgctaaggaagtcggaaatgcaaatatggccaacgcaactgttgtcaaagcagatgcagaagtagatggagaggatgctaccaagcctgaagaagaggatggtgaagtaaaatatcccccaatagtgatcaaaagcacatttcctgaggaaatgcaaagatttatgcccccaggggataacgtccacactgtcattttggatttcactcaagtcaattttattgattctgttggagtgaaaactctggcagggattgtaaaagaatatggagacgtcggtatatatgtatacttagcaggatgcagtgctttcatacagagatgaccagaagatggagaccgtaggggaaatgccgtgtaatccaagcagttcaggctttggggccaggtggacagggtttgaatgccagctctggaatctgttagtggggtgacctcagccaagtcacttaacacttctgaactttgttttctcttttgtgaaataaagaaaaaatgaatctac

SEQ ID NO: 183587 - DNA, 2686 bp, Homo sapiens
  Payload ID: 16172
  Gene Symbol: SLC26A5
  Gene Name: solute carrier family 26 (anion exchanger), member 5
  ENST ID: ENST00000354356
  CDS Start-End: 263-2503
acctggaggcagcgcgcgcgtcgaagaggcagcggctgtggagcgcggcggggcggctccgcccagggcagcccgggctgggccaaggagcgagctctcccttctcctgctctcagcctcagtgatcaaggcttcagtgaactgcactggagctcccagcgggggatcttgtcccctgtcccgacttttgtgctgcacattggatctggtgacactcaggaaatgcttgtctccggctgttaaggaataatttcagagtactatggatcatgctgaagaaaatgaaatccttgcagcaacccagaggtactatgtggaaaggcctatctttagtcatccggtcctccaggaaagactacacacaaaggacaaggttcctgattccattgcggataagctgaaacaggcattcacatgtactcctaaaaaaataagaaatatcatttatatgttcctacccataactaaatggctgccagcatacaaattcaaggaatatgtgttgggtgacttggtctcaggcataagcacaggggtgcttcagcttcctcaaggcttagcctttgcaatgctggcagctgtgcctccaatatttggcctgtactcttcattttaccctgttatcatgtattgttttcttggaacctccagacacatatccataggtccttttgctgttattagcctgatgattggtggtgtagctgttcgattagtaccagatgatatagtcattccaggaggagtaaatgcaaccaatggcacagaggccagagatgccttgagagtgaaagtcgccatgtctgtgaccttactttcaggaatcattcagttttgcctaggtgtctgtaggtttggatttgtggccatatatctcacagagcctctggtccgtgggtttaccaccgcagcagctgtgcatgtcttcacctccatgttaaaatatctgtttggagttaaaacaaagcggtacagtggaatcttttccgtggtgtatagtacagttgctgtgttgcagaatgttaaaaacctcaacgtgtgttccctaggcgtcgggctgatggtttttggtttgctgttgggtggcaaggagtttaatgagagatttaaagagaaattgccggcgcctattcctttagagttctttgcggtcgtaatgggaactggcatttcagctgggtttaacttgaaagaatcatacaatgtggatgtcgttggaacacttcctctagggctgctacctccagccaatccggacaccagcctcttccaccttgtgtacgtagatgccattgccatagccatcgttggattttcagtgaccatctccatggccaagaccttagcaaataaacatggctaccaggttgacggcaatcaggagctcattgccctgggactgtgcaattccattggctcactcttccagaccttttcaatttcatgctccttgtctcgaagccttgttcaggagggaaccggtgggaagacacagcttgcaggttgtttggcctcattaatgattctgctggtcatattagcaactggattcctctttgaatcattgccccaggctgtgctgtcggccattgtgattgtcaacctgaagggaatgtttatgcagttctcagatctcccctttttctggagaaccagcaaaatagagctgaccatctggcttaccacttttgtgtcctccttgttcctgggattggactatggtttgatcactgctgtgatcattgctctgctgactgtgatttacagaacacagagtccaagctacaaagtccttggaaagcttcctgaaactgatgtgtatattgatatagacgcatatgaggaggtgaaagaaattcctggaataaaaatatttcaaataaatgcaccaatttactatgcaaatagcgacttgtatagcaatgcattaaaacgaaagactggagtgaacccagcagtcatcatgggagcaaggagaaaggccatgcggaagtacgctaaggaagtcggaaatgcaaatatggccaacgcaactgttgtcaaagcaacacaggatgcagaagtagatggagaggatgctaccaagcctgaagaagaggatggtgaagtaaaatatcccccaatagtgatcaaaagcacatttcctgaggaaatgcaaagatttatgcccccaggggataacgtccacactgtcattttggatttcactcaagtcaattttattgattctgttggagtgaaaactctggcagggattgtaaaagaatatggagacgtcggtatatatgtatacttagcaggatgcagtgcacaagttgtgaatgacctcactcggaatagattttttgaaaatcctgccctatgggagctgctgttccacagcattcatgatgcagttttaggcagccaacttagagaggcacttgctgaacaggaagcctcggctcccccttcccaggaggacttggagcccaatgccactcctgccactcctgaggcatagatgaggacctcaccctaggatggggttataagcctctcatgaagttcataatttacacgttttaaatactagacgctagatttttttttctaagggtgaatactagtagtccaggcttgatttggagggtgaatgacgcctagcaagatgtattgtacttgtgtttttttaattgaatacttc

SEQ ID NO: 183588 - DNA, 1404 bp, Homo sapiens
  Payload ID: 16172
  Gene Symbol: SLC26A5
  Gene Name: solute carrier family 26 (anion exchanger), member 5
  Uniprot ID: P58743
  ENST ID: ENST00000356767
  CDS Start-End: 237-1244
aggcagcggctgtggagcgcggcggggcggctccgcccagggcagcccgggctgggccaaggagcgagctctcccttctcctgctctcagcctcagtgatcaaggcttcagtgaactgcactggagctcccagcgggggatcttgtcccctgtcccgacttttgtgctgcacattggatctggtgacactcaggaaatgcttgtctccggctgttaaggaataatttcagagtactatggatcatgctgaagaaaatgaaatccttgcagcaacccagaggtactatgtggaaaggcctatctttagtcatccggtcctccaggaaagactacacacaaaggacaaggttcctgattccattgcggataagctgaaacaggcattcacatgtactcctaaaaaaataagaaatatcatttatatgttcctacccataactaaatggctgccagcatacaaattcaaggaatatgtgttgggtgacttggtctcaggcataagcacaggggtgcttcagcttcctcaaggcttagcctttgcaatgctggcagctgtgcctccaatatttggcctgtactcttcattttaccctgttatcatgtattgttttcttggaacctccagacacatatccataggtccttttgctgttattagcctgatgattggtggtgtagctgttcgattagtaccagatgatatagtcattccaggaggagtaaatgcaaccaatggcacagaggccagagatgccttgagagtgaaagtcgccatgtctgtgaccttactttcaggaatcattcagttttgcctaggtgtctgtaggtttggatttgtggccatatatctcacagagcctctggtccgtgggtttaccaccgcagcagctgtgcatgtcttcacctccatgttaaaatatctgtttggagttaaaacaaagcggtacagtggaatcttttccgtggtgtatagtacagttgctgtgttgcagaatgttaaaaacctcaacgtgtgttccctaggcgtcgggctgatggtttttggtttgctgttgggtggcaaggagtttaatgagagatttaaagagaaattgccggcgcctattcctttagagttctttgcggtcgtaatgggaactggcatttcagctgggtttaacttgaaagaatcatacaatgtggatgtcgttggaacacttcctctaggctttcatacagagatgaccagaagatggagaccgtaggggaaatgccgtgtaatccaagcagttcaggctttggggccaggtggacagggtttgaatgccagctctggaatctgttagtggggtgacctcagccaagtcacttaacacttctgaactttgttttctcttttgtgaaataaagaaaaaatgaatctac

SEQ ID NO: 183589 - DNA, 2174 bp, Homo sapiens
  Payload ID: 16172
  Gene Symbol: SLC26A5
  Gene Name: solute carrier family 26 (anion exchanger), member 5
  Uniprot ID: P58743
  ENST ID: ENST00000393723
  CDS Start-End: 9-2153
agagtactatggatcatgctgaagaaaatgaaatccttgcagcaacccagaggtactatgtggaaaggcctatctttagtcatccggtcctccaggaaagactacacacaaaggacaaggttcctgattccattgcggataagctgaaacaggcattcacatgtactcctaaaaaaataagaaatatcatttatatgttcctacccataactaaatggctgccagcatacaaattcaaggaatatgtgttgggtgacttggtctcaggcataagcacaggggtgcttcagcttcctcaaggcttagcctttgcaatgctggcagctgtgcctccaatatttggcctgtactcttcattttaccctgttatcatgtattgttttcttggaacctccagacacatatccataggtccttttgctgttattagcctgatgattggtggtgtagctgttcgattagtaccagatgatatagtcattccaggaggagtaaatgcaaccaatggcacagaggccagagatgccttgagagtgaaagtcgccatgtctgtgaccttactttcaggaatcattcagttttgcctaggtgtctgtaggtttggatttgtggccatatatctcacagagcctctggtccgtgggtttaccaccgcagcagctgtgcatgtcttcacctccatgttaaaatatctgtttggagttaaaacaaagcggtacagtggaatcttttccgtggtgtatagtacagttgctgtgttgcagaatgttaaaaacctcaacgtgtgttccctaggcgtcgggctgatggtttttggtttgctgttgggtggcaaggagtttaatgagagatttaaagagaaattgccggcgcctattcctttagagttctttgcggtcgtaatgggaactggcatttcagctgggtttaacttgaaagaatcatacaatgtggatgtcgttggaacacttcctctagggctgctacctccagccaatccggacaccagcctcttccaccttgtgtacgtagatgccattgccatagccatcgttggattttcagtgaccatctccatggccaagaccttagcaaataaacatggctaccaggttgacggcaatcaggagctcattgccctgggactgtgcaattccattggctcactcttccagaccttttcaatttcatgctccttgtctcgaagccttgttcaggagggaaccggtgggaagacacagcttgcaggttgtttggcctcattaatgattctgctggtcatattagcaactggattcctctttgaatcattgccccagaccatctggcttaccacttttgtgtcctccttgttcctgggattggactatggtttgatcactgctgtgatcattgctctgctgactgtgatttacagaacacagagtccaagctacaaagtccttggaaagcttcctgaaactgatgtgtatattgatatagacgcatatgaggaggtgaaagaaattcctggaataaaaatatttcaaataaatgcaccaatttactatgcaaatagcgacttgtatagcaatgcattaaaacgaaagactggagtgaacccagcagtcatcatgggagcaaggagaaaggccatgcggaagtacgctaaggaagtcggaaatgcaaatatggccaacgcaactgttgtcaaagcaacacaggatgcagaagtagatggagaggatgctaccaagcctgaagaagaggatggtgaagtaaaatatcccccaatagtgatcaaaagcacatttcctgaggaaatgcaaagatttatgcccccaggggataacgtccacactgtcattttggatttcactcaagtcaattttattgattctgttggagtgaaaactctggcagggattgtaaaagaatatggagacgtcggtatatatgtatacttagcaggatgcagtgcacaagttgtgaatgacctcactcggaatagattttttgaaaatcctgccctatgggagctgctgttccacagcattcatgatgcagttttaggcagccaacttagagaggcacttgctgaacaggaagcctcggctcccccttcccaggaggacttggagcccaatgccactcctgccactcctgaggcatagatgaggacctcaccctaggat

SEQ ID NO: 183590 - DNA, 2270 bp, Homo sapiens
  Payload ID: 16172
  Gene Symbol: SLC26A5
  Gene Name: solute carrier family 26 (anion exchanger), member 5
  ENST ID: ENST00000393727
  CDS Start-End: 9-2249
agagtactatggatcatgctgaagaaaatgaaatccttgcagcaacccagaggtactatgtggaaaggcctatctttagtcatccggtcctccaggaaagactacacacaaaggacaaggttcctgattccattgcggataagctgaaacaggcattcacatgtactcctaaaaaaataagaaatatcatttatatgttcctacccataactaaatggctgccagcatacaaattcaaggaatatgtgttgggtgacttggtctcaggcataagcacaggggtgcttcagcttcctcaaggcttagcctttgcaatgctggcagctgtgcctccaatatttggcctgtactcttcattttaccctgttatcatgtattgttttcttggaacctccagacacatatccataggtccttttgctgttattagcctgatgattggtggtgtagctgttcgattagtaccagatgatatagtcattccaggaggagtaaatgcaaccaatggcacagaggccagagatgccttgagagtgaaagtcgccatgtctgtgaccttactttcaggaatcattcagttttgcctaggtgtctgtaggtttggatttgtggccatatatctcacagagcctctggtccgtgggtttaccaccgcagcagctgtgcatgtcttcacctccatgttaaaatatctgtttggagttaaaacaaagcggtacagtggaatcttttccgtggtgtatagtacagttgctgtgttgcagaatgttaaaaacctcaacgtgtgttccctaggcgtcgggctgatggtttttggtttgctgttgggtggcaaggagtttaatgagagatttaaagagaaattgccggcgcctattcctttagagttctttgcggtcgtaatgggaactggcatttcagctgggtttaacttgaaagaatcatacaatgtggatgtcgttggaacacttcctctagggctgctacctccagccaatccggacaccagcctcttccaccttgtgtacgtagatgccattgccatagccatcgttggattttcagtgaccatctccatggccaagaccttagcaaataaacatggctaccaggttgacggcaatcaggagctcattgccctgggactgtgcaattccattggctcactcttccagaccttttcaatttcatgctccttgtctcgaagccttgttcaggagggaaccggtgggaagacacagcttgcaggttgtttggcctcattaatgattctgctggtcatattagcaactggattcctctttgaatcattgccccaggctgtgctgtcggccattgtgattgtcaacctgaagggaatgtttatgcagttctcagatctcccctttttctggagaaccagcaaaatagagctgaccatctggcttaccacttttgtgtcctccttgttcctgggattggactatggtttgatcactgctgtgatcattgctctgctgactgtgatttacagaacacagagtccaagctacaaagtccttggaaagcttcctgaaactgatgtgtatattgatatagacgcatatgaggaggtgaaagaaattcctggaataaaaatatttcaaataaatgcaccaatttactatgcaaatagcgacttgtatagcaatgcattaaaacgaaagactggagtgaacccagcagtcatcatgggagcaaggagaaaggccatgcggaagtacgctaaggaagtcggaaatgcaaatatggccaacgcaactgttgtcaaagcaacacaggatgcagaagtagatggagaggatgctaccaagcctgaagaagaggatggtgaagtaaaatatcccccaatagtgatcaaaagcacatttcctgaggaaatgcaaagatttatgcccccaggggataacgtccacactgtcattttggatttcactcaagtcaattttattgattctgttggagtgaaaactctggcagggattgtaaaagaatatggagacgtcggtatatatgtatacttagcaggatgcagtgcacaagttgtgaatgacctcactcggaatagattttttgaaaatcctgccctatgggagctgctgttccacagcattcatgatgcagttttaggcagccaacttagagaggcacttgctgaacaggaagcctcggctcccccttcccaggaggacttggagcccaatgccactcctgccactcctgaggcatagatgaggacctcaccctaggat

SEQ ID NO: 183591 - DNA, 2422 bp, Homo sapiens
  Payload ID: 16172
  Gene Symbol: SLC26A5
  Gene Name: solute carrier family 26 (anion exchanger), member 5
  ENST ID: ENST00000393729
  CDS Start-End: 166-2289
tcccttctcctgctctcagcctcagtgatcaaggcttcagtgaactgcactggagctcccagcgggggatcttgtcccctgtcccgacttttgtgctgcacattggatctggtgacactcaggaaatgcttgtctccggctgttaaggaataatttcagagtactatggatcatgctgaagaaaatgaaatccttgcagcaacccagaggtactatgtggaaaggcctatctttagtcatccggtcctccaggaaagactacacacaaaggacaaggttcctgattccattgcggataagctgaaacaggcattcacatgtactcctaaaaaaataagaaatatcatttatatgttcctacccataactaaatggctgccagcatacaaattcaaggaatatgtgttgggtgacttggtctcaggcataagcacaggggtgcttcagcttcctcaaggtccttttgctgttattagcctgatgattggtggtgtagctgttcgattagtaccagatgatatagtcattccaggaggagtaaatgcaaccaatggcacagaggccagagatgccttgagagtgaaagtcgccatgtctgtgaccttactttcaggaatcattcagttttgcctaggtgtctgtaggtttggatttgtggccatatatctcacagagcctctggtccgtgggtttaccaccgcagcagctgtgcatgtcttcacctccatgttaaaatatctgtttggagttaaaacaaagcggtacagtggaatcttttccgtggtgtatagtacagttgctgtgttgcagaatgttaaaaacctcaacgtgtgttccctaggcgtcgggctgatggtttttggtttgctgttgggtggcaaggagtttaatgagagatttaaagagaaattgccggcgcctattcctttagagttctttgcggtcgtaatgggaactggcatttcagctgggtttaacttgaaagaatcatacaatgtggatgtcgttggaacacttcctctagggctgctacctccagccaatccggacaccagcctcttccaccttgtgtacgtagatgccattgccatagccatcgttggattttcagtgaccatctccatggccaagaccttagcaaataaacatggctaccaggttgacggcaatcaggagctcattgccctgggactgtgcaattccattggctcactcttccagaccttttcaatttcatgctccttgtctcgaagccttgttcaggagggaaccggtgggaagacacagcttgcaggttgtttggcctcattaatgattctgctggtcatattagcaactggattcctctttgaatcattgccccaggctgtgctgtcggccattgtgattgtcaacctgaagggaatgtttatgcagttctcagatctcccctttttctggagaaccagcaaaatagagctgaccatctggcttaccacttttgtgtcctccttgttcctgggattggactatggtttgatcactgctgtgatcattgctctgctgactgtgatttacagaacacagagtccaagctacaaagtccttggaaagcttcctgaaactgatgtgtatattgatatagacgcatatgaggaggtgaaagaaattcctggaataaaaatatttcaaataaatgcaccaatttactatgcaaatagcgacttgtatagcaatgcattaaaacgaaagactggagtgaacccagcagtcatcatgggagcaaggagaaaggccatgcggaagtacgctaaggaagtcggaaatgcaaatatggccaacgcaactgttgtcaaagcagatgcagaagtagatggagaggatgctaccaagcctgaagaagaggatggtgaagtaaaatatcccccaatagtgatcaaaagcacatttcctgaggaaatgcaaagatttatgcccccaggggataacgtccacactgtcattttggatttcactcaagtcaattttattgattctgttggagtgaaaactctggcagggattgtaaaagaatatggagacgtcggtatatatgtatacttagcaggatgcagtgcacaagttgtgaatgacctcactcggaatagattttttgaaaatcctgccctatgggagctgctgttccacagcattcatgatgcagttttaggcagccaacttagagaggcacttgctgaacaggaagcctcggctcccccttcccaggaggacttggagcccaatgccactcctgccactcctgaggcatagatgaggacctcaccctaggatggggttataagcctctcatgaagttcataatttacacgttttaaatactagacgctagatttttttttctaagggtgaatactagtagtccaggcttgatttggagggtgaa

SEQ ID NO: 183592 - DNA, 2498 bp, Homo sapiens
  Payload ID: 16172
  Gene Symbol: SLC26A5
  Gene Name: solute carrier family 26 (anion exchanger), member 5
  Uniprot ID: P58743
  ENST ID: ENST00000393730
  CDS Start-End: 168-2306
tctcccttctcctgctctcagcctcagtgatcaaggcttcagtgaactgcactggagctcccagcgggggatcttgtcccctgtcccgacttttgtgctgcacattggatctggtgacactcaggaaatgcttgtctccggctgttaaggaataatttcagagtactatggatcatgctgaagaaaatgaaatccttgcagcaacccagaggtactatgtggaaaggcctatctttagtcatccggtcctccaggaaagactacacacaaaggacaaggttcctgattccattgcggataagctgaaacaggcattcacatgtactcctaaaaaaataagaaatatcatttatatgttcctacccataactaaatggctgccagcatacaaattcaaggaatatgtgttgggtgacttggtctcaggcataagcacaggggtgcttcagcttcctcaaggcttagcctttgcaatgctggcagctgtgcctccaatatttggcctgtactcttcattttaccctgttatcatgtattgttttcttggaacctccagacacatatccataggtccttttgctgttattagcctgatgattggtggtgtagctgttcgattagtaccagatgatatagtcattccaggaggagtaaatgcaaccaatggcacagaggccagagatgccttgagagtgaaagtcgccatgtctgtgaccttactttcaggaatcattcagttttgcctaggtgtctgtaggtttggatttgtggccatatatctcacagagcctctggtccgtgggtttaccaccgcagcagctgtgcatgtcttcacctccatgttaaaatatctgtttggagttaaaacaaagcggtacagtggaatcttttccgtggtgtatagtacagttgctgtgttgcagaatgttaaaaacctcaacgtgtgttccctaggcgtcgggctgatggtttttggtttgctgttgggtggcaaggagtttaatgagagatttaaagagaaattgccggcgcctattcctttagagttctttgcggtcgtaatgggaactggcatttcagctgggtttaacttgaaagaatcatacaatgtggatgtcgttggaacacttcctctagggctgctacctccagccaatccggacaccagcctcttccaccttgtgtacgtagatgccattgccatagccatcgttggattttcagtgaccatctccatggccaagaccttagcaaataaacatggctaccaggttgacggcaatcaggagctcattgccctgggactgtgcaattccattggctcactcttccagaccttttcaatttcatgctccttgtctcgaagccttgttcaggagggaaccggtgggaagacacagcttgcaggttgtttggcctcattaatgattctgctggtcatattagcaactggattcctctttgaatcattgccccagaccatctggcttaccacttttgtgtcctccttgttcctgggattggactatggtttgatcactgctgtgatcattgctctgctgactgtgatttacagaacacagagtccaagctacaaagtccttggaaagcttcctgaaactgatgtgtatattgatatagacgcatatgaggaggtgaaagaaattcctggaataaaaatatttcaaataaatgcaccaatttactatgcaaatagcgacttgtatagcaatgcattaaaacgaaagactggagtgaacccagcagtcatcatgggagcaaggagaaaggccatgcggaagtacgctaaggaagtcggaaatgcaaatatggccaacgcaactgttgtcaaagcagatgcagaagtagatggagaggatgctaccaagcctgaagaagaggatggtgaagtaaaatatcccccaatagtgatcaaaagcacatttcctgaggaaatgcaaagatttatgcccccaggggataacgtccacactgtcattttggatttcactcaagtcaattttattgattctgttggagtgaaaactctggcagggattgtaaaagaatatggagacgtcggtatatatgtatacttagcaggatgcagtgcacaagttgtgaatgacctcactcggaatagattttttgaaaatcctgccctatgggagctgctgttccacagcattcatgatgcagttttaggcagccaacttagagaggcacttgctgaacaggaagcctcggctcccccttcccaggaggacttggagcccaatgccactcctgccactcctgaggcatagatgaggacctcaccctaggatggggttataagcctctcatgaagttcataatttacacgttttaaatactagacgctagatttttttttctaagggtgaatactagtagtccaggcttgatttggagggtgaatgacgcctagcaagatgtattgtacttgtgtttttttaattgaatacttcaaagataaa

SEQ ID NO: 183593 - DNA, 1947 bp, Homo sapiens
  Payload ID: 16172
  Gene Symbol: SLC26A5
  Gene Name: solute carrier family 26 (anion exchanger), member 5
  Uniprot ID: P58743
  ENST ID: ENST00000393735
  CDS Start-End: 237-1787
aggcagcggctgtggagcgcggcggggcggctccgcccagggcagcccgggctgggccaaggagcgagctctcccttctcctgctctcagcctcagtgatcaaggcttcagtgaactgcactggagctcccagcgggggatcttgtcccctgtcccgacttttgtgctgcacattggatctggtgacactcaggaaatgcttgtctccggctgttaaggaataatttcagagtactatggatcatgctgaagaaaatgaaatccttgcagcaacccagaggtactatgtggaaaggcctatctttagtcatccggtcctccaggaaagactacacacaaaggacaaggttcctgattccattgcggataagctgaaacaggcattcacatgtactcctaaaaaaataagaaatatcatttatatgttcctacccataactaaatggctgccagcatacaaattcaaggaatatgtgttgggtgacttggtctcaggcataagcacaggggtgcttcagcttcctcaaggcttagcctttgcaatgctggcagctgtgcctccaatatttggcctgtactcttcattttaccctgttatcatgtattgttttcttggaacctccagacacatatccataggtccttttgctgttattagcctgatgattggtggtgtagctgttcgattagtaccagatgatatagtcattccaggaggagtaaatgcaaccaatggcacagaggccagagatgccttgagagtgaaagtcgccatgtctgtgaccttactttcaggaatcattcagttttgcctaggtgtctgtaggtttggatttgtggccatatatctcacagagcctctggtccgtgggtttaccaccgcagcagctgtgcatgtcttcacctccatgttaaaatatctgtttggagttaaaacaaagcggtacagtggaatcttttccgtggtgtatagtacagttgctgtgttgcagaatgttaaaaacctcaacgtgtgttccctaggcgtcgggctgatggtttttggtttgctgttgggtggcaaggagtttaatgagagatttaaagagaaattgccggcgcctattcctttagagttctttgcggtcgtaatgggaactggcatttcagctgggtttaacttgaaagaatcatacaatgtggatgtcgttggaacacttcctctagggctgctacctccagccaatccggacaccagcctcttccaccttgtgtacgtagatgccattgccatagccatcgttggattttcagtgaccatctccatggccaagaccttagcaaataaacatggctaccaggttgacggcaatcaggagctcattgccctgggactgtgcaattccattggctcactcttccagaccttttcaatttcatgctccttgtctcgaagccttgttcaggagggaaccggtgggaagacacagcttgcaggttgtttggcctcattaatgattctgctggtcatattagcaactggattcctctttgaatcattgccccaggctgtgctgtcggccattgtgattgtcaacctgaagggaatgtttatgcagttctcagatctcccctttttctggagaaccagcaaaatagagctgaccatctggcttaccacttttgtgtcctccttgttcctgggattggactatggtttgatcactgctgtgatcattgctctgctgactgtgatttacagaacacagagctttcatacagagatgaccagaagatggagaccgtaggggaaatgccgtgtaatccaagcagttcaggctttggggccaggtggacagggtttgaatgccagctctggaatctgttagtggggtgacctcagccaagtcacttaacacttctgaactttgttttctcttttgtgaaataaagaaaaaatgaatctac

SEQ ID NO: 183594 - DNA, 2374 bp, Homo sapiens
  Payload ID: 16172
  Gene Symbol: SLC26A5
  Gene Name: solute carrier family 26 (anion exchanger), member 5
  ENST ID: ENST00000423416
  CDS Start-End: 168-1589
tctcccttctcctgctctcagcctcagtgatcaaggcttcagtgaactgcactggagctcccagcgggggatcttgtcccctgtcccgacttttgtgctgcacattggatctggtgacactcaggaaatgcttgtctccggctgttaaggaataatttcagagtactatggatcatgctgaagaaaatgaaatccttgcagcaacccagaggtactatgtggaaaggcctatctttagtcatccggtcctccaggaaagactacacacaaaggacaaggttcctgattccattgcggataagctgaaacaggcattcacatgtactcctaaaaaaataagaaatatcatttatatgttcctacccataactaaatggctgccagcatacaaattcaaggaatatgtgttgggtgacttggtctcaggcataagcacaggggtgcttcagcttcctcaaggcttagcctttgcaatgctggcagctgtgcctccaatatttggcctgtactcttcattttaccctgttatcatgtattgttttcttggaacctccagacacatatccataggtccttttgctgttattagcctgatgattggtggtgtagctgttcgattagtaccagatgatatagtcattccaggaggagtaaatgcaaccaatggcacagaggccagagatgccttgagagtgaaagtcgccatgtctgtgaccttactttcaggaatcattcagttttgcctaggtgtctgtaggtttggatttgtggccatatatctcacagagcctctggtccgtgggtttaccaccgcagcagctgtgcatgtcttcacctccatgttaaaatatctgtttggagttaaaacaaagcggtacagtggaatcttttccgtggtgtatagtacagttgctgtgttgcagaatgttaaaaacctcaacgtgtgttccctaggcgtcgggctgatggtttttggtttgctgttgggtggcaaggagtttaatgagagatttaaagagaaattgccggcgcctattcctttagagttctttgcggtcgtaatgggaactggcatttcagctgggtttaacttgaaagaatcatacaatgtggatgtcgttggaacacttcctctagggctgctacctccagccaatccggacaccagcctcttccaccttgtgtacgtagatgccattgccatagccatcgttggattttcagtgaccatctccatggccaagaccttagcaaataaacatggctaccaggttgacggcaatcaggagctcattgccctgggactgtgcaattccattggctcactcttccagaccttttcaatttcatgctccttgtctcgaagccttgttcaggagggaaccggtgggaagacacagcttgcaggttgtttggcctcattaatgattctgctggtcatattagcaactggattcctctttgaatcattgccccagaccatctggcttaccacttttgtgtcctccttgttcctgggattggactatggtttgatcactgctgtgatcattgctctgctgactgtgatttacagaacacagaggtgaaagaaattcctggaataaaaatatttcaaataaatgcaccaatttactatgcaaatagcgacttgtatagcaatgcattaaaacgaaagactggagtgaacccagcagtcatcatgggagcaaggagaaaggccatgcggaagtacgctaaggaagtcggaaatgcaaatatggccaacgcaactgttgtcaaagcagatgcagaagtagatggagaggatgctaccaagcctgaagaagaggatggtgaagtaaaatatcccccaatagtgatcaaaagcacatttcctgaggaaatgcaaagatttatgcccccaggggataacgtccacactgtcattttggatttcactcaagtcaattttattgattctgttggagtgaaaactctggcagggattgtaaaagaatatggagacgtcggtatatatgtatacttagcaggatgcagtgcacaagttgtgaatgacctcactcggaatagattttttgaaaatcctgccctatgggagctgctgttccacagcattcatgatgcagttttaggcagccaacttagagaggcacttgctgaacaggaagcctcggctcccccttcccaggaggacttggagcccaatgccactcctgccactcctgaggcatagatgaggacctcaccctaggatggggttataagcctctcatgaagttcataatttacacgttttaaatactagacgctagatttttttttctaagggtgaatactagtagtccaggcttgatttggagggtgaatgacg

SEQ ID NO: 183595 - DNA, 2588 bp, Homo sapiens
  Payload ID: 16172
  Gene Symbol: SLC26A5
  Gene Name: solute carrier family 26 (anion exchanger), member 5
  Uniprot ID: P58743
  ENST ID: ENST00000432958
  CDS Start-End: 263-2401
acctggaggcagcgcgcgcgtcgaagaggcagcggctgtggagcgcggcggggcggctccgcccagggcagcccgggctgggccaaggagcgagctctcccttctcctgctctcagcctcagtgatcaaggcttcagtgaactgcactggagctcccagcgggggatcttgtcccctgtcccgacttttgtgctgcacattggatctggtgacactcaggaaatgcttgtctccggctgttaaggaataatttcagagtactatggatcatgctgaagaaaatgaaatccttgcagcaacccagaggtactatgtggaaaggcctatctttagtcatccggtcctccaggaaagactacacacaaaggacaaggttcctgattccattgcggataagctgaaacaggcattcacatgtactcctaaaaaaataagaaatatcatttatatgttcctacccataactaaatggctgccagcatacaaattcaaggaatatgtgttgggtgacttggtctcaggcataagcacaggggtgcttcagcttcctcaaggcttagcctttgcaatgctggcagctgtgcctccaatatttggcctgtactcttcattttaccctgttatcatgtattgttttcttggaacctccagacacatatccataggtccttttgctgttattagcctgatgattggtggtgtagctgttcgattagtaccagatgatatagtcattccaggaggagtaaatgcaaccaatggcacagaggccagagatgccttgagagtgaaagtcgccatgtctgtgaccttactttcaggaatcattcagttttgcctaggtgtctgtaggtttggatttgtggccatatatctcacagagcctctggtccgtgggtttaccaccgcagcagctgtgcatgtcttcacctccatgttaaaatatctgtttggagttaaaacaaagcggtacagtggaatcttttccgtggtgtatagtacagttgctgtgttgcagaatgttaaaaacctcaacgtgtgttccctaggcgtcgggctgatggtttttggtttgctgttgggtggcaaggagtttaatgagagatttaaagagaaattgccggcgcctattcctttagagttctttgcggtcgtaatgggaactggcatttcagctgggtttaacttgaaagaatcatacaatgtggatgtcgttggaacacttcctctagggctgctacctccagccaatccggacaccagcctcttccaccttgtgtacgtagatgccattgccatagccatcgttggattttcagtgaccatctccatggccaagaccttagcaaataaacatggctaccaggttgacggcaatcaggagctcattgccctgggactgtgcaattccattggctcactcttccagaccttttcaatttcatgctccttgtctcgaagccttgttcaggagggaaccggtgggaagacacagcttgcaggttgtttggcctcattaatgattctgctggtcatattagcaactggattcctctttgaatcattgccccagaccatctggcttaccacttttgtgtcctccttgttcctgggattggactatggtttgatcactgctgtgatcattgctctgctgactgtgatttacagaacacagagtccaagctacaaagtccttggaaagcttcctgaaactgatgtgtatattgatatagacgcatatgaggaggtgaaagaaattcctggaataaaaatatttcaaataaatgcaccaatttactatgcaaatagcgacttgtatagcaatgcattaaaacgaaagactggagtgaacccagcagtcatcatgggagcaaggagaaaggccatgcggaagtacgctaaggaagtcggaaatgcaaatatggccaacgcaactgttgtcaaagcagatgcagaagtagatggagaggatgctaccaagcctgaagaagaggatggtgaagtaaaatatcccccaatagtgatcaaaagcacatttcctgaggaaatgcaaagatttatgcccccaggggataacgtccacactgtcattttggatttcactcaagtcaattttattgattctgttggagtgaaaactctggcagggattgtaaaagaatatggagacgtcggtatatatgtatacttagcaggatgcagtgcacaagttgtgaatgacctcactcggaatagattttttgaaaatcctgccctatgggagctgctgttccacagcattcatgatgcagttttaggcagccaacttagagaggcacttgctgaacaggaagcctcggctcccccttcccaggaggacttggagcccaatgccactcctgccactcctgaggcatagatgaggacctcaccctaggatggggttataagcctctcatgaagttcataatttacacgttttaaatactagacgctagatttttttttctaagggtgaatactagtagtccaggcttgatttggagggtgaatgacgcctagcaagatgtattgtacttgtgtttttttaattgaatacttcaaag

SEQ ID NO: 183596 - DNA, 2370 bp, Homo sapiens
  Payload ID: 16172
  Gene Symbol: SLC26A5
  Gene Name: solute carrier family 26 (anion exchanger), member 5
  ENST ID: ENST00000456463
  CDS Start-End: 166-801
tcccttctcctgctctcagcctcagtgatcaaggcttcagtgaactgcactggagctcccagcgggggatcttgtcccctgtcccgacttttgtgctgcacattggatctggtgacactcaggaaatgcttgtctccggctgttaaggaataatttcagagtactatggatcatgctgaagaaaatgaaatccttgcagcaacccagaggtactatgtggaaaggcctatctttagtcatccggtcctccaggaaagactacacacaaaggacaaggttcctgattccattgcggataagctgaaacaggcattcacatgtactcctaaaaaaataagaaatatcatttatatgttcctacccataactaaatggctgccagcatacaaattcaaggaatatgtgttgggtgacttggtctcaggcataagcacaggggtgcttcagcttcctcaaggtccttttgctgttattagcctgatgattggtggtgtagctgttcgattagtaccagatgatatagtcattccaggaggagtaaatgcaaccaatggcacagaggccagagatgccttgagagtgaaagtcgccatgtctgtgaccttactttcaggaatcattcagttttgcctaggtgtctgtaggtttggatttgtggccatatatctcacagagcctctggtccgtgggtttaccaccgcagcagctgtgcatgtcttcacctccatgttaaaatatctgtttggagttaaaacaaagcggtacagtggaatcttttccgtggtgtatgcgtcgggctgatggtttttggtttgctgttgggtggcaaggagtttaatgagagatttaaagagaaattgccggcgcctattcctttagagttctttgcggtcgtaatgggaactggcatttcagctgggtttaacttgaaagaatcatacaatgtggatgtcgttggaacacttcctctagggctgctacctccagccaatccggacaccagcctcttccaccttgtgtacgtagatgccattgccatagccatcgttggattttcagtgaccatctccatggccaagaccttagcaaataaacatggctaccaggttgacggcaatcaggagctcattgccctgggactgtgcaattccattggctcactcttccagaccttttcaatttcatgctccttgtctcgaagccttgttcaggagggaaccggtgggaagacacagcttgcaggttgtttggcctcattaatgattctgctggtcatattagcaactggattcctctttgaatcattgccccaggctgtgctgtcggccattgtgattgtcaacctgaagggaatgtttatgcagttctcagatctcccctttttctggagaaccagcaaaatagagctgaccatctggcttaccacttttgtgtcctccttgttcctgggattggactatggtttgatcactgctgtgatcattgctctgctgactgtgatttacagaacacagagtccaagctacaaagtccttggaaagcttcctgaaactgatgtgtatattgatatagacgcatatgaggaggtgaaagaaattcctggaataaaaatatttcaaataaatgcaccaatttactatgcaaatagcgacttgtatagcaatgcattaaaacgaaagactggagtgaacccagcagtcatcatgggagcaaggagaaaggccatgcggaagtacgctaaggaagtcggaaatgcaaatatggccaacgcaactgttgtcaaagcagatgcagaagtagatggagaggatgctaccaagcctgaagaagaggatggtgaagtaaaatatcccccaatagtgatcaaaagcacatttcctgaggaaatgcaaagatttatgcccccaggggataacgtccacactgtcattttggatttcactcaagtcaattttattgattctgttggagtgaaaactctggcagggattgtaaaagaatatggagacgtcggtatatatgtatacttagcaggatgcagtgcacaagttgtgaatgacctcactcggaatagattttttgaaaatcctgccctatgggagctgctgttccacagcattcatgatgcagttttaggcagccaacttagagaggcacttgctgaacaggaagcctcggctcccccttcccaggaggacttggagcccaatgccactcctgccactcctgaggcatagatgaggacctcaccctaggatggggttataagcctctcatgaagttcataatttacacgttttaaatactagacgctagatttttttttctaagggtgaatactagtagtccaggcttgatttggagggtgaa

SEQ ID NO: 183597 - DNA, 2324 bp, Homo sapiens
  Payload ID: 16172
  Gene Symbol: SLC26A5
  Gene Name: solute carrier family 26 (anion exchanger), member 5
  ENST ID: ENST00000445809
  CDS Start-End: 168-914
tctcccttctcctgctctcagcctcagtgatcaaggcttcagtgaactgcactggagctcccagcgggggatcttgtcccctgtcccgacttttgtgctgcacattggatctggtgacactcaggaaatgcttgtctccggctgttaaggaataatttcagagtactatggatcatgctgaagaaaatgaaatccttgcagcaacccagaggtactatgtggaaaggcctatctttagtcatccggtcctccaggaaagactacacacaaaggacaaggttcctgattccattgcggataagctgaaacaggcattcacatgtactcctaaaaaaataagaaatatcatttatatgttcctacccataactaaatggctgccagcatacaaattcaaggaatatgtgttgggtgacttggtctcaggcataagcacaggggtgcttcagcttcctcaaggcttagcctttgcaatgctggcagctgtgcctccaatatttggcctgtactcttcattttaccctgttatcatgtattgttttcttggaacctccagacacatatccataggtccttttgctgttattagcctgatgattggtggtgtagctgttcgattagtaccagatgatatagtcattccaggaggagtaaatgcaaccaatggcacagaggccagagatgccttgagagtgaaagtcgccatgtctgtgaccttactttcaggaatcattcagttttgcctaggtgtctgtaggtttggatttgtggccatatatctcacagagcctctggtccgtgggtttaccaccgcagcagctgtgcatgtcttcacctccatgttaaaatatctgtttggagttaaaacaaagcggtacagtggaatcttttccgtggtgtatgcgtcgggctgatggtttttggtttgctgttgggtggcaaggagtttaatgagagatttaaagagaaattgccggcgcctattcctttagagttctttgcggtcgtaatgggaactggcatttcagctgggtttaacttgaaagaatcatacaatgtggatgtcgttggaacacttcctctagggagctcattgccctgggactgtgcaattccattggctcactcttccagaccttttcaatttcatgctccttgtctcgaagccttgttcaggagggaaccggtgggaagacacagcttgcaggttgtttggcctcattaatgattctgctggtcatattagcaactggattcctctttgaatcattgccccaggctgtgctgtcggccattgtgattgtcaacctgaagggaatgtttatgcagttctcagatctcccctttttctggagaaccagcaaaatagagctgaccatctggcttaccacttttgtgtcctccttgttcctgggattggactatggtttgatcactgctgtgatcattgctctgctgactgtgatttacagaacacagaggtgaaagaaattcctggaataaaaatatttcaaataaatgcaccaatttactatgcaaatagcgacttgtatagcaatgcattaaaacgaaagactggagtgaacccagcagtcatcatgggagcaaggagaaaggccatgcggaagtacgctaaggaagtcggaaatgcaaatatggccaacgcaactgttgtcaaagcagatgcagaagtagatggagaggatgctaccaagcctgaagaagaggatggtgaagtaaaatatcccccaatagtgatcaaaagcacatttcctgaggaaatgcaaagatttatgcccccaggggataacgtccacactgtcattttggatttcactcaagtcaattttattgattctgttggagtgaaaactctggcagggattgtaaaagaatatggagacgtcggtatatatgtatacttagcaggatgcagtgcacaagttgtgaatgacctcactcggaatagattttttgaaaatcctgccctatgggagctgctgttccacagcattcatgatgcagttttaggcagccaacttagagaggcacttgctgaacaggaagcctcggctcccccttcccaggaggacttggagcccaatgccactcctgccactcctgaggcatagatgaggacctcaccctaggatggggttataagcctctcatgaagttcataatttacacgttttaaatactagacgctagatttttttttctaagggtgaatactagtagtccaggcttgatttggagggtgaatgacgcctagcaagatgtattgtacttgtgtttttttaattgaatacttcaaagataaa

SEQ ID NO: 183598 - DNA, 2242 bp, Homo sapiens
  Payload ID: 16172
  Gene Symbol: SLC26A5
  Gene Name: solute carrier family 26 (anion exchanger), member 5
  ENST ID: ENST00000454864
  CDS Start-End: 168-1511
tctcccttctcctgctctcagcctcagtgatcaaggcttcagtgaactgcactggagctcccagcgggggatcttgtcccctgtcccgacttttgtgctgcacattggatctggtgacactcaggaaatgcttgtctccggctgttaaggaataatttcagagtactatggatcatgctgaagaaaatgaaatccttgcagcaacccagaggtactatgtggaaaggcctatctttagtcatccggtcctccaggaaagactacacacaaaggacaaggttcctgattccattgcggataagctgaaacaggcattcacatgtactcctaaaaaaataagaaatatcatttatatgttcctacccataactaaatggctgccagcatacaaattcaaggaatatgtgttgggtgacttggtctcaggcataagcacaggggtgcttcagcttcctcaaggcttagcctttgcaatgctggcagctgtgcctccaatatttggcctgtactcttcattttaccctgttatcatgtattgttttcttggaacctccagacacatatccataggtccttttgctgttattagcctgatgattggtggtgtagctgttcgattagtaccagatgatatagtcattccaggaggagtaaatgcaaccaatggcacagaggccagagatgccttgagagtgaaagtcgccatgtctgtgaccttactttcaggaatcattcagttttgcctaggtgtctgtaggtttggatttgtggccatatatctcacagagcctctggtccgtgggtttaccaccgcagcagctgtgcatgtcttcacctccatgttaaaatatctgtttggagttaaaacaaagcggtacagtggaatcttttccgtggtgtatagtacagttgctgtgttgcagaatgttaaaaacctcaacgtgtgttccctaggcgtcgggctgatggtttttggtttgctgttgggtggcaaggagtttaatgagagatttaaagagaaattgccggcgcctattcctttagagttctttgcggtcgtaatgggaactggcatttcagctgggtttaacttgaaagaatcatacaatgtggatgtcgttggaacacttcctctagggctgctacctccagccaatccggacaccagcctcttccaccttgtgtacgtagatgccattgccatagccatcgttggattttcagtgaccatctccatggccaagaccttagcaaataaacatggctaccaggttgacggcaatcaggagctcattgccctgggactgtgcaattccattggctcactcttccagaccttttcaatttcatgctccttgtctcgaagccttgttcaggagggaaccggtgggaagacacagaccatctggcttaccacttttgtgtcctccttgttcctgggattggactatggtttgatcactgctgtgatcattgctctgctgactgtgatttacagaacacagaggtgaaagaaattcctggaataaaaatatttcaaataaatgcaccaatttactatgcaaatagcgacttgtatagcaatgcattaaaacgaaaggatgcagaagtagatggagaggatgctaccaagcctgaagaagaggatggtgaagtaaaatatcccccaatagtgatcaaaagcacatttcctgaggaaatgcaaagatttatgcccccaggggataacgtccacactgtcattttggatttcactcaagtcaattttattgattctgttggagtgaaaactctggcagggattgtaaaagaatatggagacgtcggtatatatgtatacttagcaggatgcagtgcacaagttgtgaatgacctcactcggaatagattttttgaaaatcctgccctatgggagctgctgttccacagcattcatgatgcagttttaggcagccaacttagagaggcacttgctgaacaggaagcctcggctcccccttcccaggaggacttggagcccaatgccactcctgccactcctgaggcatagatgaggacctcaccctaggatggggttataagcctctcatgaagttcataatttacacgttttaaatactagacgctagatttttttttctaagggtgaatactagtagtccaggcttgatttggagggtgaatgacgcctagcaagatgtattgtacttgtgtttttttaattgaatacttcaaagataaa

SEQ ID NO: 183599 - DNA, 2586 bp, Homo sapiens
  Payload ID: 16173
  Gene Symbol: SLC26A6
  Gene Name: solute carrier family 26 (anion exchanger), member 6
  ENST ID: ENST00000307364
  CDS Start-End: 62-424
ggagcgtagcggcctctagctcgagcagcaggagcagcccgcaccggacaacttgcgagccatggggctggcggatgcgtcgggaccgagggacacacaggcactgctgtctgcaacacaagcaatggacctgcggaggcgagactaccacatggaacggccgctgctgaaccaggagcatttggaggagctggggcgctggggctcagcacctaggacccaccagtggcggacctggttgcagtgctcccgtgctcgggcctatgcccttctgctccaacacctcccggttttggtctggttaccccggtatcctgtgcgtgactggctcctgggtgacctgttatccggcctgagtgtggccatcatgcagcttccgcaggatctgctctccaggcctgcactgctaccattctacccctaggcttggcctacgccctcctggctggattgccccccgtgtttggcctctatagctccttctaccctgtcttcatctacttcctgtttggcacttcccggcacatctccgtggggacctttgctgtcatgtctgtgatggtgggcagtgtgacagaatccctggccccgcaggccttgaacgactccatgatcaatgagacagccagagatgctgcccgggtacaggtggcctccacactcagtgtcctggttggcctcttccaggtggggctgggcctgatccacttcggcttcgtggtcacctacctgtcagaacctcttgtccgaggctataccacagctgcagctgtgcaggtcttcgtctcacagctcaagtatgtgtttggcctccatctgagcagccactctgggccactgtccctcatctatacagtgctggaggtctgctggaagctgccccagagcaaggttggcaccgtggtcactgcagctgtggctggggtggtgctcgtggtggtgaagctgttgaatgacaagctgcagcagcagctgcccatgccgatacccggggagctgctcacgctcatcggggccacaggcatctcctatggcatgggtctaaagcacagatttgaggtagatgtcgtgggcaacatccctgcagggctggtgcccccagtggcccccaacacccagctgttctcaaagctcgtgggcagcgccttcaccatcgctgtggttgggtttgccattgccatctcactggggaagatcttcgccctgaggcacggctaccgggtggacagcaaccaggagctggtggccctgggcctcagtaaccttatcggaggcatcttccagtgcttccccgtgagttgctctatgtctcggagcctggtacaggagagcaccgggggcaactcgcaggttgctggagccatctcttcccttttcatcctcctcatcattgtcaaacttggggaactcttccatgacctgcccaaggcggtcctggcagccatcatcattgtgaacctgaagggcatgctgaggcagctcagcgacatgcgctccctctggaaggccaatcgggcggatctgcttatctggctggtgaccttcacggccaccatcttgctgaacctggaccttggcttggtggttgcggtcatcttctccctgctgctcgtggtggtccggacacagatgccccactactctgtcctggggcaggtgccagacacggatatttacagagatgtggcagagtactcagaggccaaggaagtccggggggtgaaggtcttccgctcctcggccaccgtgtactttgccaatgctgagttctacagtgatgcgctgaagcagaggtgtggtgtggatgtcgacttcctcatctcccagaagaagaaactgctcaagaagcaggagcagctgaagctgaagcaactgcagaaagaggagaagcttcggaaacaggcagggccccttttgtctgcatgtctggctccccagcaggtgagctcaggagataagatggaagatgcaacagccaatggtcaagaagactccaaggccccagatgggtccacactgaaggccctgggcctgcctcagccagacttccacagcctcatcctggacctgggtgccctctcctttgtggacactgtgtgcctcaagagcctgaagaatattttccatgacttccgggagattgaggtggaggtgtacatggcggcctgccacagccctgtggtcagccagcttgaggctgggcacttcttcgatgcatccatcaccaagaagcatctctttgcctctgtccatgatgctgtcacctttgccctccaacacccgaggcctgtccccgacagccctgtttcggtcaccagactctgaacatgctacatcctgcccaagactgcacctctggaggtgcagggcacccttgagaagcccctcacccctaggccgcctccaggtgctacccaggagtcccctccatgtacacacacacaactcagggaaggaggtcctgggactccaagttcagcgctccaggtctgggacagggcctgcatgcagtcaggctggcagtggcgcggtacagggagggaactggtgcatattttagcctcaggaataaagatttgtctgctc

SEQ ID NO: 183600 - DNA, 2317 bp, Homo sapiens
  Payload ID: 16173
  Gene Symbol: SLC26A6
  Gene Name: solute carrier family 26 (anion exchanger), member 6
  ENST ID: ENST00000337000
  CDS Start-End: 101-2056
gagcgcagctggcctcacccggtcccggcgccgccttccggagcgtagcggcctctagctcgagcagcaggagcagcccgcaccggacaacttgcgagccatggggctggcggatgcgtcgggaccgagggacacacaggcactgctgtctgcaacacaagcaatggacctgcggaggcgagactaccacatggaacggccgctgctgaaccaggagcatttggaggagctggggcgctggggctcagcacctaggacccaccagtggcggacctggttgcagtgctcccgtgctcgggcctatgcccttctgctccaacacctcccggttttggtctggttaccccggtatcctgtgcgtgactggctcctgggtgacctgttatccggcctgagtgtggccatcatgcagcttccgcagggcttggcctacgccctcctggctggattgccccccgtgtttggcctctatagctccttctaccctgtcttcatctacttcctgtttggcacttcccggcacatctccgtggtgctggaggtctgctggaagctgccccagagcaaggttggcaccgtggtcactgcagctgtggctggggtggtgctcgtggtggtgaagctgttgaatgacaagctgcagcagcagctgcccatgccgatacccggggagctgctcacgctcatcggggccacaggcatctcctatggcatgggtctaaagcacagatttgaggtagatgtcgtgggcaacatccctgcagggctggtgcccccagtggcccccaacacccagctgttctcaaagctcgtgggcagcgccttcaccatcgctgtggttgggtttgccattgccatctcactggggaagatcttcgccctgaggcacggctaccgggtggacagcaaccaggagctggtggccctgggcctcagtaaccttatcggaggcatcttccagtgcttccccgtgagttgctctatgtctcggagcctggtacaggagagcaccgggggcaactcgcaggttgctggagccatctcttcccttttcatcctcctcatcattgtcaaacttggggaactcttccatgacctgcccaaggcggtcctggcagccatcatcattgtgaacctgaagggcatgctgaggcagctcagcgacatgcgctccctctggaaggccaatcgggcggatctgcttatctggctggtgaccttcacggccaccatcttgctgaacctggaccttggcttggtggttgcggtcatcttctccctgctgctcgtggtggtccggacacagatgccccactactctgtcctggggcaggtgccagacacggatatttacagagatgtggcagagtactcagaggccaaggaagtccggggggtgaaggtcttccgctcctcggccaccgtgtactttgccaatgctgagttctacagtgatgcgctgaagcagaggtgtggtgtggatgtcgacttcctcatctcccagaagaagaaactgctcaagaagcaggagcagctgaagctgaagcaactgcagaaagaggagaagcttcggaaacaggctgcctcccccaagggcgcctcagtttccattaatgtcaacaccagccttgaagacatgaggagcaacaacgttgaggactgcaagatgatggtgagctcaggagataagatggaagatgcaacagccaatggtcaagaagactccaaggccccagatgggtccacactgaaggccctgggcctgcctcagccagacttccacagcctcatcctggacctgggtgccctctcctttgtggacactgtgtgcctcaagagcctgaagaatattttccatgacttccgggagattgaggtggaggtgtacatggcggcctgccacagccctgtggtcagccagcttgaggctgggcacttcttcgatgcatccatcaccaagaagcatctctttgcctctgtccatgatgctgtcacctttgccctccaacacccgaggcctgtccccgacagccctgtttcggtcaccagactctgaacatgctacatcctgcccaagactgcacctctggaggtgcagggcacccttgagaagcccctcacccctaggccgcctccaggtgctacccaggagtcccctccatgtacacacacacaactcagggaaggaggtcctgggactccaagttcagcgctccaggtctgggacagggcctgcatgcagtcaggctggcagtggcgcggtacagggagggaactggtgcatattttagcctcaggaataaagatttgtctgctc

SEQ ID NO: 183601 - DNA, 2729 bp, Homo sapiens
  Payload ID: 16173
  Gene Symbol: SLC26A6
  Gene Name: solute carrier family 26 (anion exchanger), member 6
  ENST ID: ENST00000358747
  CDS Start-End: 252-2468
aaagaggctttctcaccagccaaagttcaggtactgcccctgtctgagtttggacatgtggcccacagatgccagctgggggctggaatactgtaccttgatcttagggcctggaaaaatcaggtaggtaactctctggtcctaggtggaggtgtaggggaggttgggccagggatgccttcactgtgtctctctggtcttgccaccccagaccgagggacacacaggcactgctgtctgcaacacaagcaatggacctgcggaggcgagactaccacatggaacggccgctgctgaaccaggagcatttggaggagctggggcgctggggctcagcacctaggacccaccagtggcggacctggttgcagtgctcccgtgctcgggcctatgcccttctgctccaacacctcccggttttggtctggttaccccggtatcctgtgcgtgactggctcctgggtgacctgttatccggcctgagtgtggccatcatgcagcttccgcagggcttggcctacgccctcctggctggattgccccccgtgtttggcctctatagctccttctaccctgtcttcatctacttcctgtttggcacttcccggcacatctccgtggggacctttgctgtcatgtctgtgatggtgggcagtgtgacagaatccctggccccgcaggccttgaacgactccatgatcaatgagacagccagagatgctgcccgggtacaggtggcctccacactcagtgtcctggttggcctcttccaggtggggctgggcctgatccacttcggcttcgtggtcacctacctgtcagaacctcttgtccgaggctataccacagctgcagctgtgcaggtcttcgtctcacagctcaagtatgtgtttggcctccatctgagcagccactctgggccactgtccctcatctatacagtgctggaggtctgctggaagctgccccagagcaaggttggcaccgtggtcactgcagctgtggctggggtggtgctcgtggtggtgaagctgttgaatgacaagctgcagcagcagctgcccatgccgatacccggggagctgctcacgctcatcggggccacaggcatctcctatggcatgggtctaaagcacagatttgaggtagatgtcgtgggcaacatccctgcagggctggtgcccccagtggcccccaacacccagctgttctcaaagctcgtgggcagcgccttcaccatcgctgtggttgggtttgccattgccatctcactggggaagatcttcgccctgaggcacggctaccgggtggacagcaaccaggagctggtggccctgggcctcagtaaccttatcggaggcatcttccagtgcttccccgtgagttgctctatgtctcggagcctggtacaggagagcaccgggggcaactcgcaggttgctggagccatctcttcccttttcatcctcctcatcattgtcaaacttggggaactcttccatgacctgcccaaggcggtcctggcagccatcatcattgtgaacctgaagggcatgctgaggcagctcagcgacatgcgctccctctggaaggccaatcgggcggatctgcttatctggctggtgaccttcacggccaccatcttgctgaacctggaccttggcttggtggttgcggtcatcttctccctgctgctcgtggtggtccggacacagatgccccactactctgtcctggggcaggtgccagacacggatatttacagagatgtggcagagtactcagaggccaaggaagtccggggggtgaaggtcttccgctcctcggccaccgtgtactttgccaatgctgagttctacagtgatgcgctgaagcagaggtgtggtgtggatgtcgacttcctcatctcccagaagaagaaactgctcaagaagcaggagcagctgaagctgaagcaactgcagaaagaggagaagcttcggaaacaggctgcctcccccaagggcgcctcagtttccattaatgtcaacaccagccttgaagacatgaggagcaacaacgttgaggactgcaagatgatgcaggtgagctcaggagataagatggaagatgcaacagccaatggtcaagaagactccaaggccccagatgggtccacactgaaggccctgggcctgcctcagccagacttccacagcctcatcctggacctgggtgccctctcctttgtggacactgtgtgcctcaagagcctgaagaatattttccatgacttccgggagattgaggtggaggtgtacatggcggcctgccacagccctgtggtcagccagcttgaggctgggcacttcttcgatgcatccatcaccaagaagcatctctttgcctctgtccatgatgctgtcacctttgccctccaacacccgaggcctgtccccgacagccctgtttcggtcaccagactctgaacatgctacatcctgcccaagactgcacctctggaggtgcagggcacccttgagaagcccctcacccctaggccgcctccaggtgctacccaggagtcccctccatgtacacacacacaactcagggaaggaggtcctgggactccaagttcagcgctccaggtctgggacagggcctgcatgcagtcaggctggcagtggcgcggtacagggagggaactggtgcatattttagcctcaggaataaagatttgtctgctc

SEQ ID NO: 183602 - DNA, 2545 bp, Homo sapiens
  Payload ID: 16173
  Gene Symbol: SLC26A6
  Gene Name: solute carrier family 26 (anion exchanger), member 6
  Uniprot ID: Q9BXS9
  ENST ID: ENST00000383733
  CDS Start-End: 62-2284
ggagcgtagcggcctctagctcgagcagcaggagcagcccgcaccggacaacttgcgagccatggggctggcggatgcgtcgggaccgagggacacacaggcactgctgtctgcaacacaagcaatggacctgcggaggcgagactaccacatggaacggccgctgctgaaccaggagcatttggaggagctggggcgctggggctcagcacctaggacccaccagtggcggacctggttgcagtgctcccgtgctcgggcctatgcccttctgctccaacacctcccggttttggtctggttaccccggtatcctgtgcgtgactggctcctgggtgacctgttatccggcctgagtgtggccatcatgcagcttccgcagggcttggcctacgccctcctggctggattgccccccgtgtttggcctctatagctccttctaccctgtcttcatctacttcctgtttggcacttcccggcacatctccgtggggacctttgctgtcatgtctgtgatggtgggcagtgtgacagaatccctggccccgcaggccttgaacgactccatgatcaatgagacagccagagatgctgcccgggtacaggtggcctccacactcagtgtcctggttggcctcttccaggtggggctgggcctgatccacttcggcttcgtggtcacctacctgtcagaacctcttgtccgaggctataccacagctgcagctgtgcaggtcttcgtctcacagctcaagtatgtgtttggcctccatctgagcagccactctgggccactgtccctcatctatacagtgctggaggtctgctggaagctgccccagagcaaggttggcaccgtggtcactgcagctgtggctggggtggtgctcgtggtggtgaagctgttgaatgacaagctgcagcagcagctgcccatgccgatacccggggagctgctcacgctcatcggggccacaggcatctcctatggcatgggtctaaagcacagatttgaggtagatgtcgtgggcaacatccctgcagggctggtgcccccagtggcccccaacacccagctgttctcaaagctcgtgggcagcgccttcaccatcgctgtggttgggtttgccattgccatctcactggggaagatcttcgccctgaggcacggctaccgggtggacagcaaccaggagctggtggccctgggcctcagtaaccttatcggaggcatcttccagtgcttccccgtgagttgctctatgtctcggagcctggtacaggagagcaccgggggcaactcgcaggttgctggagccatctcttcccttttcatcctcctcatcattgtcaaacttggggaactcttccatgacctgcccaaggcggtcctggcagccatcatcattgtgaacctgaagggcatgctgaggcagctcagcgacatgcgctccctctggaaggccaatcgggcggatctgcttatctggctggtgaccttcacggccaccatcttgctgaacctggaccttggcttggtggttgcggtcatcttctccctgctgctcgtggtggtccggacacagatgccccactactctgtcctggggcaggtgccagacacggatatttacagagatgtggcagagtactcagaggccaaggaagtccggggggtgaaggtcttccgctcctcggccaccgtgtactttgccaatgctgagttctacagtgatgcgctgaagcagaggtgtggtgtggatgtcgacttcctcatctcccagaagaagaaactgctcaagaagcaggagcagctgaagctgaagcaactgcagaaagaggagaagcttcggaaacaggcagggccccttttgtctgcatgtctggctccccagcaggtgagctcaggagataagatggaagatgcaacagccaatggtcaagaagactccaaggccccagatgggtccacactgaaggccctgggcctgcctcagccagacttccacagcctcatcctggacctgggtgccctctcctttgtggacactgtgtgcctcaagagcctgaagaatattttccatgacttccgggagattgaggtggaggtgtacatggcggcctgccacagccctgtggtcagccagcttgaggctgggcacttcttcgatgcatccatcaccaagaagcatctctttgcctctgtccatgatgctgtcacctttgccctccaacacccgaggcctgtccccgacagccctgtttcggtcaccagactctgaacatgctacatcctgcccaagactgcacctctggaggtgcagggcacccttgagaagcccctcacccctaggccgcctccaggtgctacccaggagtcccctccatgtacacacacacaactcagggaaggaggtcctgggactccaagttcagcgctccaggtctgggacagggcctgcatgcagtcaggctggcagtggcgcggtacagggagggaactggtgcatattttagcctcaggaataaagatttgtctgctc

SEQ ID NO: 183603 - DNA, 2589 bp, Homo sapiens
  Payload ID: 16173
  Gene Symbol: SLC26A6
  Gene Name: solute carrier family 26 (anion exchanger), member 6
  Uniprot ID: Q9BXS9
  ENST ID: ENST00000395550
  CDS Start-End: 49-2328
ctctagctcgagcagcaggagcagcccgcaccggacaacttgcgagccatggggctggcggatgcgtcgggaccgagggacacacaggcactgctgtctgcaacacaagcaatggacctgcggaggcgagactaccacatggaacggccgctgctgaaccaggagcatttggaggagctggggcgctggggctcagcacctaggacccaccagtggcggacctggttgcagtgctcccgtgctcgggcctatgcccttctgctccaacacctcccggttttggtctggttaccccggtatcctgtgcgtgactggctcctgggtgacctgttatccggcctgagtgtggccatcatgcagcttccgcagggcttggcctacgccctcctggctggattgccccccgtgtttggcctctatagctccttctaccctgtcttcatctacttcctgtttggcacttcccggcacatctccgtggggacctttgctgtcatgtctgtgatggtgggcagtgtgacagaatccctggccccgcaggccttgaacgactccatgatcaatgagacagccagagatgctgcccgggtacaggtggcctccacactcagtgtcctggttggcctcttccaggtggggctgggcctgatccacttcggcttcgtggtcacctacctgtcagaacctcttgtccgaggctataccacagctgcagctgtgcaggtcttcgtctcacagctcaagtatgtgtttggcctccatctgagcagccactctgggccactgtccctcatctatacagtgctggaggtctgctggaagctgccccagagcaaggttggcaccgtggtcactgcagctgtggctggggtggtgctcgtggtggtgaagctgttgaatgacaagctgcagcagcagctgcccatgccgatacccggggagctgctcacgctcatcggggccacaggcatctcctatggcatgggtctaaagcacagatttgaggtagatgtcgtgggcaacatccctgcagggctggtgcccccagtggcccccaacacccagctgttctcaaagctcgtgggcagcgccttcaccatcgctgtggttgggtttgccattgccatctcactggggaagatcttcgccctgaggcacggctaccgggtggacagcaaccaggagctggtggccctgggcctcagtaaccttatcggaggcatcttccagtgcttccccgtgagttgctctatgtctcggagcctggtacaggagagcaccgggggcaactcgcaggttgctggagccatctcttcccttttcatcctcctcatcattgtcaaacttggggaactcttccatgacctgcccaaggcggtcctggcagccatcatcattgtgaacctgaagggcatgctgaggcagctcagcgacatgcgctccctctggaaggccaatcgggcggatctgcttatctggctggtgaccttcacggccaccatcttgctgaacctggaccttggcttggtggttgcggtcatcttctccctgctgctcgtggtggtccggacacagatgccccactactctgtcctggggcaggtgccagacacggatatttacagagatgtggcagagtactcagaggccaaggaagtccggggggtgaaggtcttccgctcctcggccaccgtgtactttgccaatgctgagttctacagtgatgcgctgaagcagaggtgtggtgtggatgtcgacttcctcatctcccagaagaagaaactgctcaagaagcaggagcagctgaagctgaagcaactgcagaaagaggagaagcttcggaaacaggctgcctcccccaagggcgcctcagtttccattaatgtcaacaccagccttgaagacatgaggagcaacaacgttgaggactgcaagatgatgcaggtgagctcaggagataagatggaagatgcaacagccaatggtcaagaagactccaaggccccagatgggtccacactgaaggccctgggcctgcctcagccagacttccacagcctcatcctggacctgggtgccctctcctttgtggacactgtgtgcctcaagagcctgaagaatattttccatgacttccgggagattgaggtggaggtgtacatggcggcctgccacagccctgtggtcagccagcttgaggctgggcacttcttcgatgcatccatcaccaagaagcatctctttgcctctgtccatgatgctgtcacctttgccctccaacacccgaggcctgtccccgacagccctgtttcggtcaccagactctgaacatgctacatcctgcccaagactgcacctctggaggtgcagggcacccttgagaagcccctcacccctaggccgcctccaggtgctacccaggagtcccctccatgtacacacacacaactcagggaaggaggtcctgggactccaagttcagcgctccaggtctgggacagggcctgcatgcagtcaggctggcagtggcgcggtacagggagggaactggtgcatattttagcctcaggaataaagatttgtctgctc

SEQ ID NO: 183604 - DNA, 556 bp, Homo sapiens
  Payload ID: 16173
  Gene Symbol: SLC26A6
  Gene Name: solute carrier family 26 (anion exchanger), member 6
  ENST ID: ENST00000431213
  CDS Start-End: 1-267
gctcgggcctatgcccttctgctccaacacctcccggttttggtctggttaccccggtatcctgtgcgtgactggctcctgggtgacctgttatccggcctgagtgtggccatcatgcagcttccgcagggcttggcctacgccctcctggctggattgccccccgtgtttggcctctatagctccttctaccctgtcttcatctacttcctgtttggcacttcccggcacatctccgtgggccttgaacgactccatgatcaatgagacagccagagatgctgcccgggtacaggtggcctccacactcagtgtcctggttggcctcttccaggtggggctgggcctgatccacttcggcttcgtggtcacctacctgtcagaacctcttgtccgaggctataccacagctgcagctgtgcaggtcttcgtctcacagctcaagtatgtgtttggcctccatctgagcagccactctgggccactgtccctcatctatacagtgctggaggtctgctggaagctgccccagagcaaggttggcaccgtggtcact

SEQ ID NO: 183605 - DNA, 724 bp, Homo sapiens
  Payload ID: 16173
  Gene Symbol: SLC26A6
  Gene Name: solute carrier family 26 (anion exchanger), member 6
  ENST ID: ENST00000414944
  CDS Start-End: 1-583
aggtggcctccacactcagtgtcctggttggcctcttccaggtggggctgggcctgatccacttcggcttcgtggtcacctacctgtcagaacctcttgtccgaggctataccacagctgcagctgtgcaggtcttcgtctcacagctcaagtatgtgtttggcctccatctgagcagccactctgggccactgtccctcatctattgctggaggtctgctggaagctgccccagagcaaggttggcaccgtggtcactgcagctgtggctggggtggtgctcgtggtggtgaagctgttgaatgacaagctgcagcagcagctgcccatgccgatacccggggagctgctcacgctcatcggggccacaggcatctcctatggcatgggtctaaagcacagatttgaggctggtgcccccagtggcccccaacacccagctgttctcaaagctcgtgggcagcgccttcaccatcgctgtggttgggtttgccattgccatctcactggggaagatcttcgccctgaggcacggctaccgggtggacagcaaccaggagctggtggccctgggcctcagtaaccttatcggaggcatcttccagtgcttccccgtgagttgctctatgtctcggagcctggtacaggagagcaccgggggcaactcgcaggttgctggagccatctcttcccttttcatcctcctcatcattgtcaaacttgg

SEQ ID NO: 183606 - DNA, 910 bp, Homo sapiens
  Payload ID: 16173
  Gene Symbol: SLC26A6
  Gene Name: solute carrier family 26 (anion exchanger), member 6
  ENST ID: ENST00000421649
  CDS Start-End: 1-910
ggcagtgtgacagaatccctggccccgcaggccttgaacgactccatgatcaatgagacagccagagatgctgcccgggtacaggtggcctccacactcagtgtcctggttggcctcttccaggtggggctgggcctgatccacttcggcttcgtggtcacctacctgtcagaacctcttgtccgaggctataccacagctgcagctgtgcaggtcttcgtctcacagctcaagtatgtgtttggcctccatctgagcagccactctgggccactgtccctcatctatacagtgctggaggtctgctggaagctgccccagagcaagctcatcggggccacaggcatctcctatggcatgggtctaaagcacagatttgaggtagatgtcgtgggcaacatccctgcagggctggtgcccccagtggcccccaacacccagctgttctcaaagctcgtgggcagcgccttcaccatcgctgtggttgggtttgccattgccatctcactggggaagatcttcgccctgaggcacggctaccgggtggacagcaaccaggagctggtggccctgggcctcagtaaccttatcggaggcatcttccagtgcttccccgtgagttgctctatgtctcggagcctggtacaggagagcaccgggggcaactcgcaggttgctggagccatctcttcccttttcatcctcctcatcattgtcaaacttggggaactcttccatgacctgcccaaggcggtcctggcagccatcatcattgtgaacctgaagggcatgctgaggcagctcagcgacatgcgctccctctggaaggccaatcgggcggatctgcttatctggctggtgaccttcacggccaccatcttgctgaacctggaccttggcttggtggttg

SEQ ID NO: 183607 - DNA, 2460 bp, Homo sapiens
  Payload ID: 16173
  Gene Symbol: SLC26A6
  Gene Name: solute carrier family 26 (anion exchanger), member 6
  Uniprot ID: Q9BXS9
  ENST ID: ENST00000455886
  CDS Start-End: 49-2220
ctctagctcgagcagcaggagcagcccgcaccggacaacttgcgagccatggggctggcggatgcgtcgggaccgagggacacacaggcactgctgtctgcaacacaagcaatggacctgcggaggcgagactaccacatggaacggccgctgctgaaccaggagcatttggaggagctggggcgctggggctcagcacctaggacccaccagtggcggacctggttgcagtgctcccgtgctcgggcctatgcccttctgctccaacacctcccggttttggtctggttaccccggtatcctgtgcgtgactggctcctgggtgacctgttatccggcctgagtgtggccatcatgcagcttccgcagggcttggcctacgccctcctggctggattgccccccgtgtttggcctctatagctccttctaccctgtcttcatctacttcctgtttggcacttcccggcacatctccgtggcaaccccaggacccctgcctctcctgactgcccctggccgccccacaggtggggctgggcctgatccacttcggcttcgtggtcacctacctgtcagaacctcttgtccgaggctataccacagctgcagctgtgcaggtcttcgtctcacagctcaagtatgtgtttggcctccatctgagcagccactctgggccactgtccctcatctattgctggaggtctgctggaagctgccccagagcaaggttggcaccgtggtcactgcagctgtggctggggtggtgctcgtggtggtgaagctgttgaatgacaagctgcagcagcagctgcccatgccgatacccggggagctgctcacgctcatcggggccacaggcatctcctatggcatgggtctaaagcacagatttgaggtagatgtcgtgggcaacatccctgcagggctggtgcccccagtggcccccaacacccagctgttctcaaagctcgtgggcagcgccttcaccatcgctgtggttgggtttgccattgccatctcactggggaagatcttcgccctgaggcacggctaccgggtggacagcaaccaggagctggtggccctgggcctcagtaaccttatcggaggcatcttccagtgcttccccgtgagttgctctatgtctcggagcctggtacaggagagcaccgggggcaactcgcaggttgctggagccatctcttcccttttcatcctcctcatcattgtcaaacttggggaactcttccatgacctgcccaaggcggtcctggcagccatcatcattgtgaacctgaagggcatgctgaggcagctcagcgacatgcgctccctctggaaggccaatcgggcggatctgcttatctggctggtgaccttcacggccaccatcttgctgaacctggaccttggcttggtggttgcggtcatcttctccctgctgctcgtggtggtccggacacagatgccccactactctgtcctggggcaggtgccagacacggatatttacagagatgtggcagagtactcagaggccaaggaagtccggggggtgaaggtcttccgctcctcggccaccgtgtactttgccaatgctgagttctacagtgatgcgctgaagcagaggtgtggtgtggatgtcgacttcctcatctcccagaagaagaaactgctcaagaagcaggagcagctgaagctgaagcaactgcagaaagaggagaagcttcggaaacaggctgcctcccccaagggcgcctcagtttccattaatgtcaacaccagccttgaagacatgaggagcaacaacgttgaggactgcaagatgatgcaggtgagctcaggagataagatggaagatgcaacagccaatggtcaagaagactccaaggccccagatgggtccacactgaaggccctgggcctgcctcagccagacttccacagcctcatcctggacctgggtgccctctcctttgtggacactgtgtgcctcaagagcctgaagaatattttccatgacttccgggagattgaggtggaggtgtacatggcggcctgccacagccctgtggtcagccagcttgaggctgggcacttcttcgatgcatccatcaccaagaagcatctctttgcctctgtccatgatgctgtcacctttgccctccaacacccgaggcctgtccccgacagccctgtttcggtcaccagactctgaacatgctacatcctgcccaagactgcacctctggaggtgcagggcacccttgagaagcccctcacccctaggccgcctccaggtgctacccaggagtcccctccatgtacacacacacaactcagggaaggaggtcctgggactccaagttcagcgctccaggtctgggacagggcctgcatgcagtcaggctggcagtggcgcggtacagggagggaactggtgcatattttagcctca

SEQ ID NO: 183608 - DNA, 588 bp, Homo sapiens
  Payload ID: 16173
  Gene Symbol: SLC26A6
  Gene Name: solute carrier family 26 (anion exchanger), member 6
  ENST ID: ENST00000431739
  CDS Start-End: 49-588
ctctagctcgagcagcaggagcagcccgcaccggacaacttgcgagccatggggctggcggatgcgtcgggaccgagggacacacaggcactgctgtctgcaacacaagcaatggacctgcggaggcgagactaccacatggaacggccgctgctgaaccaggagcatttggaggagctggggcgctggggctcagcacctaggacccaccagtggcggacctggttgcagtgctcccgtgctcgggcctatgcccttctgctccaacacctcccggttttggtctggttaccccggtatcctgtgcgtgactggctcctgggtgacctgttatccggcctgagtgtggccatcatgcagcttccgcagggcttggcctacgccctcctggctggattgccccccgtgtttggcctctatagctccttctaccctgtcttcatctacttcctgtttggcacttcccggcacatctccgtgggtggggctgggcctgatccacttcggcttcgtggtcacctacctgtcagaacctcttgtccgaggctataccacagctgcagctgtgcaggtcttcgtctcacagct

SEQ ID NO: 183609 - DNA, 806 bp, Homo sapiens
  Payload ID: 16173
  Gene Symbol: SLC26A6
  Gene Name: solute carrier family 26 (anion exchanger), member 6
  ENST ID: ENST00000444531
  CDS Start-End: 1-654
gccttgaacgactccatgatcaatgagacagccagagatgctgcccgggtacaggtggcctccacactcagtgtcctggttggcctcttccaggtggggctgggcctgatccacttcggcttcgtggtcacctacctgtcagaacctcttgtccgaggctataccacagctgcagctgtgcaggtcttcgtctcacagctcaagtatgtgtttggcctccatctgagcagccactctgggccactgtccctcatctatacagtgctggaggtctgctggaagctgccccagagcaaggttggcaccgtggtcactgcagctgtggctggggtggtgctcgtggtggtgaagctgttgaatgacaagctgcagcagcagctgcccatgccgatacccggggagctgctcacgctcatcggggccacaggcatctcctatggcatgggtctaaagcacagatttgaggtagatgtcgtgggcaacatccctgcaggtggcccccaacacccagctgttctcaaagctcgtgggcagcgccttcaccatcgctgtggttgggtttgccattgccatctcactggggaagatcttcgccctgaggcacggctaccgggtggacagcaaccaggagctggtggccctgggcctcagtaaccttatcggaggcatcttccagtgcttccccgtgagttgctctatgtctcggagcctggtacaggagagcaccgggggcaactcgcaggttgctggagccatctcttcccttttcatcctcctcatcattgtcaaacttggggaactcttcc

SEQ ID NO: 183610 - DNA, 2630 bp, Homo sapiens
  Payload ID: 16173
  Gene Symbol: SLC26A6
  Gene Name: solute carrier family 26 (anion exchanger), member 6
  Uniprot ID: Q9BXS9
  ENST ID: ENST00000420764
  CDS Start-End: 91-2367
ggcctcacccggtcccggcgccgccttccggagcgtagcggcctctagctcgagcagcaggagcagcccgcaccggacaacttgcgagccatggggctggcggatgcgtcgggaccgagggacacacaggcactgctgtctgcaacacaagcaatggacctgcggaggcgagactaccacatggaacggccgctgctgaaccaggagcatttggaggagctggggcgctggggctcagcacctaggacccaccagtggcggacctggttgcagtgctcccgtgctcgggcctatgcccttctgctccaacacctcccggttttggtctggttaccccggtatcctgtgcgtgactggctcctgggtgacctgttatccggcctgagtgtggccatcatgcagcttccgcagggcttggcctacgccctcctggctggattgccccccgtgtttggcctctatagctccttctaccctgtcttcatctacttcctgtttggcacttcccggcacatctccgtggggacctttgctgtcatgtctgtgatggtgggcagtgtgacagaatccctggccccgcaggccttgaacgactccatgatcaatgagacagccagagatgctgcccgggtacaggtggcctccacactcagtgtcctggttggcctcttccaggtggggctgggcctgatccacttcggcttcgtggtcacctacctgtcagaacctcttgtccgaggctataccacagctgcagctgtgcaggtcttcgtctcacagctcaagtatgtgtttggcctccatctgagcagccactctgggccactgtccctcatctatacagtgctggaggtctgctggaagctgccccagagcaaggttggcaccgtggtcactgcagctgtggctggggtggtgctcgtggtggtgaagctgttgaatgacaagctgcagcagcagctgcccatgccgatacccggggagctgctcacgctcatcggggccacaggcatctcctatggcatgggtctaaagcacagatttgaggtagatgtcgtgggcaacatccctgcagggctggtgcccccagtggcccccaacacccagctgttctcaaagctcgtgggcagcgccttcaccatcgctgtggttgggtttgccattgccatctcactggggaagatcttcgccctgaggcacggctaccgggtggacagcaaccaggagctggtggccctgggcctcagtaaccttatcggaggcatcttccagtgcttccccgtgagttgctctatgtctcggagcctggtacaggagagcaccgggggcaactcgcaggttgctggagccatctcttcccttttcatcctcctcatcattgtcaaacttggggaactcttccatgacctgcccaaggcggtcctggcagccatcatcattgtgaacctgaagggcatgctgaggcagctcagcgacatgcgctccctctggaaggccaatcgggcggatctgcttatctggctggtgaccttcacggccaccatcttgctgaacctggaccttggcttggtggttgcggtcatcttctccctgctgctcgtggtggtccggacacagatgccccactactctgtcctggggcaggtgccagacacggatatttacagagatgtggcagagtactcagaggccaaggaagtccggggggtgaaggtcttccgctcctcggccaccgtgtactttgccaatgctgagttctacagtgatgcgctgaagcagaggtgtggtgtggatgtcgacttcctcatctcccagaagaagaaactgctcaagaagcaggagcagctgaagctgaagcaactgcagaaagaggagaagcttcggaaacaggctgcctcccccaagggcgcctcagtttccattaatgtcaacaccagccttgaagacatgaggagcaacaacgttgaggactgcaagatgatggtgagctcaggagataagatggaagatgcaacagccaatggtcaagaagactccaaggccccagatgggtccacactgaaggccctgggcctgcctcagccagacttccacagcctcatcctggacctgggtgccctctcctttgtggacactgtgtgcctcaagagcctgaagaatattttccatgacttccgggagattgaggtggaggtgtacatggcggcctgccacagccctgtggtcagccagcttgaggctgggcacttcttcgatgcatccatcaccaagaagcatctctttgcctctgtccatgatgctgtcacctttgccctccaacacccgaggcctgtccccgacagccctgtttcggtcaccagactctgaacatgctacatcctgcccaagactgcacctctggaggtgcagggcacccttgagaagcccctcacccctaggccgcctccaggtgctacccaggagtcccctccatgtacacacacacaactcagggaaggaggtcctgggactccaagttcagcgctccaggtctgggacagggcctgcatgcagtcaggctggcagtggcgcggtacagggagggaactggtgcatattttagcctcaggaataaagatttgtctgctcaa

SEQ ID NO: 183611 - DNA, 555 bp, Homo sapiens
  Payload ID: 16173
  Gene Symbol: SLC26A6
  Gene Name: solute carrier family 26 (anion exchanger), member 6
  ENST ID: ENST00000426599
  CDS Start-End: 49-555
ctctagctcgagcagcaggagcagcccgcaccggacaacttgcgagccatggggctggcggatgcgtcgggaccgagggacacacaggcactgctgtctgcaacacaagcaatggacctgcggaggcgagactaccacatggaacggccgctgctgaaccaggagcatttggaggagctggggcgctggggctcagcacctaggacccaccagtggcggacctggttgcagtgctcccgtgctcgggcctatgcccttctgctccaacacctcccggttttggtctggttaccccggtatcctgtgcgtgactggctcctgggtgacctgttatccggcctgagtgtggccatcatgcagcttccgcagggcttggcctacgccctcctggctggattgccccccgtgtttggcctctatagctccttctaccctgtcttcatctacttcctgtttggcacttcccggcacatctccgtggcaaccccaggacccctgcctctcctgactgcccctggccgccccacaggtggggctgggcctgatccacttcgg

SEQ ID NO: 183612 - DNA, 2623 bp, Homo sapiens
  Payload ID: 16173
  Gene Symbol: SLC26A6
  Gene Name: solute carrier family 26 (anion exchanger), member 6
  ENST ID: ENST00000614797
  CDS Start-End: 101-2362
gagcgcagctggcctcacccggtcccggcgccgccttccggagcgtagcggcctctagctcgagcagcaggagcagcccgcaccggacaacttgcgagccatggggctggcggatgcgtcgggaccgagggacacacaggcactgctgtctgcaacacaagcaatggacctgcggaggcgagactaccacatggaacggccgctgctgaaccaggagcatttggaggagctggggcgctggggctcagcacctaggacccaccagtggcggacctggttgcagtgctcccgtgctcgggcctatgcccttctgctccaacacctcccggttttggtctggttaccccggtatcctgtgcgtgactggctcctgggtgacctgttatccggcctgagtgtggccatcatgcagcttccgcaggatctgctctccaggctgcactgctaccattctaccctaggcttggcctacgccctcctggctggattgccccccgtgtttggcctctatagctccttctaccctgtcttcatctacttcctgtttggcacttcccggcacatctccgtggggacctttgctgtcatgtctgtgatggtgggcagtgtgacagaatccctggccccgcaggccttgaacgactccatgatcaatgagacagccagagatgctgcccgggtacaggtggcctccacactcagtgtcctggttggcctcttccaggtggggctgggcctgatccacttcggcttcgtggtcacctacctgtcagaacctcttgtccgaggctataccacagctgcagctgtgcaggtcttcgtctcacagctcaagtatgtgtttggcctccatctgagcagccactctgggccactgtccctcatctatacagtgctggaggtctgctggaagctgccccagagcaaggttggcaccgtggtcactgcagctgtggctggggtggtgctcgtggtggtgaagctgttgaatgacaagctgcagcagcagctgcccatgccgatacccggggagctgctcacgctcatcggggccacaggcatctcctatggcatgggtctaaagcacagatttgaggtagatgtcgtgggcaacatccctgcagggctggtgcccccagtggcccccaacacccagctgttctcaaagctcgtgggcagcgccttcaccatcgctgtggttgggtttgccattgccatctcactggggaagatcttcgccctgaggcacggctaccgggtggacagcaaccaggagctggtggccctgggcctcagtaaccttatcggaggcatcttccagtgcttccccgtgagttgctctatgtctcggagcctggtacaggagagcaccgggggcaactcgcaggttgctggagccatctcttcccttttcatcctcctcatcattgtcaaacttggggaactcttccatgacctgcccaaggcggtcctggcagccatcatcattgtgaacctgaagggcatgctgaggcagctcagcgacatgcgctccctctggaaggccaatcgggcggatctgcttatctggctggtgaccttcacggccaccatcttgctgaacctggaccttggcttggtggttgcggtcatcttctccctgctgctcgtggtggtccggacacagatgccccactactctgtcctggggcaggtgccagacacggatatttacagagatgtggcagagtactcagaggccaaggaagtccggggggtgaaggtcttccgctcctcggccaccgtgtactttgccaatgctgagttctacagtgatgcgctgaagcagaggtgtggtgtggatgtcgacttcctcatctcccagaagaagaaactgctcaagaagcaggagcagctgaagctgaagcaactgcagaaagaggagaagcttcggaaacaggcagggccccttttgtctgcatgtctggctccccagcaggtgagctcaggagataagatggaagatgcaacagccaatggtcaagaagactccaaggccccagatgggtccacactgaaggccctgggcctgcctcagccagacttccacagcctcatcctggacctgggtgccctctcctttgtggacactgtgtgcctcaagagcctgaagaatattttccatgacttccgggagattgaggtggaggtgtacatggcggcctgccacagccctgtggtcagccagcttgaggctgggcacttcttcgatgcatccatcaccaagaagcatctctttgcctctgtccatgatgctgtcacctttgccctccaacacccgaggcctgtccccgacagccctgtttcggtcaccagactctgaacatgctacatcctgcccaagactgcacctctggaggtgcagggcacccttgagaagcccctcacccctaggccgcctccaggtgctacccaggagtcccctccatgtacacacacacaactcagggaaggaggtcctgggactccaagttcagcgctccaggtctgggacagggcctgcatgcagtcaggctggcagtggcgcggtacagggagggaactggtgcatattttagcctcaggaataaagatttgtctgctc

SEQ ID NO: 183613 - DNA, 5263 bp, Homo sapiens
  Payload ID: 16174
  Gene Symbol: SLC26A7
  Gene Name: solute carrier family 26 (anion exchanger), member 7
  Uniprot ID: Q8TE54
  ENST ID: ENST00000276609
  CDS Start-End: 240-2210
gaatataaggggaattactggcgagagagctgtagaccaacttaacactgaacccattacttttccaagaccagaaaaaaatattacatgaacaggaactacttctccttcagataagaattcaagctttgacattgtaaaccacagacgaattggagcttggcattgaaaggaggtgttctgcaatgattttttttcttgtttagagaagtttacttctacaagaagaaatctgaaaaatgacaggagcaaagaggaaaaagaaaagcatgctttggagcaagatgcataccccccagtgtgaagacattatacagtggtgtagaaggcgactgcccattttggattgggcaccacattacaatctgaaagaaaacttgcttccagacactgtgtctgggataatgttggcagttcaacaggtgacccaaggattggcctttgctgttctctcatctgtgcacccagtgtttggtttatatgggtctctgtttcctgccataatttatgccatatttggaatgggacatcatgttgccacaggcacctttgccttgacatccttaatatcagccaacgccgtggaacggattgtccctcagaacatgcagaatctcaccacacagagtaacacaagcgtgctgggcttatccgactttgaaatgcaaaggatccacgttgctgcagcagtttccttcttgggaggtgtgattcaggtggccatgtttgtgctgcaactgggcagtgccacatttgtggtcacagagcctgtgatcagcgcaatgacaactggggctgccacccatgtggtgacttcacaagtcaaatatctcttgggaatgaaaatgccatatatatccggaccacttggattcttttatatttatgcatatgtttttgaaaacatcaagtctgtgcgactggaagcattgcttttatccttgctgagcattgtggtccttgttcttgttaaagagctgaatgaacagtttaaaaggaaaattaaagttgttcttcctgtagatttagttttgattattgctgcatcatttgcttgttattgcaccaatatggaaaacacatatggattagaagtagttggtcatattccacaaggaattccctcacctagagctcccccgatgaacatcctctctgcggtgatcactgaagctttcggagtggcacttgtaggctatgtggcctcactggctcttgctcaaggatctgccaaaaaattcaaatattcaattgatgacaaccaggaatttttggcccatggcctcagcaatatagtttcttcatttttcttctgcataccaagtgctgctgccatgggaaggacggctggcctgtacagcacaggagcgaagacacaggtggcttgtctaatatcttgcattttcgtccttatagtcatctatgcaataggacctttgctttactggctgcccatgtgtgtccttgcaagcattattgttgtgggactgaagggaatgctaatacagttccgagatttaaaaaaatattggaatgtggataaaatcgattggggaatatgggtcagtacatatgtatttacaatatgctttgctgccaatgtgggactgctgtttggtgttgtttgtaccatagctatagtgataggacgcttcccaagagcaatgactgtaagtataaaaaatatgaaagaaatggaatttaaagtgaagacagaaatggacagtgaaaccctgcagcaggtgaaaattatctcaataaacaacccgcttgttttcctgaatgcaaaaaaattttatactgatttaatgaacatgatccaaaaggaaaatgcctgtaatcagccacttgatgatatcagcaagtgtgaacaaaacacattgcttaattccctatccaatggcaactgcaatgaagaagcttcacagtcctgccctaatgagaagtgttatttaatcctggattgcagtggatttaccttttttgactattctggagtctccatgcttgttgaggtttacatggactgtaaaggcaggagtgtggatgtattgttagcccattgtacagcttccttgataaaagcaatgacgtattatggaaacctagactcagagaaaccaattttttttgaatcggtatctgctgcaataagtcatatccattcaaataagaatttgagcaaactcagtgaccacagtgaagtctgagacccttttgtcacagtacagctcttgtctttaccaactgcctgaagaggccatatgctggcattttgcacaactttttggttgtttagatcctacagatgacctctgctacaataagtacgatgtgacttagtaactgcatagcagttggaaagaactgccaacttttttttctcatttttgttagtaagaagattcgcttagttattttatgtaaaaatcagtatgtgtttagttttagtgtactgaagggtaaacatggttttattttattttaccatattattttgtgttgttttatttctattgtgctgtaagttgatgtttaaaattgagaaatacttttgtcataggtaatttggaacatttacaagccatttgtaaaattttaagataatctgtaactaatacataaaaacaacttagcaaatgtgccattttcacacaacttctctctgtataggcctctgaaatatcaataaggctaaatattactttacacagtaagatgtgaaattcacaaaaagtaaaccaaacaaaacgaatgaaaaactggaaataattcgtttccatatctttccatacatccatttctgaagtattcaggaatgttttcataatcgaaagaaacgggtatccaaataaaaccaagttcttgacattggtctgttttgctgtgaatattggaaatgcttaggatcttcagacccaatagctctaattttaacatttctacccaataagaggctctgttttccactgaagctttgttggagaaagagaatatgaaaattacacattttataatttttagatgagaaaataccactagcagaatagctttgtgctattccagtataagatgaactgtaataatttttgacttccctatttcagagatagtcaatataatatgtttatctatatccatatggatggataggtaggtagatcttcatagatttttttttcttttgttagaggagagcttgatgtgattatcttcaaacccaccaaaccaacaggataattgacaaataaacgccataggctaggctgaactgtatgttactgttttcatgcttatacatatattttcaatcacatacaagtacatagaatttcacattttaatttagcaaattgatttacctaggaaaaaattatcaccttcaaagataggcatagacacataattatgcttaagcttttaacagcattttaaccgctctaaaaattaccagagtaagaaaaagctaggtactttaaagtgagtttgagaaacaagttgaaactaaaattaaaataccagccatttaggtgctttctctggcatctataaaagtaaattctagtgcctgccaagtgatggattataatggtctctagcaaatgtgtggtaaacattcatatggccattaattttaacattaaatcgtaggtagggcaatgtagtaaaatgaaagagaattaagaaaggttttgaattcttataacatatccagccatttcaattttgattgaaatgaactacaaagaatagtgtttgtccctatggtagcctcagtctctttatcactaacttggattgaaatgagtgaggccaactcacattcccatcaaacactcttccaaggaaaagcagaagtaataattggaggtaaagtttccttagagaaaataattttattctgctttgtccaattaaattattccaatggcggatggtaatattcaccatctctaattcattggtcactggtaggtaagcatgagttaaggaaagtcaaaaatgaaaatatattttgctgtgtataaattgatattttgctatgcaactcctgtaattgaatttgtataatgcaggcactttctaatttattagagattatggatcagttctgacattaaaatcatagttaattgatggatggtttttatagtttgttgataaagtggacacagtattgtctgagcagttatattttaatgcatttcagtgtttatagtagaagtttagtggataaaactttaagtccaataacttgggggtcaaatgctaatgttttattcaatgtaaaggaagaccaaaccatgtaccttatgaagacctttgttttaagacttccacacaccaaggctacaatgactgttaacctggaggaagtctctggtatggagttctgagagcttaagagctaaacatgagtttagacacacaagattctaaaatgcaaatgtttattttgaagcaggcattgacaacacaaaaactgtgtagtggtcttgatgctggattgtttctagagtcacaatgaattatttttatgagattaccttatttttatatatgacaaactacttctataatgcttattatggtaaaataaaattggaaaaaattaaaactgacctataagagtgttaaggacctaatagagtgacatatataaattaagcataaaatatgtaaccaggaaaagactgttaacattacatttatgcaaattaaatgcccttaaatttcaccatttgtctttcattttaaaggttatttgctcccgattatatgattcaagtgttataagttttagcttgaactactttgcagtaatttatttgacagatctctattctataaatgtgtaatgtgatgaagaaagagatctttcttttttaatgaaaacattaatgtgttaataccctgtatggataatgcttgacatttagtggtttccaaaatatattagtatattgttgaacatacattatgccttagaaatgcacattctgtattttgtgggatgataatctaattcagtatagaatatgctgtttggcaatgagtttgtggccagatttcaaatagggagttaagtggtactttcacaatccaaagatttttagttaaaaatcatgtagtctaatatgctgcagttatttttttatatttttcaatgcatttaattatcttttttataattctttgtactaactcagcatgtaacaaccaatttacatggaaataaatcgaaatatgataactattatgc

SEQ ID NO: 183614 - DNA, 2656 bp, Homo sapiens
  Payload ID: 16174
  Gene Symbol: SLC26A7
  Gene Name: solute carrier family 26 (anion exchanger), member 7
  Uniprot ID: Q8TE54
  ENST ID: ENST00000309536
  CDS Start-End: 221-2212
ggcgagagagctgtagaccaacttaacactgaacccattacttttccaagaccagaaaaaaatattacatgaacaggaactacttctccttcagataagaattcaagctttgacattgtaaaccacagacgaattggagcttggcattgaaaggaggtgttctgcaatgattttttttcttgtttagagaagtttacttctacaagaagaaatctgaaaaatgacaggagcaaagaggaaaaagaaaagcatgctttggagcaagatgcataccccccagtgtgaagacattatacagtggtgtagaaggcgactgcccattttggattgggcaccacattacaatctgaaagaaaacttgcttccagacactgtgtctgggataatgttggcagttcaacaggtgacccaaggattggcctttgctgttctctcatctgtgcacccagtgtttggtttatatgggtctctgtttcctgccataatttatgccatatttggaatgggacatcatgttgccacaggcacctttgccttgacatccttaatatcagccaacgccgtggaacggattgtccctcagaacatgcagaatctcaccacacagagtaacacaagcgtgctgggcttatccgactttgaaatgcaaaggatccacgttgctgcagcagtttccttcttgggaggtgtgattcaggtggccatgtttgtgctgcaactgggcagtgccacatttgtggtcacagagcctgtgatcagcgcaatgacaactggggctgccacccatgtggtgacttcacaagtcaaatatctcttgggaatgaaaatgccatatatatccggaccacttggattcttttatatttatgcatatgtttttgaaaacatcaagtctgtgcgactggaagcattgcttttatccttgctgagcattgtggtccttgttcttgttaaagagctgaatgaacagtttaaaaggaaaattaaagttgttcttcctgtagatttagttttgattattgctgcatcatttgcttgttattgcaccaatatggaaaacacatatggattagaagtagttggtcatattccacaaggaattccctcacctagagctcccccgatgaacatcctctctgcggtgatcactgaagctttcggagtggcacttgtaggctatgtggcctcactggctcttgctcaaggatctgccaaaaaattcaaatattcaattgatgacaaccaggaatttttggcccatggcctcagcaatatagtttcttcatttttcttctgcataccaagtgctgctgccatgggaaggacggctggcctgtacagcacaggagcgaagacacaggtggcttgtctaatatcttgcattttcgtccttatagtcatctatgcaataggacctttgctttactggctgcccatgtgtgtccttgcaagcattattgttgtgggactgaagggaatgctaatacagttccgagatttaaaaaaatattggaatgtggataaaatcgattggggaatatgggtcagtacatatgtatttacaatatgctttgctgccaatgtgggactgctgtttggtgttgtttgtaccatagctatagtgataggacgcttcccaagagcaatgactgtaagtataaaaaatatgaaagaaatggaatttaaagtgaagacagaaatggacagtgaaaccctgcagcaggtgaaaattatctcaataaacaacccgcttgttttcctgaatgcaaaaaaattttatactgatttaatgaacatgatccaaaaggaaaatgcctgtaatcagccacttgatgatatcagcaagtgtgaacaaaacacattgcttaattccctatccaatggcaactgcaatgaagaagcttcacagtcctgccctaatgagaagtgttatttaatcctggattgcagtggatttaccttttttgactattctggagtctccatgcttgttgaggtttacatggactgtaaaggcaggagtgtggatgtattgttagcccattgtacagcttccttgataaaagcaatgacgtattatggaaacctagactcagagaaaccaattttttttgaatcggtatctgctgcaataagtcatatccattcaaataaggccagttataaactgttgtttgataacttggatcttccaacaatgccaccgctctgaggattgggtggttgcctatcatttgcaaactgcttacttgtacaacaaatgcttcttccaggatctactgtcctggggacttgaatccacctttctcaaatataaaaactctaaatatggccttttaagttttttctgctctgatatcttgcctctaagcttatattgccatctttggaaatactatttgtagaatctagtgctcacatgatctgaagtgtcaaagttattttacaaatgctgggcttatggtttagttttacaactgttcttagagctttaatttcctgcaatttttccttgagttttgaattgttttgcctttcctcacccctagaataacatttggtgcctcgcagagtcatccctattgtatacaatcagaacagtatgtatttacaaaataataataacactattattattaaatctaacatatattga

SEQ ID NO: 183615 - DNA, 2638 bp, Homo sapiens
  Payload ID: 16174
  Gene Symbol: SLC26A7
  Gene Name: solute carrier family 26 (anion exchanger), member 7
  ENST ID: ENST00000522181
  CDS Start-End: 199-1008
gtgaagccagcaagtcttgactaatctccaagcaatgtagctgtaaaaggactggaagataagcaagaatctgaagctggtgcctctccaagtattaatttgttcttacaaatgttttactcaacgtgaccctaacctctttggaattgctcaggtgtagaacagagaagtttacttctacaagaagaaatctgaaaaatgacaggagcaaagaggaaaaagaaaagcatgctttggagcaagatgcataccccccagtgtgaagacattatacagtggtgtagaaggcgactgcccattttggattgggcaccacattacaatctgaaagaaaacttgcttccagacactgtgtctgggataatgttggcagttcaacaggtgacccaaggattggcctttgctgttctctcatctgtgcacccagtgtttggtttatatgggtctctgtttcctgccataatttatgccatatttggaatgggacatcatgttgccacaggcacctttgccttgacatccttaatatcagccaacgccgtggaacggattgtccctcagaacatgcagaatctcaccacacagagtaacacaagcgtgctgggcttatccgactttgaaatgcaaaggatccacgttgctgcagcagtttccttcttgggaggtgtgattcaggtggccatgtttgtgctgcaactgggcagtgccacatttgtggtcacagagcctgtgatcagcgcaatgacaactggggctgccacccatgtggtgacttcacaagtcaaatatctcttgggaatgaaaatgccatatatatccggaccacttggattcttttatatttatgcatatgtttttgaaaacatcaagtctgtgcgactggaagcattgcttttatccttgctgagcattgtggtccttgttcttgttaaagagctgaatgaacagtttaaaaggaaaattaaagttgttcttcctgtagatttagttttgaattccctcacctagagctcccccgatgaacatcctctctgcggtgatcactgaagctttcggagtggcacttgtaggctatgtggcctcactggctcttgctcaaggatctgccaaaaaattcaaatattcaattgatgacaaccaggaatttttggcccatggcctcagcaatatagtttcttcatttttcttctgcataccaagtgctgctgccatgggaaggacggctggcctgtacagcacaggagcgaagacacaggtggcttgtctaatatcttgcattttcgtccttatagtcatctatgcaataggacctttgctttactggctgcccatgtgtgtccttgcaagcattattgttgtgggactgaagggaatgctaatacagttccgagatttaaaaaaatattggaatgtggataaaatcgattggggaatatgggtcagtacatatgtatttacaatatgctttgctgccaatgtgggactgctgtttggtgttgtttgtaccatagctatagtgataggacgcttcccaagagcaatgactgtaagtataaaaaatatgaaagaaatggaatttaaagtgaagacagaaatggacagtgaaaccctgcagcaggtgaaaattatctcaataaacaacccgcttgttttcctgaatgcaaaaaaattttatactgatttaatgaacatgatccaaaaggaaaatgcctgtaatcagccacttgatgatatcagcaagtgtgaacaaaacacattgcttaattccctatccaatggcaactgcaatgaagaagcttcacagtcctgccctaatgagaagtgttatttaatcctggattgcagtggatttaccttttttgactattctggagtctccatgcttgttgaggtttacatggactgtaaaggcaggagtgtggatgtattgttagcccattgtacagcttccttgataaaagcaatgacgtattatggaaacctagactcagagaaaccaattttttttgaatcggtatctgctgcaataagtcatatccattcaaataagaatttgagcaaactcagtgaccacagtgaagtctgagacccttttgtcacagtacagctcttgtctttaccaactgcctgaagaggccatatgctggcattttgcacaactttttggttgtttagatcctacagatgacctctgctacaataagtacgatgtgacttagtaactgcatagcagttggaaagaactgccaacttttttttctcatttttgttagtaagaagattcgcttagttattttatgtaaaaatcagtatgtgtttagttttagtgtactgaagggtaaacatggttttattttattttaccatattattttgtgttgttttatttctattgtgctgtaagttgatgtttaaaattgagaaatacttttgtcataggtaatttggaacatttacaagccatttgtaaaattttaagataatctgtaactaatacataaaaacaacttagcaaatgtgccattttcacacaacttctctctgtataggcctctgaaatatcaataaggctaaatattactttacacagtaagatgtgaaattcacaaaaagtaaaccaaacaaaacgaatgaaaaa

SEQ ID NO: 183616 - DNA, 736 bp, Homo sapiens
  Payload ID: 16174
  Gene Symbol: SLC26A7
  Gene Name: solute carrier family 26 (anion exchanger), member 7
  ENST ID: ENST00000520818
  CDS Start-End: 1-713
gcgtgctgggcttatccgactttgaaatgcaaaggatccacgttgctgcagcagtttccttcttgggaggtgtgattcaggtggccatgtttgtgctgcaactgggcagtgccacatttgtggtcacagagcctgtgatcagcgcaatgacaactggggctgccacccatgtggtgacttcacaagtcaaatatctcttgggaatgaaaatgccatatatatccggaccacttggattcttttatatttatgcatatgtttttgaaaacatcaagtctgtgcgactggaagcattgcttttatccttgctgagcattgtggtccttgttcttgttaaagagctgaatgaacagtttaaaaggaaaattaaagttgttcttcctgtagatttagttttgattattgctgcatcatttgcttgttattgcaccaatatggaaaacacatatggattagaagtagttggtcatattccacaaggaattccctcacctagagctcccccgatgaacatcctctctgcggtgatcactgaagctttcggagtggcacttgtaggctatgtggcctcactggctcttgctcaaggatctgccaaaaaattcaaatattcaattgatgacaaccaggtggagtgtgcccccagtccctctccactccagttgtatcattgcactgtgcactcccagatcctaaaaatgatgaacttatgaaaaataaaactttcctaactgta

SEQ ID NO: 183617 - DNA, 2902 bp, Homo sapiens
  Payload ID: 16174
  Gene Symbol: SLC26A7
  Gene Name: solute carrier family 26 (anion exchanger), member 7
  Uniprot ID: Q8TE54
  ENST ID: ENST00000523719
  CDS Start-End: 273-2243
ccagcaagtcttgactaatctccaagcaatgtagctgtaaaaggactggaagataagcaagaatctgaagctggtgcctctccaagtattaatttgttcttacaaatgttttactcaacgtgaccctaacctctttggaattgctcaggtgtagaacagctttgacattgtaaaccacagacgaattggagcttggcattgaaaggaggtgttctgcaatgattttttttcttgtttagagaagtttacttctacaagaagaaatctgaaaaatgacaggagcaaagaggaaaaagaaaagcatgctttggagcaagatgcataccccccagtgtgaagacattatacagtggtgtagaaggcgactgcccattttggattgggcaccacattacaatctgaaagaaaacttgcttccagacactgtgtctgggataatgttggcagttcaacaggtgacccaaggattggcctttgctgttctctcatctgtgcacccagtgtttggtttatatgggtctctgtttcctgccataatttatgccatatttggaatgggacatcatgttgccacaggcacctttgccttgacatccttaatatcagccaacgccgtggaacggattgtccctcagaacatgcagaatctcaccacacagagtaacacaagcgtgctgggcttatccgactttgaaatgcaaaggatccacgttgctgcagcagtttccttcttgggaggtgtgattcaggtggccatgtttgtgctgcaactgggcagtgccacatttgtggtcacagagcctgtgatcagcgcaatgacaactggggctgccacccatgtggtgacttcacaagtcaaatatctcttgggaatgaaaatgccatatatatccggaccacttggattcttttatatttatgcatatgtttttgaaaacatcaagtctgtgcgactggaagcattgcttttatccttgctgagcattgtggtccttgttcttgttaaagagctgaatgaacagtttaaaaggaaaattaaagttgttcttcctgtagatttagttttgattattgctgcatcatttgcttgttattgcaccaatatggaaaacacatatggattagaagtagttggtcatattccacaaggaattccctcacctagagctcccccgatgaacatcctctctgcggtgatcactgaagctttcggagtggcacttgtaggctatgtggcctcactggctcttgctcaaggatctgccaaaaaattcaaatattcaattgatgacaaccaggaatttttggcccatggcctcagcaatatagtttcttcatttttcttctgcataccaagtgctgctgccatgggaaggacggctggcctgtacagcacaggagcgaagacacaggtggcttgtctaatatcttgcattttcgtccttatagtcatctatgcaataggacctttgctttactggctgcccatgtgtgtccttgcaagcattattgttgtgggactgaagggaatgctaatacagttccgagatttaaaaaaatattggaatgtggataaaatcgattggggaatatgggtcagtacatatgtatttacaatatgctttgctgccaatgtgggactgctgtttggtgttgtttgtaccatagctatagtgataggacgcttcccaagagcaatgactgtaagtataaaaaatatgaaagaaatggaatttaaagtgaagacagaaatggacagtgaaaccctgcagcaggtgaaaattatctcaataaacaacccgcttgttttcctgaatgcaaaaaaattttatactgatttaatgaacatgatccaaaaggaaaatgcctgtaatcagccacttgatgatatcagcaagtgtgaacaaaacacattgcttaattccctatccaatggcaactgcaatgaagaagcttcacagtcctgccctaatgagaagtgttatttaatcctggattgcagtggatttaccttttttgactattctggagtctccatgcttgttgaggtttacatggactgtaaaggcaggagtgtggatgtattgttagcccattgtacagcttccttgataaaagcaatgacgtattatggaaacctagactcagagaaaccaattttttttgaatcggtatctgctgcaataagtcatatccattcaaataagaatttgagcaaactcagtgaccacagtgaagtctgagacccttttgtcacagtacagctcttgtctttaccaactgcctgaagaggccatatgctggcattttgcacaactttttggttgtttagatcctacagatgacctctgctacaataagtacgatgtgacttagtaactgcatagcagttggaaagaactgccaacttttttttctcatttttgttagtaagaagattcgcttagttattttatgtaaaaatcagtatgtgtttagttttagtgtactgaagggtaaacatggttttattttattttaccatattattttgtgttgttttatttctattgtgctgtaagttgatgtttaaaattgagaaatacttttgtcataggtaatttggaacatttacaagccatttgtaaaattttaagataatctgtaactaatacataaaaacaacttagcaaatgtgccattttcacacaacttctctctgtataggcctctgaaatatcaataaggctaaatattactttacacagtaagatgtgaaattcacaaaaagtaaaccaaacaaaacgaatgaaaaactggaaataattcgtttccatatctttccatacatccatttctgaagtattcaggaatgttttcataatcgaaagaaacgggtatccaaataaaaccaagttcttga

SEQ ID NO: 183618 - DNA, 818 bp, Homo sapiens
  Payload ID: 16174
  Gene Symbol: SLC26A7
  Gene Name: solute carrier family 26 (anion exchanger), member 7
  ENST ID: ENST00000522862
  CDS Start-End: 198-818
tgaagccagcaagtcttgactaatctccaagcaatgtagctgtaaaaggactggaagataagcaagaatctgaagctggtgcctctccaagtattaatttgttcttacaaatgttttactcaacgtgaccctaacctctttggaattgctcaggtgtagaacagagaagtttacttctacaagaagaaatctgaaaaatgacaggagcaaagaggaaaaagaaaagcatgctttggagcaagatgcataccccccagtgtgaagacattatacagtggtgtagaaggcgactgcccattttggattgggcaccacattacaatctgaaagaaaacttgcttccagacactgtgtctgggataatgttggcagttcaacaggtgacccaaggattggcctttgctgttctctcatctgtgcacccagtgtttggtttatatgggtctctgtttcctgccataatttatgccatatttggaatgggacatcatgttgccacaggcacctttgccttgacatccttaatatcagccaacgccgtggaacggattgtccctcagaacatgcagaatctcaccacacagagtaacacaagcgtgctgggcttatccgactttgaaatgcaaaggatccacgttgctgcagcagtttccttcttgggaggtgtgattcaggtggccatgtttgtgctgcaactgggcagtgccacatttgtggtcacagagcctgtgatcagcgcaatgacaactggggctgccacccatgtggtgacttcacaagtcaaatatctcttgggaatgaaaatgccatatatatcc

SEQ ID NO: 183619 - DNA, 5257 bp, Homo sapiens
  Payload ID: 16174
  Gene Symbol: SLC26A7
  Gene Name: solute carrier family 26 (anion exchanger), member 7
  Uniprot ID: Q8TE54
  ENST ID: ENST00000617233
  CDS Start-End: 232-2202
aggactggaagataagcaagaatctgaagctggtgcctctccaagtattaatttgttcttacaaatgttttactcaacgtgaccctaacctctttggaattgctcaggtgtagaacagctttgacattgtaaaccacagacgaattggagcttggcattgaaaggaggtgttctgcaatgattttttttcttgtttagagaagtttacttctacaagaagaaatctgaaaaatgacaggagcaaagaggaaaaagaaaagcatgctttggagcaagatgcataccccccagtgtgaagacattatacagtggtgtagaaggcgactgcccattttggattgggcaccacattacaatctgaaagaaaacttgcttccagacactgtgtctgggataatgttggcagttcaacaggtgacccaaggattggcctttgctgttctctcatctgtgcacccagtgtttggtttatatgggtctctgtttcctgccataatttatgccatatttggaatgggacatcatgttgccacaggcacctttgccttgacatccttaatatcagccaacgccgtggaacggattgtccctcagaacatgcagaatctcaccacacagagtaacacaagcgtgctgggcttatccgactttgaaatgcaaaggatccacgttgctgcagcagtttccttcttgggaggtgtgattcaggtggccatgtttgtgctgcaactgggcagtgccacatttgtggtcacagagcctgtgatcagcgcaatgacaactggggctgccacccatgtggtgacttcacaagtcaaatatctcttgggaatgaaaatgccatatatatccggaccacttggattcttttatatttatgcatatgtttttgaaaacatcaagtctgtgcgactggaagcattgcttttatccttgctgagcattgtggtccttgttcttgttaaagagctgaatgaacagtttaaaaggaaaattaaagttgttcttcctgtagatttagttttgattattgctgcatcatttgcttgttattgcaccaatatggaaaacacatatggattagaagtagttggtcatattccacaaggaattccctcacctagagctcccccgatgaacatcctctctgcggtgatcactgaagctttcggagtggcacttgtaggctatgtggcctcactggctcttgctcaaggatctgccaaaaaattcaaatattcaattgatgacaaccaggaatttttggcccatggcctcagcaatatagtttcttcatttttcttctgcataccaagtgctgctgccatgggaaggacggctggcctgtacagcacaggagcgaagacacaggtggcttgtctaatatcttgcattttcgtccttatagtcatctatgcaataggacctttgctttactggctgcccatgtgtgtccttgcaagcattattgttgtgggactgaagggaatgctaatacagttccgagatttaaaaaaatattggaatgtggataaaatcgattggggaatatgggtcagtacatatgtatttacaatatgctttgctgccaatgtgggactgctgtttggtgttgtttgtaccatagctatagtgataggacgcttcccaagagcaatgactgtaagtataaaaaatatgaaagaaatggaatttaaagtgaagacagaaatggacagtgaaaccctgcagcaggtgaaaattatctcaataaacaacccgcttgttttcctgaatgcaaaaaaattttatactgatttaatgaacatgatccaaaaggaaaatgcctgtaatcagccacttgatgatatcagcaagtgtgaacaaaacacattgcttaattccctatccaatggcaactgcaatgaagaagcttcacagtcctgccctaatgagaagtgttatttaatcctggattgcagtggatttaccttttttgactattctggagtctccatgcttgttgaggtttacatggactgtaaaggcaggagtgtggatgtattgttagcccattgtacagcttccttgataaaagcaatgacgtattatggaaacctagactcagagaaaccaattttttttgaatcggtatctgctgcaataagtcatatccattcaaataagaatttgagcaaactcagtgaccacagtgaagtctgagacccttttgtcacagtacagctcttgtctttaccaactgcctgaagaggccatatgctggcattttgcacaactttttggttgtttagatcctacagatgacctctgctacaataagtacgatgtgacttagtaactgcatagcagttggaaagaactgccaacttttttttctcatttttgttagtaagaagattcgcttagttattttatgtaaaaatcagtatgtgtttagttttagtgtactgaagggtaaacatggttttattttattttaccatattattttgtgttgttttatttctattgtgctgtaagttgatgtttaaaattgagaaatacttttgtcataggtaatttggaacatttacaagccatttgtaaaattttaagataatctgtaactaatacataaaaacaacttagcaaatgtgccattttcacacaacttctctctgtataggcctctgaaatatcaataaggctaaatattactttacacagtaagatgtgaaattcacaaaaagtaaaccaaacaaaacgaatgaaaaactggaaataattcgtttccatatctttccatacatccatttctgaagtattcaggaatgttttcataatcgaaagaaacgggtatccaaataaaaccaagttcttgacattggtctgttttgctgtgaatattggaaatgcttaggatcttcagacccaatagctctaattttaacatttctacccaataagaggctctgttttccactgaagctttgttggagaaagagaatatgaaaattacacattttataatttttagatgagaaaataccactagcagaatagctttgtgctattccagtataagatgaactgtaataatttttgacttccctatttcagagatagtcaatataatatgtttatctatatccatatggatggataggtaggtagatcttcatagatttttttttcttttgttagaggagagcttgatgtgattatcttcaaacccaccaaaccaacaggataattgacaaataaacgccataggctaggctgaactgtatgttactgttttcatgcttatacatatattttcaatcacatacaagtacatagaatttcacattttaatttagcaaattgatttacctaggaaaaaattatcaccttcaaagataggcatagacacataattatgcttaagcttttaacagcattttaaccgctctaaaaattaccagagtaagaaaaagctaggtactttaaagtgagtttgagaaacaagttgaaactaaaattaaaataccagccatttaggtgctttctctggcatctataaaagtaaattctagtgcctgccaagtgatggattataatggtctctagcaaatgtgtggtaaacattcatatggccattaattttaacattaaatcgtaggtagggcaatgtagtaaaatgaaagagaattaagaaaggttttgaattcttataacatatccagccatttcaattttgattgaaatgaactacaaagaatagtgtttgtccctatggtagcctcagtctctttatcactaacttggattgaaatgagtgaggccaactcacattcccatcaaacactcttccaaggaaaagcagaagtaataattggaggtaaagtttccttagagaaaataattttattctgctttgtccaattaaattattccaatggcggatggtaatattcaccatctctaattcattggtcactggtaggtaagcatgagttaaggaaagtcaaaaatgaaaatatattttgctgtgtataaattgatattttgctatgcaactcctgtaattgaatttgtataatgcaggcactttctaatttattagagattatggatcagttctgacattaaaatcatagttaattgatggatggtttttatagtttgttgataaagtggacacagtattgtctgagcagttatattttaatgcatttcagtgtttatagtagaagtttagtggataaaactttaagtccaataacttgggggtcaaatgctaatgttttattcaatgtaaaggaagaccaaaccatgtaccttatgaagacctttgttttaagacttccacacaccaaggctacaatgactgttaacctggaggaagtctctggtatggagttctgagagcttaagagctaaacatgagtttagacacacaagattctaaaatgcaaatgtttattttgaagcaggcattgacaacacaaaaactgtgtagtggtcttgatgctggattgtttctagagtcacaatgaattatttttatgagattaccttatttttatatatgacaaactacttctataatgcttattatggtaaaataaaattggaaaaaattaaaactgacctataagagtgttaaggacctaatagagtgacatatataaattaagcataaaatatgtaaccaggaaaagactgttaacattacatttatgcaaattaaatgcccttaaatttcaccatttgtctttcattttaaaggttatttgctcccgattatatgattcaagtgttataagttttagcttgaactactttgcagtaatttatttgacagatctctattctataaatgtgtaatgtgatgaagaaagagatctttcttttttaatgaaaacattaatgtgttaataccctgtatggataatgcttgacatttagtggtttccaaaatatattagtatattgttgaacatacattatgccttagaaatgcacattctgtattttgtgggatgataatctaattcagtatagaatatgctgtttggcaatgagtttgtggccagatttcaaatagggagttaagtggtactttcacaatccaaagatttttagttaaaaatcatgtagtctaatatgctgcagttatttttttatatttttcaatgcatttaattatcttttttataattctttgtactaactcagcatgtaacaaccaatttacatggaaataaatcgaaatatgataactattatgctt

SEQ ID NO: 183620 - DNA, 5094 bp, Homo sapiens
  Payload ID: 16174
  Gene Symbol: SLC26A7
  Gene Name: solute carrier family 26 (anion exchanger), member 7
  ENST ID: ENST00000617078
  CDS Start-End: 972-2039
aggactggaagataagcaagaatctgaagctggtgcctctccaagtattaatttgttcttacaaatgttttactcaacgtgaccctaacctctttggaattgctcaggtgtagaacagagaagtttacttctacaagaagaaatctgaaaaatgacaggagcaaagaggaaaaagaaaagcatgctttggagcaagatgcataccccccagtgtgaagacattatacagtggtgtagaaggcgactgcccattttggattgggcaccacattacaatctgaaagaaaacttgcttccagacactgtgtctgggataatgttggcagttcaacaggtgacccaaggattggcctttgctgttctctcatctgtgcacccagtgtttggtttatatgggtctctgtttcctgccataatttatgccatatttggaatgggacatcatgttgccacaggcacctttgccttgacatccttaatatcagccaacgccgtggaacggattgtccctcagaacatgcagaatctcaccacacagagtaacacaagcgtgctgggcttatccgactttgaaatgcaaaggatccacgttgctgcagcagtttccttcttgggaggtgtgattcaggtggccatgtttgtgctgcaactgggcagtgccacatttgtggtcacagagcctgtgatcagcgcaatgacaactggggctgccacccatgtggtgacttcacaagtcaaatatctcttgggaatgaaaatgccatatatatccggaccacttggattcttttatatttatgcatatgtttttgaaaacatcaagtctgtgcgactggaagcattgcttttatccttgctgagcattgtggtccttgttcttgttaaagagctgaatgaacagtttaaaaggaaaattaaagttgttcttcctgtagatttagttttgaattccctcacctagagctcccccgatgaacatcctctctgcggtgatcactgaagctttcggagtggcacttgtaggctatgtggcctcactggctcttgctcaaggatctgccaaaaaattcaaatattcaattgatgacaaccaggaatttttggcccatggcctcagcaatatagtttcttcatttttcttctgcataccaagtgctgctgccatgggaaggacggctggcctgtacagcacaggagcgaagacacaggtggcttgtctaatatcttgcattttcgtccttatagtcatctatgcaataggacctttgctttactggctgcccatgtgtgtccttgcaagcattattgttgtgggactgaagggaatgctaatacagttccgagatttaaaaaaatattggaatgtggataaaatcgattggggaatatgggtcagtacatatgtatttacaatatgctttgctgccaatgtgggactgctgtttggtgttgtttgtaccatagctatagtgataggacgcttcccaagagcaatgactgtaagtataaaaaatatgaaagaaatggaatttaaagtgaagacagaaatggacagtgaaaccctgcagcaggtgaaaattatctcaataaacaacccgcttgttttcctgaatgcaaaaaaattttatactgatttaatgaacatgatccaaaaggaaaatgcctgtaatcagccacttgatgatatcagcaagtgtgaacaaaacacattgcttaattccctatccaatggcaactgcaatgaagaagcttcacagtcctgccctaatgagaagtgttatttaatcctggattgcagtggatttaccttttttgactattctggagtctccatgcttgttgaggtttacatggactgtaaaggcaggagtgtggatgtattgttagcccattgtacagcttccttgataaaagcaatgacgtattatggaaacctagactcagagaaaccaattttttttgaatcggtatctgctgcaataagtcatatccattcaaataagaatttgagcaaactcagtgaccacagtgaagtctgagacccttttgtcacagtacagctcttgtctttaccaactgcctgaagaggccatatgctggcattttgcacaactttttggttgtttagatcctacagatgacctctgctacaataagtacgatgtgacttagtaactgcatagcagttggaaagaactgccaacttttttttctcatttttgttagtaagaagattcgcttagttattttatgtaaaaatcagtatgtgtttagttttagtgtactgaagggtaaacatggttttattttattttaccatattattttgtgttgttttatttctattgtgctgtaagttgatgtttaaaattgagaaatacttttgtcataggtaatttggaacatttacaagccatttgtaaaattttaagataatctgtaactaatacataaaaacaacttagcaaatgtgccattttcacacaacttctctctgtataggcctctgaaatatcaataaggctaaatattactttacacagtaagatgtgaaattcacaaaaagtaaaccaaacaaaacgaatgaaaaactggaaataattcgtttccatatctttccatacatccatttctgaagtattcaggaatgttttcataatcgaaagaaacgggtatccaaataaaaccaagttcttgacattggtctgttttgctgtgaatattggaaatgcttaggatcttcagacccaatagctctaattttaacatttctacccaataagaggctctgttttccactgaagctttgttggagaaagagaatatgaaaattacacattttataatttttagatgagaaaataccactagcagaatagctttgtgctattccagtataagatgaactgtaataatttttgacttccctatttcagagatagtcaatataatatgtttatctatatccatatggatggataggtaggtagatcttcatagatttttttttcttttgttagaggagagcttgatgtgattatcttcaaacccaccaaaccaacaggataattgacaaataaacgccataggctaggctgaactgtatgttactgttttcatgcttatacatatattttcaatcacatacaagtacatagaatttcacattttaatttagcaaattgatttacctaggaaaaaattatcaccttcaaagataggcatagacacataattatgcttaagcttttaacagcattttaaccgctctaaaaattaccagagtaagaaaaagctaggtactttaaagtgagtttgagaaacaagttgaaactaaaattaaaataccagccatttaggtgctttctctggcatctataaaagtaaattctagtgcctgccaagtgatggattataatggtctctagcaaatgtgtggtaaacattcatatggccattaattttaacattaaatcgtaggtagggcaatgtagtaaaatgaaagagaattaagaaaggttttgaattcttataacatatccagccatttcaattttgattgaaatgaactacaaagaatagtgtttgtccctatggtagcctcagtctctttatcactaacttggattgaaatgagtgaggccaactcacattcccatcaaacactcttccaaggaaaagcagaagtaataattggaggtaaagtttccttagagaaaataattttattctgctttgtccaattaaattattccaatggcggatggtaatattcaccatctctaattcattggtcactggtaggtaagcatgagttaaggaaagtcaaaaatgaaaatatattttgctgtgtataaattgatattttgctatgcaactcctgtaattgaatttgtataatgcaggcactttctaatttattagagattatggatcagttctgacattaaaatcatagttaattgatggatggtttttatagtttgttgataaagtggacacagtattgtctgagcagttatattttaatgcatttcagtgtttatagtagaagtttagtggataaaactttaagtccaataacttgggggtcaaatgctaatgttttattcaatgtaaaggaagaccaaaccatgtaccttatgaagacctttgttttaagacttccacacaccaaggctacaatgactgttaacctggaggaagtctctggtatggagttctgagagcttaagagctaaacatgagtttagacacacaagattctaaaatgcaaatgtttattttgaagcaggcattgacaacacaaaaactgtgtagtggtcttgatgctggattgtttctagagtcacaatgaattatttttatgagattaccttatttttatatatgacaaactacttctataatgcttattatggtaaaataaaattggaaaaaattaaaactgacctataagagtgttaaggacctaatagagtgacatatataaattaagcataaaatatgtaaccaggaaaagactgttaacattacatttatgcaaattaaatgcccttaaatttcaccatttgtctttcattttaaaggttatttgctcccgattatatgattcaagtgttataagttttagcttgaactactttgcagtaatttatttgacagatctctattctataaatgtgtaatgtgatgaagaaagagatctttcttttttaatgaaaacattaatgtgttaataccctgtatggataatgcttgacatttagtggtttccaaaatatattagtatattgttgaacatacattatgccttagaaatgcacattctgtattttgtgggatgataatctaattcagtatagaatatgctgtttggcaatgagtttgtggccagatttcaaatagggagttaagtggtactttcacaatccaaagatttttagttaaaaatcatgtagtctaatatgctgcagttatttttttatatttttcaatgcatttaattatcttttttataattctttgtactaactcagcatgtaacaaccaatttacatggaaataaatcgaaatatgataactattatgctt

SEQ ID NO: 183621 - DNA, 3463 bp, Homo sapiens
  Payload ID: 16175
  Gene Symbol: SLC26A8
  Gene Name: solute carrier family 26 (anion exchanger), member 8
  Uniprot ID: Q96RN1
  ENST ID: ENST00000355574
  CDS Start-End: 172-3084
ggtatccgcgtccgcagcgccgccagccaggcgagagccgtgtgggatcccagcgcccgcactcccgcccccgccaaggagccaggtgagccgctgctgggagacgcctgggcgccgggggctgcaggtcccagggcgggggctgcgtccgtcaccggcaggtacccaggaatggcacaactagagaggagcgccatctctggcttcagctctaagtccaggcgaaactcattcgcatatgatgttaagcgtgaagtatacaatgaggagacctttcaacaggaacacaaaaggaaggcctcctcttctgggaacatgaacatcaacatcaccaccttcagacaccacgtccagtgccgctgctcatggcacaggttcctacgatgcgtgcttacaatctttcccttcctagaatggatgtgtatgtatcgattaaaggattggcttctgggagacttacttgctggtataagtgttggccttgtgcaagttccccaaggcctgacacttagtttgctggcaaggcaactgattcctcctctcaacatcgcttatgcagctttctgttcttcggtaatctatgtaatttttggatcgtgtcatcaaatgtccattggttccttcttcctggtgagtgctctgctgatcaacgttctgaaagtgagcccattcaacaacggtcaactggtcatgggatctttcgtcaagaatgagttttcggccccctcctaccttatgggctataataaatccttgagtgtggtggcaaccacaacttttctgactgggattattcagctaataatgggcgtattgggtttgggcttcattgccacttaccttccggagtctgcaatgagtgcttacctggctgctgtggcacttcatatcatgctgtcccagctgactttcatctttgggattatgattagtttccatgccggtcccatctccttcttctatgacataattaattactgtgtagctctcccaaaagcgaattccaccagcattctagtatttctaactgttgttgttgctctgcgaatcaacaaatgtatcagaatttctttcaatcagtatcccattgagtttcccatggaattatttctgattattggcttcactgtgattgcaaacaagataagcatggccacagaaaccagccagacgcttattgacatgattccttatagctttctgcttcctgtaacaccagatttcagccttcttcccaagataattttacaagccttctccttatctttggtgagctcctttctgctcatatttctgggcaagaagattgccagtcttcacaattacagtgtcaattccaaccaggatttaatagccatcggcctttgcaatgtcgtcagttcatttttcagatcttgtgtgtttactggtgctattgctaggactattatccaggataaatctggaggaagacaacagtttgcatctctggtaggcgcaggtgtgatgctgctcctgatggtgaagatgggacactttttctacacactgccaaatgctgtgctggctggtattattctgagcaacgtcattccctaccttgaaaccatttctaacctacccagcctgtggaggcaggaccaatatgactgtgctctttggatgatgacattctcatcttcaattttcctgggactggacattggactaattatctcagtagtttctgctttcttcatcaccactgttcgttcacacagagctaagattcttctcctgggtcaaatccctaacaccaacatttatagaagcatcaatgattatcgggagatcatcaccattcctggggtgaaaatcttccagtgctgcagctcaattacatttgtaaatgtttactacctaaagcataagctgttaaaagaggttgatatggtaaaggtgcctcttaaagaagaagaaattttcagcttgtttaattcaagtgacaccaatctacaaggaggaaagatttgcaggtgtttctgcaactgtgatgatctggagccgctgcccaggattctttacacagagcgatttgaaaataaactggatcccgaagcatcctccattaacctgattcactgctcacattttgagagcatgaacacaagccaaactgcatccgaagaccaagtgccatacacagtatcgtccgtgtctcagaaaaatcaagggcaacagtatgaggaggtggaggaagtttggcttcctaataactcatcaagaaacagctcaccaggactgcctgatgtggcggaaagccaggggaggagatcactcatcccttactcagatgcgtctctactgcccagtgtccacaccatcatcctggatttctccatggtacactacgtggattcacgggggttagtcgtattaagacagatatgcaatgcctttcaaaacgccaacattttgatactcattgcagggtgtcactcttccatagtcagggcatttgagaggaatgatttctttgacgctggcatcaccaagacccagctgttcctcagcgttcacgacgccgtgctgtttgccttgtcaaggaaggtcataggctcctctgagttaagcatcgatgaatccgagacagtgatacgggaaacctactcagaaacagacaagaatgacaattcaagatataaaatgagcagcagttttctaggaagccaaaaaaatgtaagtccaggcttcatcaagatccaacagcctgtagaagaggagtcggagttggatttggagctggaatcagaacaagaggctgggctgggtctggacctagacctggatcgggagctggagcctgaaatggagcccaaggctgagaccgagaccaagacccagaccgagatggagccccagcctgagactgagcctgagatggagcccaaccccaaatctaggccaagagctcacacttttcctcagcagcgttactggcctatgtatcatccgtctatggcttccacccagtctcagactcagactcggacatggtcagtggagaggagacgccatcctatggattcatactcaccagagggcaacagcaatgaagatgtctaggagatgaactagaaataaggggtcagataatgctggcaaatcctcctacccaaaaaggggtcaattgtccagagacctagactggatacgaactagcagtacttccttcctgactgtgactcctactacctgccagccttcttccttgctctgcgctgggatcatactcccaaatcacattactaaatgccaacaattatctctgaattccctatccaggctcccctcatttcaccttcagcatatattctagtcatgaatttccttcttcacacaccccacatctctgggctttgtgccagaccatctctaacttaatcctctcatccctgttcccctttctccaaagagatgaagctcaaataaaatgtataactct

SEQ ID NO: 183622 - DNA, 3144 bp, Homo sapiens
  Payload ID: 16175
  Gene Symbol: SLC26A8
  Gene Name: solute carrier family 26 (anion exchanger), member 8
  Uniprot ID: Q96RN1
  ENST ID: ENST00000394602
  CDS Start-End: 167-2764
gctgggagacgcctgggcgccgggggctgcaggtcccagggcgggggctgcgtccgtcaccggcaggtacccaggtatgccgcagagccaggcacgccgtgggcactcagtcagtatctgtggaatgaatgaatgatggtcgtccctgggagcttatctctgaggaatggcacaactagagaggagcgccatctctggcttcagctctaagtccaggcgaaactcattcgcatatgatgttaagcgtgaagtatacaatgaggagacctttcaacaggaacacaaaaggaaggcctcctcttctgggaacatgaacatcaacatcaccaccttcagacaccacgtccagtgccgctgctcatggcacaggttcctacgatgcgtgcttacaatctttcccttcctagaatggatgtgtatgtatcgattaaaggattggcttctgggagacttacttgctggtataagtgttggccttgtgcaagttccccaaggcctgacacttagtttgctggcaaggcaactgattcctcctctcaacatcgcttatgcagctttctgttcttcggtaatctatgtaatttttggatcgtgtcatcaaatgtccattggttccttcttcctggtgagtgctctgctgatcaacgttctgaaagtgagcccattcaacaacggtcaactggtcatgggatctttcgtcaagaatgagttttcggccccctcctaccttatgggctataataaatccttgagtgtggtggcaaccacaacttttctgactgggattattcagattattggcttcactgtgattgcaaacaagataagcatggccacagaaaccagccagacgcttattgacatgattccttatagctttctgcttcctgtaacaccagatttcagccttcttcccaagataattttacaagccttctccttatctttggtgagctcctttctgctcatatttctgggcaagaagattgccagtcttcacaattacagtgtcaattccaaccaggatttaatagccatcggcctttgcaatgtcgtcagttcatttttcagatcttgtgtgtttactggtgctattgctaggactattatccaggataaatctggaggaagacaacagtttgcatctctggtaggcgcaggtgtgatgctgctcctgatggtgaagatgggacactttttctacacactgccaaatgctgtgctggctggtattattctgagcaacgtcattccctaccttgaaaccatttctaacctacccagcctgtggaggcaggaccaatatgactgtgctctttggatgatgacattctcatcttcaattttcctgggactggacattggactaattatctcagtagtttctgctttcttcatcaccactgttcgttcacacagagctaagattcttctcctgggtcaaatccctaacaccaacatttatagaagcatcaatgattatcgggagatcatcaccattcctggggtgaaaatcttccagtgctgcagctcaattacatttgtaaatgtttactacctaaagcataagctgttaaaagaggttgatatggtaaaggtgcctcttaaagaagaagaaattttcagcttgtttaattcaagtgacaccaatctacaaggaggaaagatttgcaggtgtttctgcaactgtgatgatctggagccgctgcccaggattctttacacagagcgatttgaaaataaactggatcccgaagcatcctccattaacctgattcactgctcacattttgagagcatgaacacaagccaaactgcatccgaagaccaagtgccatacacagtatcgtccgtgtctcagaaaaatcaagggcaacagtatgaggaggtggaggaagtttggcttcctaataactcatcaagaaacagctcaccaggactgcctgatgtggcggaaagccaggggaggagatcactcatcccttactcagatgcgtctctactgcccagtgtccacaccatcatcctggatttctccatggtacactacgtggattcacgggggttagtcgtattaagacagatatgcaatgcctttcaaaacgccaacattttgatactcattgcagggtgtcactcttccatagtcagggcatttgagaggaatgatttctttgacgctggcatcaccaagacccagctgttcctcagcgttcacgacgccgtgctgtttgccttgtcaaggaaggtcataggctcctctgagttaagcatcgatgaatccgagacagtgatacgggaaacctactcagaaacagacaagaatgacaattcaagatataaaatgagcagcagttttctaggaagccaaaaaaatgtaagtccaggcttcatcaagatccaacagcctgtagaagaggagtcggagttggatttggagctggaatcagaacaagaggctgggctgggtctggacctagacctggatcgggagctggagcctgaaatggagcccaaggctgagaccgagaccaagacccagaccgagatggagccccagcctgagactgagcctgagatggagcccaaccccaaatctaggccaagagctcacacttttcctcagcagcgttactggcctatgtatcatccgtctatggcttccacccagtctcagactcagactcggacatggtcagtggagaggagacgccatcctatggattcatactcaccagagggcaacagcaatgaagatgtctaggagatgaactagaaataaggggtcagataatgctggcaaatcctcctacccaaaaaggggtcaattgtccagagacctagactggatacgaactagcagtacttccttcctgactgtgactcctactacctgccagccttcttccttgctctgcgctgggatcatactcccaaatcacattactaaatgccaacaattatctctgaattccctatccaggctcccctcatttcaccttcagcatatattctagtcatgaatttccttcttcacacaccccacatctctgggctttgtgccagaccatctctaacttaatcctctcatccctgttcccctttctccaaagagatgaagctcaaataaaatgtataactcta

SEQ ID NO: 183623 - DNA, 3653 bp, Homo sapiens
  Payload ID: 16175
  Gene Symbol: SLC26A8
  Gene Name: solute carrier family 26 (anion exchanger), member 8
  Uniprot ID: Q96RN1
  ENST ID: ENST00000490799
  CDS Start-End: 355-3267
tgttcaggacacgaggcctggcaccaaataggccctcgatcaagaatagcaaaacctcggagagagaaggagccttggtatacaggtttaccaaataccaaggggatcccacgactcaggtatgaggagggcgacccaggtaccactttcctggctccctagcccagctgctcatgctcctcttcctcgtcccctcccccactctcatctcctcagcccgcccggaacgcccgcgggctaggccacaacggctcgggaaccgccgccggtatccgcgtccgcagcgccgccagccaggcgagagccgtgtgggatcccagcgcccgcactcccgcccccgccaaggagccaggaatggcacaactagagaggagcgccatctctggcttcagctctaagtccaggcgaaactcattcgcatatgatgttaagcgtgaagtatacaatgaggagacctttcaacaggaacacaaaaggaaggcctcctcttctgggaacatgaacatcaacatcaccaccttcagacaccacgtccagtgccgctgctcatggcacaggttcctacgatgcgtgcttacaatctttcccttcctagaatggatgtgtatgtatcgattaaaggattggcttctgggagacttacttgctggtataagtgttggccttgtgcaagttccccaaggcctgacacttagtttgctggcaaggcaactgattcctcctctcaacatcgcttatgcagctttctgttcttcggtaatctatgtaatttttggatcgtgtcatcaaatgtccattggttccttcttcctggtgagtgctctgctgatcaacgttctgaaagtgagcccattcaacaacggtcaactggtcatgggatctttcgtcaagaatgagttttcggccccctcctaccttatgggctataataaatccttgagtgtggtggcaaccacaacttttctgactgggattattcagctaataatgggcgtattgggtttgggcttcattgccacttaccttccggagtctgcaatgagtgcttacctggctgctgtggcacttcatatcatgctgtcccagctgactttcatctttgggattatgattagtttccatgccggtcccatctccttcttctatgacataattaattactgtgtagctctcccaaaagcgaattccaccagcattctagtatttctaactgttgttgttgctctgcgaatcaacaaatgtatcagaatttctttcaatcagtatcccattgagtttcccatggaattatttctgattattggcttcactgtgattgcaaacaagataagcatggccacagaaaccagccagacgcttattgacatgattccttatagctttctgcttcctgtaacaccagatttcagccttcttcccaagataattttacaagccttctccttatctttggtgagctcctttctgctcatatttctgggcaagaagattgccagtcttcacaattacagtgtcaattccaaccaggatttaatagccatcggcctttgcaatgtcgtcagttcatttttcagatcttgtgtgtttactggtgctattgctaggactattatccaggataaatctggaggaagacaacagtttgcatctctggtaggcgcaggtgtgatgctgctcctgatggtgaagatgggacactttttctacacactgccaaatgctgtgctggctggtattattctgagcaacgtcattccctaccttgaaaccatttctaacctacccagcctgtggaggcaggaccaatatgactgtgctctttggatgatgacattctcatcttcaattttcctgggactggacattggactaattatctcagtagtttctgctttcttcatcaccactgttcgttcacacagagctaagattcttctcctgggtcaaatccctaacaccaacatttatagaagcatcaatgattatcgggagatcatcaccattcctggggtgaaaatcttccagtgctgcagctcaattacatttgtaaatgtttactacctaaagcataagctgttaaaagaggttgatatggtaaaggtgcctcttaaagaagaagaaattttcagcttgtttaattcaagtgacaccaatctacaaggaggaaagatttgcaggtgtttctgcaactgtgatgatctggagccgctgcccaggattctttacacagagcgatttgaaaataaactggatcccgaagcatcctccattaacctgattcactgctcacattttgagagcatgaacacaagccaaactgcatccgaagaccaagtgccatacacagtatcgtccgtgtctcagaaaaatcaagggcaacagtatgaggaggtggaggaagtttggcttcctaataactcatcaagaaacagctcaccaggactgcctgatgtggcggaaagccaggggaggagatcactcatcccttactcagatgcgtctctactgcccagtgtccacaccatcatcctggatttctccatggtacactacgtggattcacgggggttagtcgtattaagacagatatgcaatgcctttcaaaacgccaacattttgatactcattgcagggtgtcactcttccatagtcagggcatttgagaggaatgatttctttgacgctggcatcaccaagacccagctgttcctcagcgttcacgacgccgtgctgtttgccttgtcaaggaaggtcataggctcctctgagttaagcatcgatgaatccgagacagtgatacgggaaacctactcagaaacagacaagaatgacaattcaagatataaaatgagcagcagttttctaggaagccaaaaaaatgtaagtccaggcttcatcaagatccaacagcctgtagaagaggagtcggagttggatttggagctggaatcagaacaagaggctgggctgggtctggacctagacctggatcgggagctggagcctgaaatggagcccaaggctgagaccgagaccaagacccagaccgagatggagccccagcctgagactgagcctgagatggagcccaaccccaaatctaggccaagagctcacacttttcctcagcagcgttactggcctatgtatcatccgtctatggcttccacccagtctcagactcagactcggacatggtcagtggagaggagacgccatcctatggattcatactcaccagagggcaacagcaatgaagatgtctaggagatgaactagaaataaggggtcagataatgctggcaaatcctcctacccaaaaaggggtcaattgtccagagacctagactggatacgaactagcagtacttccttcctgactgtgactcctactacctgccagccttcttccttgctctgcgctgggatcatactcccaaatcacattactaaatgccaacaattatctctgaattccctatccaggctcccctcatttcaccttcagcatatattctagtcatgaatttccttcttcacacaccccacatctctgggctttgtgccagaccatctctaacttaatcctctcatccctgttcccctttctccaaagagatgaagctcaaataaaatgtataactctagtaaca

SEQ ID NO: 183624 - DNA, 2104 bp, Homo sapiens
  Payload ID: 16175
  Gene Symbol: SLC26A8
  Gene Name: solute carrier family 26 (anion exchanger), member 8
  ENST ID: ENST00000465492
  CDS Start-End: 1-961
tttctacacactgccaaatgctgtgctggctggtattattctgagcaacgtcattccctaccttgaaaccatttctaacctacccagcctgtggaggcaggaccaatatgactgtgctctttggatgatgacattctcatcttcaattttcctgggactggacattggactaattatctcagtagtttctgctttcttcatcaccactgttcgttcacacagagctaagattcttctcctgggtcaaatccctaacaccaacatttatagaagcatcaatgattatcgggagatcatcaccattcctggggtgaaaatcttccagtgctgcagctcaattacatttgtaaatgtttactacctaaagcataagctgttaaaagaggttgatatggtaaaggtgcctcttaaagaagaagaaattttcagcttgtttaattcaagtgacaccaatctacaaggaggaaagatttgcaggtgtttctgcaactgtgatgatctggagccgctgcccaggattctttacacagagcgatttgaaaataaactggatcccgaagcatcctccattaacctgattcactgctcacattttgagagcatgaacacaagccaaactgcatccgaagaccaagtgccatacacagtatcgtccgtgtctcagaaaaatcaagggcaacagtatgaggaggtggaggaagtttggcttcctaataactcatcaagaaacagctcaccaggactgcctgatgtggcggaaagccaggggaggagatcactcatcccttactcagatgcgtctctactgcccagtgtccacaccatcatcctggatttctccatggtacactacgtggattcacgggggttagtcgtattaagacaggtaagtactgaggaggccttggcaggagctctgatccccctcctaccatcccaaccccaccctgatcctgattgaattctgttagtcactgatcagctgctatgagactgctaggccaccagagccttggacaccaaaggcagtacaatataaggtcaatcaaaataaaaagagaatgaaccaattcttttttcttttttcttttttgagatggagcctcactctgttgcccaggctggagtgcagtggcacaatcttggctcactgcaacctccacctcccaggttcaagagattctcctgcctcagcctcctgaatagctggaactacagatatgcaatgcctttcaaaacgccaacattttgatactcattgcagggtgtcactcttccatagtcagggcatttgagaggaatgatttctttgacgctggcatcaccaagacccagctgttcctcagcgttcacgacgccgtgctgtttgccttgtcaaggaaggtcataggctcctctgagttaagcatcgatgaatccgagacagtgatacgggaaacctactcagaaacagacaagaatgacaattcaagatataaaatgagcagcagttttctaggaagccaaaaaaatgtaagtccaggcttcatcaagatccaacagcctgtagaagaggagtcggagttggatttggagctggaatcagaacaagaggctgggctgggtctggacctagacctggatcgggagctggagcctgaaatggagcccaaggctgagaccgagaccaagacccagaccgagatggagccccagcctgagactgagcctgagatggagcccaaccccaaatctaggccaagagctcacacttttcctcagcagcgttactggcctatgtatcatccgtctatggcttccacccagtctcagactcagactcggacatggtcagtggagaggagacgccatcctatggattcatactcaccagagggcaacagcaatgaagatgtctaggagatgaactagaaataaggggtcagataatgctggcaaatcctcctacccaaaaaggggtcaattgtccagagacctagactggatacgaactagcagtacttccttcctgactgtgactcctactacctgccagccttcttccttgctctgcgctgggatcatactcccaaatcacattactaaatgccaacaattatctctg

SEQ ID NO: 183625 - DNA, 740 bp, Homo sapiens
  Payload ID: 16175
  Gene Symbol: SLC26A8
  Gene Name: solute carrier family 26 (anion exchanger), member 8
  ENST ID: ENST00000469847
  CDS Start-End: 1-554
tggtatacaggtttaccaaataccaaggggatcccacgactcagcccgcccggaacgcccgcgggctaggccacaacggctcgggaaccgccgccggtatccgcgtccgcagcgccgccagccaggcgagagccgtgtgggatcccagcgcccgcactcccgcccccgccaaggagccaggtgagccgctgctgggagacgcctgggcgccgggggctgcaggtcccagggcgggggctgcgtccgtcaccggcaggtacccaggaatggcacaactagagaggagcgccatctctggcttcagctctaagtccaggcgaaactcattcgcatatgatgttaagcgtgaagtatacaatgaggagacctttcaacaggaacacaaaaggaaggcctcctcttctgggaacatgaacatcaacatcaccaccttcagacaccacgtccagtgccgaatggatgtgtatgtatcgattaaaggattggcttctgggagacttacttgctggtataagtgttggccttgtgcaagttccccaaggcctgacacttagtttgctggcaaggcaactgattcctcctctcaacatcgcttatgcagctttctgttcttcggtaatctatgtaatttttggatcgtgtcatcaaatgtccattggttccttcttcctggtgagtgctctgctgatcaacgttctgaaagtgagcccattcaacaacggtcaactggtcatgggatc

SEQ ID NO: 183626 - DNA, 582 bp, Homo sapiens
  Payload ID: 16175
  Gene Symbol: SLC26A8
  Gene Name: solute carrier family 26 (anion exchanger), member 8
  ENST ID: ENST00000480663
  CDS Start-End: 13-582
gtgcactgctgtatgttcaggacacgaggcctggcaccaaataggccctcgatcaagaatagcaaaacctcggagagagaaggagccttggtatacaggtttaccaaataccaaggggatcccacgactcagcccgcccggaacgcccgcgggctaggccacaacggctcgggaaccgccgccggtatccgcgtccgcagcgccgccagccaggcgagagccgtgtgggatcccagcgcccgcactcccgcccccgccaaggagccaggaatggcacaactagagaggagcgccatctctggcttcagctctaagtccaggcgaaactcattcgcatatgatgttaagcgtgaagtatacaatgaggagacctttcaacaggaacacaaaaggaaggcctcctcttctgggaacatgaacatcaacatcaccaccttcagacaccacgtccagtgccgctgctcatggcacaggttcctacgatgcgtgcttacaatctttcccttcctagaatggatgtgtatgtatcgattaaaggattggcttctgggagacttacttgctggtataagtgttggcctt

SEQ ID NO: 183627 - DNA, 4510 bp, Homo sapiens
  Payload ID: 16176
  Gene Symbol: SLC26A9
  Gene Name: solute carrier family 26 (anion exchanger), member 9
  Uniprot ID: Q7LBE3
  ENST ID: ENST00000340781
  CDS Start-End: 3-2666
atatgagccagcccaggccccgctacgtggtagacagagccgcatactcccttaccctcttcgacgatgagtttgagaagaaggaccggacatacccagtgggagagaaacttcgcaatgccttcagatgttcctcagccaagatcaaagctgtggtgtttgggctgctgcctgtgctctcctggctccccaagtacaagattaaagactacatcattcctgacctgctcggtggactcagcgggggatccatccaggtcccacaaggcatggcatttgctctgctggccaaccttcctgcagtcaatggcctctactcctccttcttccccctcctgacctacttcttcctggggggtgttcaccagatggtgccaggtacctttgccgttatcagcatcctggtgggtaacatctgtctgcagctggccccagagtcgaaattccaggtcttcaacaatgccaccaatgagagctatgtggacacagcagccatggaggctgagaggctgcacgtgtcagctacgctagcctgcctcaccgccatcatccagatgggtctgggcttcatgcagtttggctttgtggccatctacctctccgagtccttcatccggggcttcatgacggccgccggcctgcagatcctgatttcggtgctcaagtacatcttcggactgaccatcccctcctacacaggcccagggtccatcgtctttaccttcattgacatttgcaaaaacctcccccacaccaacatcgcctcgctcatcttcgctctcatcagcggtgccttcctggtgctggtgaaggagctcaatgctcgctacatgcacaagattcgcttccccatccctacagagatgattgtggtggtggtggcaacagctatctccgggggctgtaagatgcccaaaaagtatcacatgcagatcgtgggagaaatccaacgcgggttccccaccccggtgtcgcctgtggtctcacagtggaaggacatgataggcacagccttctccctagccatcgtgagctacgtcatcaacctggctatgggccggaccctggccaacaagcacggctacgacgtggattcgaaccaggagatgatcgctctcggctgcagcaacttctttggctccttctttaaaattcatgtcatttgctgtgcgctttctgtcactctggctgtggatggagctggaggaaaatcccaggtggccagcctgtgtgtgtctctggtggtgatgatcaccatgctggtcctggggatctatctgtatcctctccctaagtctgtgctaggagccctgatcgctgtcaatctcaagaactccctcaagcaactcaccgacccctactacctgtggaggaagagcaagctggactgttgcatctgggtagtgagcttcctctcctccttcttcctcagcctgccctatggtgtggcagtgggtgtcgccttctccgtcctggtcgtggtcttccagactcagtttcgaaatggctatgcactggcccaggtcatggacactgacatttatgtgaatcccaagacctataatagggcccaggatatccaggggattaaaatcatcacgtactgctcccctctctactttgccaactcagagatcttcaggcaaaaggtcatcgccaagacaggcatggacccccagaaagtattactagccaagcaaaaatacctcaagaagcaggagaagcggagaatgaggcccacacaacagaggaggtctctattcatgaaaaccaagactgtctccctgcaggagctgcagcaggactttgagaatgcgccccccaccgaccccaacaacaaccagaccccggctaacggcaccagcgtgtcctatatcaccttcagccctgacagctcctcacctgcccagagtgagccaccagcctccgctgaggcccccggcgagcccagtgacatgctggccagcgtcccacccttcgtcaccttccacaccctcatcctggacatgagtggagtcagcttcgtggacttgatgggcatcaaggccctggccaagctgagctccacctatgggaagatcggcgtgaaggtcttcttggtgaacatccatgcccaggtgtacaatgacattagccatggaggcgtctttgaggatgggagtctagaatgcaagcacgtctttcccagcatacatgacgcagtcctctttgcccaggcaaatgctagagacgtgaccccaggacacaacttccaaggggctccaggggatgctgagctctccttgtacgactcagaggaggacattcgcagctactgggacttagagcaggagatgttcgggagcatgtttcacgcagagaccctgaccgccctagagagcctctcagcagcaggggggtgctacccttacaggagtgagagtctggtgagcccactcttcacccgtcaggccctggccgcaatggacaagcctcctgctcactccaccccacccacctctgccctgtccttggcagctgaaggacaccttgacttccagcttttacgagtgagccaaaaacagaaggacaagtacaactgtgctggcctgctgtacaagcttcaaaaagtgtcccagagcccacacggctcggtgtcagatggtgtcaggctgtcacggacatagggataaacttggttaggactctggcttgccttccccagctgcctcaactctgtctctggcagctctgcacccagggaccatgtgctctccacacccaggagtctaggccttggtaactatgcgccccccctccatcatccccaaggctgcccaaaccaccactgctgtcagcaagcacatcagactctagcctggacagtggccaggaccgtcgagaccaccagagctacctccccggggacagcccactaaggttctgcctcagcctcctgaaacatcactgccctcagaggctgctcccttcccctggaggctggctagaaaccccaaagagggggatgggtagctggcagaatcatctggcatcctagtaatagataccagttattctgcacaaaacttttgggaattcctctttgcacccagagactcagaggggaagagggtgctagtaccaacacagggaaaacggatgggacctgggcccagacagtcccccttgaccccagggcccatcagggaaatgcctccctttggtaaatctgccttatccttctttacctggcaaagagccaatcatgttaactcttccttatcagcctgtggcccagagacacaatggggtccttctgtaggcaaaggtggaagtcctccagggatccgctacatcccctaactgcatgcagatgtggaaaggggctgatccagattgggtcttcctgcacaggaagactctttaacacccttaggacctcaggccatcttctcctatgaagatgaaaataggggttaagttttccatatgtacaaggaggtattgagaggaaccctactgttgacttgaaaataaataggttccatgtgtaagtgttttgtaaaatttcagtggaaatgcacagaaaatcttctggcctctcatcactgcttttctcaagcttcttcagcttaacaaccccttccctaacaggttgggctggcccagcctaggaaaacatccccatttctaacttcagccagacctgcgttgtgtgtctgtgtgttgagtgagctggtcagctaacaagtcttcttagagttaaaggagggggtgctggccaagagccaacacattcttggcccaggagcattgcttttctgtgaattcattatgccatctggctgccaatggaactcaaaacttggaaggcgaaggacaatgttatctgggattcaccgtgcccagcacccgaagtgccaaattccaggaggacaagagccttagccaatgacaactcactctcccctactccacctccttccaagtccagctcaggcccaggaggtgggagaaggtcacagagcctcaggaatttccaagtcagagtcccctttgaaccaagtatctagatcccctgaggacttgatgaagtgatccttaacccccaagtaatcattaacccccagaccagcctcagaactgaaggagattgttgacccagtgacctggagttgaggctcagggagagatctgccacatgtctgagggttgcagagcccgctgtggaggtaagattggaaacacatgaggcagagggaagacattgaagaaaacatctctgctggaatatttggaaaagaacactcttctggacctggttgaagcaggaaagatggaggcaaagtagtgaaataatccagaatttcaatgcttttgaatgttcttagtgatactgacctgtgataatataattcccagggaggactgggaaccttatctcttgagatatttgcataatttatttaatttaagcctcattctccttttgttcattttggtaataaactggatttgaattgtgaacaaa

SEQ ID NO: 183628 - DNA, 4616 bp, Homo sapiens
  Payload ID: 16176
  Gene Symbol: SLC26A9
  Gene Name: solute carrier family 26 (anion exchanger), member 9
  Uniprot ID: Q7LBE3
  ENST ID: ENST00000367134
  CDS Start-End: 115-2778
gagcagagccctttcacacacctcaggaacacctttcggctgcccgctccccagacacacctgcagccctgcccagccggctttgctcacccactgcttgtaaatgccccagatatgagccagcccaggccccgctacgtggtagacagagccgcatactcccttaccctcttcgacgatgagtttgagaagaaggaccggacatacccagtgggagagaaacttcgcaatgccttcagatgttcctcagccaagatcaaagctgtggtgtttgggctgctgcctgtgctctcctggctccccaagtacaagattaaagactacatcattcctgacctgctcggtggactcagcgggggatccatccaggtcccacaaggcatggcatttgctctgctggccaaccttcctgcagtcaatggcctctactcctccttcttccccctcctgacctacttcttcctggggggtgttcaccagatggtgccaggtacctttgccgttatcagcatcctggtgggtaacatctgtctgcagctggccccagagtcgaaattccaggtcttcaacaatgccaccaatgagagctatgtggacacagcagccatggaggctgagaggctgcacgtgtcagctacgctagcctgcctcaccgccatcatccagatgggtctgggcttcatgcagtttggctttgtggccatctacctctccgagtccttcatccggggcttcatgacggccgccggcctgcagatcctgatttcggtgctcaagtacatcttcggactgaccatcccctcctacacaggcccagggtccatcgtctttaccttcattgacatttgcaaaaacctcccccacaccaacatcgcctcgctcatcttcgctctcatcagcggtgccttcctggtgctggtgaaggagctcaatgctcgctacatgcacaagattcgcttccccatccctacagagatgattgtggtggtggtggcaacagctatctccgggggctgtaagatgcccaaaaagtatcacatgcagatcgtgggagaaatccaacgcgggttccccaccccggtgtcgcctgtggtctcacagtggaaggacatgataggcacagccttctccctagccatcgtgagctacgtcatcaacctggctatgggccggaccctggccaacaagcacggctacgacgtggattcgaaccaggagatgatcgctctcggctgcagcaacttctttggctccttctttaaaattcatgtcatttgctgtgcgctttctgtcactctggctgtggatggagctggaggaaaatcccaggtggccagcctgtgtgtgtctctggtggtgatgatcaccatgctggtcctggggatctatctgtatcctctccctaagtctgtgctaggagccctgatcgctgtcaatctcaagaactccctcaagcaactcaccgacccctactacctgtggaggaagagcaagctggactgttgcatctgggtagtgagcttcctctcctccttcttcctcagcctgccctatggtgtggcagtgggtgtcgccttctccgtcctggtcgtggtcttccagactcagtttcgaaatggctatgcactggcccaggtcatggacactgacatttatgtgaatcccaagacctataatagggcccaggatatccaggggattaaaatcatcacgtactgctcccctctctactttgccaactcagagatcttcaggcaaaaggtcatcgccaagacaggcatggacccccagaaagtattactagccaagcaaaaatacctcaagaagcaggagaagcggagaatgaggcccacacaacagaggaggtctctattcatgaaaaccaagactgtctccctgcaggagctgcagcaggactttgagaatgcgccccccaccgaccccaacaacaaccagaccccggctaacggcaccagcgtgtcctatatcaccttcagccctgacagctcctcacctgcccagagtgagccaccagcctccgctgaggcccccggcgagcccagtgacatgctggccagcgtcccacccttcgtcaccttccacaccctcatcctggacatgagtggagtcagcttcgtggacttgatgggcatcaaggccctggccaagctgagctccacctatgggaagatcggcgtgaaggtcttcttggtgaacatccatgcccaggtgtacaatgacattagccatggaggcgtctttgaggatgggagtctagaatgcaagcacgtctttcccagcatacatgacgcagtcctctttgcccaggcaaatgctagagacgtgaccccaggacacaacttccaaggggctccaggggatgctgagctctccttgtacgactcagaggaggacattcgcagctactgggacttagagcaggagatgttcgggagcatgtttcacgcagagaccctgaccgccctagagagcctctcagcagcaggggggtgctacccttacaggagtgagagtctggtgagcccactcttcacccgtcaggccctggccgcaatggacaagcctcctgctcactccaccccacccacctctgccctgtccttggcagctgaaggacaccttgacttccagcttttacgagtgagccaaaaacagaaggacaagtacaactgtgctggcctgctgtacaagcttcaaaaagtgtcccagagcccacacggctcggtgtcagatggtgtcaggctgtcacggacatagggataaacttggttaggactctggcttgccttccccagctgcctcaactctgtctctggcagctctgcacccagggaccatgtgctctccacacccaggagtctaggccttggtaactatgcgccccccctccatcatccccaaggctgcccaaaccaccactgctgtcagcaagcacatcagactctagcctggacagtggccaggaccgtcgagaccaccagagctacctccccggggacagcccactaaggttctgcctcagcctcctgaaacatcactgccctcagaggctgctcccttcccctggaggctggctagaaaccccaaagagggggatgggtagctggcagaatcatctggcatcctagtaatagataccagttattctgcacaaaacttttgggaattcctctttgcacccagagactcagaggggaagagggtgctagtaccaacacagggaaaacggatgggacctgggcccagacagtcccccttgaccccagggcccatcagggaaatgcctccctttggtaaatctgccttatccttctttacctggcaaagagccaatcatgttaactcttccttatcagcctgtggcccagagacacaatggggtccttctgtaggcaaaggtggaagtcctccagggatccgctacatcccctaactgcatgcagatgtggaaaggggctgatccagattgggtcttcctgcacaggaagactctttaacacccttaggacctcaggccatcttctcctatgaagatgaaaataggggttaagttttccatatgtacaaggaggtattgagaggaaccctactgttgacttgaaaataaataggttccatgtgtaagtgttttgtaaaatttcagtggaaatgcacagaaaatcttctggcctctcatcactgcttttctcaagcttcttcagcttaacaaccccttccctaacaggttgggctggcccagcctaggaaaacatccccatttctaacttcagccagacctgcgttgtgtgtctgtgtgttgagtgagctggtcagctaacaagtcttcttagagttaaaggagggggtgctggccaagagccaacacattcttggcccaggagcattgcttttctgtgaattcattatgccatctggctgccaatggaactcaaaacttggaaggcgaaggacaatgttatctgggattcaccgtgcccagcacccgaagtgccaaattccaggaggacaagagccttagccaatgacaactcactctcccctactccacctccttccaagtccagctcaggcccaggaggtgggagaaggtcacagagcctcaggaatttccaagtcagagtcccctttgaaccaagtatctagatcccctgaggacttgatgaagtgatccttaacccccaagtaatcattaacccccagaccagcctcagaactgaaggagattgttgacccagtgacctggagttgaggctcagggagagatctgccacatgtctgagggttgcagagcccgctgtggaggtaagattggaaacacatgaggcagagggaagacattgaagaaaacatctctgctggaatatttggaaaagaacactcttctggacctggttgaagcaggaaagatggaggcaaagtagtgaaataatccagaatttcaatgcttttgaatgttcttagtgatactgacctgtgataatataattcccagggaggactgggaaccttatctcttgagatatttgcataatttatttaatttaagcctcattctccttttgttcattttggtaataaactggatttgaattgtg

SEQ ID NO: 183629 - DNA, 4799 bp, Homo sapiens
  Payload ID: 16176
  Gene Symbol: SLC26A9
  Gene Name: solute carrier family 26 (anion exchanger), member 9
  Uniprot ID: Q7LBE3
  ENST ID: ENST00000367135
  CDS Start-End: 115-2490
gagcagagccctttcacacacctcaggaacacctttcggctgcccgctccccagacacacctgcagccctgcccagccggctttgctcacccactgcttgtaaatgccccagatatgagccagcccaggccccgctacgtggtagacagagccgcatactcccttaccctcttcgacgatgagtttgagaagaaggaccggacatacccagtgggagagaaacttcgcaatgccttcagatgttcctcagccaagatcaaagctgtggtgtttgggctgctgcctgtgctctcctggctccccaagtacaagattaaagactacatcattcctgacctgctcggtggactcagcgggggatccatccaggtcccacaaggcatggcatttgctctgctggccaaccttcctgcagtcaatggcctctactcctccttcttccccctcctgacctacttcttcctggggggtgttcaccagatggtgccaggtacctttgccgttatcagcatcctggtgggtaacatctgtctgcagctggccccagagtcgaaattccaggtcttcaacaatgccaccaatgagagctatgtggacacagcagccatggaggctgagaggctgcacgtgtcagctacgctagcctgcctcaccgccatcatccagatgggtctgggcttcatgcagtttggctttgtggccatctacctctccgagtccttcatccggggcttcatgacggccgccggcctgcagatcctgatttcggtgctcaagtacatcttcggactgaccatcccctcctacacaggcccagggtccatcgtctttaccttcattgacatttgcaaaaacctcccccacaccaacatcgcctcgctcatcttcgctctcatcagcggtgccttcctggtgctggtgaaggagctcaatgctcgctacatgcacaagattcgcttccccatccctacagagatgattgtggtggtggtggcaacagctatctccgggggctgtaagatgcccaaaaagtatcacatgcagatcgtgggagaaatccaacgcgggttccccaccccggtgtcgcctgtggtctcacagtggaaggacatgataggcacagccttctccctagccatcgtgagctacgtcatcaacctggctatgggccggaccctggccaacaagcacggctacgacgtggattcgaaccaggagatgatcgctctcggctgcagcaacttctttggctccttctttaaaattcatgtcatttgctgtgcgctttctgtcactctggctgtggatggagctggaggaaaatcccaggtggccagcctgtgtgtgtctctggtggtgatgatcaccatgctggtcctggggatctatctgtatcctctccctaagtctgtgctaggagccctgatcgctgtcaatctcaagaactccctcaagcaactcaccgacccctactacctgtggaggaagagcaagctggactgttgcatctgggtagtgagcttcctctcctccttcttcctcagcctgccctatggtgtggcagtgggtgtcgccttctccgtcctggtcgtggtcttccagactcagtttcgaaatggctatgcactggcccaggtcatggacactgacatttatgtgaatcccaagacctataatagggcccaggatatccaggggattaaaatcatcacgtactgctcccctctctactttgccaactcagagatcttcaggcaaaaggtcatcgccaagacaggcatggacccccagaaagtattactagccaagcaaaaatacctcaagaagcaggagaagcggagaatgaggcccacacaacagaggaggtctctattcatgaaaaccaagactgtctccctgcaggagctgcagcaggactttgagaatgcgccccccaccgaccccaacaacaaccagaccccggctaacggcaccagcgtgtcctatatcaccttcagccctgacagctcctcacctgcccagagtgagccaccagcctccgctgaggcccccggcgagcccagtgacatgctggccagcgtcccacccttcgtcaccttccacaccctcatcctggacatgagtggagtcagcttcgtggacttgatgggcatcaaggccctggccaagctgagctccacctatgggaagatcggcgtgaaggtcttcttggtgaacatccatgcccaggtgtacaatgacattagccatggaggcgtctttgaggatgggagtctagaatgcaagcacgtctttcccagcatacatgacgcagtcctctttgcccaggcaaatgctagagacgtgaccccaggacacaacttccaaggggctccaggggatgctgagctctccttgtacgactcagaggaggacattcgcagctactgggacttagagcaggagatgttcgggagcatgtttcacgcagagaccctgaccgccctgtgagggctcagccagtcctcatgctgcctacagagtgcctggcacttgggacttccataaaggatgagcctggggtcacagggggtgtcgggcggaggaaagtgcatcccccagagcttgggttcctctctcctctccccctctctcctcccttccttccctccccgcatctccagagagagcctctcagcagcaggggggtgctacccttacaggagtgagagtctggtgagcccactcttcacccgtcaggccctggccgcaatggacaagcctcctgctcactccaccccacccacctctgccctgtccttggcagctgaaggacaccttgacttccagcttttacgagtgagccaaaaacagaaggacaagtacaactgtgctggcctgctgtacaagcttcaaaaagtgtcccagagcccacacggctcggtgtcagatggtgtcaggctgtcacggacatagggataaacttggttaggactctggcttgccttccccagctgcctcaactctgtctctggcagctctgcacccagggaccatgtgctctccacacccaggagtctaggccttggtaactatgcgccccccctccatcatccccaaggctgcccaaaccaccactgctgtcagcaagcacatcagactctagcctggacagtggccaggaccgtcgagaccaccagagctacctccccggggacagcccactaaggttctgcctcagcctcctgaaacatcactgccctcagaggctgctcccttcccctggaggctggctagaaaccccaaagagggggatgggtagctggcagaatcatctggcatcctagtaatagataccagttattctgcacaaaacttttgggaattcctctttgcacccagagactcagaggggaagagggtgctagtaccaacacagggaaaacggatgggacctgggcccagacagtcccccttgaccccagggcccatcagggaaatgcctccctttggtaaatctgccttatccttctttacctggcaaagagccaatcatgttaactcttccttatcagcctgtggcccagagacacaatggggtccttctgtaggcaaaggtggaagtcctccagggatccgctacatcccctaactgcatgcagatgtggaaaggggctgatccagattgggtcttcctgcacaggaagactctttaacacccttaggacctcaggccatcttctcctatgaagatgaaaataggggttaagttttccatatgtacaaggaggtattgagaggaaccctactgttgacttgaaaataaataggttccatgtgtaagtgttttgtaaaatttcagtggaaatgcacagaaaatcttctggcctctcatcactgcttttctcaagcttcttcagcttaacaaccccttccctaacaggttgggctggcccagcctaggaaaacatccccatttctaacttcagccagacctgcgttgtgtgtctgtgtgttgagtgagctggtcagctaacaagtcttcttagagttaaaggagggggtgctggccaagagccaacacattcttggcccaggagcattgcttttctgtgaattcattatgccatctggctgccaatggaactcaaaacttggaaggcgaaggacaatgttatctgggattcaccgtgcccagcacccgaagtgccaaattccaggaggacaagagccttagccaatgacaactcactctcccctactccacctccttccaagtccagctcaggcccaggaggtgggagaaggtcacagagcctcaggaatttccaagtcagagtcccctttgaaccaagtatctagatcccctgaggacttgatgaagtgatccttaacccccaagtaatcattaacccccagaccagcctcagaactgaaggagattgttgacccagtgacctggagttgaggctcagggagagatctgccacatgtctgagggttgcagagcccgctgtggaggtaagattggaaacacatgaggcagagggaagacattgaagaaaacatctctgctggaatatttggaaaagaacactcttctggacctggttgaagcaggaaagatggaggcaaagtagtgaaataatccagaatttcaatgcttttgaatgttcttagtgatactgacctgtgataatataattcccagggaggactgggaaccttatctcttgagatatttgcataatttatttaatttaagcctcattctccttttgttcattttggtaataaactggatttgaattgtgaacaaa

SEQ ID NO: 183630 - DNA, 2389 bp, Homo sapiens
  Payload ID: 16177
  Gene Symbol: SLC26A10
  Gene Name: solute carrier family 26, member 10
  Uniprot ID: Q8NG04
  ENST ID: ENST00000320442
  CDS Start-End: 312-2003
cacaagctctagagggcttccgggaggaggcttagggagctgggaatccgggagcagatggtgggttcctaccgtcgagggtgggagagagggatctgaggccaagtttgaggtaaggactgtggagctccatcagatccccatccccacctcccctcatctgcgcaatcctgcgagaagccttagacaggttctggctcagagaaccggagagaggcacaacgcctggcccccaggacttggccacagcgtccctgaccttgtctgctccatgacctctcactgaggcccattaacccctcagttccctgatgaggcttgatttagcatccttgatgtcagctcctaagagtctgggaagtgcatttaagtcctggaggttggacaaggccccctccccacagcacacctttccatccacttctatcccaggcatggcttttgctctcctggcctccgtgcccccggtgtttggactctacacttctttcttccccgtcctcatctacagcttgctaggtactgggagacacctgtccacaggaactttcgccatactcagcctcatgacaggctcggccgtcgagcggctggtgccggaacccctcgtggggaatctgagcggaatcgagaaggagcagctggacgctcaacgggttggggtagccgcggccgtggccttcgggagcggggcgttgatgctggggatgttcgtgctgcagctcggcgtcttgtccacctttttgtccgagcctgtggtcaaggcgctgaccagcggggccgcgctgcacgtgctcttgtcccagctgccgagcctcttggggttgtccctcccgcgccagatcggctgcttctctctcttcaagacgctggcctccttgctgactgcgctgcctcggagcagtccggccgaactgaccatctccgcgctcagcctggcgctgctcgtgccggtcaaggaattgaacgtgagattccgagaccggctacccacgccgatcccgggggaagtcgtcttggtgcttctggcctccgtgctctgcttcacctcttctgtggacacaagataccaagtccagatagtggggctgttgcctggaggatttccccaacccctcctccccaacctggctgagctgcccaggattctggctgactcgctgcccattgcactggttagttttgcggtgtctgcctccctggcctccatccatgcagacaagtatagctacactattgactccaaccaggagttcctggcacatggtgcctccaacctcatctcctccctcttctcttgctttcccaactcggctacgctggccaccaccaatctactggtggatgctggtgggaaaacacagctggcaggcctcttctcctgcacagtggtcctgtcggtgctgctgtggctggggcccttcttttactatctgcccaaggctgtcctggcttgcatcaacatctccagcatgcgccaggtgttctgccagatgcaggaacttccacaactatggcacatcagccgagtggactttctcctccaggtcccggggctctgcatcctgagctatccaacaccactgtactttgggacccgtgggcagtttcgctgcaacctggagtggcacctggggctcggagaaggagaaaaggagacttcaaagccagatggcccaatggttgcagttgctgagcctgtcagggtggtggtcctagacttcagtggtgtcacctttgcagatgctgctggggccagagaagtggtgcaggtgagggagaggctggccagccgatgtcgagatgctaggatccgcctcctcctggctcagtgtaatgccttggtgcaggggacactgacccgggtaggactcctggacagggtgactccagatcagctgtttgtgagtgtgcaggatgcagctgcttatgccctggggagcctgttaaggggcagtagcaccaggagcgggagccaggaggcactgggctgcggcaagtgaggcaggggtaagtggctggagacccagggagaggggtttgggaaagggtctgaggaagatcaagaagaaaagggtggggacggaatgaatagtagattgaagaccaaatcagggagcccgggctgagctatgggtgaggaactgaagaactcagatccctaagtaggtggggtacccctgagaggactgccacatttcattaaggaagaggggtgcctaatctattcctgacatgtctcctctcttctccaggagctcactgacccaaagatttgcaccgtgtgggtctgacctcatcatgtggagtgcagagggccctgatgacatgtgtgtgatgaggaccatgacccttgaacccccttacctaacgtaactaataaaatgaa

SEQ ID NO: 183631 - DNA, 1819 bp, Homo sapiens
  Payload ID: 16177
  Gene Symbol: SLC26A10
  Gene Name: solute carrier family 26, member 10
  ENST ID: ENST00000440686
  CDS Start-End: 1-1237
ttttgctctcctggcctccgtgcccccggtgtttggactctacacttctttcttccccgtcctcatctacagcttgctaggtactgggagacacctgtccacaggaactttcgccatactcagcctcatgacaggctcggccgtcgagcggctggtgccggaacccctcgtggggaatctgagcggaatcgagaaggagcagctggacgctcaacgggttggggtagccgcggccgtggccttcgggagcggggcgttgatgctggggatgttcgtgctgcagctcggcgtcttgtccacctttttgtccgagcctgtggtcaaggcgctgaccagcggggccgcgctgcacgtgctcttgtcccagctgccgagcctcttggggttgtccctcccgcgccagatcggctgcttctctctcttcaagacgctggcctccttgctgactgcgctgcctcggagcagtccggccgaactgaccatctccgcgctcagcctggcgctgctcgtgccggtcaaggaattgaacgtgagattccgagaccggctacccacgccgatcccgggggaagtcgtcttggtgcttctggcctccgtgctctgcttcacctcttctgtggacacaagataccaagtccagatagtggggctgttgcctggaggatttccccaacccctcctccccaacctggctgagctgcccaggattctggctgactcgctgcccattgcactggttagttttgcggtgtctgcctccctggcctccatccatgcagacaagtatagctacactattgactccaaccaggagttcctggcacatggtgcctccaacctcatctcctccctcttctcttgctttcccaactcggctacgctggccaccaccaatctactggtggatgctggtgggaaaacacagctggcaggcctcttctcctgcacagtggtcctgtcggtgctgctgtggctggggcccttcttttactatctgcccaaggctgtcctggcttgcatcaacatctccagcatgcgccaggtgttctgccagatgcaggaacttccacaactatggcacatcagccgagtggactttgctgtgtggatggtcacctgggtggcagtagtgaccctgagtgtggatttgggcctggctgtgggtgtggtcttctccatgatgactgtggtctgccgcacccggagctcctccaggtcccggggctctgcatcctgagctatccaacaccactgtactttgggacccgtgggcagtttcgctgcaacctggagtggcacctggggctcggagaaggagaaaaggagacttcaaagccagatggcccaatggttgcagttgctgagcctgtcagggtggtggtcctagacttcagtggtgtcacctttgcagatgctgctggggccagagaagtggtgcagctggccagccgatgtcgagatgctaggatccgcctcctcctggctcagtgtaatgccttggtgcaggggacactgacccgggtaggactcctggacagggtgactccagatcagctgtttgtgagtgtgcaggatgcagctgcttatgccctggggagcctgttaaggggcagtagcaccaggagcgggagccaggaggcactgggctgcggcaagtgaggcaggggagctcactgacccaaagatttgcaccgtgtgggtctgacctcatcatgtggagtgcagagggccctgatgacatgtgtgtgatgaggaccatgacccttgaacccccttacctaacgtaactaataaaatgaagctgagagctttggaatcc

SEQ ID NO: 183632 - DNA, 2173 bp, Homo sapiens
  Payload ID: 16177
  Gene Symbol: SLC26A10
  Gene Name: solute carrier family 26, member 10
  ENST ID: ENST00000474359
  CDS Start-End: 10-1572
aagggcagaatgagcgggattcagggcaccaggacctacccaggcgcgggggacacctctgaccttaagtaccccttggcgaccaggctcagggaagctctcaccgaggctcggttccatcagctcttcaggggcgaagagcaggaaccggagctacctgaagagcgcggctttccccggctcttcgggctgtggaggctgcgggctcgcgcttgttccgggacaggggcgtggcgcctgctgctggctcggctgcccgcgctgcactggctgccccattaccgctggcgggcctggctgctcggagatgcggtggccggagtgaccgtgggcatcgtgcacgtgccccagggcatggcttttgctctcctggcctccgtgcccccggtgtttggactctacacttctttcttccccgtcctcatctacagcttgctaggtactgggagacacctgtccacaggaactttcgccatactcagcctcatgacaggctcggccgtcgagcggctggtgccggaacccctcgtggggaatctgagcggaatcgagaaggagcagctggacgctcaacgggttggggtagccgcggccgtggccttcgggagcggggcgttgatgctggggatgttcgtgctgcagctcggcgtcttgtccacctttttgtccgagcctgtggtcaaggcgctgaccagcggggccgcgctgcacgtgctcttgtcccagctgccgagcctcttggggttgtccctcccgcgccagatcggctgcttctctctcttcaagacgctggcctccttgctgactgcgctgcctcggagcagtccggccgaactgaccatctccgcgctcagcctggcgctgctcgtgccggtcaaggaattgaacgtgagattccgagaccggctacccacgccgatcccgggggaagtcgtcttggtgcttctggcctccgtgctctgcttcacctcttctgtggacacaagataccaagtccagatagtggggctgttgcctggaggatttccccaacccctcctccccaacctggctgagctgcccaggattctggctgactcgctgcccattgcactggttagttttgcggtgtctgcctccctggcctccatccatgcagacaagtatagctacactattgactccaaccaggagttcctggcacatggtgcctccaacctcatctcctccctcttctcttgctttcccaactcggctacgctggccaccaccaatctactggtggatgctggtgggaaaacacagctggcaggcctcttctcctgcacagtggtcctgtcggtgctgctgtggctggggcccttcttttactatctgcccaaggctgtcctggcttgcatcaacatctccagcatgcgccaggtgttctgccagatgcaggaacttccacaactatggcacatcagccgagtggactttgctgtgtggatggtcacctgggtggcagtagtgaccctgagtgtggatttgggcctggctgtgggtgtggtcttctccatgatgactgtggtctgccgcacccggagggtgtagtgcctggcacttggacaggctgaggggacagagctctacagaccactcagaggaagccccaggctcctccaggtcccggggctctgcatcctgagctatccaacaccactgtactttgggacccgtgggcagtttcgctgcaacctggagtggcacctggggctcggagaaggagaaaaggagacttcaaagccagatggcccaatggttgcagttgctgagcctgtcagggtggtggtcctagacttcagtggtgtcacctttgcagatgctgctggggccagagaagtggtgcagctggccagccgatgtcgagatgctaggatccgcctcctcctggctcagtgtaatgccttggtgcaggggacactgacccgggtaggactcctggacagggtgactccagatcagctgtttgtgagtgtgcaggatgcagctgcttatgccctggggagcctgagctcactgacccaaagatttgcaccgtgtgggtctgacctcatcatgtggagtgcagagggccctgatgacatgtgtgtgatgaggaccatgacccttgaacccccttacctaacgtaactaataaaatgaagctgagagc

SEQ ID NO: 183633 - DNA, 3594 bp, Homo sapiens
  Payload ID: 16178
  Gene Symbol: SLC27A1
  Gene Name: solute carrier family 27 (fatty acid transporter), member 1
  Uniprot ID: Q6PCB7
  ENST ID: ENST00000252595
  CDS Start-End: 98-2038
gcggctcgctgtagaggcgggggcggtcgtggggcggagcgggtcgtggggcggggctggagcggcccgcggcctcagctctctctgcttccccaggatgcgggctccgggtgcgggcgcggcctcggtggtctcgctggcgctgttgtggctgctggggctgccgtggacctggagcgcggcagcggcgctcggcgtgtacgtgggcagcggcggctggcgcttcctgcgcatcgtctgcaagaccgcgaggcgagacctcttcggtctctctgtgctgatccgcgtgcgcctggagctgcggcggcaccagcgtgccggccacaccatcccgcgcatctttcaggcggtagtgcagcgacagcccgagcgcctggcgctggtggatgccgggaccggcgagtgctggacctttgcgcagctggacgcctactccaatgcggtagccaacctcttccgccagctgggcttcgcgccgggcgacgtggtggccatcttcctggagggccggccggagttcgtggggctgtggctgggcctggccaaggcgggcatggaggccgcgctgctcaacgtgaacctgcggcgcgagcccctggccttctgcctgggcacctcgggcgctaaggccctgatctttggaggagaaatggtggcggcggtggccgaagtgagcgggcatctggggaaaagtttgatcaagttctgctctggagacttggggcccgagggcatcttgccggacacccacctcctggacccgctgctgaaggaggcctctactgcccccttggcacagatccccagcaagggcatggacgatcgtcttttctacatctacacgtcggggaccaccgggctgcccaaggctgccattgtcgtgcacagcaggtactaccgcatggcagccttcggccaccacgcctaccgcatgcaggcggctgacgtgctctatgactgcctgcccctgtaccactcggcaggaaacatcatcggcgtggggcagtgtctcatctatgggctgacagtcgtcctccgcaagaaattctcggccagccgcttctgggacgactgcatcaagtacaactgcacggtggttcagtacatcggggagatctgccgctacctgctgaagcagccggtgcgcgaggcggagaggcgacaccgcgtgcgcctggcggtggggaacgggctgcgtcctgccatctgggaggagttcacggagcgcttcggcgtacgccaaatcggggagttctacggcgccaccgagtgcaactgcagcattgccaacatggacggcaaggtcggctcctgtggtttcaacagccgcatcctgccccacgtgtaccccatccggctggtgaaggtcaatgaggacacaatggagctgctgcgggatgcccagggcctctgcatcccctgccaggccggggagcctggcctccttgtgggtcagatcaaccaacaggacccgctgcgccgcttcgatggctatgtcagcgagagcgccaccagcaagaagatcgcccacagcgtcttcagcaagggcgacagcgcctacctctcaggtgacgtgctagtgatggatgagctgggctacatgtacttccgggaccgtagcggggacaccttccgctggcgaggggagaacgtctccaccaccgaggtggagggcgtgctgagccgcctgctgggccagacagacgtggccgtctatggggtggctgttccaggagtggagggtaaggcagggatggcggccgtcgcagacccccacagcctgctggaccccaacgcgatataccaggagctgcagaaggtgctggcaccctatgcccggcccatcttcctgcgcctcctgccccaggtggacaccacaggcaccttcaagatccagaagacgaggctgcagcgagagggctttgacccacgccagacctcagaccggctcttcttcctggacctgaagcagggccactacctgcccttaaatgaggcagtctacactcgcatctgctcgggcgccttcgccctctgaagctgttcctctactggccacaaactctgggcctggtgggagaggccagcttgagccagacagcgctgcccaggggtggccgcctagtacacacccacctggccgagctgtacctggcacggcccatcctggactgagaaactggaacctcagaggaacccgtgcctctctgctgccttggtgcccctgtgtctgcctcctctccctgcttttcagcctctgtctccttccatccctgtccctgtctggccttaactcttccctctttttcttttctttctttctttcttttttttttaagatagagtctcactctgctgcccgggctagagtgcagtggtgggatctcggctcactgcaacctctgcctcctggggttcaagtgatcctcccacctcagcctcctgagtagctgggattacaggcacccgccaccacgtccagctaatttttatatttttagtagagacggggtttcaccatgttggtcaggttggtcttgaactcctgacctcaggtgatccgctggcctcggcctcccagagtgctgggattataggcgtgagcctctggcccggcctttcctttttcctctcctctcctgccgagagtggaacacgcgtgtcctgggagctgcatcttgtgtagggtccagctgcttttggggactgcaggaatcatctcccctgggccctggactcggactggggcctccccacctccctctcggctgtgccttacggagccccgatccaggcctcctgtggctgttgggttccagatgctgcagctccatgtgacttccaagcaggccctccgccctccctgctgaatggaggagccgggggtcccccaggccaactggaaaatctcccaggctaggccaattgccttttgcacttccccgttcctgtcacatttccccagccccaccttcccctcctgatgccctgaaagcttccggaattgactgtgaccacttggatgtcaccactgtcagcccctgccttgatgtccccatttagccatctccatggagctcctgctggagggccctgaaccctgcactgcgtggctgcccagccagctgcctcctgtcctgggaggaggcctcctgggtgtcctcatctggtgtgtctactggagggtcccacaggagaggcagcagaggggtcaggggaggtctcctgccgggggttggcctctcaagcctcaggggttctagcctgttgaatataccccacctggtggtggcccctccgatgtccccactgatggctctgacaccgtgttggtggcgatgtcccagacaatcccaccaggacggcccagacatccctactggcttcgctggtggctcatctcgaacatccacgccagcctttctggggccggccacccaggccgcctgtccgtctgtcctccctccagcagcaccccctggcccctggagtggtggggccatggcaagagacaccgtggcgtctcatgtgaactttcctgggcactgtggttttatttcctaattgatttaagaaataaacctgaagaccgtc

SEQ ID NO: 183634 - DNA, 2596 bp, Homo sapiens
  Payload ID: 16178
  Gene Symbol: SLC27A1
  Gene Name: solute carrier family 27 (fatty acid transporter), member 1
  ENST ID: ENST00000599380
  CDS Start-End: 14-304
ctgcttccccaggatgcgggctccgggtgcgggcgcggcctcggtggtctcgctggcgctgttgtggctgctggggctgccgtggacctggagcgcggcagcggcgctcggcgtgtacgtgggcagcggcggctggcgcttcctgcgcatcgtctgcaagaccgcgaggcgagacctcttatcgtcttttctacatctacacgtcggggaccaccgggctgcccaaggctgccattgtcgtgcacagcaggtactaccgcatggcagccttcggccaccacgcctaccgcatgcaggcggctgacgtgctctatgactgcctgcccctgtaccactcggcaggaaacatcatcggcgtggggcagtgtctcatctatgggctgacagtcgtcctccgcaagaaattctcggccagccgcttctgggacgactgcatcaagtacaactgcacggtggttcagtacatcggggagatctgccgctacctgctgaagcagccggtgcgcgaggcggagaggcgacaccgcgtgcgcctggcggtggggaacgggctgcgtcctgccatctgggaggagttcacggagcgcttcggcgtacgccaaatcggggagttctacggcgccaccgagtgcaactgcagcattgccaacatggacggcaaggtgcacaccggcagggccccggggcaggtctcggagttcagggaagaccactgtctcctcttcctggggcccctgggatacataaaacagcctggactggcgcggaaggctccgccaaggcgcacgcagggcggggtgtaaggggagttcctgggactcccggtgcaccaccagagggacaatcctgcagcctgcacagatagtcatgtgactgtggtccttgggtcaggagagttggaggataggtatggctgtgcgccctggcaagtgcctcagcctttctgagcctcagtttctgcgtgtggagattagcaaggagaatagggctctgtgtaccgtgctgttattttgttgttgttgtttgagacagagtctcgctctgtcgcccaggctggagtgcagccacgtgatcatagctcactgtagctttcagttcctgagctcaagcaatcctcctgcctcagcctcccaagtagcagcaaacagataccttcataattagcaactacttactctcttaatcatctccattctccgcttgcatgaatctccctctcctttcccaagcccctcccatccaaggccaagaacagaccgtaataatgatcataaagcaaatgtcggctgggcacagtggctcacacctgtaatcctaacactttgggaggctgaggcaggaggatcacttgagcccaggagtttgagaccagcatagccaatgtagtgagacccccttttctacagaaaataaaaaattagccaggcatggtggcaggtgcctgtagtcaatgctactaaggaggctgaggcgggaggatcacgtgagctcacgagatcgaggctgcagtgagctatgattacaccactggactccagcctgggcaacagagtgagactctgtgtctctaaaaaggaaaaaaaaaaacagcaagtgccatgggggctgggtccttaatgccaagaacaatgctccttcctcagtgtgcttggtgttggatggccagcccccagggcacttttgctcactgtagctcagattcttgcataggaaacacaccaggccaggcacggtggctcacgcctgtagggtccagccccacagggtcggtgggtttttctccctgtgtgcggagacgagagattgtagaaataaagacacaagacaaagagatgaaagaaaagacagctgggcccgggggaccactaccaccaagaggcggagaccggtagaggccccgaatgtctggctgcactgttatttactggatacaaagcaaaaggggcagggtaaagagtgtgagtcatctccaatgataggtaaggtcacgtgggtcatgcgtccactggacagggggcccttccctgcctggcagccgaggcagaggcagagagagggagagagagagaaagacagcttatgccattatttctgcatatcagagacttttagtactttcactaattttgctactgttatctagaaggcagagccaggtgtacaggatggaacatgaaggcggactaggagcatgaccactgaagcacagcatcacagggagacggttaggcctccggataactgtgggcaagcctgactgatgtcaggccctccacaagaggtggaggagtagagtcttctctaaactccccgggggaaagggagactccctttcccggtccactaagtagcaggtgtttttccttgacactaaggctaccgctagactagacttcccagacgctggcgtcaccgctagaccaaggaaccctctggtggccctgtccgggcataacagaaggctcgcactcttgtcttctggtcactactcactgtgtcccctcagctcctatctctctatggcccggttttttctaggttatgattacagagcgaggattattataatactggaataaagagtaattgctacaaa

SEQ ID NO: 183635 - DNA, 1163 bp, Homo sapiens
  Payload ID: 16178
  Gene Symbol: SLC27A1
  Gene Name: solute carrier family 27 (fatty acid transporter), member 1
  ENST ID: ENST00000600297
  CDS Start-End: 4-678
aggatgcgggctccgggtgcgggcgcggcctcggtggtctcgctggcgctgttgtggctgctggggctgccgtggacctggagcgcggcagcggcgctcggcgtgtacgtgggcagcggcggctggcgcttcctgcgcatcgtctgcaagaccgcgaggcgagacctcttcggtctctctgtgctgatccgcgtgcgcctggagctgcggcggcaccagcgtgccggccacaccatcccgcgcatctttcaggcggtagtgcagcgacagcccgagcgcctggcgctggtggatgccgggaccggcgagtgctggacctttgcgcagctggacgcctactccaatgcggtagccaacctcttccgccagctgggcttcgcgccgggcgacgtggtggccatcttcctggagggccggccggagttcgtggggctgtggctgggcctggccaaggcgggcatggaggccgcgctgctcaacgtgaacctgcggcgcgagcccctggccttctgcctgggcacctcgggcgctaaggccctgatctttggaggagaaatggtggcgggtgaggccaggcgtgggcatcaggtgggcggggacccaggactggcccctgggcgggcggggagatgctgcgccccaggcctcggaaggcggccgccctggacgtgggcatgaggtgcacggtctgggtatgccccgggcagggagttggtgcatcccaggcctcgggagggggcctgtccggcggtgaccatgacccatgtgttggggaccacagcggtggccgaagtgagcgggcatctggggaaaagtttgatcaagttctgctctggagacttggggcccgagggcatcttgccggacacccacctcctggacccgctgctgaaggaggcctctactgcccccttggcacagatccccagcaagggcatggacgatcgtcttttctacatctacacgtcggggaccaccgggctgcccaaggctgccattgtcgtgcacagcaggtactaccgcatggcagccttcggccaccacgcctaccgcatgcaggcggctgacgtgctctatgactgcctgcccctgtaccactcggcaggaaacatcatcggcgtggggcagtgtctcatctatgggctgacagtcgtcctccgcaa

SEQ ID NO: 183636 - DNA, 788 bp, Homo sapiens
  Payload ID: 16178
  Gene Symbol: SLC27A1
  Gene Name: solute carrier family 27 (fatty acid transporter), member 1
  ENST ID: ENST00000599965
  CDS Start-End: 1-500
tgcgggatgcccagggcctctgcatcccctgccaggccggggagcctggcctccttgtgggtcagatcaaccaacaggacccgctgcgccgcttcgatggctatgtcagcgagagcgccaccagcaagaagatcgcccacagcgtcttcagcaagggcgacagcgcctacctctcaggtgacgtgctagtgatggatgagctgggctacatgtacttccgggaccgtagcggggacaccttccgctggcgaggggagaacgtctccaccaccgaggtggagggcgtgctgagccgcctgctgggccagacagacgtggccgtctatggggtggctgttccaggcaccttcaagatccagaagacgaggctgcagcgagagggctttgacccacgccagacctcagaccggctcttcttcctggacctgaagcagggccactacctgcccttaaatgaggcagtctacactcgcatctgctcgggcgccttcgccctctgaagctgttcctctactggccacaaactctgggcctggtgggagaggccagcttgagccagacagcgctgcccaggggtggccgcctagtacacacccacctggccgagctgtacctggcacggcccatcctggactgagaaactggaacctcagaggaacccgtgcctctctgctgccttggtgcccctgtgtctgcctcctctccctgcttttcagcctctgtctccttccatccctgtccctgtctggccttaactcttccctctttttcttttctttctttctttc

SEQ ID NO: 183637 - DNA, 1423 bp, Homo sapiens
  Payload ID: 16178
  Gene Symbol: SLC27A1
  Gene Name: solute carrier family 27 (fatty acid transporter), member 1
  ENST ID: ENST00000600277
  CDS Start-End: 244-918
aacgctggaaaggtcggccaaggagagcagaaaacaagcagtggtggagtcggcagtggggcagaggagggggagctggaagggaaggaccccaaagcagaagcccgcacagtaggcacagcgcacccaagaagggtccaggagtctgcagaaacagaaaggtccccggcctcagcctcctagtccctgcctgcctcctgcctgagcttctgggagactgaaggcacggcttgcagcttcaggatgcgggctccgggtgcgggcgcggcctcggtggtctcgctggcgctgttgtggctgctggggctgccgtggacctggagcgcggcagcggcgctcggcgtgtacgtgggcagcggcggctggcgcttcctgcgcatcgtctgcaagaccgcgaggcgagacctcttcggtctctctgtgctgatccgcgtgcgcctggagctgcggcggcaccagcgtgccggccacaccatcccgcgcatctttcaggcggtagtgcagcgacagcccgagcgcctggcgctggtggatgccgggaccggcgagtgctggacctttgcgcagctggacgcctactccaatgcggtagccaacctcttccgccagctgggcttcgcgccgggcgacgtggtggccatcttcctggagggccggccggagttcgtggggctgtggctgggcctggccaaggcgggcatggaggccgcgctgctcaacgtgaacctgcggcgcgagcccctggccttctgcctgggcacctcgggcgctaaggccctgatctttggaggagaaatggtggcgggtgaggccaggcgtgggcatcaggtgggcggggacccaggactggcccctgggcgggcggggagatgctgcgccccaggcctcggaaggcggccgccctggacgtgggcatgaggtgcacggtctgggtatgccccgggcagggagttggtgcatcccaggcctcgggagggggcctgtccggcggtgaccatgacccatgtgttggggaccacagcggtggccgaagtgagcgggcatctggggaaaagtttgatcaagttctgctctggagacttggggcccgagggcatcttgccggacacccacctcctggacccgctgctgaaggaggcctctactgcccccttggcacagatccccagcaagggcatggacgatcgtcttttctacatctacacgtcggggaccaccgggctgcccaaggctgccattgtcgtgcacagcaggaaacatcatcggcgtggggcagtgtctcatctatgggctgacagtcgtcctccgcaagaaattctcggccagccgcttctgggacgactgcatcaagtacaactgcacggtggttcagtacatcggggagatctgccgctacctgctgaagcagccggtgcgcgaggcg

SEQ ID NO: 183638 - DNA, 2681 bp, Homo sapiens
  Payload ID: 16178
  Gene Symbol: SLC27A1
  Gene Name: solute carrier family 27 (fatty acid transporter), member 1
  Uniprot ID: Q6PCB7
  ENST ID: ENST00000598424
  CDS Start-End: 904-2307
gtggggcggggctggagcggcccgcggcctcagctctctctgcttccccaggatgcgggctccgggtgcgggcgcggcctcggtggtctcgctggcgctgttgtggctgctggggctgccgtggacctggagcgcggcagcggcgctcggcgtgtacgtgggcagcggcggctggcgcttcctgcgcatcgtctgcaagaccgcgaggcgagacctcttgtcctgctcagatgccgcctgcctctctcaagggcctcccctgcctctgcccttggtccgtgtgactgaccacatcaccccttgcagtcttgtcaccatccagcacggcctggtattcagtcatatacatggaaggggtctctcttcccagaggactgtgaaccccagagggtggggcctggtggtctggatgctctgtccccagagctgagaacagtgcctaaagcacaacagacactgcggtctctctgtgctgatccgcgtgcgcctggagctgcggcggcaccagcgtgccggccacaccatcccgcgcatctttcaggcggtagtgcagcgacagcccgagcgcctggcgctggtggatgccgggaccggcgagtgctggacctttgcgcagctggacgcctactccaatgcggtagccaacctcttccgccagctgggcttcgcgccgggcgacgtggtggccatcttcctggagggccggccggagttcgtggggctgtggctgggcctggccaaggcgggcatggaggccgcgctgctcaacgtgaacctgcggcgcgagcccctggccttctgcctgggcacctcgggcgctaaggccctgatctttggaggagaaatggtggcggggagttggtgcatcccaggcctcgggagggggcctgtccggcggtgaccatgacccatgtgttggggaccacagcggtggccgaagtgagcgggcatctggggaaaagtttgatcaagttctgctctggagacttggggcccgagggcatcttgccggacacccacctcctggacccgctgctgaaggaggcctctactgcccccttggcacagatccccagcaagggcatggacgatcgtcttttctacatctacacgtcggggaccaccgggctgcccaaggctgccattgtcgtgcacagcaggtactaccgcatggcagccttcggccaccacgcctaccgcatgcaggcggctgacgtgctctatgactgcctgcccctgtaccactcggcaggaaacatcatcggcgtggggcagtgtctcatctatgggctgacagtcgtcctccgcaagaaattctcggccagccgcttctgggacgactgcatcaagtacaactgcacggtggttcagtacatcggggagatctgccgctacctgctgaagcagccggtgcgcgaggcggagaggcgacaccgcgtgcgcctggcggtggggaacgggctgcgtcctgccatctgggaggagttcacggagcgcttcggcgtacgccaaatcggggagttctacggcgccaccgagtgcaactgcagcattgccaacatggacggcaaggtcggctcctgtggtttcaacagccgcatcctgccccacgtgtaccccatccggctggtgaaggtcaatgaggacacaatggagctgctgcgggatgcccagggcctctgcatcccctgccaggccggggagcctggcctccttgtgggtcagatcaaccaacaggacccgctgcgccgcttcgatggctatgtcagcgagagcgccaccagcaagaagatcgcccacagcgtcttcagcaagggcgacagcgcctacctctcaggtgacgtgctagtgatggatgagctgggctacatgtacttccgggaccgtagcggggacaccttccgctggcgaggggagaacgtctccaccaccgaggtggagggcgtgctgagccgcctgctgggccagacagacgtggccgtctatggggtggctgttccaggagtggagggtaaggcagggatggcggccgtcgcagacccccacagcctgctggaccccaacgcgatataccaggagctgcagaaggtgctggcaccctatgcccggcccatcttcctgcgcctcctgccccaggtggacaccacaggcaccttcaagatccagaagacgaggctgcagcgagagggctttgacccacgccagacctcagaccggctcttcttcctggacctgaagcagggccactacctgcccttaaatgaggcagtctacactcgcatctgctcgggcgccttcgccctctgaagctgttcctctactggccacaaactctgggcctggtgggagaggccagcttgagccagacagcgctgcccaggggtggccgcctagtacacacccacctggccgagctgtacctggcacggcccatcctggactgagaaactggaacctcagaggaacccgtgcctctctgctgccttggtgcccctgtgtctgcctcctctccctgcttttcagcctctgtctccttccatccctgtccctgtctggccttaactcttccctctttttcttttctttctttctttcttttttttttaagatagagtctcactctgctgcccgggctagagtgcagtggtgggatctcggctcactgcaacctctgcctcctg

SEQ ID NO: 183639 - DNA, 2394 bp, Homo sapiens
  Payload ID: 16179
  Gene Symbol: SLC27A2
  Gene Name: solute carrier family 27 (fatty acid transporter), member 2
  Uniprot ID: O14975
  ENST ID: ENST00000267842
  CDS Start-End: 233-2095
agtcctgcccggaacccccggcaacgcgcatacgactacacctgctccggagcccgcggcggtacctgcagcggaggagctctgtcttccccttcatctcacgcgagcccggcgtcccgccgcgtgcgccccggcgcagcccgccagtccgcccggagcccgcccagtcgccgcgctgcacgcccggggtgaaccctctgccctcgctgggacagagggccccgcagccgtcatgctttccgccatctacacagtcctggcgggactgctgttcctgccgctcctggtgaacctctgctgcccatacttcttccaggacataggctacttcttgaaggtggccgccgtgggccggagggtgcgcagctacgggaagcggcggccggcgcgcaccatcctgcgggcgttcctggagaaagcgcgccagacgccacacaagccttttctgctcttccgcgacgagactctcacctacgcgcaggtggaccggcgcagcaatcaagtggcccgggcgctgcacgaccacctcggcctgcgccagggagactgcgtggcgctccttatgggtaacgagccggcctacgtgtggctgtggctggggctggtgaagctgggctgtgccatggcgtgcctcaattacaacatccgcgcgaagtccctgctgcactgcttccagtgctgcggggcgaaggtgctgctggtgtcgccagaactacaagcagctgtcgaagagatactgccaagccttaaaaaagatgatgtgtccatctattatgtgagcagaacttctaacacagatgggattgactctttcctggacaaagtggatgaagtatcaactgaacctatcccagagtcatggaggtctgaagtcactttttccactcctgccttatacatttatacttctggaaccacaggtcttccaaaagcagccatgatcactcatcagcgcatatggtatggaactggcctcacttttgtaagcggattgaaggcagatgatgtcatctatatcactctgcccttttaccacagtgctgcactactgattggcattcacggatgtattgtggctggtgctactcttgccttgcggactaaattttcagccagccagttttgggatgactgcagaaaatacaacgtcactgtcattcagtatatcggtgaactgcttcggtatttatgcaactcaccacagaaaccaaatgaccgtgatcataaagtgagactggcactgggaaatggcttacgaggagatgtgtggagacaatttgtcaagagatttggggacatatgcatctatgagttctatgctgccactgaaggcaatattggatttatgaattatgcgagaaaagttggtgctgttggaagagtaaactacctacagaaaaaaatcataacttatgacctgattaaatatgatgtggagaaagatgaacctgtccgtgatgaaaatggatattgcgtcagagttcccaaaggtgaagttggacttctggtttgcaaaatcacacaacttacaccatttaatggctatgctggagcaaaggctcagacagagaagaaaaaactgagagatgtctttaagaaaggagacctctatttcaacagtggagatctcttaatggttgaccatgaaaatttcatctatttccacgacagagttggagatacattccggtggaaaggggaaaatgtggccaccactgaagttgctgatacagttggactggttgattttgtccaagaagtaaatgtttatggagtgcatgtgccagatcatgagggtcgcattggcatggcctccatcaaaatgaaagaaaaccatgaatttgatggaaagaaactctttcagcacattgctgattacctacctagttatgcaaggccccggtttctaagaatacaggacaccattgagatcactggaacttttaaacaccgcaaaatgaccctggtggaggagggctttaaccctgctgtcatcaaagatgccttgtatttcttggatgacacagcaaaaatgtatgtgcctatgactgaggacatctataatgccataagtgctaaaaccctgaaactctgaatattcccaggaggataactcaacatttccagaaagaaactgaatggacagccacttgatataatccaactttaatttgattgaagattgtgaggaaattttgtaggaaatttgcatacccgtaaagggagacttttttaaataacagttgagtctttgcaagtaaaaagatttagagattattatttttcagtgtgcacctactgtttgtatttgcaaactgagcttgttggagggaaggcattattttttaaaatacttagtaaattaaatgaacaccaacatgtgagatggcactg

SEQ ID NO: 183640 - DNA, 2181 bp, Homo sapiens
  Payload ID: 16179
  Gene Symbol: SLC27A2
  Gene Name: solute carrier family 27 (fatty acid transporter), member 2
  Uniprot ID: O14975
  ENST ID: ENST00000380902
  CDS Start-End: 196-1899
acacctgctccggagcccgcggcggtacctgcagcggaggagctctgtcttccccttcatctcacgcgagcccggcgtcccgccgcgtgcgccccggcgcagcccgccagtccgcccggagcccgcccagtcgccgcgctgcacgcccggggtgaaccctctgccctcgctgggacagagggccccgcagccgtcatgctttccgccatctacacagtcctggcgggactgctgttcctgccgctcctggtgaacctctgctgcccatacttcttccaggacataggctacttcttgaaggtggccgccgtgggccggagggtgcgcagctacgggaagcggcggccggcgcgcaccatcctgcgggcgttcctggagaaagcgcgccagacgccacacaagccttttctgctcttccgcgacgagactctcacctacgcgcaggtggaccggcgcagcaatcaagtggcccgggcgctgcacgaccacctcggcctgcgccagggagactgcgtggcgctccttatgggtaacgagccggcctacgtgtggctgtggctggggctggtgaagctgggctgtgccatggcgtgcctcaattacaacatccgcgcgaagtccctgctgcactgcttccagtgctgcggggcgaaggtgctgctggtgtcgccagaactacaagcagctgtcgaagagatactgccaagccttaaaaaagatgatgtgtccatctattatgtgagcagaacttctaacacagatgggattgactctttcctggacaaagtggatgaagtatcaactgaacctatcccagagtcatggaggtctgaagtcactttttccactcctgccttatacatttatacttctggaaccacaggtgctactcttgccttgcggactaaattttcagccagccagttttgggatgactgcagaaaatacaacgtcactgtcattcagtatatcggtgaactgcttcggtatttatgcaactcaccacagaaaccaaatgaccgtgatcataaagtgagactggcactgggaaatggcttacgaggagatgtgtggagacaatttgtcaagagatttggggacatatgcatctatgagttctatgctgccactgaaggcaatattggatttatgaattatgcgagaaaagttggtgctgttggaagagtaaactacctacagaaaaaaatcataacttatgacctgattaaatatgatgtggagaaagatgaacctgtccgtgatgaaaatggatattgcgtcagagttcccaaaggtgaagttggacttctggtttgcaaaatcacacaacttacaccatttaatggctatgctggagcaaaggctcagacagagaagaaaaaactgagagatgtctttaagaaaggagacctctatttcaacagtggagatctcttaatggttgaccatgaaaatttcatctatttccacgacagagttggagatacattccggtggaaaggggaaaatgtggccaccactgaagttgctgatacagttggactggttgattttgtccaagaagtaaatgtttatggagtgcatgtgccagatcatgagggtcgcattggcatggcctccatcaaaatgaaagaaaaccatgaatttgatggaaagaaactctttcagcacattgctgattacctacctagttatgcaaggccccggtttctaagaatacaggacaccattgagatcactggaacttttaaacaccgcaaaatgaccctggtggaggagggctttaaccctgctgtcatcaaagatgccttgtatttcttggatgacacagcaaaaatgtatgtgcctatgactgaggacatctataatgccataagtgctaaaaccctgaaactctgaatattcccaggaggataactcaacatttccagaaagaaactgaatggacagccacttgatataatccaactttaatttgattgaagattgtgaggaaattttgtaggaaatttgcatacccgtaaagggagacttttttaaataacagttgagtctttgcaagtaaaaagatttagagattattatttttcagtgtgcacctactgtttgtatttgcaaactgagcttgttggagggaaggcattattttttaaaatacttagtaaattaaatgaacaccaa

SEQ ID NO: 183641 - DNA, 2025 bp, Homo sapiens
  Payload ID: 16179
  Gene Symbol: SLC27A2
  Gene Name: solute carrier family 27 (fatty acid transporter), member 2
  ENST ID: ENST00000544960
  CDS Start-End: 580-1737
ctttgctagaacttaatctgaatggctcatacaaggaggtgggaacctcagaagcccagaatgattcttttcattttgcatgtgaccctccatacactgacttgaactacaagcagctgtcgaagagatactgccaagccttaaaaaagatgatgtgtccatctattatgtgagcagaacttctaacacagatgggattgactctttcctggacaaagtggatgaagtatcaactgaacctatcccagagtcatggaggtctgaagtcactttttccactcctgccttatacatttatacttctggaaccacaggatgccttcaactgtaagctgccccattatgagccactaagaagaaacactgccaattaacaatgttatgggaacactgctgtatggaagaagcaatattaagggtagcatgtgtactaggcattcttcaaggagctttacaacatttgttgataagattctgcccccactcttgacatcggtactctttttacttccattttagagattcagaaaatgatgcttagagaggttaagaacttcccaaggtcttccaaaagcagccatgatcactcatcagcgcatatggtatggaactggcctcacttttgtaagcggattgaaggcagatgatgtcatctatatcactctgcccttttaccacagtgctgcactactgattggcattcacggatgtattgtggctggtgctactcttgccttgcggactaaattttcagccagccagttttgggatgactgcagaaaatacaacgtcactgtcattcagtatatcggtgaactgcttcggtatttatgcaactcaccacagaaaccaaatgaccgtgatcataaagtgagactggcactgggaaatggcttacgaggagatgtgtggagacaatttgtcaagagatttggggacatatgcatctatgagttctatgctgccactgaaggcaatattggatttatgaattatgcgagaaaagttggtgctgttggaagagtaaactacctacagaaaaaaatcataacttatgacctgattaaatatgatgtggagaaagatgaacctgtccgtgatgaaaatggatattgcgtcagagttcccaaaggtgaagttggacttctggtttgcaaaatcacacaacttacaccatttaatggctatgctggagcaaaggctcagacagagaagaaaaaactgagagatgtctttaagaaaggagacctctatttcaacagtggagatctcttaatggttgaccatgaaaatttcatctatttccacgacagagttggagatacattccggtggaaaggggaaaatgtggccaccactgaagttgctgatacagttggactggttgattttgtccaagaagtaaatgtttatggagtgcatgtgccagatcatgagggtcgcattggcatggcctccatcaaaatgaaagaaaaccatgaatttgatggaaagaaactctttcagcacattgctgattacctacctagttatgcaaggccccggtttctaagaatacaggacaccattgagatcactggaacttttaaacaccgcaaaatgaccctggtggaggagggctttaaccctgctgtcatcaaagatgccttgtatttcttggatgacacagcaaaaatgtatgtgcctatgactgaggacatctataatgccataagtgctaaaaccctgaaactctgaatattcccaggaggataactcaacatttccagaaagaaactgaatggacagccacttgatataatccaactttaatttgattgaagattgtgaggaaattttgtaggaaatttgcatacccgtaaagggagacttttttaaataacagttgagtctttgcaagtaaaaagatttagagattattatttttcagtgtgcacctactgtttgtatttgcaaactgagcttgttggagggaaggcattattttttaaaatacttagtaaattaaatgaacaccaacatgtg

SEQ ID NO: 183642 - DNA, 3351 bp, Homo sapiens
  Payload ID: 16180
  Gene Symbol: SLC27A3
  Gene Name: solute carrier family 27 (fatty acid transporter), member 3
  ENST ID: ENST00000271857
  CDS Start-End: 761-3196
aaaaggtctgtcatcctccagttgaagtctgtgtgcctaccaagaatggccggaggactcgctgcttgacgggagggatgctccagcttggtctccagggacaactgtacctggagataaagtctggataccagggagggacagagatgctcttccttccacagtgtggccacttgctgggccatgtgaaccagcagaggagagttccttggctatgctgttgttcccccgctgtccagggagaatggaggtggactgaggagtgaagtttgggcgaactgcacagagctgctcctcttcaccccgaaaatttgtctttttacagaatccaggttctcccctccctcatcactgctgttgcttcctttgaaagtctaaaccactggaggcttctttttccttcctctctccttccccagtttcctctgtcccaattaaaaccaggatggagagcatttgctggctggccccaattattgtacccttgcccaaagggaggggcctctgtcgtgacccctcagaaatctggcagtctgggtttccacctttcccctatttaactctcagcccccacccatcccctggggttgcggctggcaggccgggacttgcagaaccaaatgggccaggggccaagttcattcttttgggagagagcaatggtaccttcccttaacgggaaaacgagaaatattgaggggaagatggactgcgatccaaacgccctggctctcaggcctggactctagggcttagccagatgcctaaaccgcccaagccgagaaacaacttagaagacagacataaccctgggattcagggaaggcgcgagcaccgcccaggacctggtagggtgcgagccgcgagcagtccgggagggagcgcgcctagggcggagcgtaggctgtggggggagggctgggagtccggggccgccccacacccgcactcctcccgggtttctgctctccgcccgtgtggagtggtgggggcctgggtgggaatgggcgtgtgccagcgcacgcgcgctccctggaaggagaagtctcagctagaacgagcggccctaggttttcggaagggaggatcagggatgtttgcgagcggctggaaccagacggtgccgatagaggaagcgggctccatggctgccctcctgctgctgcccctgctgctgttgctaccgctgctgctgctgaagctacacctctggccgcagttgcgctggcttccggcggacttggcctttgcggtgcgagctctgtgctgcaaaagggctcttcgagctcgcgccctggccgcggctgccgccgacccggaaggtcccgaggggggctgcagcctggcctggcgcctcgcggaactggcccagcagcgcgccgcgcacacctttctcattcacggctcgcggcgctttagctactcagaggcggagcgcgagagtaacagggctgcacgcgccttcctacgtgcgctaggctgggactggggacccgacggcggcgacagcggcgaggggagcgctggagaaggcgagcgggcagcgccgggagccggagatgcagcggccggaagcggcgcggagtttgccggaggggacggtgccgccagaggtggaggagccgccgcccctctgtcacctggagcaactgtggcgctgctcctccccgctggcccagagtttctgtggctctggttcgggctggccaaggccggcctgcgcactgcctttgtgcccaccgccctgcgccggggccccctgctgcactgcctccgcagctgcggcgcgcgcgcgctggtgctggcgccagagtttctggagtccctggagccggacctgcccgccctgagagccatggggctccacctgtgggctgcaggcccaggaacccaccctgctggaattagcgatttgctggctgaagtgtccgctgaagtggatgggccagtgccaggatacctctcttccccccagagcataacagacacgtgcctgtacatcttcacctctggcaccacgggcctccccaaggctgctcggatcagtcatctgaagatcctgcaatgccagggcttctatcagctgtgtggtgtccaccaggaagatgtgatctacctcgccctcccactctaccacatgtccggttccctgctgggcatcgtgggctgcatgggcattggggccacagtggtgctgaaatccaagttctcggctggtcagttctgggaagattgccagcagcacagggtgacggtgttccagtacattggggagctgtgccgataccttgtcaaccagcccccgagcaaggcagaacgtggccataaggtccggctggcagtgggcagcgggctgcgcccagatacctgggagcgttttgtgcggcgcttcgggcccctgcaggtgctggagacatatggactgacagagggcaacgtggccaccatcaactacacaggacagcggggcgctgtggggcgtgcttcctggctttacaagcatatcttccccttctccttgattcgctatgatgtcaccacaggagagccaattcgggacccccaggggcactgtatggccacatctccaggtgagccagggctgctggtggccccggtaagccagcagtccccattcctgggctatgctggcgggccagagctggcccaggggaagttgctaaaggatgtcttccggcctggggatgttttcttcaacactggggacctgctggtctgcgatgaccaaggttttctccgcttccatgatcgtactggagacaccttcaggtggaagggggagaatgtggccacaaccgaggtggcagaggtcttcgaggccctagattttcttcaggaggtgaacgtctatggagtcactgtgccagggcatgaaggcagggctggaatggcagccctagttctgcgtcccccccacgctttggaccttatgcagctctacacccacgtgtctgagaacttgccaccttatgcccggccccgattcctcaggctccaggagtctttggccaccacagagaccttcaaacagcagaaagttcggatggcaaatgagggcttcgaccccagcaccctgtctgacccactgtacgttctggaccaggctgtaggtgcctacctgcccctcacaactgcccggtacagcgccctcctggcaggaaaccttcgaatctgagaacttccacacctgaggcacctgagagaggaactctgtggggtgggggccgttgcaggtgtactgggctgtcagggatcttttctataccagaactgcggtcactattttgtaataaatgtggctggagctgatccagctgtctctgacctaca

SEQ ID NO: 183643 - DNA, 2410 bp, Homo sapiens
  Payload ID: 16180
  Gene Symbol: SLC27A3
  Gene Name: solute carrier family 27 (fatty acid transporter), member 3
  Uniprot ID: Q5K4L6
  ENST ID: ENST00000368661
  CDS Start-End: 66-2258
cacacccgcactcctcccgggtttctgctctccgcccgtgtggagtggtgggggcctgggtgggaatgggcgtgtgccagcgcacgcgcgctccctggaaggagaagtctcagctagaacgagcggccctaggttttcggaagggaggatcagggatgtttgcgagcggctggaaccagacggtgccgatagaggaagcgggctccatggctgccctcctgctgctgcccctgctgctgttgctaccgctgctgctgctgaagctacacctctggccgcagttgcgctggcttccggcggacttggcctttgcggtgcgagctctgtgctgcaaaagggctcttcgagctcgcgccctggccgcggctgccgccgacccggaaggtcccgaggggggctgcagcctggcctggcgcctcgcggaactggcccagcagcgcgccgcgcacacctttctcattcacggctcgcggcgctttagctactcagaggcggagcgcgagagtaacagggctgcacgcgccttcctacgtgcgctaggctgggactggggacccgacggcggcgacagcggcgaggggagcgctggagaaggcgagcgggcagcgccgggagccggagatgcagcggccggaagcggcgcggagtttgccggaggggacggtgccgccagaggtggaggagccgccgcccctctgtcacctggagcaactgtggcgctgctcctccccgctggcccagagtttctgtggctctggttcgggctggccaaggccggcctgcgcactgcctttgtgcccaccgccctgcgccggggccccctgctgcactgcctccgcagctgcggcgcgcgcgcgctggtgctggcgccagagtttctggagtccctggagccggacctgcccgccctgagagccatggggctccacctgtgggctgcaggcccaggaacccaccctgctggaattagcgatttgctggctgaagtgtccgctgaagtggatgggccagtgccaggatacctctcttccccccagagcataacagacacgtgcctgtacatcttcacctctggcaccacgggcctccccaaggctgctcggatcagtcatctgaagatcctgcaatgccagggcttctatcagctgtgtggtgtccaccaggaagatgtgatctacctcgccctcccactctaccacatgtccggttccctgctgggcatcgtgggctgcatgggcattggggccacagtggtgctgaaatccaagttctcggctggtcagttctgggaagattgccagcagcacagggtgacggtgttccagtacattggggagctgtgccgataccttgtcaaccagcccccgagcaaggcagaacgtggccataaggtccggctggcagtgggcagcgggctgcgcccagatacctgggagcgttttgtgcggcgcttcgggcccctgcaggtgctggagacatatggactgacagagggcaacgtggccaccatcaactacacaggacagcggggcgctgtggggcgtgcttcctggctttacaagcatatcttccccttctccttgattcgctatgatgtcaccacaggagagccaattcgggacccccaggggcactgtatggccacatctccaggtgagccagggctgctggtggccccggtaagccagcagtccccattcctgggctatgctggcgggccagagctggcccaggggaagttgctaaaggatgtcttccggcctggggatgttttcttcaacactggggacctgctggtctgcgatgaccaaggttttctccgcttccatgatcgtactggagacaccttcaggtggaagggggagaatgtggccacaaccgaggtggcagaggtcttcgaggccctagattttcttcaggaggtgaacgtctatggagtcactgtgccagggcatgaaggcagggctggaatggcagccctagttctgcgtcccccccacgctttggaccttatgcagctctacacccacgtgtctgagaacttgccaccttatgcccggccccgattcctcaggctccaggagtctttggccaccacagagaccttcaaacagcagaaagttcggatggcaaatgagggcttcgaccccagcaccctgtctgacccactgtacgttctggaccaggctgtaggtgcctacctgcccctcacaactgcccggtacagcgccctcctggcaggaaaccttcgaatctgagaacttccacacctgaggcacctgagagaggaactctgtggggtgggggccgttgcaggtgtactgggctgtcagggatcttttctataccagaactgcggtcactattttgtaataaatgtggctggagctgatccagctgtctctgacct

SEQ ID NO: 183644 - DNA, 1357 bp, Homo sapiens
  Payload ID: 16180
  Gene Symbol: SLC27A3
  Gene Name: solute carrier family 27 (fatty acid transporter), member 3
  ENST ID: ENST00000458027
  CDS Start-End: 1-1202
cccaccctgctggaattagcgatttgctggctgaagtgtccgctgaagtggatgggccagtgccaggatacctctcttccccccagagcataacagacacgtgcctgtacatcttcacctctggcaccacgggcctccccaaggctgctcggatcagtcatctgaagatcctgcaatgccagggcttctatcagctgtgtggtgtccaccaggaagatgtgatctacctcgccctcccactctaccacatgtccggttccctgctgggcatcgtgggctgcatgggcattggggccacagtggtgctgaaatccaagttctcggctggtcagttctgggaagattgccagcagcacagggtgacggtgttccagtacattggggagctgtgccgataccttgtcaaccagcccccgagcaaggcagaacgtggccataaggtccggctggcagtgggcagcgggctgcgcccagatacctgggagcgttttgtgcggcgcttcgggcccctgcaggtgctggagacatatggactgacagagggcaacgtggccaccatcaactacacaggacagcggggcgctgtggggcgtgcttcctggctttacaagcatatcttccccttctccttgattcgctatgatgtcaccacaggagagccaattcgggacccccaggggcactgtatggccacatctccaggtgagccagggctgctggtggccccggtaagccagcagtccccattcctgggctatgctggcgggccagagctggcccaggggaagttgctaaaggatgtcttccggcctggggatgttttcttcaacactggggacctgctggtctgcgatgaccaaggttttctccgcttccatgatcgtactggagacaccttcaggtggaagggggagaatgtggccacaaccgaggtggcagaggtcttcgaggccctagattttcttcaggaggtgaacgtctatggagtcactgtgccagggcatgaaggcagggctggaatggcagccctagttctgcgtcccccccacgctttggaccttatgcagctctacacccacgtgtctgagaacttgccaccttatgcccggccccgattcctcaggctccaggctgtaggtgcctacctgcccctcacaactgcccggtacagcgccctcctggcaggaaaccttcgaatctgagaacttccacacctgaggcacctgagagaggaactctgtggggtgggggccgttgcaggtgtactgggctgtcagggatcttttctataccagaactgcggtcactattttgtaataaatgtggctggagctgatccagctgtctctgacctaca

SEQ ID NO: 183645 - DNA, 433 bp, Homo sapiens
  Payload ID: 16180
  Gene Symbol: SLC27A3
  Gene Name: solute carrier family 27 (fatty acid transporter), member 3
  ENST ID: ENST00000532853
  CDS Start-End: 1-433
gtgggcagcgggctgcgcccagatacctgggagcgttttgtgcggcgcttcgggcccctgcaggtgctggagacatatggactgacagagggcaacgtggccaccatcaactacacaggacagcggggcgctgtggggcgtgcttcctggctttacaagcatatcttccccttctccttgattcgctatgatgtcaccacaggagagccaattcgggacccccaggggcactgtatggccacatctccaggttttctccgcttccatgatcgtactggagacaccttcaggtggaagggggagaatgtggccacaaccgaggtggcagaggtcttcgaggccctagattttcttcaggaggtgaacgtctatggagtcactgtgccagggcatgaaggcagggctggaatggcagccctagttctgcgtcccc

SEQ ID NO: 183646 - DNA, 457 bp, Homo sapiens
  Payload ID: 16180
  Gene Symbol: SLC27A3
  Gene Name: solute carrier family 27 (fatty acid transporter), member 3
  ENST ID: ENST00000524676
  CDS Start-End: 1-457
caattcgggacccccaggggcactgtatggccacatctccagctggcccaggggaagttgctaaaggatgtcttccggcctggggatgttttcttcaacactggggacctgctggtctgcgatgaccaaggttttctccgcttccatgatcgtactggagacaccttcaggtggaagggggagaatgtggccacaaccgaggtggcagaggtcttcgaggccctagattttcttcaggaggtgaacgtctatggagtcactgtgccagggcatgaaggcagggctggaatggcagccctagttctgcgtcccccccacgctttggaccttatgcagctctacacccacgtgtctgagaacttgccaccttatgcccggccccgattcctcaggctccaggagtctttggccaccacagagaccttcaaacagcagaaagttcggatggcaaatgagg

SEQ ID NO: 183647 - DNA, 3351 bp, Homo sapiens; identical to SEQ ID NO: 183642
  Payload ID: 16180
  Gene Symbol: SLC27A3
  Gene Name: solute carrier family 27 (fatty acid transporter), member 3
  ENST ID: ENST00000575439
  CDS Start-End: 761-3196

SEQ ID NO: 183648 - DNA, 457 bp, Homo sapiens; identical to SEQ ID NO: 183646
  Payload ID: 16180
  Gene Symbol: SLC27A3
  Gene Name: solute carrier family 27 (fatty acid transporter), member 3
  ENST ID: ENST00000575532
  CDS Start-End: 1-457

SEQ ID NO: 183649 - DNA, 1357 bp, Homo sapiens; identical to SEQ ID NO: 183644
  Payload ID: 16180
  Gene Symbol: SLC27A3
  Gene Name: solute carrier family 27 (fatty acid transporter), member 3
  ENST ID: ENST00000570870
  CDS Start-End: 1-1202

SEQ ID NO: 183650 - DNA, 433 bp, Homo sapiens; identical to SEQ ID NO: 183645
  Payload ID: 16180
  Gene Symbol: SLC27A3
  Gene Name: solute carrier family 27 (fatty acid transporter), member 3
  ENST ID: ENST00000573411
  CDS Start-End: 1-433

SEQ ID NO: 183651 - DNA, 2413 bp, Homo sapiens
  Payload ID: 16180
  Gene Symbol: SLC27A3
  Gene Name: solute carrier family 27 (fatty acid transporter), member 3
  Uniprot ID: Q5K4L6
  ENST ID: ENST00000624995
  CDS Start-End: 66-2258
cacacccgcactcctcccgggtttctgctctccgcccgtgtggagtggtgggggcctgggtgggaatgggcgtgtgccagcgcacgcgcgctccctggaaggagaagtctcagctagaacgagcggccctaggttttcggaagggaggatcagggatgtttgcgagcggctggaaccagacggtgccgatagaggaagcgggctccatggctgccctcctgctgctgcccctgctgctgttgctaccgctgctgctgctgaagctacacctctggccgcagttgcgctggcttccggcggacttggcctttgcggtgcgagctctgtgctgcaaaagggctcttcgagctcgcgccctggccgcggctgccgccgacccggaaggtcccgaggggggctgcagcctggcctggcgcctcgcggaactggcccagcagcgcgccgcgcacacctttctcattcacggctcgcggcgctttagctactcagaggcggagcgcgagagtaacagggctgcacgcgccttcctacgtgcgctaggctgggactggggacccgacggcggcgacagcggcgaggggagcgctggagaaggcgagcgggcagcgccgggagccggagatgcagcggccggaagcggcgcggagtttgccggaggggacggtgccgccagaggtggaggagccgccgcccctctgtcacctggagcaactgtggcgctgctcctccccgctggcccagagtttctgtggctctggttcgggctggccaaggccggcctgcgcactgcctttgtgcccaccgccctgcgccggggccccctgctgcactgcctccgcagctgcggcgcgcgcgcgctggtgctggcgccagagtttctggagtccctggagccggacctgcccgccctgagagccatggggctccacctgtgggctgcaggcccaggaacccaccctgctggaattagcgatttgctggctgaagtgtccgctgaagtggatgggccagtgccaggatacctctcttccccccagagcataacagacacgtgcctgtacatcttcacctctggcaccacgggcctccccaaggctgctcggatcagtcatctgaagatcctgcaatgccagggcttctatcagctgtgtggtgtccaccaggaagatgtgatctacctcgccctcccactctaccacatgtccggttccctgctgggcatcgtgggctgcatgggcattggggccacagtggtgctgaaatccaagttctcggctggtcagttctgggaagattgccagcagcacagggtgacggtgttccagtacattggggagctgtgccgataccttgtcaaccagcccccgagcaaggcagaacgtggccataaggtccggctggcagtgggcagcgggctgcgcccagatacctgggagcgttttgtgcggcgcttcgggcccctgcaggtgctggagacatatggactgacagagggcaacgtggccaccatcaactacacaggacagcggggcgctgtggggcgtgcttcctggctttacaagcatatcttccccttctccttgattcgctatgatgtcaccacaggagagccaattcgggacccccaggggcactgtatggccacatctccaggtgagccagggctgctggtggccccggtaagccagcagtccccattcctgggctatgctggcgggccagagctggcccaggggaagttgctaaaggatgtcttccggcctggggatgttttcttcaacactggggacctgctggtctgcgatgaccaaggttttctccgcttccatgatcgtactggagacaccttcaggtggaagggggagaatgtggccacaaccgaggtggcagaggtcttcgaggccctagattttcttcaggaggtgaacgtctatggagtcactgtgccagggcatgaaggcagggctggaatggcagccctagttctgcgtcccccccacgctttggaccttatgcagctctacacccacgtgtctgagaacttgccaccttatgcccggccccgattcctcaggctccaggagtctttggccaccacagagaccttcaaacagcagaaagttcggatggcaaatgagggcttcgaccccagcaccctgtctgacccactgtacgttctggaccaggctgtaggtgcctacctgcccctcacaactgcccggtacagcgccctcctggcaggaaaccttcgaatctgagaacttccacacctgaggcacctgagagaggaactctgtggggtgggggccgttgcaggtgtactgggctgtcagggatcttttctataccagaactgcggtcactattttgtaataaatgtggctggagctgatccagctgtctctgacctaca

SEQ ID NO: 183652 - DNA, 2413 bp, Homo sapiens; identical to SEQ ID NO: 183651
  Payload ID: 16180
  Gene Symbol: SLC27A3
  Gene Name: solute carrier family 27 (fatty acid transporter), member 3
  Uniprot ID: Q5K4L6
  ENST ID: ENST00000623839
  CDS Start-End: 66-2258

SEQ ID NO: 183653 - DNA, 3028 bp, Homo sapiens
  Payload ID: 16181
  Gene Symbol: SLC27A4
  Gene Name: solute carrier family 27 (fatty acid transporter), member 4
  Uniprot ID: Q6P1M0
  ENST ID: ENST00000300456
  CDS Start-End: 118-2049
gctgagacccggctccgtgcgtccaggggcggctaatgcccctcacgctgtctacgctgctgcaaccgggccgcatctggacggggcgccgcgcggcggagccgacgccgggccacaatgctgcttggagcctctctggtgggggtgctgctgttctccaagctggtgctgaaactgccctggacccaggtgggattctccctgttgttcctctacttgggatctggcggctggcgcttcatccgggtcttcatcaagaccatcaggcgcgatatctttggcggcctggtcctcctgaaggtgaaggcaaaggtgcgacagtgcctgcaggagcggcggacagtgcccattttgtttgcctctaccgttcggcgccaccccgacaagacggccctgatcttcgagggcacagatacccactggaccttccgccagctggatgagtactcaagcagtgtagccaacttcctgcaggcccggggcctggcctcgggcgatgtggctgccatcttcatggagaaccgcaatgagttcgtgggcctatggctgggcatggccaagctcggtgtggaggcagccctcatcaacaccaacctgcggcgggatgctctgctccactgcctcaccacctcgcgcgcacgggcccttgtctttggcagcgaaatggcctcagccatctgtgaggtccatgccagcctggacccctcgctcagcctcttctgctctggctcctgggagcccggtgcggtgcctccaagcacagaacacctggaccctctgctgaaagatgctcccaagcaccttcccagttgccctgacaagggcttcacagataaactgttctacatctacacatccggcaccacagggctgcccaaggccgccatcgtggtgcacagcaggtattaccgcatggctgccctggtgtactatggattccgcatgcggcccaacgacatcgtctatgactgcctccccctctaccactcagcaggaaacatcgtgggaatcggccagtgcctgctgcatggcatgacggtggtgattcggaagaagttctcagcctcccggttctgggacgattgtatcaagtacaactgcacgattgtgcagtacattggtgaactgtgccgctacctcctgaaccagccaccgcgggaggcagaaaaccagcaccaggttcgcatggcactaggcaatggcctccggcagtccatctggaccaacttttccagccgcttccacataccccaggtggctgagttctacggggccacagagtgcaactgtagcctgggcaacttcgacagccaggtgggggcctgtggtttcaatagccgcatcctgtccttcgtgtaccccatccggttggtacgtgtcaacgaggacaccatggagctgatccgggggcccgacggcgtctgcattccctgccagccaggtgagccgggccagctggtgggccgcatcatccagaaagaccccctgcgccgcttcgatggctacctcaaccagggcgccaacaacaagaagattgccaaggatgtcttcaagaagggggaccaggcctaccttactggtgatgtgctggtgatggacgagctgggctacctgtacttccgagaccgcactggggacacgttccgctggaaaggtgagaacgtgtccaccaccgaggtggaaggcacactcagccgcctgctggacatggctgacgtggccgtgtatggtgtcgaggtgccaggaaccgagggccgggccggaatggctgctgtggccagccccactggcaactgtgacctggagcgctttgctcaggtcttggagaaggaactgcccctgtatgcgcgccccatcttcctgcgcctcctgcctgagctgcacaaaacaggaacctacaagttccagaagacagagctacggaaggagggctttgacccggctattgtgaaagacccgctgttctatctagatgcccagaagggccgctacgtcccgctggaccaagaggcctacagccgcatccaggcaggcgaggagaagctgtgattccccccatccctctgagggccggcggatgctggatccggagccccaggttccgccccagagcggtcctggacaaggccagaccaaagcaagcagggcctggcacctccatcctgaggtgctgcccctccatccaaaactgccaagtgactcattgccttcccaacccttccagaggctttctgtgaaagtctcatgtccaagttccgtcttctgggctgggcaggccctctggttcccaggctgagactgacgggttttctcaggatgatgtcttgggtgagggtagggagaggacaaggggtcaccgagcccttcccagagagcagggagcttataaatggaaccagagcagaagtccccagactcaggaagtcaacagagtgggcagggacagtggtagcatccatctggtggccaaagagaatcgtagccccagagctgcccaagttcactgggctccacccccacctccaggaggggaggagaggacctgacatctgtaggtggcccctgatgccccatctacagcaggaggtcaggaccacgcccctggcctctccccactcccccatcctcctccctgggtggctgcctgattatccctcaggcagggcctctcagtccttgtgggtctgtgtcacctccatctcagtcttggcctggctatgaggggaggaggaatgggagagggggctcaggggccaataaactctgccttgagtcctcctagcctgtgtgcaaaccacccaagcccaccctgaccccagaaccccacagccccactgtggccgcttgatcccccacgccaaccccctggcccattgacccgcctcatctgttcattcacttatctaagctgagggtgtagcaggtaagatgccgcagcccctgcctccaatgtgctggttcagccgggggcagtgcccatgtgaatctggcaaggtgtttaacagtgtgggcttgaaagtccaaacca

SEQ ID NO: 183654 - DNA, 1557 bp, Homo sapiens
  Payload ID: 16181
  Gene Symbol: SLC27A4
  Gene Name: solute carrier family 27 (fatty acid transporter), member 4
  Uniprot ID: Q6P1M0
  ENST ID: ENST00000372870
  CDS Start-End: 118-831
ggagcgcggcgggcggggccgggcggcgggcggggctggcggggcggccgggccatgcagggcgcagagccggctaaaccctgctgagacccggctccgtgcgtccaggggcggctaatgcccctcacgctgtctacgctgctgcaaccgggccgcatctggacggggcgccgcgcggcggagccgacgccgggccacaatgctgcttggagcctctctggtgggggtgctgctgttctccaagctggtgctgaaactgccctggacccaggtgggattctccctgttgttcctctacttgggatctggcggctggcgcttcatccgggtcttcatcaagaccatcaggcctaccttactggtgatgtgctggtgatggacgagctgggctacctgtacttccgagaccgcactggggacacgttccgctggaaaggtgagaacgtgtccaccaccgaggtggaaggcacactcagccgcctgctggacatggctgacgtggccgtgtatggtgtcgaggtgccaggaaccgagggccgggccggaatggctgctgtggccagccccactggcaactgtgacctggagcgctttgctcaggtcttggagaaggaactgcccctgtatgcgcgccccatcttcctgcgcctcctgcctgagctgcacaaaacaggaacctacaagttccagaagacagagctacggaaggagggctttgacccggctattgtgaaagacccgctgttctatctagatgcccagaagggccgctacgtcccgctggaccaagaggcctacagccgcatccaggcaggcgaggagaagctgtgattccccccatccctctgagggccggcggatgctggatccggagccccaggttccgccccagagcggtcctggacaaggccagaccaaagcaagcagggcctggcacctccatcctgaggtgctgcccctccatccaaaactgccaagtgactcattgccttcccaacccttccagaggctttctgtgaaagtctcatgtccaagttccgtcttctgggctgggcaggccctctggttcccaggctgagactgacgggttttctcaggatgatgtcttgggtgagggtagggagaggacaaggggtcaccgagcccttcccagagagcagggagcttataaatggaaccagagcagaagtccccagactcaggaagtcaacagagtgggcagggacagtggtagcatccatctggtggccaaagagaatcgtagccccagagctgcccaagttcactgggctccacccccacctccaggaggggaggagaggacctgacatctgtaggtggcccctgatgccccatctacagcaggaggtcaggaccacgcccctggcctctccccactcccccatcctcctccctgggtggctgcctgattatccctcaggcagggcctctcagtccttgtgggtctgtgtcacctccatctcagtcttggcctggctatgaggggaggaggaatgggagagggggctcaggggccaataaactctgccttgagtc

SEQ ID NO: 183655 - DNA, 2361 bp, Homo sapiens
  Payload ID: 16182
  Gene Symbol: SLC27A5
  Gene Name: solute carrier family 27 (fatty acid transporter), member 5
  Uniprot ID: Q9Y2P5
  ENST ID: ENST00000263093
  CDS Start-End: 111-2183
agcagtgccagggccaccacccctggggaggagccattgggctactcttgaggggccagaggtgagcctgaacactccacagctgctgctcctagggaggagctggtaccatgggtgtcaggcaacagttggccttgctgctgctgctgctgctcctgctctggggcctggggcagccagtgtggccagtcgctgtggccttgaccctgcgctggctcctgggggatcccacatgttgcgtgctacttgggctggccatgttagcacggccctggctcggcccctgggtgccccatgggctgagcctggcagctgcggccctggcactaaccctcctgccagcacggctgcccccaggactacgctggctgccggctgatgtgatcttcttggccaagatcctccacctgggcctgaagatcaggggatgcttgagccggcagccgcctgacacctttgtagatgccttcgagcggcgagcacgagcgcagcctggcagggcactcttggtgtggacggggcctggggccggctcagtcacctttggtgagctggatgcccgggcctgccaggcggcatgggccctgaaggctgagctgggtgaccctgcgagcctgtgtgccggggagcctactgccctccttgtgctggcttcccaggccgttccagccctgtgtatgtggctggggctggccaagctgggctgcccaacagcctggatcaacccgcatggccgggggatgcccctggcgcactctgtgctgagctctggggcccgggtgctggtggtggacccagacctccgggagagcctggaggagatccttcccaagctgcaggctgagaacatccgctgcttctacctcagccatacctcccctacaccaggggtgggggctctgggggctgccctggatgcagcgccctcccacccagtgcctgctgacctgcgtgctgggatcacatggagaagccctgccctcttcatctatacctcggggaccactggcctcccgaagccagccatcctcacgcatgagcgggtactgcagatgagcaagatgctgtccttatctggggccacagctgatgatgtggtttacacggtcctgcctctgtaccacgtgatgggacttgtcgttgggatcctcggctgcttagatctcggagccacctgtgttctggcccccaagttctctacttcctgcttctgggatgactgtcggcagcatggcgtgacagtgatcctgtatgtgggcgagctcctgcggtacttgtgtaacattccccagcaaccagaggaccggacacatacagtccgcctggcaatgggcaatggactacgggctgatgtgtgggagaccttccagcagcgcttcggtcctattcggatctgggaagtctacggctccacagaaggcaacatgggcttagtcaactatgtggggcgctgcggggccctgggcaagatgagctgcctcctccgaatgctgtccccctttgagctggtgcagttcgacatggaggcggcggagcctgtgagggacaatcagggcttctgcatccctgtagggctaggggagccggggctgctgctgaccaaggtggtaagccagcaacccttcgtgggctaccgcggcccccgagagctgtcggaacggaagctggtgcgcaacgtgcggcaatcgggcgacgtttactacaacaccggggacgtactggccatggaccgcgaaggcttcctctacttccgcgaccgcctcggggacaccttccgatggaagggcgagaacgtgtccacgcacgaggtggagggcgtgttgtcgcaggtggacttcttgcaacaggttaacgtgtatggcgtgtgcgtgccaggttgtgagggtaaggtgggcatggctgctgtgcagctagcccccggccagactttcgacggggagaagttgtaccagcacgttcgcgcttggctccctgcctacgctaccccccatttcatccgcatccaggacgccatggaggtcaccagcacgttcaaactgatgaagacccggttggtgcgtgagggcttcaatgtggggatcgtggttgaccctctgtttgtactggacaaccgggcccagtccttccggcccctgacggcagaaatgtaccaggctgtgtgtgagggaacctggaggctctgatcacctggccaacccactggggtagggatcaaagccagccacccccaccccaacacactcggtgtccctttcatcctgggcctgtgtgaatcccagcctggccataccctcaacctcagtgggctggaaatgacagtgggccctgtagcagtggcagaataaactcagatgtgttcac

SEQ ID NO: 183656 - DNA, 2003 bp, Homo sapiens
  Payload ID: 16182
  Gene Symbol: SLC27A5
  Gene Name: solute carrier family 27 (fatty acid transporter), member 5
  ENST ID: ENST00000595851
  CDS Start-End: 162-449
cttcccgggggcgtggtcacaagcgccggctccctccttgcagatggaagggcgagaacgtgtccacgcacgaggtggagggcgtgttgtcgcaggtggacttcttgcaacaggttaacgtgtatggcgtgtgcgtgccaggttgtgagggtaaggtgggcatggctgctgtgcagctagcccccggccagactttcgacggggagaagttgtaccagcacgttcgcgcttggctccctgcctacgctaccccccatttcatccgcatccaggacgccatggaggtcaccagcacgttcaaactgatgaagacccggttggtgcgtgagggcttcaatgtggggatcgtggttgaccctctgtttgtactggacaaccgggcccagtccttccggcccctgacggcagaaatgtaccaggctgtgtgtgagggaacctggaggctctgatcacctggccaacccactgggacagggtctcatcctgttgcccaggctggagtgcaatggtgttatcagagctcactgcagccttaacctcctgggctcaagtgattctcccacctcagtctccctgggactacagggagcaggagaaacggaagccaactgtgctttcctgggtcttctgctgctctccacactgagacctcaggcccagcctctgcacagacgagtgggaaggcacagtttttgaacacccacctgagagtcttctgctggtgccccagaggctgtatccaggccccgagaacaccgaggccccgagggactgtgctgtctggctgctcatggaacctccggccggtggcccttgcggtggatgaccagctgcgacttccagtcgaaggcgcggccacagtcactgcagaagtgacgccgctggcctgtgtggctcttgcggtggatgaccagctgcgacttccagctgaagctgcacccgcactcctcacacgggtaactccgggggcctgtgagtgagcgtcgggggtggtgcggaaaggccacctccccttgtggtggcttctctgtgctttccccggtggctagccccggggactgcacacctggcccactcgtgtgtgtccggtggtggatgacgaacactgacttccagtcgaagccgcggccacactgctcgcacgtgtagggcttcctgggggtggcagccggctccagtctcgtctctgcaggtgtgggctgagtgggcactggcggtgtccctgggcgcacagtgggggcaggagtggcagccccagacaagccctcccaggctgccggccctgggccctggggcggctgggcctctgggcagccaggtggaccctcactctcatttcctgggggcaggggcaaaccaggtgagtcccggcactcagcaacccctccctcaggcttgtggccgtggcacaagctcccgtccccccatgagtgggtggctcaggtcccaccgatacaggaggggtgattcaggctggatggtgtggggcactcacccgagcgcaggcttctgcagacgcctgtccccgtgagcagcatccccagctctgactgggcctgtgcctctggctggtggggcggtaaccctgcccgggtggggggcacagttaggcatggggtttgcatgaaggaggggtggggtcggttctggtaggtgacagggtgttcctctggaaggtgggagagctgggtagggctggtagcacagaggccctgcccagctaggcctgctgcagggtgggtgcaggccccagggagaggggcggggtggggctggctggtcctcacccagggagaccactgtgccgtacttctccagcatcgcatcccagtacagttccttctgtgaccggtccagcagcccccactcctcctgcggatgtggcccatcactgtaggcgtctttccaccccttccctgccctgtctggttcacattcttacctattacccggaagagtcagcaggttacctacgcctcatctgcccctcctgctgagaatga

SEQ ID NO: 183657 - DNA, 1987 bp, Homo sapiens
  Payload ID: 16182
  Gene Symbol: SLC27A5
  Gene Name: solute carrier family 27 (fatty acid transporter), member 5
  Uniprot ID: Q9Y2P5
  ENST ID: ENST00000601355
  CDS Start-End: 38-1858
actccacagctgctgctcctagggaggagctggtaccatgggtgtcaggcaacagttggccttgctgctgctgctgctgctcctgctctggggcctggggcagccagtgtggccagtcgctgtggccttgaccctgcgctggctcctgggggatcccacatgttgcgtgctacttgggctggccatgttagcacggccctggctcggcccctgggtgccccatgggctgagcctggcagctgcggccctggcactaaccctcctgccagcacggctgcccccaggactacgctggctgccggctgatgtgatcttcttggccaagatcctccacctgggcctgaagatcaggggatgcttgagccggcagccgcctgacacctttgtagatgccttcgagcggcgagcacgagcgcagcctggcagggcactcttggtgtggacggggcctggggccggctcagtcacctttgacctccgggagagcctggaggagatccttcccaagctgcaggctgagaacatccgctgcttctacctcagccatacctcccctacaccaggggtgggggctctgggggctgccctggatgcagcgccctcccacccagtgcctgctgacctgcgtgctgggatcacatggagaagccctgccctcttcatctatacctcggggaccactggcctcccgaagccagccatcctcacgcatgagcgggtactgcagatgagcaagatgctgtccttatctggggccacagctgatgatgtggtttacacggtcctgcctctgtaccacgtgatgggacttgtcgttgggatcctcggctgcttagatctcggagccacctgtgttctggcccccaagttctctacttcctgcttctgggatgactgtcggcagcatggcgtgacagtgatcctgtatgtgggcgagctcctgcggtacttgtgtaacattccccagcaaccagaggaccggacacatacagtccgcctggcaatgggcaatggactacgggctgatgtgtgggagaccttccagcagcgcttcggtcctattcggatctgggaagtctacggctccacagaaggcaacatgggcttagtcaactatgtggggcgctgcggggccctgggcaagatgagctgcctcctccgaatgctgtccccctttgagctggtgcagttcgacatggaggcggcggagcctgtgagggacaatcagggcttctgcatccctgtagggctaggggagccggggctgctgctgaccaaggtggtaagccagcaacccttcgtgggctaccgcggcccccgagagctgtcggaacggaagctggtgcgcaacgtgcggcaatcgggcgacgtttactacaacaccggggacgtactggccatggaccgcgaaggcttcctctacttccgcgaccgcctcggggacaccttccgatggaagggcgagaacgtgtccacgcacgaggtggagggcgtgttgtcgcaggtggacttcttgcaacaggttaacgtgtatggcgtgtgcgtgccaggttgtgagggtaaggtgggcatggctgctgtgcagctagcccccggccagactttcgacggggagaagttgtaccagcacgttcgcgcttggctccctgcctacgctaccccccatttcatccgcatccaggacgccatggaggtcaccagcacgttcaaactgatgaagacccggttggtgcgtgagggcttcaatgtggggatcgtggttgaccctctgtttgtactggacaaccgggcccagtccttccggcccctgacggcagaaatgtaccaggctgtgtgtgagggaacctggaggctctgatcacctggccaacccactggggtagggatcaaagccagccacccccaccccaacacactcggtgtccctttcatcctgggcctgtgtgaatcccagcctggccataccctcaacctcagtgggctggaa

SEQ ID NO: 183658 - DNA, 643 bp, Homo sapiens
  Payload ID: 16182
  Gene Symbol: SLC27A5
  Gene Name: solute carrier family 27 (fatty acid transporter), member 5
  ENST ID: ENST00000594786
  CDS Start-End: 174-461
gcggggcctctccttcccgggggcgtggtcacaagcgccggctccctccttgcagatggaagggcgagaacgtgtccacgcacgaggtggagggcgtgttgtcgcaggtggacttcttgcaacaggttaacgtgtatggcgtgtgcgtgccaggttgtgagggtaaggtgggcatggctgctgtgcagctagcccccggccagactttcgacggggagaagttgtaccagcacgttcgcgcttggctccctgcctacgctaccccccatttcatccgcatccaggacgccatggaggtcaccagcacgttcaaactgatgaagacccggttggtgcgtgagggcttcaatgtggggatcgtggttgaccctctgtttgtactggacaaccgggcccagtccttccggcccctgacggcagaaatgtaccaggctgtgtgtgagggaacctggaggctctgatcacctggccaacccactggggtagggatcaaagccagccacccccaccccaacacactcggtgtccctttcatcctgggcctgtgtgaatcccagcctggccataccctcaacctcagtgggctggaaatgacagtgggccctgtagcagtggcagaataaactcagatgtgttcacagaa

SEQ ID NO: 183659 - DNA, 3219 bp, Homo sapiens
  Payload ID: 16183
  Gene Symbol: SLC27A6
  Gene Name: solute carrier family 27 (fatty acid transporter), member 6
  Uniprot ID: Q9Y2P4
  ENST ID: ENST00000262462
  CDS Start-End: 1011-2870
gggcctcctccctggggtgtgagcaggtcggcgcgccacacttctctaggtggccggacgcgcgcccagggaggagctggcggcggggcccaggctgttccggctgcggcacgccaggggatgtggttagccctgagcctggaggccgaaggtgggcaggcaacactcccaccatgtttcggaggagaatacactaggctagcctaacgacactcggagtgcgagctgcggctggggtaggggcacccctttccagcgggcgcgtgggtcaccaaggagcagttctccgggacccgttgcgtcagagggactgggcggggctgggcggggcaggacgggggcggcgctcaggaaccctggaacccgctggccctgaggccacggaccgagacgtggtgctgagcccctgcgcggtttctggtgcgtagagactgtaaatcgctgcgcttctcagtcatcatcatcccagcttttcccggctcgaattcagcctccaactcaagctcgcgggaaagactacctgagaggagaaaagcttctgtccctggaccttcttctgagggtggtgaggtttgtttagggtcgcagaagcagggaggactgactcagccctcacagagaagaggtctggaaagtcctggggaactcgcagggcacgggccgctgtcgcggttgggaggcgagggcgcagcgctggggttgtagattccaagacccctgagggtggctgtgttggtttctcgcaggagtcggaggctccctgctttccagccgcccagtgacccaagcttaatcttcagcaccacttggggcgaccttttcggtgcaaacctacgattctgtttctcaggattcctccccatcccgcttcgccccggaaaagctgacaagaacttcaggtgtaagccctgagtagtgaggatctgcggtctccgtggagagctgtgcctggaagagaaggacgctggtgggggctgagatcagagctgtcttctggcccagttgcccccatgcttctgtcatggctaacagttctaggggctggaatggtcgtcctgcacttcttgcagaaactcctgttcccttacttttgggatgacttctggttcgtgttgaaggtggtgctcattataattcggctgaagaagtatgaaaagagaggggagctggtgactgtgctggataaattcttgagtcatgccaaaagacaacctcggaaacctttcatcatctatgagggagacatctacacctatcaggatgtagacaaaaggagcagcagagtggcccatgtcttcctgaaccattcctctctgaaaaagggggacacggtggctctgctgatgagcaatgagccggacttcgttcacgtgtggttcggcctcgccaagctgggctgcgtggtggcctttctcaacaccaacattcgctccaactccctcctgaattgcatccgcgcctgtgggcccagagccctagtggtgggcgcagatttgcttggaacggtagaagaaatccttccaagcctctcagaaaatatcagtgtttgggggatgaaagattctgttccacaaggtgtaatttcactcaaagaaaaactgagcacctcacctgatgagcccgtgccacgcagccaccatgttgtctcactcctcaagtctacttgtctttacatttttacctctggaacaacaggtctaccaaaagcagctgtgattagtcagctgcaggttttaaggggttctgctgtcctgtgggcttttggttgtactgctcatgacattgtttatataacccttcctctgtatcatagttcagcagctatcctgggaatttctggatgtgttgagttgggtgccacttgtgtgttaaagaagaaattttcagcaagccagttttggagtgactgcaagaagtatgatgtgactgtgtttcagtatattggagaactttgtcgctacctttgcaaacaatctaagagagaaggagaaaaggatcataaggtgcgtttggcaattggaaatggcatacggagtgatgtatggagagaatttttagacagatttggaaatataaaggtgtgtgaactttatgcagctaccgaatcaagcatatctttcatgaactacactgggagaattggagcaattgggagaacaaatttgttttacaaacttctttccacttttgacttaataaagtatgactttcagaaagatgaacccatgagaaatgagcagggttggtgtattcatgtgaaaaaaggagaacctggacttctcatttctcgagtgaatgcaaaaaatcccttctttggctatgctgggccttataagcacacaaaagacaaattgctttgtgatgtttttaagaagggagatgtttaccttaatactggagacttaatagtccaggatcaggacaatttcctttatttttgggaccgtactggagacactttcagatggaaaggagaaaatgtcgcaaccactgaggttgctgatgttattggaatgttggatttcatacaggaagcaaacgtctatggtgtggctatatcaggttatgaaggaagagcaggaatggcttctattattttaaaaccaaatacatctttagatttggaaaaagtttatgaacaagttgtaacatttctaccagcttatgcttgtccacgatttttaagaattcaggaaaaaatggaagcaacaggaacattcaaactattgaagcatcagttggtggaagatggatttaatccactgaaaatttctgaaccactttacttcatggataacttgaaaaagtcttatgttctactgaccagggaactttatgatcaaataatgttaggggaaataaaactttaagatttttatatctagaactttcatatgctttcttaggaagagtgagaggggggtatatgattctttatgaaatggggaaagggagctaacattaattatgcatgtactatatttccttaatatgagagataattttttaattgcataagaattttaatttcttttaattgatataaacagtagttgattattctttttatctatttggagattcagtgcataactaagtattttccttaatactaaagattttaaataataaatagtggctagcggtttggacaatcactaaaaatgtactttctaataagtaaaatttctaattttgaataaaagattaaattttact

SEQ ID NO: 183660 - DNA, 2616 bp, Homo sapiens
  Payload ID: 16183
  Gene Symbol: SLC27A6
  Gene Name: solute carrier family 27 (fatty acid transporter), member 6
  Uniprot ID: Q9Y2P4
  ENST ID: ENST00000395266
  CDS Start-End: 397-2256
gacgtggtgctgagcccctgcgcggtttctggtgcgtagagactgtaaatcgctgcgcttctcagtcatcatcatcccagcttttcccggctcgaattcagcctccaactcaagctcgcgggaaagactacctgagaggagaaaagcttctgtccctggaccttcttctgagggtggtgaggtttgtttagggtcgcagaagcagggaggactgactcagccctcacagagaagaggattcctccccatcccgcttcgccccggaaaagctgacaagaacttcaggtgtaagccctgagtagtgaggatctgcggtctccgtggagagctgtgcctggaagagaaggacgctggtgggggctgagatcagagctgtcttctggcccagttgcccccatgcttctgtcatggctaacagttctaggggctggaatggtcgtcctgcacttcttgcagaaactcctgttcccttacttttgggatgacttctggttcgtgttgaaggtggtgctcattataattcggctgaagaagtatgaaaagagaggggagctggtgactgtgctggataaattcttgagtcatgccaaaagacaacctcggaaacctttcatcatctatgagggagacatctacacctatcaggatgtagacaaaaggagcagcagagtggcccatgtcttcctgaaccattcctctctgaaaaagggggacacggtggctctgctgatgagcaatgagccggacttcgttcacgtgtggttcggcctcgccaagctgggctgcgtggtggcctttctcaacaccaacattcgctccaactccctcctgaattgcatccgcgcctgtgggcccagagccctagtggtgggcgcagatttgcttggaacggtagaagaaatccttccaagcctctcagaaaatatcagtgtttgggggatgaaagattctgttccacaaggtgtaatttcactcaaagaaaaactgagcacctcacctgatgagcccgtgccacgcagccaccatgttgtctcactcctcaagtctacttgtctttacatttttacctctggaacaacaggtctaccaaaagcagctgtgattagtcagctgcaggttttaaggggttctgctgtcctgtgggcttttggttgtactgctcatgacattgtttatataacccttcctctgtatcatagttcagcagctatcctgggaatttctggatgtgttgagttgggtgccacttgtgtgttaaagaagaaattttcagcaagccagttttggagtgactgcaagaagtatgatgtgactgtgtttcagtatattggagaactttgtcgctacctttgcaaacaatctaagagagaaggagaaaaggatcataaggtgcgtttggcaattggaaatggcatacggagtgatgtatggagagaatttttagacagatttggaaatataaaggtgtgtgaactttatgcagctaccgaatcaagcatatctttcatgaactacactgggagaattggagcaattgggagaacaaatttgttttacaaacttctttccacttttgacttaataaagtatgactttcagaaagatgaacccatgagaaatgagcagggttggtgtattcatgtgaaaaaaggagaacctggacttctcatttctcgagtgaatgcaaaaaatcccttctttggctatgctgggccttataagcacacaaaagacaaattgctttgtgatgtttttaagaagggagatgtttaccttaatactggagacttaatagtccaggatcaggacaatttcctttatttttgggaccgtactggagacactttcagatggaaaggagaaaatgtcgcaaccactgaggttgctgatgttattggaatgttggatttcatacaggaagcaaacgtctatggtgtggctatatcaggttatgaaggaagagcaggaatggcttctattattttaaaaccaaatacatctttagatttggaaaaagtttatgaacaagttgtaacatttctaccagcttatgcttgtccacgatttttaagaattcaggaaaaaatggaagcaacaggaacattcaaactattgaagcatcagttggtggaagatggatttaatccactgaaaatttctgaaccactttacttcatggataacttgaaaaagtcttatgttctactgaccagggaactttatgatcaaataatgttaggggaaataaaactttaagatttttatatctagaactttcatatgctttcttaggaagagtgagaggggggtatatgattctttatgaaatggggaaagggagctaacattaattatgcatgtactatatttccttaatatgagagataattttttaattgcataagaattttaatttcttttaattgatataaacagtagttgattattctttttatctatttggagattcagtgcataactaagtattttccttaatactaaagattttaaataataaatagtggctagcggtttggacaatcactaaaaatgtactttctaataagtaaaatttctaattttgaataaaagattaaattttactgaaatatttta

SEQ ID NO: 183661 - DNA, 2294 bp, Homo sapiens
  Payload ID: 16183
  Gene Symbol: SLC27A6
  Gene Name: solute carrier family 27 (fatty acid transporter), member 6
  Uniprot ID: Q9Y2P4
  ENST ID: ENST00000506176
  CDS Start-End: 435-2294
gagcccctgcgcggtttctggtgcgtagagactgtaaatcgctgcgcttctcagtcatcatcatcccagcttttcccggctcgaattcagcctccaactcaagctcgcgggaaagactacctgagaggagaaaagcttctgtccctggaccttcttctgagggtggtgaggagtcggaggctccctgctttccagccgcccagtgacccaagcttaatcttcagcaccacttggggcgaccttttcggtgcaaacctacgattctgtttctcaggattcctccccatcccgcttcgccccggaaaagctgacaagaacttcaggtgtaagccctgagtagtgaggatctgcggtctccgtggagagctgtgcctggaagagaaggacgctggtgggggctgagatcagagctgtcttctggcccagttgcccccatgcttctgtcatggctaacagttctaggggctggaatggtcgtcctgcacttcttgcagaaactcctgttcccttacttttgggatgacttctggttcgtgttgaaggtggtgctcattataattcggctgaagaagtatgaaaagagaggggagctggtgactgtgctggataaattcttgagtcatgccaaaagacaacctcggaaacctttcatcatctatgagggagacatctacacctatcaggatgtagacaaaaggagcagcagagtggcccatgtcttcctgaaccattcctctctgaaaaagggggacacggtggctctgctgatgagcaatgagccggacttcgttcacgtgtggttcggcctcgccaagctgggctgcgtggtggcctttctcaacaccaacattcgctccaactccctcctgaattgcatccgcgcctgtgggcccagagccctagtggtgggcgcagatttgcttggaacggtagaagaaatccttccaagcctctcagaaaatatcagtgtttgggggatgaaagattctgttccacaaggtgtaatttcactcaaagaaaaactgagcacctcacctgatgagcccgtgccacgcagccaccatgttgtctcactcctcaagtctacttgtctttacatttttacctctggaacaacaggtctaccaaaagcagctgtgattagtcagctgcaggttttaaggggttctgctgtcctgtgggcttttggttgtactgctcatgacattgtttatataacccttcctctgtatcatagttcagcagctatcctgggaatttctggatgtgttgagttgggtgccacttgtgtgttaaagaagaaattttcagcaagccagttttggagtgactgcaagaagtatgatgtgactgtgtttcagtatattggagaactttgtcgctacctttgcaaacaatctaagagagaaggagaaaaggatcataaggtgcgtttggcaattggaaatggcatacggagtgatgtatggagagaatttttagacagatttggaaatataaaggtgtgtgaactttatgcagctaccgaatcaagcatatctttcatgaactacactgggagaattggagcaattgggagaacaaatttgttttacaaacttctttccacttttgacttaataaagtatgactttcagaaagatgaacccatgagaaatgagcagggttggtgtattcatgtgaaaaaaggagaacctggacttctcatttctcgagtgaatgcaaaaaatcccttctttggctatgctgggccttataagcacacaaaagacaaattgctttgtgatgtttttaagaagggagatgtttaccttaatactggagacttaatagtccaggatcaggacaatttcctttatttttgggaccgtactggagacactttcagatggaaaggagaaaatgtcgcaaccactgaggttgctgatgttattggaatgttggatttcatacaggaagcaaacgtctatggtgtggctatatcaggttatgaaggaagagcaggaatggcttctattattttaaaaccaaatacatctttagatttggaaaaagtttatgaacaagttgtaacatttctaccagcttatgcttgtccacgatttttaagaattcaggaaaaaatggaagcaacaggaacattcaaactattgaagcatcagttggtggaagatggatttaatccactgaaaatttctgaaccactttacttcatggataacttgaaaaagtcttatgttctactgaccagggaactttatgatcaaataatgttaggggaaataaaactttaa

SEQ ID NO: 183662 - DNA, 811 bp, Homo sapiens
  Payload ID: 16183
  Gene Symbol: SLC27A6
  Gene Name: solute carrier family 27 (fatty acid transporter), member 6
  ENST ID: ENST00000508645
  CDS Start-End: 326-811
ccgtgcgctccgaagacggatattggaaagctgcaaaagtcaccagaaagaaacagggctgccttagtaaagtacagaggtgaagtggagcaagatggcagaatagcaagctcctttgatggccatccgcacaaatgtctacacagaaaaagcaccttcacaagaaccaaaaatcagcctgttttgtgcaacttccaagtcaagattatgaacattttcagactttttgcaagacagaattcaatggattaacaatcagccttatttgcttggaacggtagaagaaatccttccaagcctctcagaaaatatcagtgtttgggggatgaaagattctgttccacaaggtgtaatttcactcaaagaaaaactgagcacctcacctgatgagcccgtgccacgcagccaccatgttgtctcactcctcaagtctacttgtctttacatttttacctctggaacaacaggtctaccaaaagcagctgtgattagtcagctgcaggttttaaggggttctgctgtcctgtgggcttttggttgtactgctcatgacattgtttatataacccttcctctgtatcatagttcagcagctatcctgggaatttctggatgtgttgagttgggtgccacttgtgtgttaaagaagaaattttcagcaagccagttttggagtgactgcaagaagtatgatgtgactgtgtttcagtatattggagaactttgtcgctacctttgcaaacaatctaagagagaaggagaaaaggatcataaggtgcgtttggcaattggaaatggcatacggagtgat

SEQ ID NO: 183663 - DNA, 2636 bp, Homo sapiens
  Payload ID: 16184
  Gene Symbol: SLC28A1
  Gene Name: solute carrier family 28 (concentrative nucleoside transporter), member 1
  Uniprot ID: O00337
  ENST ID: ENST00000286749
  CDS Start-End: 91-2040
ataagctgcactgcatggttgctgctggatgtgttgtgttcctggcttccctctggatgctgacagaaacaaggctggaaggtctgggacatggagaacgacccctcgagacgaagagagtccatctctctcacacctgtggccaagggtctggagaacatgggggctgatttcttggaaagcctggaggaaggccagctccctaggagtgacttgagccccgcagagatcaggagcagctggagcgaggcggcgccgaagcccttctccagatggaggaacctgcagccagccctgagagccagaagcttctgcagggagcacatgcagctgtttcgatggatcggcacaggcctgctctgcactgggctctctgccttcctgctggtggcctgcctcctggatttccagagggccctggctctgtttgtcctcacctgtgtggtcctcaccttcctgggccaccgcctgctgaaacggcttctggggccaaagctgaggaggtttctcaagcctcagggccatccccgcctgctgctctggtttaagaggggtctagctcttgctgctttcctgggcctggtcctgtggctgtctctggacacctcccagcggcctgagcaactggtgtccttcgcaggaatctgcgtgttcgtcgctctcctctttgcctgctcaaagcatcattgcgcagtgtcctggagggccgtgtcttggggacttggactgcagtttgtacttggactcctcgtcatcagaacagaaccaggattcattgcgttcgagtggctgggcgagcagatccggatcttcctgagctacacgaaggctggctccagcttcgtgtttggggaggcgctggtcaaggatgtctttgcctttcaggttctgcccatcattgtctttttcagctgtgtcatatccgttctctaccacgtgggcctcatgcagtgggtgatcctgaagattgcctggctgatgcaagtcaccatgggcaccacagccactgagaccctgagtgtggctggaaacatctttgtgagccagaccgaggctccattactgatccggccctacttggcagacatgacactctctgaagtccacgttgtcatgaccggaggttacgccaccattgctggcagcctgctgggtgcctacatctcctttgggatcgatgccacctcgttgattgcagcctctgtgatggctgccccttgtgccttggccctctccaagctggtctacccggaggtggaggagtccaagtttaggagggaggaaggagtgaaactgacctatggagatgctcagaacctcatagaagcagccagcactggggccgccatctccgtgaaggtggtcgccaacatcgctgccaacctgattgcgttcctggctgtgctggactttatcaatgctgccctctcctggctgggagacatggtggacatccaagggctcagcttccagctcatctgctcctacatcctgcggcctgtagccttcttgatgggtgtggcgtgggaggactgcccagtggtagctgagctgctggggatcaagctgtttctgaacgagtttgtggcctatcaagacctctccaagtacaagcaacgccgcctggcaggggccgaggagtgggtcggcgacaggaagcagtggatctccgtcagagctgaagtcctcacgacgtttgccctctgtggatttgccaatttcagctccattgggatcatgctgggaggcttgacctccatggtcccccaacggaagagcgacttctcccagatagtgctccgggcgctcttcacgggagcctgtgtgtccctggtgaacgcctgtatggcagggatcctctacatgcccaggggggctgaagttgactgcatgtccctcttgaacacgaccctcagcagcagtagctttgagatttaccagtgctgccgtgaggccttccagagcgtcaatccagagttcagcccagaggccctggacaactgctgtcggttttacaaccacacgatctgtgcacagtgaggacagaacatgcttgtgcttctgcgcttctgagggctgttctcccccgggaaccatctgtccccaccttccctttcccagagccctcttcagggaagccacaggacttagacccagctcaatcccacaattgggaagggttcatggagtgagtgtgcagagagtgagtgaggacataaggaaggacatgtcccactccatcccccttcctgctcccccatttcctaactcccccagtgtgaattctcagggtcacttctgcctcctcccgtttcccctccacatccaaacagcaccctggtcctctctatcccccctctcctggggtccctcacatgccccttcccttctgttgtgggctgcacaccaaagcctcctcccctccccacttcctaggcactaggatctctctgtggcttcccctgctgggtggtgtcacctctttctctgctttcagagaaacccttcccgcctttcctcagagtgcttcccaaactgaggtcccatggcacactgtcctgggaggcgttcagagggttccatgatggactaggtttggaaccactgggttaaataaacttagagagggctgttta

SEQ ID NO: 183664 - DNA, 1360 bp, Homo sapiens
  Payload ID: 16184
  Gene Symbol: SLC28A1
  Gene Name: solute carrier family 28 (concentrative nucleoside transporter), member 1
  Uniprot ID: O00337
  ENST ID: ENST00000338602
  CDS Start-End: 231-758
agggcccacaacgatgtgaaggttataagctgcactgcatggttgctgctggatgtgttgtgttcctggcttccctctggatgctgacagaaacaagggaatttctgctgaagtgacaaggcaagccagagccaaagcaggttggacccagcttgtccccacagagacgtgtgcttccctctctctctgagagcgacctgttaaccgcaaatacctggaaggtctgggacatggagaacgacccctcgagacgaagagagtccatctctctcacacctgtggccaagggtctggagaacatgggggctgatttcttggaaagcctggaggaaggccagctccctaggagtgacttgagccccgcagagatcaggagcagctggagcgaggcggcgccgaagcccttctccagatggaggaacctgcagccagccctgagagccagaagcttctgcagggagcacatgcagctgtttcgatggatcggcacaggcctgctctgcactgggctctctgccttcctgctggtggcctgcctcctggatttccagagggccctggctctgtttgtcctcacctgtgtggtcctcaccttcctgggccaccgcctgctgaaacggcttctggggccaaagctgaggaggtttctcaagcctcagggccatccccgcctgctgctctggtttaagagggatcccaggccatggagcaaggagggcccgaatcagtacctccctcagatcacctggacagtgtgagacaaaaagccgcagggaccatccctggagggggattcagcaggctcgatcggggtccaggtgctggtatttttcattagcctccaggggattctgatgtagccagcagcgtccttggacaacagtttgagatctgctgcttttcaaactggattccttggagcgctggaaatctcagcgatgtcacagggcaggagagggaggttgtggagggaaaattcagacttcccgcccagcccaccatttcaccaggcagctctaaatttatgtgttttataagccaaggttcacacaaaaaagaaaattcgctgggggaaaaaaacagtttctatggcttaaaaaaaagtctgaagaccaccagtctatttcaatactctattttgttgatgaagaagctggtgaccaaagatacccaaagactaagtcagggggatgcaggggtacaggggtgcctctcactttcccaaagtgagatccacataccacagcaaaatgatttgagccagcctgtggatgaacacatttaaaattttatttataaatacatttactgttacatttgacttctctttattaaatacatttgtgatttatttttgcaa

SEQ ID NO: 183665 - DNA, 2769 bp, Homo sapiens
  Payload ID: 16184
  Gene Symbol: SLC28A1
  Gene Name: solute carrier family 28 (concentrative nucleoside transporter), member 1
  Uniprot ID: O00337
  ENST ID: ENST00000394573
  CDS Start-End: 224-2173
acaacgatgtgaaggttataagctgcactgcatggttgctgctggatgtgttgtgttcctggcttccctctggatgctgacagaaacaagggaatttctgctgaagtgacaaggcaagccagagccaaagcaggttggacccagcttgtccccacagagacgtgtgcttccctctctctctgagagcgacctgttaaccgcaaatacctggaaggtctgggacatggagaacgacccctcgagacgaagagagtccatctctctcacacctgtggccaagggtctggagaacatgggggctgatttcttggaaagcctggaggaaggccagctccctaggagtgacttgagccccgcagagatcaggagcagctggagcgaggcggcgccgaagcccttctccagatggaggaacctgcagccagccctgagagccagaagcttctgcagggagcacatgcagctgtttcgatggatcggcacaggcctgctctgcactgggctctctgccttcctgctggtggcctgcctcctggatttccagagggccctggctctgtttgtcctcacctgtgtggtcctcaccttcctgggccaccgcctgctgaaacggcttctggggccaaagctgaggaggtttctcaagcctcagggccatccccgcctgctgctctggtttaagaggggtctagctcttgctgctttcctgggcctggtcctgtggctgtctctggacacctcccagcggcctgagcaactggtgtccttcgcaggaatctgcgtgttcgtcgctctcctctttgcctgctcaaagcatcattgcgcagtgtcctggagggccgtgtcttggggacttggactgcagtttgtacttggactcctcgtcatcagaacagaaccaggattcattgcgttcgagtggctgggcgagcagatccggatcttcctgagctacacgaaggctggctccagcttcgtgtttggggaggcgctggtcaaggatgtctttgcctttcaggttctgcccatcattgtctttttcagctgtgtcatatccgttctctaccacgtgggcctcatgcagtgggtgatcctgaagattgcctggctgatgcaagtcaccatgggcaccacagccactgagaccctgagtgtggctggaaacatctttgtgagccagaccgaggctccattactgatccggccctacttggcagacatgacactctctgaagtccacgttgtcatgaccggaggttacgccaccattgctggcagcctgctgggtgcctacatctcctttgggatcgatgccacctcgttgattgcagcctctgtgatggctgccccttgtgccttggccctctccaagctggtctacccggaggtggaggagtccaagtttaggagggaggaaggagtgaaactgacctatggagatgctcagaacctcatagaagcagccagcactggggccgccatctccgtgaaggtggtcgccaacatcgctgccaacctgattgcgttcctggctgtgctggactttatcaatgctgccctctcctggctgggagacatggtggacatccaagggctcagcttccagctcatctgctcctacatcctgcggcctgtagccttcttgatgggtgtggcgtgggaggactgcccagtggtagctgagctgctggggatcaagctgtttctgaacgagtttgtggcctatcaagacctctccaagtacaagcaacgccgcctggcaggggccgaggagtgggtcggcgacaggaagcagtggatctccgtcagagctgaagtcctcacgacgtttgccctctgtggatttgccaatttcagctccattgggatcatgctgggaggcttgacctccatggtcccccaacggaagagcgacttctcccagatagtgctccgggcgctcttcacgggagcctgtgtgtccctggtgaacgcctgtatggcagggatcctctacatgcccaggggggctgaagttgactgcatgtccctcttgaacacgaccctcagcagcagtagctttgagatttaccagtgctgccgtgaggccttccagagcgtcaatccagagttcagcccagaggccctggacaactgctgtcggttttacaaccacacgatctgtgcacagtgaggacagaacatgcttgtgcttctgcgcttctgagggctgttctcccccgggaaccatctgtccccaccttccctttcccagagccctcttcagggaagccacaggacttagacccagctcaatcccacaattgggaagggttcatggagtgagtgtgcagagagtgagtgaggacataaggaaggacatgtcccactccatcccccttcctgctcccccatttcctaactcccccagtgtgaattctcagggtcacttctgcctcctcccgtttcccctccacatccaaacagcaccctggtcctctctatcccccctctcctggggtccctcacatgccccttcccttctgttgtgggctgcacaccaaagcctcctcccctccccacttcctaggcactaggatctctctgtggcttcccctgctgggtggtgtcacctctttctctgctttcagagaaacccttcccgcctttcctcagagtgcttcccaaactgaggtcccatggcacactgtcctgggaggcgttcagagggttccatgatggactaggtttggaaccactgggttaaataaacttagagagggctgttta

SEQ ID NO: 183666 - DNA, 2155 bp, Homo sapiens
  Payload ID: 16184
  Gene Symbol: SLC28A1
  Gene Name: solute carrier family 28 (concentrative nucleoside transporter), member 1
  ENST ID: ENST00000538177
  CDS Start-End: 108-1559
acaacgatgtgaaggttataagctgcactgcatggttgctgctggatgtgttgtgttcctggcttccctctggatgctgacagaaacaaggctggaaggtctgggacatggagaacgacccctcgagacgaagagagtccatctctctcacacctgtggccaagggtctggagaacatgggggctgatttcttggaaagcctggaggaaggccagctccctaggagtgacttgagccccgcagagatcaggagcagctggagcgaggcggcgccgaagcccttctccagatggaggaacctgcagccagccctgagagccagaagcttctgcagggagcacatgcagctgtttcgatggatcggcacaggcctgctctgcactgggctctctgccttcctgctggtggcctgcctcctggatttccagagggccctggctctgtttgtcctcacctgtgtggtcctcaccttcctgggccaccgcctgctgaaacggcttctggggccaaagctgaggaggtttctcaagcctcagggccatccccgcctgctgctctggtttaagaggggtctagctcttgctgctttcctgggcctggtcctgtggctgtctctggacacctcccagcggcctgagcaactggtgtccttcgcaggaatctgcgtgttcgtcgctctcctctttgcctgctcaaagcatcattgcgcagtgtcctggagggccgtgtcttggggacttggactgcagtttgtacttggactcctcgtcatcagaacagaaccaggattcattgcgttcgagtggctgggcgagcagatccggatcttcctgagctacacgaaggctggctccagcttcgtgtttggggaggcgctggtcaaggatgtctttgcctttcaggttctgcccatcattgtctttttcagctgtgtcatatccgttctctaccacgtgggcctcatgcagtgggtgatcctgaagattgcctggctgatgcaagtcaccatgggcaccacagccactgagaccctgagtgtggctggaaacatctttgtgagccagaccgaggctccattactgatccggccctacttggcagacatgacactctctgaagtccacgttgtcatgaccggaggttacgccaccattgctggcagcctgctgggtgcctacatctcctttggggtcagagctgaagtcctcacgacgtttgccctctgtggatttgccaatttcagctccattgggatcatgctgggaggcttgacctccatggtcccccaacggaagagcgacttctcccagatagtgctccgggcgctcttcacgggagcctgtgtgtccctggtgaacgcctgtatggcagggatcctctacatgcccaggggggctgaagttgactgcatgtccctcttgaacacgaccctcagcagcagtagctttgagatttaccagtgctgccgtgaggccttccagagcgtcaatccagagttcagcccagaggccctggacaactgctgtcggttttacaaccacacgatctgtgcacagtgaggacagaacatgcttgtgcttctgcgcttctgagggctgttctcccccgggaaccatctgtccccaccttccctttcccagagccctcttcagggaagccacaggacttagacccagctcaatcccacaattgggaagggttcatggagtgagtgtgcagagagtgagtgaggacataaggaaggacatgtcccactccatcccccttcctgctcccccatttcctaactcccccagtgtgaattctcagggtcacttctgcctcctcccgtttcccctccacatccaaacagcaccctggtcctctctatcccccctctcctggggtccctcacatgccccttcccttctgttgtgggctgcacaccaaagcctcctcccctccccacttcctaggcactaggatctctctgtggcttcccctgctgggtggtgtcacctctttctctgctttcagagaaacccttcccgcctttcctcagagtgcttcccaaactgaggtcccatggcacactgtcctgggaggcgttcagagggttccatgatggactaggtttggaaccactgggttaaataaacttagagagggctgttta

SEQ ID NO: 183667 - DNA, 4374 bp, Homo sapiens
  Payload ID: 16185
  Gene Symbol: SLC28A2
  Gene Name: solute carrier family 28 (concentrative nucleoside transporter), member 2
  Uniprot ID: O43868
  ENST ID: ENST00000347644
  CDS Start-End: 66-2042
tttcagtccttcactgaggagccagagggaatcaattccacaagctgggttgaggagaacaggagatggagaaagcaagtggaagacagtccattgctctgtccacagtggagactggcacagtgaacccggggctggagctcatggaaaaagaagtagagcctgagggaagcaagaggactgacgcacaaggacacagcctgggggatggactgggcccttccacttaccagaggaggagtcggtggcctttcagcaaagcaagaagtttctgcaaaacacacgccagcttgttcaagaagatcctgttgggcctgttgtgtttggcctatgctgcctatctcctggcagcttgcatcttgaatttccagagggcactggccttgtttgtcatcacctgcttggtgatctttgtcctggttcactcgtttttgaaaaagctcctgggcaaaaaattaacaagatgtctgaagccctttgaaaactcccgcctgaggctttggacgaaatgggtgtttgcaggagtctccttggttggccttatactgtggttggctttagacacagcccaaaggccagagcagctgatcccctttgcaggaatctgcatgttcatccttatcctctttgcctgctccaaacaccacagcgcagtgtcctggaggacagtgttttcgggcctaggtcttcaatttgtctttgggatcttggtcatcagaactgatcttggatatactgtatttcagtggctgggagagcaggtccagattttcctgaactacactgtggccggctccagttttgtctttggggatacactggtcaaggatgtctttgcttttcaggccttaccaatcatcattttctttggatgtgtggtgtccattctctactacctgggccttgtgcaatgggtagttcagaaggtcgcctggtttttacaaatcactatgggcaccactgctacagagaccctggctgtggcaggaaacatctttgtgggtatgacagaggcacctctgctcatccgtccctaccttggggacatgacactctctgaaatccatgcggtgatgactggagggtttgccaccatttctggcactgtgctgggagccttcatagcctttggggttgatgcatcatccctgatttctgcctctgtgatggccgccccttgtgctctcgcctcatcaaagctagcgtatccggaagtggaggagtccaagttcaagagtgaggagggggtaaagctgccccgtgggaaggagaggaatgtcctggaagctgccagcaacggagccgtagatgccataggccttgctactaatgtagcagccaacctgattgcctttttggctgtgttggccttcatcaatgctgccctctcctggctgggggaattggtggacatacaggggctcactttccaggtcatctgctcctatctcctaaggcccatggttttcatgatgggtgtagagtggacagactgtccaatggtggctgagatggtgggaatcaagttcttcataaatgagtttgtggcttatcagcaactgtctcaatacaagaacaaacgtctctctggaatggaggagtggattgagggagagaaacagtggatttctgtgagagctgaaatcattacaacattttcactctgtggatttgccaatcttagttccataggaatcacacttggaggcttgacatcaatagtacctcaccggaagagtgacttgtccaaggttgtggtcagggccctcttcacaggggcctgtgtatcccttatcagtgcctgtatggcaggaatcctctatgtccccaggggagctgaagctgactgtgtctccttcccaaacacaagtttcaccaatagaacctatgagacctacatgtgctgcagagggctctttcagagtacttctctgaatggcaccaaccctccttctttttctggtccctgggaagataaggagttcagtgctatggcccttactaactgctgtggattctacaacaataccgtctgtgcctaaggctgcttgatctatttctataacagttttgatcttaaaagctttgtgattgcaaaggtgtttatgtactcagggtgcccacaactcactcaccaagatgtttaacagtaagtaacagtaaatgtaaaagattcattttgggccgggctcagtggctcatgcctgtaatcccagcactttgggaggccgaggcgggcggatcacaaggtcaggagatcgagaccatcctggctaacacagtgaaaccccgtctctactaaaaatacaaaaaattagccgggagtggtgtcgggcgactgtagtcccagctactcgcgaggctgaggcaggagaatggcgtgaatccgggaggcggagcttgcagcgagccaagatcgcgccactgcactccagcctgggtgacagagcgagactctgtctcaaaaaaaaaaaaaaaaaaaaagattcattttggttcgctgtatcccaataacgaaaaatagcttttgtttttccattatttggctgaaccaaaaaatggcattcctcatgggccctgcctgaactttcatttgaaaaaataagtattactgtccaacaatgatagactggattaagaaaatgtggcacatatacaccatggaatactatgcagccataaaaaatgatgagctcatgtcctttgcagggacatggatgaaattggaaatcatcattctcagtaaactatcgcaaggacaaaaaaccaaacaccacatgttctcactcatagatgggaattgaacaatgagaacacatggacacaggaaggggaacatcacactctggggactgttgtggggtgaggggaagggggagggatagcattaggagatatacctaatgctaaatgacgagttaatgggtgcagcacactagcatggcacatgtatacatatgtaactaacctgcatattgtgcacatgtaccctaaaacttaaagtataataataataataaaagaaaaaacttcataaaataaagtgaagcacccaccaaaaaataaaataaataaaataaataaataaaagaaaaaataagtattactatgtcaaaaaagtcttacaaatcatgcttctagttgccatcttaaaaattatgtgatgcagtgtgctataaatgtgatttagtatgtaatttgcctgggacgggggagaagctacatttattggcattgtggatgagctggatttatattactgatgttacctttgaaaggtatatgaatatttaatgataagatttttctggttgtcaaacatttgtaaatctgcaaacttcttaacaacattacacagtaaacaaaaaatacttcctgtatactaaggaagacttctaaggaatatccatttcttaaaggccattactttgttgtagtattctgctttagtgctagccacatttgctccaagtttatggggaagcctttaaaacagtaattttcagtgggaaggggccaattttgcttttcagaggacatctgacagtgtgtctccagacattattggtgattaaagtgggaggatgctactgacatctagtgagtagaggccaatattgctactaaaattcctataaccaaaggtcagctctcccacaacgaagaattacctggtcccaaacgtcaattgtgctgagactcagaaactctgattcaaaatattttagatatttattatatttaatattatttattatattaatattatagccttaaggaagggtttcaaaaggatacaggagttcctcaaaaagttaaacacagaattaccatagagccccacaattccactcctacatacacattcaaaagaatcaaaactaagttctcaaacaagtacatgtacatgcatgttcacagtagcactattcaaaatagccaaaaattggaaacagtctaaatgtccatcaatggataaattgtgttacatacacacaatggaattttattcacccattaaaaaaagaagtactgatttatgctatgtagaggcaccccgaaaacatgctaaacgaaagaagctagacacaaaagtcttattattgcatgattccatttagatgaaatattcagaatatataaatccatagagacagaagggagatggtggttgccagggcctggggaaggagggattagagagtgactccttaacgagtttggggttttcctttggggtgatgggaatgttttggaacgagatagaggtggtggttgtgcaacattgtgaatattatgtcactgaattgttcactttaaaatggctgtttatgttatgtgaatttcacctcaataaaaaaaatttttagaagg

SEQ ID NO: 183668 - DNA, 769 bp, Homo sapiens
  Payload ID: 16185
  Gene Symbol: SLC28A2
  Gene Name: solute carrier family 28 (concentrative nucleoside transporter), member 2
  ENST ID: ENST00000559924
  CDS Start-End: 1-215
cctatgctgcctatctcctggcagcttgcatcttgaatttccagagggcactggccttgtttgtcatcacctgcttggtgatctttgtcctggttcactcgtttttgaaaaagctcctgggcaaaaaattaacaagatgtctgaagccctttgaaaactcccgcctgaggctttggacgaaatggtgtcctggaggacagtgttttcgggcctaggtcttcaatttgtctttgggatcttggtcatcagaactgatcttggatatactgtatttcagtggctgggagagcaggtccagattttcctgaactacactgtggccggctccagttttgtctttggggatacactggtcaaggatgtctttgcttttcaggccttaccaatcatcattttctttggatgtgtggtgtccattctctactacctgggccttgtgcaatgggtagttcagaaggtttctgtattcttctaggtcgcctggtttttacaaatcactatgggcaccactgctacagagaccctggctgtggcaggaaacatctttgtgggtatgacagaggcacctctgctcatccgtccctaccttggggacatgacactctctgaaatccatgcggtgatgactggagggtttgccaccatttctggcactgtgctgggagccttcatagcctttggggttgatgcatcatccctgatttctgcctctgtgatggccgccccttgtgctctcgcctcatcaaagctagcgtatccggaagtggag

SEQ ID NO: 183669 - DNA, 581 bp, Homo sapiens
  Payload ID: 16185
  Gene Symbol: SLC28A2
  Gene Name: solute carrier family 28 (concentrative nucleoside transporter), member 2
  ENST ID: ENST00000560438
  CDS Start-End: 1-581
agtccttcactgaggagccagagggaatcaattccacaagctggggaaaaagaagtagagcctgagggaagcaagaggactgacgcacaaggacacagcctgggggatggactgggcccttccacttaccagaggaggagtcggtggcctttcagcaaagcaagaagtttctgcaaaacacacgccagcttgttcaagaagatcctgttgggcctgttgtgtttggcctatgctgcctatctcctggcagcttgcatcttgaatttccagagggcactggccttgtttgtcatcacctgcttggtgatctttgtcctggttcactcgtttttgaaaaagctcctgggcaaaaaattaacaagatgtctgaagccctttgaaaactcccgcctgaggctttggacgaaatgggtgtttgcaggagtctccttggttggccttatactgtggttggctttagacacagcccaaaggccagagcagctgatcccctttgcaggaatctgcatgttcatccttatcctctttgcctgctccaaacaccacagcgcagtgtcctggaggacagtgttttcgggcct

SEQ ID NO: 183670 - DNA, 4887 bp, Homo sapiens
  Payload ID: 16186
  Gene Symbol: SLC28A3
  Gene Name: solute carrier family 28 (concentrative nucleoside transporter), member 3
  Uniprot ID: Q9HAS3
  ENST ID: ENST00000376238
  CDS Start-End: 51-2126
cccaggtacaaaggacctccagaccagagccagccagcagcaaaaagagcatggagctgaggagtacagcagcccccagagctgagggctacagcaacgtgggcttccagaatgaagaaaactttcttgagaacgagaacacatcaggaaacaactcaataagaagcagagctgtgcaaagcagggagcacacaaacaccaaacaggatgaagaacaggtcacagttgagcaggattctccaagaaacagagaacacatggaggatgatgatgaggagatgcaacaaaaagggtgtttggaaaggaggtatgacacagtatgtggtttctgtaggaaacacaaaacaactcttcggcacatcatctggggcattttattagcaggttatctggttatggtgatttcggcctgtgtgctgaactttcacagagcccttcctctttttgtgatcaccgtggctgccatcttctttgttgtctgggatcacctgatggccaaatacgaacatcgaattgatgagatgctgtctcctggcagaaggcttctaaacagccattggttctggctgaagtgggtgatctggagctccctggtcctagcagttattttctggttggcctttgacactgccaaattgggtcaacagcagctggtgtccttcggtgggctcataatgtacattgtcctgttatttctattttccaagtacccaaccagagtttactggagacctgtcttatggggaatcgggctacagtttcttcttgggctcttgattctaaggactgaccctggatttatagcttttgattggttgggcagacaagttcagacttttctggagtacacagatgctggtgcttcatttgtctttggtgagaaatacaaagaccacttctttgcatttaaggtcctgccgatcgtggttttcttcagcactgtgatgtccatgctgtactacctgggactgatgcagtggattattagaaaggttggatggatcatgctagttactacgggatcatctcctattgaatctgtagttgcttctggcaatatatttgttggacaaacggagtctccactgctggtccgaccatatttaccttacatcaccaagtctgaactccacgccatcatgaccgccgggttctctaccattgctggaagcgtgctaggtgcatacatttcttttggggttccatcctcccacttgttaacagcgtcagttatgtcagcacctgcgtcattggctgctgctaaactcttttggcctgagacagaaaaacctaaaataaccctcaagaatgccatgaaaatggaaagtggtgattcagggaatcttctagaagctgcaacacagggagcatcctcctccatctccctggtggccaacatcgctgtgaatctgattgccttcctggccctgctgtcttttatgaattcagccctgtcctggtttggaaacatgtttgactacccacagctgagttttgagctaatctgctcctacatcttcatgcccttttccttcatgatgggagtggaatggcaggacagctttatggttgccagactcataggttataagaccttcttcaatgaatttgtggcttatgagcacctctcaaaatggatccacttgaggaaagaaggtggacccaaatttgtaaacggtgtgcagcaatatatatcaattcgttctgagataatcgccacttacgctctctgtggttttgccaatatcgggtccctaggaatcgtgatcggcggactcacatccatggctccttccagaaagcgtgatatcgcctcgggggcagtgagagctctgattgcggggaccgtggcctgcttcatgacagcctgcatcgcaggcatactctccagcactcctgtggacatcaactgccatcacgttttagagaatgccttcaactccactttccctggaaacacaaccaaggtgatagcttgttgccaaagtctgttgagcagcactgttgccaagggtcctggtgaagtcatcccaggaggaaaccacagtctgtattctttgaagggctgctgcacattgttgaatccatcgacctttaactgcaatgggatctctaatacattttgaggtcagccacttctccagtggaactctgaagtacagatgctgaattttctgctttggaaagaaaaaaaaaagaagctattgtccacagattgatgcttccataatggaatcagctttaattgcaaggaatgaagaaaaacaagagtggaccttcaaagctacaacattttcctcctcccctccctccccaccagccccttccccaccaagaactgctatgatgtcccaaagtgaggtgttgttgattccagtctcaatgggattttctgactttaatgtttgcaaggcatttcaccagaatacagctataaacggccgctcccaacaactgggctctgactcacccacacccacttagtgtccactaagtagtccagggtgactcagtttaagcacatctcaggtgaggtcactctgcatataccttggcttacctgaaatagcctgaacttgaatctcacataagggaaaactagtcatcaatcaccaactcattgactaccctcaggaagtcctgcagaaatcaagagtccttgaggagaacacgtggatcataccaaaaccagggtttaaatccattctgcttaagagttctatcagtcagtttaaccataaattacgctacagaaacaaacaacccaaaaacctcagtggcttacagatttatttttcactcacatgtttgtaatgatccatcttggttgtaatccatattgcttcagcacccagtctaaaggagcagcctctaaggggggcatgttggtcttaagagggaaaagaaaggtgggaaccacatgatggctctttcatcttccgctaggaaatgataccctttacttccatgacattccattagccaaaacaagtcctgtgacaggcacgatgtcagtcaccacagttaaattatcctgtcatagggagggatagtgaatattttgcagaagtaatatgatacaccataagggtacataatatccatgtctcccttcaaggagccatcctgttgtaggccataacggtaggcctattcatctgcacatttggtaatgtattcctggtgacaaagcagctactcttcaatcaaaagccgtgtaagaagcagttgaggaaaaaaagtcctggttgagctctgaaaaccttgcgttgataatttcattgaccaggatggcatcagtatcaaacttgaagaatgggtgtcagtgtctaagaaaaagattccagagacaatggtggtgtgctctttaacgaaatgcccatcaccactgctcttaatagcatgaagaccacatgctgtgagaaaacacaaacatcaattaccaagtcaagaaacagacactgaatgtgaaaaaggttttgaaataccttaagtaatttattttgtttctatttttccttctgtttgtgtacaagagtaatttaaaagaaaaagctatgtgaaaatagttggggttttttgtgtgttttgttttttgtggtggtgaaggaggaggcctaatgtccagaggactgtttatccctgaagtatgatatactaaaatatttcttattatttgtatcaattttccttggagctcaatgtgcccttgcagtcttcagactttattttaggaaaatatatttgcatgttttccccccattctcaatgtttggtgtcctggttcatcataccccacagaatgttatgtttatgtatcataccattcctctgtggacatgcatttactttgtttacaggttttggtttgggggttctctttttcctactctggacagtgcatgtacatttactttgcatgctggtgcttttttttctatagcaatagtgtctgatagacatatgcaagtcacatgtaatttaagatctagtagccacgctaaaaaacaagtaaaattaattttaatatatttaactcaatacattggagatattatttcagtaagatatttttcattcttatgaaactaagtctgtctggtttgcatatctcagttgagacactaaagttttactgataatacttaatccatgtttagatttcataaaatctaaatttgcaaagtaaatttacatacccatgttggtctaaatgtgcttaaaagttttccaataactgaaatgagtatcagttttaaatttaaaaatttgttacttggttactccatatttcaggtattagtggctaccatattggtcagagcagattcataggatgatttcccaggtttgaagtgtgtgtatatttctggtattataagatgtcagactggtttttggagaaatatgttgtcttaatttttacctgctttgatatgacctttctgtgtgtacgtgtgacatttctttataaatgcaacatgttcacataggtcctacgttgattccttattaatgctgtgcatccttgaactgagaaagggggtgttattcctgagctatattataagaggatagtaaaggccaaggaccaggaaaatgagctggttaagcctcttgagcttgttacccccagaaacctcaccaataccctgtgaacgtcgtaagtggcccttctcccagtgaaacaacctaatggaggtttttggtgcatggtgatgtttttattcctctttagtagacatagaagctggaggctgcttgtcttccccagtttctccttcacccatgtacatatagtgggcaaagatggcatgcctatgtttttcagctgtttgagcccgctcactgttgacagattgttgctgttggtctgtgctccccaac

SEQ ID NO: 183671 - DNA, 2159 bp, Homo sapiens
  Payload ID: 16187
  Gene Symbol: SLC29A1
  Gene Name: solute carrier family 29 (equilibrative nucleoside transporter), member 1
  Uniprot ID: Q99808
  ENST ID: ENST00000371708
  CDS Start-End: 176-1546
agggggtcttactggactcctccactggcctgttctgtcagccctgccccctctccccctaagagcctgaggaggcctatggcagggccaagacagggcctcacactgttcctgcccccagcaggcccctgagggagggagctgtcagccagggaaaaccgagaacaccatcaccatgacaaccagtcaccagcctcaggacagatacaaagctgtctggcttatcttcttcatgctgggtctgggaacgctgctcccgtggaattttttcatgacggccactcagtatttcacaaaccgcctggacatgtcccagaatgtgtccttggtcactgctgaactgagcaaggacgcccaggcgtcagccgcccctgcagcacccttgcctgagcggaactctctcagtgccatcttcaacaatgtcatgaccctatgtgccatgctgcccctgctgttattcacctacctcaactccttcctgcatcagaggatcccccagtccgtacggatcctgggcagcctggtggccatcctgctggtgtttctgatcactgccatcctggtgaaggtgcagctggatgctctgcccttctttgtcatcaccatgatcaagatcgtgctcattaattcatttggtgccatcctgcagggcagcctgtttggtctggctggccttctgcctgccagctacacggcccccatcatgagtggccagggcctagcaggcttctttgcctccgtggccatgatctgcgctattgccagtggctcggagctatcagaaagtgccttcggctactttatcacagcctgtgctgttatcattttgaccatcatctgttacctgggcctgccccgcctggaattctaccgctactaccagcagctcaagcttgaaggacccggggagcaggagaccaagttggacctcattagcaaaggagaggagccaagagcaggcaaagaggaatctggagtttcagtctccaactctcagcccaccaatgaaagccactctatcaaagccatcctgaaaaatatctcagtcctggctttctctgtctgcttcatcttcactatcaccattgggatgtttccagccgtgactgttgaggtcaagtccagcatcgcaggcagcagcacctgggaacgttacttcattcctgtgtcctgtttcttgactttcaatatctttgactggttgggccggagcctcacagctgtattcatgtggcctgggaaggacagccgctggctgccaagcctggtgctggcccggctggtgtttgtgccactgctgctgctgtgcaacattaagccccgccgctacctgactgtggtcttcgagcacgatgcctggttcatcttcttcatggctgcctttgccttctccaacggctacctcgccagcctctgcatgtgcttcgggcccaagaaagtgaagccagctgaggcagagaccgcaggagccatcatggccttcttcctgtgtctgggtctggcactgggggctgttttctccttcctgttccgggcaattgtgtgacaaaggatggacagaaggactgcctgcctccctccctgtctgcctcctgccccttccttctgccaggggtgatcctgagtggtctggcggttttttcttctaactgacttctgctttccacggcgtgtgctgggcccggatctccaggccctggggagggagcctctggacggacagtggggacattgtgggtttggggctcagagtcgagggacggggtgtagcctcggcatttgcttgagtttctccactcttggctctgactgatccctgcttgtgcaggccagtggaggctcttgggcttggagaacacgtgtgtctctgtgtatgtgtctgtgtgtctgcgtccgtgtctgtcagactgtctgcctgtcctggggtggctaggagctgggtctgaccgttgtatggtttgacctgatatactccattctcccctgcgcctcctcctctgtgttctctccatgtccccctcccaactccccatgcccagttcttacccatcatgcaccctgtacagttgccacgttactgccttttttaaaaatatatttgacagaaaccaggtgccttcagaggctctctgatttaaataaacctttcttgttttttt

SEQ ID NO: 183672 - DNA, 2168 bp, Homo sapiens
  Payload ID: 16187
  Gene Symbol: SLC29A1
  Gene Name: solute carrier family 29 (equilibrative nucleoside transporter), member 1
  Uniprot ID: Q99808
  ENST ID: ENST00000371713
  CDS Start-End: 185-1555
ggagcctgaggaccctgcggggaccgggacccaagctgggcggggcggcctggctcccgggcctaaaacaggctgcggtcacgttgacctccgcaaggggcaggcgagtggacgggtgatccccatcgatctggcccctgagggagggagctgtcagccagggaaaaccgagaacaccatcaccatgacaaccagtcaccagcctcaggacagatacaaagctgtctggcttatcttcttcatgctgggtctgggaacgctgctcccgtggaattttttcatgacggccactcagtatttcacaaaccgcctggacatgtcccagaatgtgtccttggtcactgctgaactgagcaaggacgcccaggcgtcagccgcccctgcagcacccttgcctgagcggaactctctcagtgccatcttcaacaatgtcatgaccctatgtgccatgctgcccctgctgttattcacctacctcaactccttcctgcatcagaggatcccccagtccgtacggatcctgggcagcctggtggccatcctgctggtgtttctgatcactgccatcctggtgaaggtgcagctggatgctctgcccttctttgtcatcaccatgatcaagatcgtgctcattaattcatttggtgccatcctgcagggcagcctgtttggtctggctggccttctgcctgccagctacacggcccccatcatgagtggccagggcctagcaggcttctttgcctccgtggccatgatctgcgctattgccagtggctcggagctatcagaaagtgccttcggctactttatcacagcctgtgctgttatcattttgaccatcatctgttacctgggcctgccccgcctggaattctaccgctactaccagcagctcaagcttgaaggacccggggagcaggagaccaagttggacctcattagcaaaggagaggagccaagagcaggcaaagaggaatctggagtttcagtctccaactctcagcccaccaatgaaagccactctatcaaagccatcctgaaaaatatctcagtcctggctttctctgtctgcttcatcttcactatcaccattgggatgtttccagccgtgactgttgaggtcaagtccagcatcgcaggcagcagcacctgggaacgttacttcattcctgtgtcctgtttcttgactttcaatatctttgactggttgggccggagcctcacagctgtattcatgtggcctgggaaggacagccgctggctgccaagcctggtgctggcccggctggtgtttgtgccactgctgctgctgtgcaacattaagccccgccgctacctgactgtggtcttcgagcacgatgcctggttcatcttcttcatggctgcctttgccttctccaacggctacctcgccagcctctgcatgtgcttcgggcccaagaaagtgaagccagctgaggcagagaccgcaggagccatcatggccttcttcctgtgtctgggtctggcactgggggctgttttctccttcctgttccgggcaattgtgtgacaaaggatggacagaaggactgcctgcctccctccctgtctgcctcctgccccttccttctgccaggggtgatcctgagtggtctggcggttttttcttctaactgacttctgctttccacggcgtgtgctgggcccggatctccaggccctggggagggagcctctggacggacagtggggacattgtgggtttggggctcagagtcgagggacggggtgtagcctcggcatttgcttgagtttctccactcttggctctgactgatccctgcttgtgcaggccagtggaggctcttgggcttggagaacacgtgtgtctctgtgtatgtgtctgtgtgtctgcgtccgtgtctgtcagactgtctgcctgtcctggggtggctaggagctgggtctgaccgttgtatggtttgacctgatatactccattctcccctgcgcctcctcctctgtgttctctccatgtccccctcccaactccccatgcccagttcttacccatcatgcaccctgtacagttgccacgttactgccttttttaaaaatatatttgacagaaaccaggtgccttcagaggctctctgatttaaataaacctttcttgttttttt

SEQ ID NO: 183673 - DNA, 2275 bp, Homo sapiens
  Payload ID: 16187
  Gene Symbol: SLC29A1
  Gene Name: solute carrier family 29 (equilibrative nucleoside transporter), member 1
  Uniprot ID: Q99808
  ENST ID: ENST00000371724
  CDS Start-End: 292-1662
ggagcctgaggaccctgcggggaccgggacccaagctgggcggggcggcctggctcccgggcctaaaacaggctgcggtcacgttgacctccgcaaggggcaggcgagtggacgggtgatccccatcgatctggagcccgtggacaaggcccactgcctgagcctgaactaggagcacctcctagggactgcccaggcttgctctgctctgacccttctgctggccagtctgggcacctggcccctgagggagggagctgtcagccagggaaaaccgagaacaccatcaccatgacaaccagtcaccagcctcaggacagatacaaagctgtctggcttatcttcttcatgctgggtctgggaacgctgctcccgtggaattttttcatgacggccactcagtatttcacaaaccgcctggacatgtcccagaatgtgtccttggtcactgctgaactgagcaaggacgcccaggcgtcagccgcccctgcagcacccttgcctgagcggaactctctcagtgccatcttcaacaatgtcatgaccctatgtgccatgctgcccctgctgttattcacctacctcaactccttcctgcatcagaggatcccccagtccgtacggatcctgggcagcctggtggccatcctgctggtgtttctgatcactgccatcctggtgaaggtgcagctggatgctctgcccttctttgtcatcaccatgatcaagatcgtgctcattaattcatttggtgccatcctgcagggcagcctgtttggtctggctggccttctgcctgccagctacacggcccccatcatgagtggccagggcctagcaggcttctttgcctccgtggccatgatctgcgctattgccagtggctcggagctatcagaaagtgccttcggctactttatcacagcctgtgctgttatcattttgaccatcatctgttacctgggcctgccccgcctggaattctaccgctactaccagcagctcaagcttgaaggacccggggagcaggagaccaagttggacctcattagcaaaggagaggagccaagagcaggcaaagaggaatctggagtttcagtctccaactctcagcccaccaatgaaagccactctatcaaagccatcctgaaaaatatctcagtcctggctttctctgtctgcttcatcttcactatcaccattgggatgtttccagccgtgactgttgaggtcaagtccagcatcgcaggcagcagcacctgggaacgttacttcattcctgtgtcctgtttcttgactttcaatatctttgactggttgggccggagcctcacagctgtattcatgtggcctgggaaggacagccgctggctgccaagcctggtgctggcccggctggtgtttgtgccactgctgctgctgtgcaacattaagccccgccgctacctgactgtggtcttcgagcacgatgcctggttcatcttcttcatggctgcctttgccttctccaacggctacctcgccagcctctgcatgtgcttcgggcccaagaaagtgaagccagctgaggcagagaccgcaggagccatcatggccttcttcctgtgtctgggtctggcactgggggctgttttctccttcctgttccgggcaattgtgtgacaaaggatggacagaaggactgcctgcctccctccctgtctgcctcctgccccttccttctgccaggggtgatcctgagtggtctggcggttttttcttctaactgacttctgctttccacggcgtgtgctgggcccggatctccaggccctggggagggagcctctggacggacagtggggacattgtgggtttggggctcagagtcgagggacggggtgtagcctcggcatttgcttgagtttctccactcttggctctgactgatccctgcttgtgcaggccagtggaggctcttgggcttggagaacacgtgtgtctctgtgtatgtgtctgtgtgtctgcgtccgtgtctgtcagactgtctgcctgtcctggggtggctaggagctgggtctgaccgttgtatggtttgacctgatatactccattctcccctgcgcctcctcctctgtgttctctccatgtccccctcccaactccccatgcccagttcttacccatcatgcaccctgtacagttgccacgttactgccttttttaaaaatatatttgacagaaaccaggtgccttcagaggctctctgatttaaataaacctttcttgttttttt

SEQ ID NO: 183674 - DNA, 2258 bp, Homo sapiens
  Payload ID: 16187
  Gene Symbol: SLC29A1
  Gene Name: solute carrier family 29 (equilibrative nucleoside transporter), member 1
  Uniprot ID: Q99808
  ENST ID: ENST00000371731
  CDS Start-End: 275-1645
cagcgcgggagcagtgcttctgcggcaggcttctcagaatggggccccatgaagcctgagggactctctcctgataacaccctgtgccacctttttcattctggatccgcacccaggagcccgtggacaaggcccactgcctgagcctgaactaggagcacctcctagggactgcccaggcttgctctgctctgacccttctgctggccagtctgggcacctggcccctgagggagggagctgtcagccagggaaaaccgagaacaccatcaccatgacaaccagtcaccagcctcaggacagatacaaagctgtctggcttatcttcttcatgctgggtctgggaacgctgctcccgtggaattttttcatgacggccactcagtatttcacaaaccgcctggacatgtcccagaatgtgtccttggtcactgctgaactgagcaaggacgcccaggcgtcagccgcccctgcagcacccttgcctgagcggaactctctcagtgccatcttcaacaatgtcatgaccctatgtgccatgctgcccctgctgttattcacctacctcaactccttcctgcatcagaggatcccccagtccgtacggatcctgggcagcctggtggccatcctgctggtgtttctgatcactgccatcctggtgaaggtgcagctggatgctctgcccttctttgtcatcaccatgatcaagatcgtgctcattaattcatttggtgccatcctgcagggcagcctgtttggtctggctggccttctgcctgccagctacacggcccccatcatgagtggccagggcctagcaggcttctttgcctccgtggccatgatctgcgctattgccagtggctcggagctatcagaaagtgccttcggctactttatcacagcctgtgctgttatcattttgaccatcatctgttacctgggcctgccccgcctggaattctaccgctactaccagcagctcaagcttgaaggacccggggagcaggagaccaagttggacctcattagcaaaggagaggagccaagagcaggcaaagaggaatctggagtttcagtctccaactctcagcccaccaatgaaagccactctatcaaagccatcctgaaaaatatctcagtcctggctttctctgtctgcttcatcttcactatcaccattgggatgtttccagccgtgactgttgaggtcaagtccagcatcgcaggcagcagcacctgggaacgttacttcattcctgtgtcctgtttcttgactttcaatatctttgactggttgggccggagcctcacagctgtattcatgtggcctgggaaggacagccgctggctgccaagcctggtgctggcccggctggtgtttgtgccactgctgctgctgtgcaacattaagccccgccgctacctgactgtggtcttcgagcacgatgcctggttcatcttcttcatggctgcctttgccttctccaacggctacctcgccagcctctgcatgtgcttcgggcccaagaaagtgaagccagctgaggcagagaccgcaggagccatcatggccttcttcctgtgtctgggtctggcactgggggctgttttctccttcctgttccgggcaattgtgtgacaaaggatggacagaaggactgcctgcctccctccctgtctgcctcctgccccttccttctgccaggggtgatcctgagtggtctggcggttttttcttctaactgacttctgctttccacggcgtgtgctgggcccggatctccaggccctggggagggagcctctggacggacagtggggacattgtgggtttggggctcagagtcgagggacggggtgtagcctcggcatttgcttgagtttctccactcttggctctgactgatccctgcttgtgcaggccagtggaggctcttgggcttggagaacacgtgtgtctctgtgtatgtgtctgtgtgtctgcgtccgtgtctgtcagactgtctgcctgtcctggggtggctaggagctgggtctgaccgttgtatggtttgacctgatatactccattctcccctgcgcctcctcctctgtgttctctccatgtccccctcccaactccccatgcccagttcttacccatcatgcaccctgtacagttgccacgttactgccttttttaaaaatatatttgacagaaaccaggtgccttcagaggctctctgatttaaataaacctttcttgttttttt

SEQ ID NO: 183675 - DNA, 2219 bp, Homo sapiens
  Payload ID: 16187
  Gene Symbol: SLC29A1
  Gene Name: solute carrier family 29 (equilibrative nucleoside transporter), member 1
  Uniprot ID: Q99808
  ENST ID: ENST00000371740
  CDS Start-End: 236-1606
gaatgtgccccggcgggagagggaagctgcagcgagagcgcgcggatctcagcgcgggagcagtgcttctgcggcaggagcccgtggacaaggcccactgcctgagcctgaactaggagcacctcctagggactgcccaggcttgctctgctctgacccttctgctggccagtctgggcacctggcccctgagggagggagctgtcagccagggaaaaccgagaacaccatcaccatgacaaccagtcaccagcctcaggacagatacaaagctgtctggcttatcttcttcatgctgggtctgggaacgctgctcccgtggaattttttcatgacggccactcagtatttcacaaaccgcctggacatgtcccagaatgtgtccttggtcactgctgaactgagcaaggacgcccaggcgtcagccgcccctgcagcacccttgcctgagcggaactctctcagtgccatcttcaacaatgtcatgaccctatgtgccatgctgcccctgctgttattcacctacctcaactccttcctgcatcagaggatcccccagtccgtacggatcctgggcagcctggtggccatcctgctggtgtttctgatcactgccatcctggtgaaggtgcagctggatgctctgcccttctttgtcatcaccatgatcaagatcgtgctcattaattcatttggtgccatcctgcagggcagcctgtttggtctggctggccttctgcctgccagctacacggcccccatcatgagtggccagggcctagcaggcttctttgcctccgtggccatgatctgcgctattgccagtggctcggagctatcagaaagtgccttcggctactttatcacagcctgtgctgttatcattttgaccatcatctgttacctgggcctgccccgcctggaattctaccgctactaccagcagctcaagcttgaaggacccggggagcaggagaccaagttggacctcattagcaaaggagaggagccaagagcaggcaaagaggaatctggagtttcagtctccaactctcagcccaccaatgaaagccactctatcaaagccatcctgaaaaatatctcagtcctggctttctctgtctgcttcatcttcactatcaccattgggatgtttccagccgtgactgttgaggtcaagtccagcatcgcaggcagcagcacctgggaacgttacttcattcctgtgtcctgtttcttgactttcaatatctttgactggttgggccggagcctcacagctgtattcatgtggcctgggaaggacagccgctggctgccaagcctggtgctggcccggctggtgtttgtgccactgctgctgctgtgcaacattaagccccgccgctacctgactgtggtcttcgagcacgatgcctggttcatcttcttcatggctgcctttgccttctccaacggctacctcgccagcctctgcatgtgcttcgggcccaagaaagtgaagccagctgaggcagagaccgcaggagccatcatggccttcttcctgtgtctgggtctggcactgggggctgttttctccttcctgttccgggcaattgtgtgacaaaggatggacagaaggactgcctgcctccctccctgtctgcctcctgccccttccttctgccaggggtgatcctgagtggtctggcggttttttcttctaactgacttctgctttccacggcgtgtgctgggcccggatctccaggccctggggagggagcctctggacggacagtggggacattgtgggtttggggctcagagtcgagggacggggtgtagcctcggcatttgcttgagtttctccactcttggctctgactgatccctgcttgtgcaggccagtggaggctcttgggcttggagaacacgtgtgtctctgtgtatgtgtctgtgtgtctgcgtccgtgtctgtcagactgtctgcctgtcctggggtggctaggagctgggtctgaccgttgtatggtttgacctgatatactccattctcccctgcgcctcctcctctgtgttctctccatgtccccctcccaactccccatgcccagttcttacccatcatgcaccctgtacagttgccacgttactgccttttttaaaaatatatttgacagaaaccaggtgccttcagaggctctctgatttaaataaacctttcttgttttttt

SEQ ID NO: 183676 - DNA, 2112 bp, Homo sapiens
  Payload ID: 16187
  Gene Symbol: SLC29A1
  Gene Name: solute carrier family 29 (equilibrative nucleoside transporter), member 1
  Uniprot ID: Q99808
  ENST ID: ENST00000371755
  CDS Start-End: 129-1499
gaatgtgccccggcgggagagggaagctgcagcgagagcgcgcggatctcagcgcgggagcagtgcttctgcggcaggcccctgagggagggagctgtcagccagggaaaaccgagaacaccatcaccatgacaaccagtcaccagcctcaggacagatacaaagctgtctggcttatcttcttcatgctgggtctgggaacgctgctcccgtggaattttttcatgacggccactcagtatttcacaaaccgcctggacatgtcccagaatgtgtccttggtcactgctgaactgagcaaggacgcccaggcgtcagccgcccctgcagcacccttgcctgagcggaactctctcagtgccatcttcaacaatgtcatgaccctatgtgccatgctgcccctgctgttattcacctacctcaactccttcctgcatcagaggatcccccagtccgtacggatcctgggcagcctggtggccatcctgctggtgtttctgatcactgccatcctggtgaaggtgcagctggatgctctgcccttctttgtcatcaccatgatcaagatcgtgctcattaattcatttggtgccatcctgcagggcagcctgtttggtctggctggccttctgcctgccagctacacggcccccatcatgagtggccagggcctagcaggcttctttgcctccgtggccatgatctgcgctattgccagtggctcggagctatcagaaagtgccttcggctactttatcacagcctgtgctgttatcattttgaccatcatctgttacctgggcctgccccgcctggaattctaccgctactaccagcagctcaagcttgaaggacccggggagcaggagaccaagttggacctcattagcaaaggagaggagccaagagcaggcaaagaggaatctggagtttcagtctccaactctcagcccaccaatgaaagccactctatcaaagccatcctgaaaaatatctcagtcctggctttctctgtctgcttcatcttcactatcaccattgggatgtttccagccgtgactgttgaggtcaagtccagcatcgcaggcagcagcacctgggaacgttacttcattcctgtgtcctgtttcttgactttcaatatctttgactggttgggccggagcctcacagctgtattcatgtggcctgggaaggacagccgctggctgccaagcctggtgctggcccggctggtgtttgtgccactgctgctgctgtgcaacattaagccccgccgctacctgactgtggtcttcgagcacgatgcctggttcatcttcttcatggctgcctttgccttctccaacggctacctcgccagcctctgcatgtgcttcgggcccaagaaagtgaagccagctgaggcagagaccgcaggagccatcatggccttcttcctgtgtctgggtctggcactgggggctgttttctccttcctgttccgggcaattgtgtgacaaaggatggacagaaggactgcctgcctccctccctgtctgcctcctgccccttccttctgccaggggtgatcctgagtggtctggcggttttttcttctaactgacttctgctttccacggcgtgtgctgggcccggatctccaggccctggggagggagcctctggacggacagtggggacattgtgggtttggggctcagagtcgagggacggggtgtagcctcggcatttgcttgagtttctccactcttggctctgactgatccctgcttgtgcaggccagtggaggctcttgggcttggagaacacgtgtgtctctgtgtatgtgtctgtgtgtctgcgtccgtgtctgtcagactgtctgcctgtcctggggtggctaggagctgggtctgaccgttgtatggtttgacctgatatactccattctcccctgcgcctcctcctctgtgttctctccatgtccccctcccaactccccatgcccagttcttacccatcatgcaccctgtacagttgccacgttactgccttttttaaaaatatatttgacagaaaccaggtgccttcagaggctctctgatttaaataaacctttcttgttttttt

SEQ ID NO: 183677 - DNA, 2485 bp, Homo sapiens
  Payload ID: 16187
  Gene Symbol: SLC29A1
  Gene Name: solute carrier family 29 (equilibrative nucleoside transporter), member 1
  Uniprot ID: Q99808
  ENST ID: ENST00000393841
  CDS Start-End: 492-1862
agtgcttctgcggcaggtgctgcccggggccggggactggggactggggactgccggggcggaagacgccgctgcccgcctgccacggagggcagggagggcgggcctgacggctccgcagcccggagaagggacgccgggtggggccccagtgcggagcgtgcggagccgcgcagcacgtggcgcgcacgggccagggagcctgaggaccctgcggggaccgggacccaagctgggcggggcggcctggctcccgggcctaaaacaggctgcggtcacgttgacctccgcaaggggcaggcgagtggacgggtgatccccatcgatctggagcccgtggacaaggcccactgcctgagcctgaactaggagcacctcctagggactgcccaggcttgctctgctctgacccttctgctggccagtctgggcacctgcaggcccctgagggagggagctgtcagccagggaaaaccgagaacaccatcaccatgacaaccagtcaccagcctcaggacagatacaaagctgtctggcttatcttcttcatgctgggtctgggaacgctgctcccgtggaattttttcatgacggccactcagtatttcacaaaccgcctggacatgtcccagaatgtgtccttggtcactgctgaactgagcaaggacgcccaggcgtcagccgcccctgcagcacccttgcctgagcggaactctctcagtgccatcttcaacaatgtcatgaccctatgtgccatgctgcccctgctgttattcacctacctcaactccttcctgcatcagaggatcccccagtccgtacggatcctgggcagcctggtggccatcctgctggtgtttctgatcactgccatcctggtgaaggtgcagctggatgctctgcccttctttgtcatcaccatgatcaagatcgtgctcattaattcatttggtgccatcctgcagggcagcctgtttggtctggctggccttctgcctgccagctacacggcccccatcatgagtggccagggcctagcaggcttctttgcctccgtggccatgatctgcgctattgccagtggctcggagctatcagaaagtgccttcggctactttatcacagcctgtgctgttatcattttgaccatcatctgttacctgggcctgccccgcctggaattctaccgctactaccagcagctcaagcttgaaggacccggggagcaggagaccaagttggacctcattagcaaaggagaggagccaagagcaggcaaagaggaatctggagtttcagtctccaactctcagcccaccaatgaaagccactctatcaaagccatcctgaaaaatatctcagtcctggctttctctgtctgcttcatcttcactatcaccattgggatgtttccagccgtgactgttgaggtcaagtccagcatcgcaggcagcagcacctgggaacgttacttcattcctgtgtcctgtttcttgactttcaatatctttgactggttgggccggagcctcacagctgtattcatgtggcctgggaaggacagccgctggctgccaagcctggtgctggcccggctggtgtttgtgccactgctgctgctgtgcaacattaagccccgccgctacctgactgtggtcttcgagcacgatgcctggttcatcttcttcatggctgcctttgccttctccaacggctacctcgccagcctctgcatgtgcttcgggcccaagaaagtgaagccagctgaggcagagaccgcaggagccatcatggccttcttcctgtgtctgggtctggcactgggggctgttttctccttcctgttccgggcaattgtgtgacaaaggatggacagaaggactgcctgcctccctccctgtctgcctcctgccccttccttctgccaggggtgatcctgagtggtctggcggttttttcttctaactgacttctgctttccacggcgtgtgctgggcccggatctccaggccctggggagggagcctctggacggacagtggggacattgtgggtttggggctcagagtcgagggacggggtgtagcctcggcatttgcttgagtttctccactcttggctctgactgatccctgcttgtgcaggccagtggaggctcttgggcttggagaacacgtgtgtctctgtgtatgtgtctgtgtgtctgcgtccgtgtctgtcagactgtctgcctgtcctggggtggctaggagctgggtctgaccgttgtatggtttgacctgatatactccattctcccctgcgcctcctcctctgtgttctctccatgtccccctcccaactccccatgcccagttcttacccatcatgcaccctgtacagttgccacgttactgccttttttaaaaatatatttgacagaaaccaggtgccttcagaggctctctgatttaaataaacctttcttgtttttttctccatggct

SEQ ID NO: 183678 - DNA, 2326 bp, Homo sapiens
  Payload ID: 16187
  Gene Symbol: SLC29A1
  Gene Name: solute carrier family 29 (equilibrative nucleoside transporter), member 1
  Uniprot ID: Q99808
  ENST ID: ENST00000393844
  CDS Start-End: 333-1703
gaagggcccctcccactgagtcggctctggtctccccgcccctgagccgcgaggactggacgcagctggctgcggagctctgggcgggcgctggggtcgcctgttgcagcctctcttccgcccggcggcccacaccggtcaggcccggcgcgggctgcgctctccagctgtggctatggccccagccccgagatgaggagggagagaactaggggcccgcaggcctgggaatttccgtcccccaccaagtccggatgctcactccaaagtctcagcagcaggcccctgagggagggagctgtcagccagggaaaaccgagaacaccatcaccatgacaaccagtcaccagcctcaggacagatacaaagctgtctggcttatcttcttcatgctgggtctgggaacgctgctcccgtggaattttttcatgacggccactcagtatttcacaaaccgcctggacatgtcccagaatgtgtccttggtcactgctgaactgagcaaggacgcccaggcgtcagccgcccctgcagcacccttgcctgagcggaactctctcagtgccatcttcaacaatgtcatgaccctatgtgccatgctgcccctgctgttattcacctacctcaactccttcctgcatcagaggatcccccagtccgtacggatcctgggcagcctggtggccatcctgctggtgtttctgatcactgccatcctggtgaaggtgcagctggatgctctgcccttctttgtcatcaccatgatcaagatcgtgctcattaattcatttggtgccatcctgcagggcagcctgtttggtctggctggccttctgcctgccagctacacggcccccatcatgagtggccagggcctagcaggcttctttgcctccgtggccatgatctgcgctattgccagtggctcggagctatcagaaagtgccttcggctactttatcacagcctgtgctgttatcattttgaccatcatctgttacctgggcctgccccgcctggaattctaccgctactaccagcagctcaagcttgaaggacccggggagcaggagaccaagttggacctcattagcaaaggagaggagccaagagcaggcaaagaggaatctggagtttcagtctccaactctcagcccaccaatgaaagccactctatcaaagccatcctgaaaaatatctcagtcctggctttctctgtctgcttcatcttcactatcaccattgggatgtttccagccgtgactgttgaggtcaagtccagcatcgcaggcagcagcacctgggaacgttacttcattcctgtgtcctgtttcttgactttcaatatctttgactggttgggccggagcctcacagctgtattcatgtggcctgggaaggacagccgctggctgccaagcctggtgctggcccggctggtgtttgtgccactgctgctgctgtgcaacattaagccccgccgctacctgactgtggtcttcgagcacgatgcctggttcatcttcttcatggctgcctttgccttctccaacggctacctcgccagcctctgcatgtgcttcgggcccaagaaagtgaagccagctgaggcagagaccgcaggagccatcatggccttcttcctgtgtctgggtctggcactgggggctgttttctccttcctgttccgggcaattgtgtgacaaaggatggacagaaggactgcctgcctccctccctgtctgcctcctgccccttccttctgccaggggtgatcctgagtggtctggcggttttttcttctaactgacttctgctttccacggcgtgtgctgggcccggatctccaggccctggggagggagcctctggacggacagtggggacattgtgggtttggggctcagagtcgagggacggggtgtagcctcggcatttgcttgagtttctccactcttggctctgactgatccctgcttgtgcaggccagtggaggctcttgggcttggagaacacgtgtgtctctgtgtatgtgtctgtgtgtctgcgtccgtgtctgtcagactgtctgcctgtcctggggtggctaggagctgggtctgaccgttgtatggtttgacctgatatactccattctcccctgcgcctcctcctctgtgttctctccatgtccccctcccaactccccatgcccagttcttacccatcatgcaccctgtacagttgccacgttactgccttttttaaaaatatatttgacagaaaccaggtgccttcagaggctctctgatttaaataaacctttcttgtttttttctccatggct

SEQ ID NO: 183679 - DNA, 2171 bp, Homo sapiens
  Payload ID: 16187
  Gene Symbol: SLC29A1
  Gene Name: solute carrier family 29 (equilibrative nucleoside transporter), member 1
  Uniprot ID: Q99808
  ENST ID: ENST00000427851
  CDS Start-End: 179-1549
gggctgcgctctccagctgtggctatggccccagccccgagatgaggagggagagaactaggggcccgcaggcctgggaatttccgtcccccaccaagtccggatgctcactccaaagtctcagcaggcccctgagggagggagctgtcagccagggaaaaccgagaacaccatcaccatgacaaccagtcaccagcctcaggacagatacaaagctgtctggcttatcttcttcatgctgggtctgggaacgctgctcccgtggaattttttcatgacggccactcagtatttcacaaaccgcctggacatgtcccagaatgtgtccttggtcactgctgaactgagcaaggacgcccaggcgtcagccgcccctgcagcacccttgcctgagcggaactctctcagtgccatcttcaacaatgtcatgaccctatgtgccatgctgcccctgctgttattcacctacctcaactccttcctgcatcagaggatcccccagtccgtacggatcctgggcagcctggtggccatcctgctggtgtttctgatcactgccatcctggtgaaggtgcagctggatgctctgcccttctttgtcatcaccatgatcaagatcgtgctcattaattcatttggtgccatcctgcagggcagcctgtttggtctggctggccttctgcctgccagctacacggcccccatcatgagtggccagggcctagcaggcttctttgcctccgtggccatgatctgcgctattgccagtggctcggagctatcagaaagtgccttcggctactttatcacagcctgtgctgttatcattttgaccatcatctgttacctgggcctgccccgcctggaattctaccgctactaccagcagctcaagcttgaaggacccggggagcaggagaccaagttggacctcattagcaaaggagaggagccaagagcaggcaaagaggaatctggagtttcagtctccaactctcagcccaccaatgaaagccactctatcaaagccatcctgaaaaatatctcagtcctggctttctctgtctgcttcatcttcactatcaccattgggatgtttccagccgtgactgttgaggtcaagtccagcatcgcaggcagcagcacctgggaacgttacttcattcctgtgtcctgtttcttgactttcaatatctttgactggttgggccggagcctcacagctgtattcatgtggcctgggaaggacagccgctggctgccaagcctggtgctggcccggctggtgtttgtgccactgctgctgctgtgcaacattaagccccgccgctacctgactgtggtcttcgagcacgatgcctggttcatcttcttcatggctgcctttgccttctccaacggctacctcgccagcctctgcatgtgcttcgggcccaagaaagtgaagccagctgaggcagagaccgcaggagccatcatggccttcttcctgtgtctgggtctggcactgggggctgttttctccttcctgttccgggcaattgtgtgacaaaggatggacagaaggactgcctgcctccctccctgtctgcctcctgccccttccttctgccaggggtgatcctgagtggtctggcggttttttcttctaactgacttctgctttccacggcgtgtgctgggcccggatctccaggccctggggagggagcctctggacggacagtggggacattgtgggtttggggctcagagtcgagggacggggtgtagcctcggcatttgcttgagtttctccactcttggctctgactgatccctgcttgtgcaggccagtggaggctcttgggcttggagaacacgtgtgtctctgtgtatgtgtctgtgtgtctgcgtccgtgtctgtcagactgtctgcctgtcctggggtggctaggagctgggtctgaccgttgtatggtttgacctgatatactccattctcccctgcgcctcctcctctgtgttctctccatgtccccctcccaactccccatgcccagttcttacccatcatgcaccctgtacagttgccacgttactgccttttttaaaaatatatttgacagaaaccaggtgccttcagaggctctctgatttaaataaacctttcttgtttttttctccatggc

SEQ ID NO: 183680 - DNA, 2262 bp, Homo sapiens
  Payload ID: 16188
  Gene Symbol: SLC29A2
  Gene Name: solute carrier family 29 (equilibrative nucleoside transporter), member 2
  ENST ID: ENST00000311161
  CDS Start-End: 111-1196
ggagcggctctggcatcacctcggagctgacgaagcgggaagagccccgcaccagtgctgcccctacagagctctcggcggggggtggaggcgcatccgccgcggcggccatggcgcgaggagacgccccgcgggacagctaccacctggtcgggatcagcttcttcatcctggggctgggcaccctccttccctggaacttcttcatcaccgccatcccgtacttccaggcgcgactggccggggccggcaacagcacagccaggatcctgagcaccaaccacacgggtcccgaggatgccttcaacttcaacaattgggtgacgctgctgtcccagctgcccctgctgctcttcaccctcctcaactccttcctgtaccagtgcgtcccggagacggtgcgcattctgggcagcctgctggccatactgctgctctttgccctgacagcagcgctggtcaaggtggacatgagccccggacccttcttctccatcaccatggcctccgtctgcttcatcaactccttcagtgcagtcctacagggcagcctcttcgggcagctgggcaccatgccctccacctacagcaccctcttcctcagcggccagggcctggctgggatctttgctgcccttgccatgctcctgtccatggccagtggcgtggacgccgagacctctgccctggggtactttatcacgccctgtgtgggcatcctcatgtccatcgtgtgttacctgagcctgcctcacctgaagtttgcccgctactacctggccaataaatcatcccaggcccaagctcaggagctggagaccaaagctgagctcctccagtctgatctggctgacagcgctgtgccttgtgttggtcttcacagtcaccctgtccgtcttccccgccatcacagccatggtgaccagctccaccagtcctgggaagtggagtcagttcttcaaccccatctgctgcttcctcctcttcaacatcatggactggctgggacggagcctgacctcttacttcctgtggccagacgaggacagccggctgctgcccctgctggtctgcctgcggttcctgttcgtgcccctcttcatgctgtgccacgtgccccagaggtcccggctgcccatcctcttcccacaggatgcctacttcatcaccttcatgctgctctttgccgtttctaatggctacctggtgtccctcaccatgtgcctggcgcccaggcaggtgctgccacacgagagggaggtggccggcgccctcatgaccttcttcctggccctgggactttcctgtggagcctccctctccttcctcttcaaggcgctgctctgaagtggcccctccaggctctttggcagcctcttctcgacgtctccttccggagctgagatccagcccagggcgaatggcgagcttggctcaggcctctgcggggtggaggcccctgggcctgaggctgccagcagcgggcaggagctgctcttcatccacttggagtgctgtggggaagaaatcaccaccggtcattctaaccctcacccaggaatgggggtgactcgcacaagacctcatggaaagggtgatgactagggaaaagagggtgcagggcacggctgctccccaccaccaggtctgcatttgttcatcatcatcaggagcagaggtgaccagagggttcagagtgggaggcggggccagcccaggccaggagcgcctcatcttcccaggcctcagccacccagggtaaaaggtgccagggaagttgtgggcacctgagaggaggaacagatgtggaggacctgagggtgctcaaagggccaggctcagcctcaagcagtgttttcattgccaacacttactgtacccactccgcagagcccagctgggcctgggccccagggccacagctagcctgcatgtgtgtactgcactttacagtttgcaaagctcttccatacccactctctcaccgaagcctaattgaggctcttggaaggagtcaggcaaggattgtgcttcccccattatacaggtgacaaaactgagtcctggggaaagtgactggtccgtggtagagccgggacccaatcccctctctctcctccctgttggtgctgttcttcctgcccaacacctgtttctcttttcctcaaggggtttggggcaggagcctgggcacttactccccgtttttgctgtttctccttctgaccctgctcttgggtctaataaccccatttatttgta

SEQ ID NO: 183681 - DNA, 2514 bp, Homo sapiens
  Payload ID: 16188
  Gene Symbol: SLC29A2
  Gene Name: solute carrier family 29 (equilibrative nucleoside transporter), member 2
  Uniprot ID: Q14542
  ENST ID: ENST00000357440
  CDS Start-End: 230-1600
ggtggcgcgaccctctgtccccgcctcggggcggagcccaggtcccagcctgcggagcgcgagacacgccgaaatccgcccgaggctacctgtgcgactccagccgccctgcaccggaatctggggagacccgccccccgccccaccggtctgcggccctccgccccagcgcaggtgcaggtgcggcttctctgcccctttcaccccaggcgcatccgccgcggcggccatggcgcgaggagacgccccgcgggacagctaccacctggtcgggatcagcttcttcatcctggggctgggcaccctccttccctggaacttcttcatcaccgccatcccgtacttccaggcgcgactggccggggccggcaacagcacagccaggatcctgagcaccaaccacacgggtcccgaggatgccttcaacttcaacaattgggtgacgctgctgtcccagctgcccctgctgctcttcaccctcctcaactccttcctgtaccagtgcgtcccggagacggtgcgcattctgggcagcctgctggccatactgctgctctttgccctgacagcagcgctggtcaaggtggacatgagccccggacccttcttctccatcaccatggcctccgtctgcttcatcaactccttcagtgcagtcctacagggcagcctcttcgggcagctgggcaccatgccctccacctacagcaccctcttcctcagcggccagggcctggctgggatctttgctgcccttgccatgctcctgtccatggccagtggcgtggacgccgagacctctgccctggggtactttatcacgccctgtgtgggcatcctcatgtccatcgtgtgttacctgagcctgcctcacctgaagtttgcccgctactacctggccaataaatcatcccaggcccaagctcaggagctggagaccaaagctgagctcctccagtctgatgagaacgggattcccagtagtccccagaaagtagctctgaccctggatcttgacctggagaaggagccggaatcagagccagatgagccccagaagccaggaaaaccttcagtcttcactgtcttccagaagatctggctgacagcgctgtgccttgtgttggtcttcacagtcaccctgtccgtcttccccgccatcacagccatggtgaccagctccaccagtcctgggaagtggagtcagttcttcaaccccatctgctgcttcctcctcttcaacatcatggactggctgggacggagcctgacctcttacttcctgtggccagacgaggacagccggctgctgcccctgctggtctgcctgcggttcctgttcgtgcccctcttcatgctgtgccacgtgccccagaggtcccggctgcccatcctcttcccacaggatgcctacttcatcaccttcatgctgctctttgccgtttctaatggctacctggtgtccctcaccatgtgcctggcgcccaggcaggtgctgccacacgagagggaggtggccggcgccctcatgaccttcttcctggccctgggactttcctgtggagcctccctctccttcctcttcaaggcgctgctctgaagtggcccctccaggctctttggcagcctcttctcgacgtctccttccggagctgagatccagcccagggcgaatggcgagcttggctcaggcctctgcggggtggaggcccctgggcctgaggctgccagcagcgggcaggagctgctcttcatccacttggagtgctgtggggaagaaatcaccaccggtcattctaaccctcacccaggaatgggggtgactcgcacaagacctcatggaaagggtgatgactagggaaaagagggtgcagggcacggctgctccccaccaccaggtctgcatttgttcatcatcatcaggagcagaggtgaccagagggttcagagtgggaggcggggccagcccaggccaggagcgcctcatcttcccaggcctcagccacccagggtaaaaggtgccagggaagttgtgggcacctgagaggaggaacagatgtggaggacctgagggtgctcaaagggccaggctcagcctcaagcagtgttttcattgccaacacttactgtacccactccgcagagcccagctgggcctgggccccagggccacagctagcctgcatgtgtgtactgcactttacagtttgcaaagctcttccatacccactctctcaccgaagcctaattgaggctcttggaaggagtcaggcaaggattgtgcttcccccattatacaggtgacaaaactgagtcctggggaaagtgactggtccgtggtagagccgggacccaatcccctctctctcctccctgttggtgctgttcttcctgcccaacacctgtttctcttttcctcaaggggtttggggcaggagcctgggcacttactccccgtttttgctgtttctccttctgaccctgctcttgggtctaataaccccatttatttgt

SEQ ID NO: 183682 - DNA, 2505 bp, Homo sapiens
  Payload ID: 16188
  Gene Symbol: SLC29A2
  Gene Name: solute carrier family 29 (equilibrative nucleoside transporter), member 2
  Uniprot ID: Q14542
  ENST ID: ENST00000544554
  CDS Start-End: 221-1591
acgctctgggcggggactccgcagcggctccctagttagggggcgccccggtgggttccagctttaggggtcgcaggagcggctctggcatcacctcggagctgacgaagcgggaagagccccgcaccagtgctgcccctacagagctctcggcggggggtggaggtgcaggtgcggcttctctgcccctttcaccccaggcgcatccgccgcggcggccatggcgcgaggagacgccccgcgggacagctaccacctggtcgggatcagcttcttcatcctggggctgggcaccctccttccctggaacttcttcatcaccgccatcccgtacttccaggcgcgactggccggggccggcaacagcacagccaggatcctgagcaccaaccacacgggtcccgaggatgccttcaacttcaacaattgggtgacgctgctgtcccagctgcccctgctgctcttcaccctcctcaactccttcctgtaccagtgcgtcccggagacggtgcgcattctgggcagcctgctggccatactgctgctctttgccctgacagcagcgctggtcaaggtggacatgagccccggacccttcttctccatcaccatggcctccgtctgcttcatcaactccttcagtgcagtcctacagggcagcctcttcgggcagctgggcaccatgccctccacctacagcaccctcttcctcagcggccagggcctggctgggatctttgctgcccttgccatgctcctgtccatggccagtggcgtggacgccgagacctctgccctggggtactttatcacgccctgtgtgggcatcctcatgtccatcgtgtgttacctgagcctgcctcacctgaagtttgcccgctactacctggccaataaatcatcccaggcccaagctcaggagctggagaccaaagctgagctcctccagtctgatgagaacgggattcccagtagtccccagaaagtagctctgaccctggatcttgacctggagaaggagccggaatcagagccagatgagccccagaagccaggaaaaccttcagtcttcactgtcttccagaagatctggctgacagcgctgtgccttgtgttggtcttcacagtcaccctgtccgtcttccccgccatcacagccatggtgaccagctccaccagtcctgggaagtggagtcagttcttcaaccccatctgctgcttcctcctcttcaacatcatggactggctgggacggagcctgacctcttacttcctgtggccagacgaggacagccggctgctgcccctgctggtctgcctgcggttcctgttcgtgcccctcttcatgctgtgccacgtgccccagaggtcccggctgcccatcctcttcccacaggatgcctacttcatcaccttcatgctgctctttgccgtttctaatggctacctggtgtccctcaccatgtgcctggcgcccaggcaggtgctgccacacgagagggaggtggccggcgccctcatgaccttcttcctggccctgggactttcctgtggagcctccctctccttcctcttcaaggcgctgctctgaagtggcccctccaggctctttggcagcctcttctcgacgtctccttccggagctgagatccagcccagggcgaatggcgagcttggctcaggcctctgcggggtggaggcccctgggcctgaggctgccagcagcgggcaggagctgctcttcatccacttggagtgctgtggggaagaaatcaccaccggtcattctaaccctcacccaggaatgggggtgactcgcacaagacctcatggaaagggtgatgactagggaaaagagggtgcagggcacggctgctccccaccaccaggtctgcatttgttcatcatcatcaggagcagaggtgaccagagggttcagagtgggaggcggggccagcccaggccaggagcgcctcatcttcccaggcctcagccacccagggtaaaaggtgccagggaagttgtgggcacctgagaggaggaacagatgtggaggacctgagggtgctcaaagggccaggctcagcctcaagcagtgttttcattgccaacacttactgtacccactccgcagagcccagctgggcctgggccccagggccacagctagcctgcatgtgtgtactgcactttacagtttgcaaagctcttccatacccactctctcaccgaagcctaattgaggctcttggaaggagtcaggcaaggattgtgcttcccccattatacaggtgacaaaactgagtcctggggaaagtgactggtccgtggtagagccgggacccaatcccctctctctcctccctgttggtgctgttcttcctgcccaacacctgtttctcttttcctcaaggggtttggggcaggagcctgggcacttactccccgtttttgctgtttctccttctgaccctgctcttgggtctaataaccccatttatttgt

SEQ ID NO: 183683 - DNA, 2509 bp, Homo sapiens
  Payload ID: 16188
  Gene Symbol: SLC29A2
  Gene Name: solute carrier family 29 (equilibrative nucleoside transporter), member 2
  Uniprot ID: Q14542
  ENST ID: ENST00000546034
  CDS Start-End: 226-1596
gtggcagctctggttcccccgcccgggcccggctcgggttacgctctgggcggggactccgcagcggctccctagttagggggcgccccggtgggttccagctttaggggtcgcaggagcggctctggcatcacctcggagctgacgaagcgggaagagccccgcaccagtgctgcccctacagagctctcggcggggggtggaggcgcatccgccgcggcggccatggcgcgaggagacgccccgcgggacagctaccacctggtcgggatcagcttcttcatcctggggctgggcaccctccttccctggaacttcttcatcaccgccatcccgtacttccaggcgcgactggccggggccggcaacagcacagccaggatcctgagcaccaaccacacgggtcccgaggatgccttcaacttcaacaattgggtgacgctgctgtcccagctgcccctgctgctcttcaccctcctcaactccttcctgtaccagtgcgtcccggagacggtgcgcattctgggcagcctgctggccatactgctgctctttgccctgacagcagcgctggtcaaggtggacatgagccccggacccttcttctccatcaccatggcctccgtctgcttcatcaactccttcagtgcagtcctacagggcagcctcttcgggcagctgggcaccatgccctccacctacagcaccctcttcctcagcggccagggcctggctgggatctttgctgcccttgccatgctcctgtccatggccagtggcgtggacgccgagacctctgccctggggtactttatcacgccctgtgtgggcatcctcatgtccatcgtgtgttacctgagcctgcctcacctgaagtttgcccgctactacctggccaataaatcatcccaggcccaagctcaggagctggagaccaaagctgagctcctccagtctgatgagaacgggattcccagtagtccccagaaagtagctctgaccctggatcttgacctggagaaggagccggaatcagagccagatgagccccagaagccaggaaaaccttcagtcttcactgtcttccagaagatctggctgacagcgctgtgccttgtgttggtcttcacagtcaccctgtccgtcttccccgccatcacagccatggtgaccagctccaccagtcctgggaagtggagtcagttcttcaaccccatctgctgcttcctcctcttcaacatcatggactggctgggacggagcctgacctcttacttcctgtggccagacgaggacagccggctgctgcccctgctggtctgcctgcggttcctgttcgtgcccctcttcatgctgtgccacgtgccccagaggtcccggctgcccatcctcttcccacaggatgcctacttcatcaccttcatgctgctctttgccgtttctaatggctacctggtgtccctcaccatgtgcctggcgcccaggcaggtgctgccacacgagagggaggtggccggcgccctcatgaccttcttcctggccctgggactttcctgtggagcctccctctccttcctcttcaaggcgctgctctgaagtggcccctccaggctctttggcagcctcttctcgacgtctccttccggagctgagatccagcccagggcgaatggcgagcttggctcaggcctctgcggggtggaggcccctgggcctgaggctgccagcagcgggcaggagctgctcttcatccacttggagtgctgtggggaagaaatcaccaccggtcattctaaccctcacccaggaatgggggtgactcgcacaagacctcatggaaagggtgatgactagggaaaagagggtgcagggcacggctgctccccaccaccaggtctgcatttgttcatcatcatcaggagcagaggtgaccagagggttcagagtgggaggcggggccagcccaggccaggagcgcctcatcttcccaggcctcagccacccagggtaaaaggtgccagggaagttgtgggcacctgagaggaggaacagatgtggaggacctgagggtgctcaaagggccaggctcagcctcaagcagtgttttcattgccaacacttactgtacccactccgcagagcccagctgggcctgggccccagggccacagctagcctgcatgtgtgtactgcactttacagtttgcaaagctcttccatacccactctctcaccgaagcctaattgaggctcttggaaggagtcaggcaaggattgtgcttcccccattatacaggtgacaaaactgagtcctggggaaagtgactggtccgtggtagagccgggacccaatcccctctctctcctccctgttggtgctgttcttcctgcccaacacctgtttctcttttcctcaaggggtttggggcaggagcctgggcacttactccccgtttttgctgtttctccttctgaccctgctcttgggtctaataaccccatttatttg

SEQ ID NO: 183684 - DNA, 2272 bp, Homo sapiens
  Payload ID: 16188
  Gene Symbol: SLC29A2
  Gene Name: solute carrier family 29 (equilibrative nucleoside transporter), member 2
  Uniprot ID: Q14542
  ENST ID: ENST00000541567
  CDS Start-End: 57-665
ggtgcaggtgcggcttctctgcccctttcaccccaggcgcatccgccgcggcggccatggcgcgaggagacgccccgcgggacagctaccacctggtcgggatcagcttcttcatcctggggctgggcaccctccttccctggaacttcttcatcaccgccatcccgtacttccaggcgcgactggccggggccggcaacagcacagccaggatcctgagcaccaaccacacgggtcccgaggatgccttcaacttcaacaattgggtgacgctgctgtcccagctgcccctgctgctcttcaccctcctcaactccttcctgtaccagtgcgctggtcaaggtggacatgagccccggacccttcttctccatcaccatggcctccgtctgcttcatcaactccttcagtgcagtcctacagggcagcctcttcgggcagctgggcaccatgccctccacctacagcaccctcttcctcagcggccagggcctggctgggatctttgctgcccttgccatgctcctgtccatggccagtggcgtggacgccgagacctctgccctggggtactttatcacgccctgtgtgggcatcctcatgtccatcgtgtgttacctgagcctgcctcacctgaagtttgcccgctactacctggccaataaatcatcccaggcccaagctcaggagctggagaccaaagctgagctcctccagtctgatgagaacgggattcccagtagtccccagaaagtagctctgaccctggatcttgacctggagaaggagccggaatcagagccagatgagccccagaagccaggaaaaccttcagtcttcactgtcttccagaagatctggctgacagcgctgtgccttgtgttggtcttcacagtcaccctgtccgtcttccccgccatcacagccatggtgaccagctccaccagtcctgggaagtggagtcagttcttcaaccccatctgctgcttcctcctcttcaacatcatggactggctgggacggagcctgacctcttacttcctgtggccagacgaggacagccggctgctgcccctgctggtctgcctgcggttcctgttcgtgcccctcttcatgctgtgccacgtgccccagaggtcccggctgcccatcctcttcccacaggatgcctacttcatcaccttcatgctgctctttgccgtttctaatggctacctggtgtccctcaccatgtgcctggcgcccaggcaggtgctgccacacgagagggaggtggccggcgccctcatgaccttcttcctggccctgggactttcctgtggagcctccctctccttcctcttcaaggcgctgctctgaagtggcccctccaggctctttggcagcctcttctcgacgtctccttccggagctgagatccagcccagggcgaatggcgagcttggctcaggcctctgcggggtggaggcccctgggcctgaggctgccagcagcgggcaggagctgctcttcatccacttggagtgctgtggggaagaaatcaccaccggtcattctaaccctcacccaggaatgggggtgactcgcacaagacctcatggaaagggtgatgactagggaaaagagggtgcagggcacggctgctccccaccaccaggtctgcatttgttcatcatcatcaggagcagaggtgaccagagggttcagagtgggaggcggggccagcccaggccaggagcgcctcatcttcccaggcctcagccacccagggtaaaaggtgccagggaagttgtgggcacctgagaggaggaacagatgtggaggacctgagggtgctcaaagggccaggctcagcctcaagcagtgttttcattgccaacacttactgtacccactccgcagagcccagctgggcctgggccccagggccacagctagcctgcatgtgtgtactgcactttacagtttgcaaagctcttccatacccactctctcaccgaagcctaattgaggctcttggaaggagtcaggcaaggattgtgcttcccccattatacaggtgacaaaactgagtcctggggaaagtgactggtccgtggtagagccgggacccaatcccctctctctcctccctgttggtgctgttcttcctgcccaacacctgtttctcttttcctcaaggggtttggggcaggagcctgggcacttactccccgtttttgctgtttctccttctgaccctgctcttgggtctaataaccccatttatttg

SEQ ID NO: 183685 - DNA, 2474 bp, Homo sapiens
  Payload ID: 16188
  Gene Symbol: SLC29A2
  Gene Name: solute carrier family 29 (equilibrative nucleoside transporter), member 2
  Uniprot ID: Q14542
  ENST ID: ENST00000540386
  CDS Start-End: 230-1135
ggtggcgcgaccctctgtccccgcctcggggcggagcccaggtcccagcctgcggagcgcgagacacgccgaaatccgcccgaggctacctgtgcgactccagccgccctgcaccggaatctggggagacccgccccccgccccaccggtctgcggccctccgccccagcgcaggtgcaggtgcggcttctctgcccctttcaccccaggcgcatccgccgcggcggccatggcgcgaggagacgccccgcgggacagctaccacctggtcgggatcagcttcttcatcctggggctgggcaccctccttccctggaacttcttcatcaccgccatcccgtacttccaggcgcgactggccggggccggcaacagcacagccaggatcctgagcaccaaccacacgggtcccgaggatgccttcaacttcaacaattgggtgacgctgctgtcccagctgcccctgctgctcttcaccctcctcaactccttcctgtaccagtgcgtcccggagacggtgcgcattctgggcagcctgctggccatactgctgctctttgccctgacagcagcgctggtcaaggtggacatgagccccggacccttcttctccatcaccatggcctccgtctgcttcatcaactccttcagtgcagtcctacagggcagcctcttcgggcagctgggcaccatgccctccacctacagcaccctcttcctcagcggccagggcctggctgggatctttgctgcccttgccatgctcctgtccatggccagtggcgtggacgccgagacctctgccctggggtactttatcacgccctgtgtgggcatcctcatgtccatcgtgtgttacctgagcctgcctcacctgaagtttgcccgctactacctggccaataaatcatcccaggcccaagctcaggagctggagaccaaagctgagctcctccagtctgatgagaacgggattcccagtagtccccagaaagtagctctgaccctggatcttgacctggagaaggagccggaatcagagccagatgagccccagaagccaggaaaaccttcagtcttcactgtcttccagaagtcaccctgtccgtcttccccgccatcacagccatggtgaccagctccaccagtcctgggaagtggagtcagttcttcaaccccatctgctgcttcctcctcttcaacatcatggactggctgggacggagcctgacctcttacttcctgtggccagacgaggacagccggctgctgcccctgctggtctgcctgcggttcctgttcgtgcccctcttcatgctgtgccacgtgccccagaggtcccggctgcccatcctcttcccacaggatgcctacttcatcaccttcatgctgctctttgccgtttctaatggctacctggtgtccctcaccatgtgcctggcgcccaggcaggtgctgccacacgagagggaggtggccggcgccctcatgaccttcttcctggccctgggactttcctgtggagcctccctctccttcctcttcaaggcgctgctctgaagtggcccctccaggctctttggcagcctcttctcgacgtctccttccggagctgagatccagcccagggcgaatggcgagcttggctcaggcctctgcggggtggaggcccctgggcctgaggctgccagcagcgggcaggagctgctcttcatccacttggagtgctgtggggaagaaatcaccaccggtcattctaaccctcacccaggaatgggggtgactcgcacaagacctcatggaaagggtgatgactagggaaaagagggtgcagggcacggctgctccccaccaccaggtctgcatttgttcatcatcatcaggagcagaggtgaccagagggttcagagtgggaggcggggccagcccaggccaggagcgcctcatcttcccaggcctcagccacccagggtaaaaggtgccagggaagttgtgggcacctgagaggaggaacagatgtggaggacctgagggtgctcaaagggccaggctcagcctcaagcagtgttttcattgccaacacttactgtacccactccgcagagcccagctgggcctgggccccagggccacagctagcctgcatgtgtgtactgcactttacagtttgcaaagctcttccatacccactctctcaccgaagcctaattgaggctcttggaaggagtcaggcaaggattgtgcttcccccattatacaggtgacaaaactgagtcctggggaaagtgactggtccgtggtagagccgggacccaatcccctctctctcctccctgttggtgctgttcttcctgcccaacacctgtttctcttttcctcaaggggtttggggcaggagcctgggcacttactccccgtttttgctgtttctccttctgaccctgctcttgggtctaataaccccatttatttgt

SEQ ID NO: 183686 - DNA, 2380 bp, Homo sapiens
  Payload ID: 16188
  Gene Symbol: SLC29A2
  Gene Name: solute carrier family 29 (equilibrative nucleoside transporter), member 2
  ENST ID: ENST00000619145
  CDS Start-End: 230-1315
ggtggcgcgaccctctgtccccgcctcggggcggagcccaggtcccagcctgcggagcgcgagacacgccgaaatccgcccgaggctacctgtgcgactccagccgccctgcaccggaatctggggagacccgccccccgccccaccggtctgcggccctccgccccagcgcaggtgcaggtgcggcttctctgcccctttcaccccaggcgcatccgccgcggcggccatggcgcgaggagacgccccgcgggacagctaccacctggtcgggatcagcttcttcatcctggggctgggcaccctccttccctggaacttcttcatcaccgccatcccgtacttccaggcgcgactggccggggccggcaacagcacagccaggatcctgagcaccaaccacacgggtcccgaggatgccttcaacttcaacaattgggtgacgctgctgtcccagctgcccctgctgctcttcaccctcctcaactccttcctgtaccagtgcgtcccggagacggtgcgcattctgggcagcctgctggccatactgctgctctttgccctgacagcagcgctggtcaaggtggacatgagccccggacccttcttctccatcaccatggcctccgtctgcttcatcaactccttcagtgcagtcctacagggcagcctcttcgggcagctgggcaccatgccctccacctacagcaccctcttcctcagcggccagggcctggctgggatctttgctgcccttgccatgctcctgtccatggccagtggcgtggacgccgagacctctgccctggggtactttatcacgccctgtgtgggcatcctcatgtccatcgtgtgttacctgagcctgcctcacctgaagtttgcccgctactacctggccaataaatcatcccaggcccaagctcaggagctggagaccaaagctgagctcctccagtctgatctggctgacagcgctgtgccttgtgttggtcttcacagtcaccctgtccgtcttccccgccatcacagccatggtgaccagctccaccagtcctgggaagtggagtcagttcttcaaccccatctgctgcttcctcctcttcaacatcatggactggctgggacggagcctgacctcttacttcctgtggccagacgaggacagccggctgctgcccctgctggtctgcctgcggttcctgttcgtgcccctcttcatgctgtgccacgtgccccagaggtcccggctgcccatcctcttcccacaggatgcctacttcatcaccttcatgctgctctttgccgtttctaatggctacctggtgtccctcaccatgtgcctggcgcccaggcaggtgctgccacacgagagggaggtggccggcgccctcatgaccttcttcctggccctgggactttcctgtggagcctccctctccttcctcttcaaggcgctgctctgaagtggcccctccaggctctttggcagcctcttctcgacgtctccttccggagctgagatccagcccagggcgaatggcgagcttggctcaggcctctgcggggtggaggcccctgggcctgaggctgccagcagcgggcaggagctgctcttcatccacttggagtgctgtggggaagaaatcaccaccggtcattctaaccctcacccaggaatgggggtgactcgcacaagacctcatggaaagggtgatgactagggaaaagagggtgcagggcacggctgctccccaccaccaggtctgcatttgttcatcatcatcaggagcagaggtgaccagagggttcagagtgggaggcggggccagcccaggccaggagcgcctcatcttcccaggcctcagccacccagggtaaaaggtgccagggaagttgtgggcacctgagaggaggaacagatgtggaggacctgagggtgctcaaagggccaggctcagcctcaagcagtgttttcattgccaacacttactgtacccactccgcagagcccagctgggcctgggccccagggccacagctagcctgcatgtgtgtactgcactttacagtttgcaaagctcttccatacccactctctcaccgaagcctaattgaggctcttggaaggagtcaggcaaggattgtgcttcccccattatacaggtgacaaaactgagtcctggggaaagtgactggtccgtggtagagccgggacccaatcccctctctctcctccctgttggtgctgttcttcctgcccaacacctgtttctcttttcctcaaggggtttggggcaggagcctgggcacttactccccgtttttgctgtttctccttctgaccctgctcttgggtctaataaccccatttatttgt

SEQ ID NO: 183687 - DNA, 2257 bp, Homo sapiens
  Payload ID: 16189
  Gene Symbol: SLC29A3
  Gene Name: solute carrier family 29 (equilibrative nucleoside transporter), member 3
  Uniprot ID: Q9BZD2
  ENST ID: ENST00000373189
  CDS Start-End: 53-1480
cagtggtcctggccgtgcgccggaggcagcggcggcgtggcgcagcggcgacatggccgttgtctcagaggacgactttcagcacagttcaaactccacctacagaaccacaagcagcagtctccgagctgaccaggaggcactgcttgagaagctgctggaccgcccgccccctggcctgcagaggcccgaggaccgcttctgtggcacatacatcatcttcttcagcctgggcattggcagtctactgccatggaacttctttatcactgccaaggagtactggatgttcaaactccgcaactcctccagcccagccaccggggaggaccctgagggctcagacatcctgaactactttgagagctaccttgccgttgcctccaccgtgccctccatgctgtgcctggtggccaacttcctgcttgtcaacagggttgcagtccacatccgtgtcctggcctcactgacggtcatcctggccatcttcatggtgataactgcactggtgaaggtggacacttcctcctggacccgtggcttttttgcggtcaccattgtctgcatggtgatcctcagcggtgcctccactgtcttcagcagcagcatctacggcatgaccggctcctttcctatgaggaactcccaggcactgatatcaggaggagccatgggcgggacggtcagcgccgtggcctcattggtggacttggctgcatccagtgatgtgaggaacagcgccctggccttcttcctgacggccactgtcttcctcgtgctctgcatgggactctacctgctgctgtccaggctggagtatgccaggtactacatgaggcctgttcttgcggcccatgtgttttctggtgaagaggagcttccccaggactccctcagtgccccttcggtggcctccagattcattgattcccacacaccccctctccgccccatcctgaagaagacggccagcctgggcttctgtgtcacctacgtcttcttcatcaccagcctcatctaccccgccatctgcaccaacatcgagtccctcaacaagggttcgggctcactgtggaccaccaagtttttcatccccctcactaccttcctcctgtacaactttgctgacctatgtggccggcagctcaccgcctggatccaggtgccagggcccaatagcaaggcgctcccagggttcgtgctcctccggacctgcctcatccccctcttcgtgctctgtaactaccagccccgcgtccacctgaagactgtggtcttccagtccgatgtgtaccccgcactcctcagctccctgctggggctcagcaacggctacctcagcaccctggccctcctctacgggcctaagattgtgcccagggagctggctgaggccacgggagtggtgatgtccttttatgtgtgcttgggcttaacactgggctcagcctgctctaccctcctggtgcacctcatctagaagggaggacacaaggacattggtgcttcagagcctttgaagatgagaagagagtgcaggagggctgggggccatggaggaaaggcctaaagtttcacttggggacagagagcagagcacactcgggcctcatccctcccaagatgccagtgagccacgtccatgcccattccgtgcaaggcagatattccagtcatattaacagaacactcctgagacagttgaagaagaaatagcacaaatcaggggtactcccttcacagctgatggttaacattccaccttctttctagcccttcaaagatgctgccagtgttcgccctagagttattacaaagccagtgccaaaacccagccatgggctctttgcaacctcccagctgcgctcattccagctgacagcgagatgcaagcaaatgctcagctctccttaccctgaaggggtctccctggaatggaagtcccctggcatggtcagtcctcaggcccaagactcaagtgtgcacagacccctgtgttctgtgggtgaacaactgcccactaaccagactggaaaacccagaaagatgggccttccatgaatgcttcattccagagggaccagagggcctccctgtgcaagggatcaagcatgtctggcctgggttttcaaaaaaagagggatcctcatgacctggtggtctatggcctgggtcaagatgagggtctttcagtgttcctgtttacaacatgtcaaagccattggttcaagggcgtaataaatacttgcgtattcaa

SEQ ID NO: 183688 - DNA, 2839 bp, Homo sapiens
  Payload ID: 16190
  Gene Symbol: SLC29A4
  Gene Name: solute carrier family 29 (equilibrative nucleoside transporter), member 4
  Uniprot ID: Q7RTT9
  ENST ID: ENST00000297195
  CDS Start-End: 126-1718
ggggccgggcggactcggggaccggcggaggacgccgggcgcgcccggcccgaggctgggggagcggggcggcgtggcgggcgcgccgaggaccccaggccgggccgggccgagcagaggctgccatgggctccgtggggagccagcgccttgaggagcccagcgtggcaggcacaccagacccgggcgtagtgatgagcttcaccttcgacagtcaccagctggaggaggcggcggaggcggctcagggccagggccttagggccaggggcgtcccagctttcacggatactacattggacgagccagtgcccgatgaccgttatcacgccatctactttgcgatgctgctggctggcgtgggcttcctgctgccatacaacagcttcatcacggacgtggactacctgcatcacaagtacccagggacctccatcgtgtttgacatgagcctcacctacatcttggtggcactggcagctgtcctcctgaacaacgtcctggtggagagactgaccctgcacaccaggatcaccgcaggctacctcttagccttgggccctctcctttttatcagcatctgcgacgtgtggctgcagctcttctctcgggaccaggcctacgccatcaacctggccgctgtgggcaccgtggccttcggctgcacagtgcagcaatccagcttctacgggtacacggggatgctgcccaagcggtacacgcagggggtgatgaccggggagagcacggcgggcgtgatgatctctctgagccgcatcctcacgaagctgctgctgcccgacgagcgcgccagcacgctcatcttcttcctggtgtcggtggcgctggagctgctgtgtttcctgctgcacctgttagtgcggcgcagccgcttcgtgctcttctataccacacggccgcgtgacagccaccggggcaggccaggcctgggcaggggctatggctaccgcgtgcaccacgacgttgtcgccggggacgtccacttcgagcacccagccccggccctggcccccaacgagtccccaaaggacagcccagcccacgaggtgaccggcagcggcggggcctacatgcgctttgatgtgccgcggccaagggtccagcgcagctggcccaccttcagagccctgttactgcaccgctacgtggtggcgcgggtgatctgggccgacatgctctccatcgccgtgacctacttcatcacgctgtgcctgttccccggcctcgagtctgagatccgccactgcatcctgggcgagtggctgcccatcctcatcatggctgtgttcaacctgtcagacttcgtgggcaagatcctggcagccctgcccgtggactggcggggcacccacctgctggcctgctcctgcctgcgtgtggtcttcatccccctcttcatcctgtgcgtctaccccagcggcatgcccgccctccgtcaccccgcctggccctgcatcttctcactgctcatgggcatcagcaacggctacttcggcagcgtgcccatgatcctggcggcaggcaaagtgagccccaagcagcgggagctggcagggaacaccatgaccgtgtcctacatgtcagggctgacgctggggtccgccgtggcctactgcacctacagcctcacccgcgacgctcacggcagctgcctgcacgcctccaccgccaatggttccatcctcgcaggcctctgagccagccccgcccactgccagggacgccgagggcctgaccaggggccccgaggcctgagggcccctcccctgtccccacctcagtgcctgcggggccctgagcctccccctgtgccagcagccccactccctcagggtccagccatgccccaccctggactgaagttctgcaaagtcctccgaggaccggaacacgtttctgcgacccggggctctggccagcactgtgttctgcgtttggtctcatacctgcgtctaccttccatctgtgtccagcggccccggctccagcccagccagcactctgcagggtcacacgcaccgtgtccccacccaggacagcagacacccgccagagtgtgcgcgcccagtgactgcaccccggccctcatcacccaccggcactgatcggggcaccgcctggcccagcctccaccagggacccctcctcatgaactctggagccctgagaggagaggggcagccccccaccttgtcaccctcagggcttccccttctgtcctcattcttagagactgcttctcccaaacataacgcgttagccatgaaggagtcggagccctgggtccgaatggacccgcctgcggtctgcatcagcctctgggaaaccacagcagtgatgccagctgggcacgtcaggacctccccacacacccacacgatgccacaggtcagggggctgtgcctgactagggagccctcccattgccttcctggcccgggatagaagaggggaggtaagtctgggggctacgaagccgggcccccacaccctggctgaagtcagcttgacctaggtcttgaccctcatccagcaagggactcgacagacccaagggtccctggaacgtagggaggggctgggggtcagtccagcccgggcctcccagaacaccaggcccgtgtgggtggcaccctgaggtcaggggatcctaagggtgtccttccagagacggtgtttccagggggaggaccgcccccgcttccagatccccggccccggctgtgactgccctgtttcacccctgctgtgtcccatcccccgtctgtccactaactgtaccgcaccggccattaaaagatgaaggcagaccgctgca

SEQ ID NO: 183689 - DNA, 5685 bp, Homo sapiens
  Payload ID: 16190
  Gene Symbol: SLC29A4
  Gene Name: solute carrier family 29 (equilibrative nucleoside transporter), member 4
  Uniprot ID: Q7RTT9
  ENST ID: ENST00000396872
  CDS Start-End: 162-1754
tggtggcctgggctgtgctcgtcgccgcgctcgtggaccggggccgggcggactcggggaccggcggaggacgccgggcgcgcccggcccgaggctgggggagcggggcggcgtggcgggcgcgccgaggaccccaggccgggccgggccgagaggctgccatgggctccgtggggagccagcgccttgaggagcccagcgtggcaggcacaccagacccgggcgtagtgatgagcttcaccttcgacagtcaccagctggaggaggcggcggaggcggctcagggccagggccttagggccaggggcgtcccagctttcacggatactacattggacgagccagtgcccgatgaccgttatcacgccatctactttgcgatgctgctggctggcgtgggcttcctgctgccatacaacagcttcatcacggacgtggactacctgcatcacaagtacccagggacctccatcgtgtttgacatgagcctcacctacatcttggtggcactggcagctgtcctcctgaacaacgtcctggtggagagactgaccctgcacaccaggatcaccgcaggctacctcttagccttgggccctctcctttttatcagcatctgcgacgtgtggctgcagctcttctctcgggaccaggcctacgccatcaacctggccgctgtgggcaccgtggccttcggctgcacagtgcagcaatccagcttctacgggtacacggggatgctgcccaagcggtacacgcagggggtgatgaccggggagagcacggcgggcgtgatgatctctctgagccgcatcctcacgaagctgctgctgcccgacgagcgcgccagcacgctcatcttcttcctggtgtcggtggcgctggagctgctgtgtttcctgctgcacctgttagtgcggcgcagccgcttcgtgctcttctataccacacggccgcgtgacagccaccggggcaggccaggcctgggcaggggctatggctaccgcgtgcaccacgacgttgtcgccggggacgtccacttcgagcacccagccccggccctggcccccaacgagtccccaaaggacagcccagcccacgaggtgaccggcagcggcggggcctacatgcgctttgatgtgccgcggccaagggtccagcgcagctggcccaccttcagagccctgttactgcaccgctacgtggtggcgcgggtgatctgggccgacatgctctccatcgccgtgacctacttcatcacgctgtgcctgttccccggcctcgagtctgagatccgccactgcatcctgggcgagtggctgcccatcctcatcatggctgtgttcaacctgtcagacttcgtgggcaagatcctggcagccctgcccgtggactggcggggcacccacctgctggcctgctcctgcctgcgtgtggtcttcatccccctcttcatcctgtgcgtctaccccagcggcatgcccgccctccgtcaccccgcctggccctgcatcttctcactgctcatgggcatcagcaacggctacttcggcagcgtgcccatgatcctggcggcaggcaaagtgagccccaagcagcgggagctggcagggaacaccatgaccgtgtcctacatgtcagggctgacgctggggtccgccgtggcctactgcacctacagcctcacccgcgacgctcacggcagctgcctgcacgcctccaccgccaatggttccatcctcgcaggcctctgagccagccccgcccactgccagggacgccgagggcctgaccaggggccccgaggcctgagggcccctcccctgtccccacctcagtgcctgcggggccctgagcctccccctgtgccagcagccccactccctcagggtccagccatgccccaccctggactgaagttctgcaaagtcctccgaggaccggaacacgtttctgcgacccggggctctggccagcactgtgttctgcgtttggtctcatacctgcgtctaccttccatctgtgtccagcggccccggctccagcccagccagcactctgcagggtcacacgcaccgtgtccccacccaggacagcagacacccgccagagtgtgcgcgcccagtgactgcaccccggccctcatcacccaccggcactgatcggggcaccgcctggcccagcctccaccagggacccctcctcatgaactctggagccctgagaggagaggggcagccccccaccttgtcaccctcagggcttccccttctgtcctcattcttagagactgcttctcccaaacataacgcgttagccatgaaggagtcggagccctgggtccgaatggacccgcctgcggtctgcatcagcctctgggaaaccacagcagtgatgccagctgggcacgtcaggacctccccacacacccacacgatgccacaggtcagggggctgtgcctgactagggagccctcccattgccttcctggcccgggatagaagaggggaggtaagtctgggggctacgaagccgggcccccacaccctggctgaagtcagcttgacctaggtcttgaccctcatccagcaagggactcgacagacccaagggtccctggaacgtagggaggggctgggggtcagtccagcccgggcctcccagaacaccaggcccgtgtgggtggcaccctgaggtcaggggatcctaagggtgtccttccagagacggtgtttccagggggaggaccgcccccgcttccagatccccggccccggctgtgactgccctgtttcacccctgctgtgtcccatcccccgtctgtccactaactgtaccgcaccggccattaaaagatgaaggcagaccgctgcaccgccgcctgcaagcagagtttgtgcgtggacgggggctgggactgccatctcgggataccggtggaactcgggctgccccgcataagccggtcctcagtcttcccatctgtgaggtgggccgggtggatcagggagcaggagggtgtcctcacactgggtaggcttggtttgtgggcagcgctgggtagtggggtgagagctgggagcacttagggtttgtcgctcaccttgaccgcccgccccccccaccccttcgtgaggatcagggaggatggccacatgcagcccatttgaaggggaaacaaagtgggcggggcttggcccctgcccctcagggactgcactgcatcctaggagtcagagcctcctggcttcgagcctcatcccttttgctgatttgtgcaatttggacaaaatcctgcactgttctgtgcctcatttctttctttttttattttttttttgagactgagtcttgctcttgtcacccaggctggagtgcagtggcacgatcttggctcactgcaatctctgccttccaggttcaagcgattctcctgcctcagcctctcaagtagctgggattacaggtacgcaccaccacacctggctaatttgtcttgtggagaccgggtttcaccatgttggccatgctggtctcgaactcctgatctcaagtgatccatctgtctcatcctcccaaagtgttgggattacaggtgtgagccactgcacccgtcctgtgcctcatttttgttttttctttctttacaagacaggctctcgctctgtcactgaggctggagtgcagtggtgccatcatagctcactgcagcctccacctcctgggctccagtgatcctcccacctcagcctcccaaatagctgtgaatacaggcgcgtgccaccacgtctggccagattcttttattttgtgtagagatggggtcttgctgttgcccagactggtctcaaagtctgggcctcaagtgttccccctgccttggcctcccaaagtgccaggattacaggtatgagtcactgcgcctggcctgttctgtccttagcttccccaaggaatggggctggtccaggttttgatgtgggtcccgtaaaggagggcacgagggccacctatgctctggcaggcatcctccctggggcccaggtgggcggccacttgggccaagactgcgccaggtgacaccagagtgtttcccagagcccatgccgggcccttcccttgcccgaggccggctggctgccctccatgggttaccctctttgcaaagccccgaatgtcctctgcaggccacccacactaaccaggtcagtcactgggcagccagacccccacctatagcttccctaggccccagtgcagagatgccgtccacccccatctaggtgagggcttggggccactcttagcattagtatcattttcttctagtatcattttgtggtaggcatggctggaaatgtgcagctttgctttttttttttttttttttggaggagtttcgcttttgttgcccaggctggagtgcaatggctcgatttcagctcactgcaacctctgcctgccgggttcaagcgattctcctgcctcagcctcccgagtagctgggattacaggcatgtgccaccatgcccggctaattttgtgcttttagtagagacgaggtttctccatgttggtcaggctggtcttgaactcccgacctcaggtgatccacctgcctcagcctcccaaagtgctgggattacaggcatgagccaccatgcctggcactggttttttgagatggaatctcgttatgtcaccccagctggagggcagtggcacgatctcagctcactgtaacctttgccgtgggttcaagcgattctcctgcctcagcctcccaagtagctgggattacaggcacgctccaccacacccggctaatttttttgtatttttagtagagatggggtttcaccatattggccaggctggtcttgaactcctgacctcaagtgatccgcctcccttggcctcccaaagtgctgggattacaggcgtgagccaccgtgcccatccaacttaacttttaattttttctcatgtaaatttgttcaatttctttttttttttttttttttttttttgagacaatctctgtcacccccaggccagagtgcagtggtgcgatctcaactcactgcaacctccacccgccgggtccctgtgattttcccacctcagcctcccgagtagctgggattacaggtgtgggccaccacacccggctaatttttgtatttttagtagagacggggtttcaccacattgctcaggctggtctgaaactcctggcctgaagtgatcctcccgcctcggcctcctaaagtgctgggattacaggcacgctctaccacacctggctaatttttttttgtatttttagtagagatggggtttcaccatattggccaggctggtctcgaactcctgacttcaagtgatccgcctgccttggcctcccaaagtgctggcattacaggcgtgagccactgtgcccagccgatgagctcatttagatggctgcatggggtcaccgcccctgcacgcgtggcacccaacttcttccagtcgaatcctgcttcttggtgccctgatatggcagaatgcccccagacaccacccctactccagcccctgaaataaaccactccagacaattttatttttccaattaaatcttttctttttttttatgaaaaaagatcacacagaatttgccaacaaacaaaattccaaaa

SEQ ID NO: 183690 - DNA, 2734 bp, Homo sapiens
  Payload ID: 16190
  Gene Symbol: SLC29A4
  Gene Name: solute carrier family 29 (equilibrative nucleoside transporter), member 4
  Uniprot ID: Q7RTT9
  ENST ID: ENST00000406453
  CDS Start-End: 63-1613
ggagcggggcggcgtggcgggcgcgccgaggaccccaggccgggccgggccgagaggctgccatgggctccgtggggagccagcgccttgaggagcccagcgtggcaggcacaccagacccgggcgtagtgatgagcttcaccttcgacagtcaccagctggaggaggcggcggaggcggctcagggccagggccttagggccaggggcgtcccagctttcacggatactacattggacgagccagtgcccgatgaccgttatcacgccatctactttgcgatgctgctggctggcgtgggcttcctgctgccatacaacagcttcatcacggacgtggactacctgcatcacaagtacccagggacctccatcgtgtttgacatgagcctcacctacatcttggtggcactggcagctgtcctcctgaacaacgtcctggtggagagactgaccctgcacaccaggatcaccgcagcatctgcgacgtgtggctgcagctcttctctcgggaccaggcctacgccatcaacctggccgctgtgggcaccgtggccttcggctgcacagcaatccagcttctacgggtacacggggatgctgcccaagcggtacacgcagggggtgatgaccggggagagcacggcgggcgtgatgatctctctgagccgcatcctcacgaagctgctgctgcccgacgagcgcgccagcacgctcatcttcttcctggtgtcggtggcgctggagctgctgtgtttcctgctgcacctgttagtgcggcgcagccgcttcgtgctcttctataccacacggccgcgtgacagccaccggggcaggccaggcctgggcaggggctatggctaccgcgtgcaccacgacgttgtcgccggggacgtccacttcgagcacccagccccggccctggcccccaacgagtccccaaaggacagcccagcccacgaggtgaccggcagcggcggggcctacatgcgctttgatgtgccgcggccaagggtccagcgcagctggcccaccttcagagccctgttactgcaccgctacgtggtggcgcgggtgatctgggccgacatgctctccatcgccgtgacctacttcatcacgctgtgcctgttccccggcctcgagtctgagatccgccactgcatcctgggcgagtggctgcccatcctcatcatggctgtgttcaacctgtcagacttcgtgggcaagatcctggcagccctgcccgtggactggcggggcacccacctgctggcctgctcctgcctgcgtgtggtcttcatccccctcttcatcctgtgcgtctaccccagcggcatgcccgccctccgtcaccccgcctggccctgcatcttctcactgctcatgggcatcagcaacggctacttcggcagcgtgcccatgatcctggcggcaggcaaagtgagccccaagcagcgggagctggcagggaacaccatgaccgtgtcctacatgtcagggctgacgctggggtccgccgtggcctactgcacctacagcctcacccgcgacgctcacggcagctgcctgcacgcctccaccgccaatggttccatcctcgcaggcctctgagccagccccgcccactgccagggacgccgagggcctgaccaggggccccgaggcctgagggcccctcccctgtccccacctcagtgcctgcggggccctgagcctccccctgtgccagcagccccactccctcagggtccagccatgccccaccctggactgaagttctgcaaagtcctccgaggaccggaacacgtttctgcgacccggggctctggccagcactgtgttctgcgtttggtctcatacctgcgtctaccttccatctgtgtccagcggccccggctccagcccagccagcactctgcagggtcacacgcaccgtgtccccacccaggacagcagacacccgccagagtgtgcgcgcccagtgactgcaccccggccctcatcacccaccggcactgatcggggcaccgcctggcccagcctccaccagggacccctcctcatgaactctggagccctgagaggagaggggcagccccccaccttgtcaccctcagggcttccccttctgtcctcattcttagagactgcttctcccaaacataacgcgttagccatgaaggagtcggagccctgggtccgaatggacccgcctgcggtctgcatcagcctctgggaaaccacagcagtgatgccagctgggcacgtcaggacctccccacacacccacacgatgccacaggtcagggggctgtgcctgactagggagccctcccattgccttcctggcccgggatagaagaggggaggtaagtctgggggctacgaagccgggcccccacaccctggctgaagtcagcttgacctaggtcttgaccctcatccagcaagggactcgacagacccaagggtccctggaacgtagggaggggctgggggtcagtccagcccgggcctcccagaacaccaggcccgtgtgggtggcaccctgaggtcaggggatcctaagggtgtccttccagagacggtgtttccagggggaggaccgcccccgcttccagatccccggccccggctgtgactgccctgtttcacccctgctgtgtcccatcccccgtctgtccactaactgtaccgcaccggccattaaaagatgaaggcagaccgctgca

SEQ ID NO: 183691 - DNA, 623 bp, Homo sapiens
  Payload ID: 16190
  Gene Symbol: SLC29A4
  Gene Name: solute carrier family 29 (equilibrative nucleoside transporter), member 4
  ENST ID: ENST00000434816
  CDS Start-End: 135-623
acagcctcctcttgtaaatagagagtacaaaggcttctccgagtagtgtgtatgccgggcagacgctgatgccacggggagaggccttagaaggagcacaggaaagtcccaggtaagaaccagcagaggctgccatgggctccgtggggagccagcgccttgaggagcccagcgtggcaggcacaccagacccgggcgtagtgatgagcttcaccttcgacagtcaccagctggaggaggcggcggaggcggctcagggccagggccttagggccaggggcgtcccagctttcacggatactacattggacgagccagtgcccgatgaccgttatcacgccatctactttgcgatgctgctggctggcgtgggcttcctgctgccatacaacagcttcatcacggacgtggactacctgcatcacaagtacccagggacctccatcgtgtttgacatgagcctcacctacatcttggtggcactggcagctgtcctcctgaacaacgtcctggtggagagactgaccctgcacaccaggatcaccgcaggctacctcttagccttgggccctctcctttttatcagcatctgcgacgtgtggctgcagctcttctctcgggac

SEQ ID NO: 183692 - DNA, 585 bp, Homo sapiens
  Payload ID: 16190
  Gene Symbol: SLC29A4
  Gene Name: solute carrier family 29 (equilibrative nucleoside transporter), member 4
  ENST ID: ENST00000444741
  CDS Start-End: 133-585
gtggaccggggccgggcggactcggggaccggcggaggacgccgggcgcgcccggcccgaggctgggggagcggggcggcgtggcgggcgcgccgaggaccccaggccgggccgggccgagcagaggctgccatgggctccgtggggagccagcgccttgaggagcccagcgtggcaggcacaccagacccgggcgtagtgatgagcttcaccttcgacagtcaccagctggaggaggcggcggaggcggctcagggccagggccttagggccaggggcgtcccagctttcacggatactacattggacgagccagtgcccgatgaccgttatcacgccatctactttgcgatgctgctggctggcgtgggcttcctgctgccatacaacagcttcatcacggacgtggactacctgcatcacaagtacccagggacctccatcgtgtttgacatgagcctcacctacatcttggtggcactggcagctgtcctcctgaacaacgtcctggtggagagactgaccctgcacaccaggatcaccgcagcatctgcgacgtgtggctgcagctcttctctcgggacc

SEQ ID NO: 183693 - DNA, 2989 bp, Homo sapiens
  Payload ID: 16191
  Gene Symbol: SLC3A1
  Gene Name: solute carrier family 3 (amino acid transporter heavy chain), member 1
  Uniprot ID: Q07837
  ENST ID: ENST00000260649
  CDS Start-End: 77-2134
gaccaagcattcagcaagccactcttccacctcccttactgcaggaaggcactccgaagacataagtcggtgagacatggctgaagataaaagcaagagagactccatcgagatgagtatgaagggatgccagacaaacaacgggtttgtccataatgaagacattctggagcagaccccggatccaggaagctcaacagacaacctgaagcacagcaccaggggcatccttggctcccaggagcccgacttcaagggcgtccagccctatgcggggatgcccaaggaggtgctgttccagttctctggccaggcccgctaccgcatacctcgggagatcctcttctggctcacagtggcttctgtgctggtgctcatcgcggccaccatagccatcattgccctctctccaaagtgcctagactggtggcaggaggggcccatgtaccagatctacccaaggtctttcaaggacagtaacaaggatgggaacggagatctgaaaggtattcaagataaactggactacatcacagctttaaatataaaaactgtttggattacttcattttataaatcgtcccttaaagatttcagatatggtgttgaagatttccgggaagttgatcccatttttggaacgatggaagattttgagaatctggttgcagccatacatgataaaggtttaaaattaatcatcgatttcataccaaaccacacgagtgataaacatatttggtttcaattgagtcggacacggacaggaaaatatactgattattatatctggcatgactgtacccatgaaaatggcaaaaccattccacccaacaactggttaagtgtgtatggaaactccagttggcactttgacgaagtgcgaaaccaatgttattttcatcagtttatgaaagagcaacctgatttaaatttccgcaatcctgatgttcaagaagaaataaaagaaattttacggttctggctcacaaagggtgttgatggttttagtttggatgctgttaaattcctcctagaagcaaagcacctgagagatgagatccaagtaaataagacccaaatcccggacacggtcacacaatactcggagctgtaccatgacttcaccaccacgcaggtgggaatgcacgacattgtccgcagcttccggcagaccatggaccaatacagcacggagcccggcagatacaggttcatggggactgaagcctatgcagagagtattgacaggaccgtgatgtactatggattgccatttatccaagaagctgattttcccttcaacaattacctcagcatgctagacactgtttctgggaacagcgtgtatgaggttatcacatcctggatggaaaacatgccagaaggaaaatggcctaactggatgattggtggaccagacagttcacggctgacttcgcgtttggggaatcagtatgtcaacgtgatgaacatgcttcttttcacactccctggaactcctataacttactatggagaagaaattggaatgggaaatattgtagccgcaaatctcaatgaaagctatgatattaatacccttcgctcaaagtcaccaatgcagtgggacaatagttcaaatgctggtttttctgaagctagtaacacctggttacctaccaattcagattaccacactgtgaatgttgatgtccaaaagactcagcccagatcggctttgaagttatatcaagatttaagtctacttcatgccaatgagctactcctcaacaggggctggttttgccatttgaggaatgacagccactatgttgtgtacacaagagagctggatggcatcgacagaatctttatcgtggttctgaattttggagaatcaacactgttaaatctacataatatgatttcgggccttcccgctaaaatgagaataaggttaagtaccaattctgccgacaaaggcagtaaagttgatacaagtggcatttttctggacaagggagagggactcatctttgaacacaacacgaagaatctccttcatcgccaaacagctttcagagatagatgctttgtttccaatcgagcatgctattccagtgtactgaacatactgtatacctcgtgttaggcacctttatgaagagatgaagacactggcatttcagtgggattgtaagcatttgtaatagcttcatgtacagcatgctgcttggtgaacaatcattaattcttcgatatttctgtagcttgaatgtaactgctttaagaaaggttctcaaatgttttgaaaaaaataaaatgtttaaaagtaaattatggcttataggagcttataactttattcagatagcatcaatcagggatgaccagaacacattaggaccccagattattcaaaaactttaacgaattttaaggggaagaattttatcttttcccttaaaatgcagtcatagaaattagaggatgactcactgccacagtgtctaaaagcatttgctagcaaagaggcaggacactaatttgtaaactgctcaactgttctgactggaagggaggcctggagctctgctatcaccaatccttcccttccctctactccacatccttctaaggagcatgatttgaaaattactttcctaggttaatgggcatgtgcatcaatggagagaatagtataagcaagtgagatgtagactaagcaaaatttagatggagaagcacattttaaaaaattaataacttaaaagtctcaagttattaattttttttttgctaactcaattggaagtaagactatgaaatatttcagtgtgtttccaattcccagttgaatgcagtgtttcagaatttcaggtatttcttaagatcctcgaaaacactggtgctgtcaagtccaagttcctcgtacaggaatttaatttgggctgtaatctaaaagaaacacattaaaaaaattaaatagaaggcctttgtagtaaaa

SEQ ID NO: 183694 - DNA, 2909 bp, Homo sapiens
  Payload ID: 16191
  Gene Symbol: SLC3A1
  Gene Name: solute carrier family 3 (amino acid transporter heavy chain), member 1
  Uniprot ID: Q07837
  ENST ID: ENST00000409229
  CDS Start-End: 1-1695
atggctgaagataaaagcaagagagactccatcgagatgagtatgaagggatgccagacaaacaacgggtttgtccataatgaagacattctggagcagaccccggatccaggaagctcaacagacaacctgaagcacagcaccaggggcatccttggctcccaggagcccgacttcaagggcgtccagccctatgcggggatgcccaaggaggtgctgttccagttctctggccaggcccgctaccgcatacctcgggagatcctcttctggctcacagtggcttctgtgctggtgctcatcgcggccaccatagccatcattgccctctctccaaagtgcctagactggtggcaggaggggcccatgtaccagatctacccaaggtctttcaaggacagtaacaaggatgggaacggagatctgaaaggtattcaagataaactggactacatcacagctttaaatataaaaactgtttggattacttcattttataaatcgtcccttaaagatttcagatatggtgttgaagatttccgggaagttgatcccatttttggaacgatggaagattttgagaatctggttgcagccatacatgataaaggtttaaaattaatcatcgatttcataccaaaccacacgagtgataaacatatttggtttcaattgagtcggacacggacaggaaaatatactgattattatatctggcatgactgtacccatgaaaatggcaaaaccattccacccaacaactggttaagtgtgtatggaaactccagttggcactttgacgaagtgcgaaaccaatgttattttcatcagtttatgaaagagcaacctgatttaaatttccgcaatcctgatgttcaagaagaaataaaagaaattttacggttctggctcacaaagggtgttgatggttttagtttggatgctgttaaattcctcctagaagcaaagcacctgagagatgagatccaagtaaataagacccaaatcccggacacggtcacacaatactcggagctgtaccatgacttcaccaccacgcaggtgggaatgcacgacattgtccgcagcttccggcagaccatggaccaatacagcacggagcccggcagatacaggttcatggggactgaagcctatgcagagagtattgacaggaccgtgatgtactatggattgccatttatccaagaagctgattttcccttcaacaattacctcagcatgctagacactgtttctgggaacagcgtgtatgaggttatcacatcctggatggaaaacatgccagaaggaaaatggcctaactggatgattggtggaccagacagttcacggctgacttcgcgtttggggaatcagtatgtcaacgtgatgaacatgcttcttttcacactccctggaactcctataacttactatggagaagaaattggaatgggaaatattgtagccgcaaatctcaatgaaagctatgatattaatacccttcgctcaaagtcaccaatgcagtgggacaatagttcaaatgctggtttttctgaagctagtaacacctggttacctaccaattcagattaccacactgtgaatgttgatgtaagtatcagtgaaaattttatgttgattctagaaacaaagaaatgggtttctactgaaagtacacactcaccctgaatgtgtctaaaccttaacggatactctttaaatcaatcacagacttccttgcagttttccatttgtaaggagtttgtaaatcatgcctttgtgaaaatacaaactggtacaaatctaccaagtgaagtgaagtatcatatagaatatacaagtcttcattgcaatgacctttactaaggcctttgagctatgaaggaaattttatgaagttttttagctagcccagctgcctttcctcctctcttcccctcaaaaggcagggagagaggcgagtggataggcagccatgcaggcagtaaggagatcaatcaatcaacccagagcaaggctcaaatccacactactgttctgaagaaacagaagccatacatgatccttaaagtggttgctctggcatactaatacaactttggcttttacccttttttctgttcccatagtgatcaagcactaatgtcattcactagtgaaaacttcactggaaaacaaactaaaccaatttaggggaaatgaaattatagatgccacatggagatagttaagaaatgcatagcaccctctgccacacacacacacacaccatgcccatcccactctactgagtaatctgaggaaactccccaggatattcagatatagaaagccacacaaaccctcctgctcccacagctccctgctacaagcaccactgagaattcttggatagtataagctttgttttatatagttgtaagtcttgaagacacaaaatatatatgggttgaatgcctcttgattctcattatgtctaaaatattcccataggccaaggccaatctgaatacagtatgtaggaagtcctacataaaaatgcataccagcaaagatggagaaaatgcaaattaaaacagtgattttttttttttttttttttttttttgagatggagttttgcttttgttgcccgggctagagtgcaatggtgtggtcttggctcaccgcaacctccatctcctgggttcaagcgattctcctaccttggcctcccaagtatctgggattacaggtgcccgccaggcgcctgccaccatgtatggctaatttttgtatttttagtggagacggggtttcaccatgttgggcaggctggtttcaaactcctgatctcaagtgatccgcccacctcggcctcccaaagtgttgggattacaggcgtgagccactacgcccagcca

SEQ ID NO: 183695 - DNA, 1418 bp, Homo sapiens
  Payload ID: 16191
  Gene Symbol: SLC3A1
  Gene Name: solute carrier family 3 (amino acid transporter heavy chain), member 1
  Uniprot ID: Q07837
  ENST ID: ENST00000409740
  CDS Start-End: 309-1259
cacctatgagtgagaacatgcggtgtttggttttctgtccttgtgatagtttgcttagaatgatggtttccagcttcatccatgtccctgcaaaggacatggactcatccttttttatggctgcatagtattccatggtgtgtatgtgccacattttcttaatccagtctaacatttggtgacagcttgattatgctttctagaaggtgctagtcctatatggttaatagtgtgcattcagcccctacatcttgtacatgcaagataagcagctgtggagtgccttcccagtcttctgacaggccccgatgacactgaaccttgtcaactcttataggttcatggggactgaagcctatgcagagagtattgacaggaccgtgatgtactatggattgccatttatccaagaagctgattttcccttcaacaattacctcagcatgctagacactgtttctgggaacagcgtgtatgaggttatcacatcctggatggaaaacatgccagaaggaaaatggcctaactggatgattggtggaccagacagttcacggctgacttcgcgtttggggaatcagtatgtcaacgtgatgaacatgcttcttttcacactccctggaactcctataacttactatggagaagaaattggaatgggaaatattgtagccgcaaatctcaatgaaagctatgatattaatacccttcgctcaaagtcaccaatgcagtgggacaatagttcaaatgctggtttttctgaagctagtaacacctggttacctaccaattcagattaccacactgtgaatgttgatgtccaaaagactcagcccagatcggctttgaagttatatcaagatttaagtctacttcatgccaatgagctactcctcaacaggggctggttttgccatttgaggaatgacagccactatgttgtgtacacaagagagctggatggcatcgacagaatctttatcgtggttctgaattttggagaatcaacactgttaaatctacataatatgatttcgggccttcccgctaaaatgagaataaggttaagtaccaattctgccgacaaaggcagtaaagttgatacaagtggcatttttctggacaagggagagggactcatctttgaacacaacacgaagaatctccttcatcgccaaacagctttcagagatagatgctttgtttccaatcgagcatgctattccagtgtactgaacatactgtatacctcgtgttaggcacctttatgaagagatgaagacactggcatttcagtgggattgtaagcatttgtaatagcttcatgtacagcatgctgcttggtgaacaatcattaattcttcgatatttctgtagcttgaatgtaactgctttaagaaaggttctcaaatgttttg

SEQ ID NO: 183696 - DNA, 2424 bp, Homo sapiens
  Payload ID: 16191
  Gene Symbol: SLC3A1
  Gene Name: solute carrier family 3 (amino acid transporter heavy chain), member 1
  Uniprot ID: Q07837
  ENST ID: ENST00000409380
  CDS Start-End: 1019-2242
tcttcagttccttttgtattctggatactgattttttattgtttatgtacactaaaaatctcttgccctggttgtgtccaggtgggctgtgtgttgaattggaaagggtgcatgtccttgaaaggcagcagctactactcagcatctgcctgtgttgccatggacatgtggactcagtgtaactacgtcttccaactcaaaaagatttatgtaaaatctcccagttgttaaatgttttccagatgttctctttaacatgaaatggacaaaaggcctaggacagagccccatgaaactctcacattcaagggcccacagcgttgacttaaggagtggccagagatgtgggagggcagccgggagagtcataccatggggccataaatgtgagcatttccagacagaggagaccagcgacatcgtcaactattgctgagtaccaacacttgaagttgctttttattcttggagactggtagagattttaagtgaaggattctaataattttctggggatataatttaaatattcagtctatctgggctcaagctccaagatgagcggaatgtttctttcttccaaattgactaccattttgcttctcttcacaaacaagagtttggatcctggacagaagattcaagaaaatacattagtaatgtcagttccttaagttgaccttgtcttgggtttgagaacattggtttgctgttgcagttgttacaaacagcatctactgtaaaaatacgttgcaaccatgtttgtgaggcattaggccaatggggtggggggtatttggaaggggtttctttaacctgctgctctctgtagaaggaaaactctcaggatttacatactctgcctgcaaaggatcagggagggcaatgatctttatttgtgggcaataccattataggtcactgatgtgctgttttctttgtttgccagttaagtgtgtatggaaactccagttggcactttgacgaagtgcgaaaccaatgttattttcatcagtttatgaaagagcaacctgatttaaatttccgcaatcctgatgttcaagaagaaataaaagaaattttacggttctggctcacaaagggtgttgatggttttagtttggatgctgttaaattcctcctagaagcaaagcacctgagagatgagatccaagtaaataagacccaaatcccggacacggtcacacaatactcggagctgtaccatgacttcaccaccacgcaggtgggaatgcacgacattgtccgcagcttccggcagaccatggaccaatacagcacggagcccggcagatacaggttcatggggactgaagcctatgcagagagtattgacaggaccgtgatgtactatggattgccatttatccaagaagctgattttcccttcaacaattacctcagcatgctagacactgtttctgggaacagcgtgtatgaggttatcacatcctggatggaaaacatgccagaaggaaaatggcctaactggatgattggtggaccagacagttcacggctgacttcgcgtttggggaatcagtatgtcaacgtgatgaacatgcttcttttcacactccctggaactcctataacttactatggagaagaaattggaatgggaaatattgtagccgcaaatctcaatgaaagctatgatattaatacccttcgctcaaagtcaccaatgcagtgggacaatagttcaaatgctggtttttctgaagctagtaacacctggttacctaccaattcagattaccacactgtgaatgttgatgtccaaaagactcagcccagatcggctttgaagttatatcaagatttaagtctacttcatgccaatgagctactcctcaacaggggctggttttgccatttgaggaatgacagccactatgttgtgtacacaagagagctggatggcatcgacagaatctttatcgtggttctgaattttggagaatcaacactgttaaatctacataatatgatttcgggccttcccgctaaaatgagaataaggttaagtaccaattctgccgacaaaggcagtaaagttgatacaagtggcatttttctggacaagggagagggactcatctttgaacacaacacgaagaatctccttcatcgccaaacagctttcagagatagatgctttgtttccaatcgagcatgctattccagtgtactgaacatactgtatacctcgtgttaggcacctttatgaagagatgaagacactggcatttcagtgggattgtaagcatttgtaatagcttcatgtacagcatgctgcttggtgaacaatcattaattcttcgatatttctgtagcttgaatgtaactgctttaagaaaggttctcaaatgttttgaaaaaaataaaatgtttaaaagt

SEQ ID NO: 183697 - DNA, 792 bp, Homo sapiens
  Payload ID: 16191
  Gene Symbol: SLC3A1
  Gene Name: solute carrier family 3 (amino acid transporter heavy chain), member 1
  ENST ID: ENST00000409294
  CDS Start-End: 69-623
taaattcctcctagaagcaaagcacctgagagatgagatccaagtaaataagacccaaatcccggttcatggggactgaagcctatgcagagagtattgacaggaccgtgatgtactatggattgccatttatccaagaagctgattttcccttcaacaattacctcagcatgctagacactgtttctgggaacagcgtgtatgaggttatcacatcctggatggaaaacatgccagaaggaaaatggcctaactggatgattggtggaccagacagttcacggctgacttcgcgtttggggaatcagtatgtcaacgtgatgaacatgcttcttttcacactccctggaactcctataacttactatggagaagaaattggaatgggaaatattgtagccgcaaatctcaatgaaagctatgatattaatacccttcgctcaaagtcaccaatgcagtgggacaatagttcaaatgctggtttttctgaagctagtaacacctggttacctaccaattcagattaccacactgtgaatgttgatgtaagtatcagtgaaaattttatgttgattctagaaacaaagaaatgggtttctactgaaagtacacactcaccctgaatgtgtctaaaccttaacggatactctttaaatcaatcacagacttccttgcagttttccatttgtaaggagtttgtaaatcatgcctttgtgaaaatacaaactggtacaaatctaccaagtgaagtgaagtatcatatagaatatacaagtcttcattgcaatgacc

SEQ ID NO: 183698 - DNA, 1537 bp, Homo sapiens
  Payload ID: 16191
  Gene Symbol: SLC3A1
  Gene Name: solute carrier family 3 (amino acid transporter heavy chain), member 1
  Uniprot ID: Q07837
  ENST ID: ENST00000409741
  CDS Start-End: 1-1509
atggctgaagataaaagcaagagagactccatcgagatgagtatgaagggatgccagacaaacaacgggtttgtccataatgaagacattctggagcagaccccggatccaggaagctcaacagacaacctgaagcacagcaccaggggcatccttggctcccaggagcccgacttcaagggcgtccagccctatgcggggatgcccaaggaggtgctgttccagttctctggccaggcccgctaccgcatacctcgggagatcctcttctggctcacagtggcttctgtgctggtgctcatcgcggccaccatagccatcattgccctctctccaaagtgcctagactggtggcaggaggggcccatgtaccagatctacccaaggtctttcaaggacagtaacaaggatgggaacggagatctgaaaggtattcaagataaactggactacatcacagctttaaatataaaaactgtttggattacttcattttataaatcgtcccttaaagatttcagatatggtgttgaagatttccgggaagttgatcccatttttggaacgatggaagattttgagaatctggttgcagccatacatgataaaggtttaaaattaatcatcgatttcataccaaaccacacgagtgataaacatatttggtttcaattgagtcggacacggacaggaaaatatactgattattatatctggcatgactgtacccatgaaaatggcaaaaccattccacccaacaactggttaagtgtgtatggaaactccagttggcactttgacgaagtgcgaaaccaatgttattttcatcagtttatgaaagagcaacctgatttaaatttccgcaatcctgatgttcaagaagaaataaaagaaattttacggttctggctcacaaagggtgttgatggttttagtttggatgctgttaaattcctcctagaagcaaagcacctgagagatgagatccaagtaaataagacccaaatcccggacacggtcacacaatactcggagctgtaccatgacttcaccaccacgcaggtgggaatgcacgacattgtccgcagcttccggcagaccatggaccaatacagcacggagcccggcagatacaggttcatggggactgaagcctatgcagagagtattgacaggaccgtgatgtactatggattgccatttatccaagaagctgattttcccttcaacaattacctcagcatgctagacactgtttctgggaacagcgtgtatgaggttatcacatcctggatggaaaacatgccagaaggaaaatggcctaactggatgattggtggaccagacagttcacggctgacttcgcgtttggggaatcagtatgtcaacgtgatgaacatgcttcttttcacactccctggaactcctataacttactatggagaagaaattggaatgggaaatattgtagccgcaaatctcaatgaaagctatgatattgtaagttgaatacaacttgactattcatcacagctat

SEQ ID NO: 183699 - DNA, 2334 bp, Homo sapiens
  Payload ID: 16191
  Gene Symbol: SLC3A1
  Gene Name: solute carrier family 3 (amino acid transporter heavy chain), member 1
  ENST ID: ENST00000409387
  CDS Start-End: 73-1767
aagcattcagcaagccactcttccacctcccttactgcaggaaggcactccgaagacataagtcggtgagacatggctgaagataaaagcaagagagactccatcgagatgagtatgaagggatgccagacaaacaacgggtttgtccataatgaagacattctggagcagaccccggatccaggaagctcaacagacaacctgaagcacagcaccaggggcatccttggctcccaggagcccgacttcaagggcgtccagccctatgcggggatgcccaaggaggtgctgttccagttctctggccaggcccgctaccgcatacctcgggagatcctcttctggctcacagtggcttctgtgctggtgctcatcgcggccaccatagccatcattgccctctctccaaagtgcctagactggtggcaggaggggcccatgtaccagatctacccaaggtctttcaaggacagtaacaaggatgggaacggagatctgaaaggtattcaagataaactggactacatcacagctttaaatataaaaactgtttggattacttcattttataaatcgtcccttaaagatttcagatatggtgttgaagatttccgggaagttgatcccatttttggaacgatggaagattttgagaatctggttgcagccatacatgataaaggtttaaaattaatcatcgatttcataccaaaccacacgagtgataaacatatttggtttcaattgagtcggacacggacaggaaaatatactgattattatatctggcatgactgtacccatgaaaatggcaaaaccattccacccaacaactggttaagtgtgtatggaaactccagttggcactttgacgaagtgcgaaaccaatgttattttcatcagtttatgaaagagcaacctgatttaaatttccgcaatcctgatgttcaagaagaaataaaagaaattttacggttctggctcacaaagggtgttgatggttttagtttggatgctgttaaattcctcctagaagcaaagcacctgagagatgagatccaagtaaataagacccaaatcccggacacggtcacacaatactcggagctgtaccatgacttcaccaccacgcaggtgggaatgcacgacattgtccgcagcttccggcagaccatggaccaatacagcacggagcccggcagatacaggttcatggggactgaagcctatgcagagagtattgacaggaccgtgatgtactatggattgccatttatccaagaagctgattttcccttcaacaattacctcagcatgctagacactgtttctgggaacagcgtgtatgaggttatcacatcctggatggaaaacatgccagaaggaaaatggcctaactggatgattggtggaccagacagttcacggctgacttcgcgtttggggaatcagtatgtcaacgtgatgaacatgcttcttttcacactccctggaactcctataacttactatggagaagaaattggaatgggaaatattgtagccgcaaatctcaatgaaagctatgatattaatacccttcgctcaaagtcaccaatgcagtgggacaatagttcaaatgctggtttttctgaagctagtaacacctggttacctaccaattcagattaccacactgtgaatgttgattcttgctccgtcacccatgctcgagtgcagtggcgtgatctcggcacactgcagcctctgcttcctgggttcaagtgattctcctgctgcagcctcccaagtagctgggattacaggtgcacgtcattatgcccgggtaatttctgtattttttagtagagatggtgtttcaccatgttggccaggctggtcttgaactcctgacctctggtgatctgtctgccttgcctcccaaagtgctaggattacgggcctgagccaccttgcctggcctgcaaaatttgtttttaatagaagacacaagaaatgatttaaatattttatcaacagaaaaccagttctatcaactatgggcccagtatgcagcttttaaaaatgacagttctatatacattgatatgagaccatttcaaacaggtattcaataaagtatagaatggtaacatatcaccaactgtgtaaagaaaaatatataaacatatgaaatgatacattctgtgcctatgcaaacatatgatacattaaaaacaaaagaacatatagtgcctgtctctgaggggaactgtgaagctatggaaaggtgttgaagaaaacctttttatagtatgtattcttgtaattgaataaaaaataaaattacaaaaa

SEQ ID NO: 183700 - DNA, 1426 bp, Homo sapiens
  Payload ID: 16191
  Gene Symbol: SLC3A1
  Gene Name: solute carrier family 3 (amino acid transporter heavy chain), member 1
  Uniprot ID: Q07837
  ENST ID: ENST00000410056
  CDS Start-End: 1-1176
atggctgaagataaaagcaagagagactccatcgagatgagtatgaagggatgccagacaaacaacgggtttgtccataatgaagacattctggagcagaccccggatccaggaagctcaacagacaacctgaagcacagcaccaggggcatccttggctcccaggagcccgacttcaagggcgtccagccctatgcggggatgcccaaggaggtgctgttccagttctctggccaggcccgctaccgcatacctcgggagatcctcttctggctcacagtggcttctgtgctggtgctcatcgcggccaccatagccatcattgccctctctccaaagtgcctagactggtggcaggaggggcccatgtaccagatctacccaaggtctttcaaggacagtaacaaggatgggaacggagatctgaaaggtattcaagataaactggactacatcacagctttaaatataaaaactgtttggattacttcattttataaatcgtcccttaaagatttcagatatggtgttgaagatttccgggaagttgatcccatttttggaacgatggaagattttgagaatctggttgcagccatacatgataaaggtttaaaattaatcatcgatttcataccaaaccacacgagtgataaacatatttggtttcaattgagtcggacacggacaggaaaatatactgattattatatctggcatgactgtacccatgaaaatggcaaaaccattccacccaacaactggttaagtgtgtatggaaactccagttggcactttgacgaagtgcgaaaccaatgttattttcatcagtttatgaaagagcaacctgatttaaatttccgcaatcctgatgttcaagaagaaataaaagaaattttacggttctggctcacaaagggtgttgatggttttagtttggatgctgttaaattcctcctagaagcaaagcacctgagagatgagatccaagtaaataagacccaaatcccggacacggtcacacaatactcggagctgtaccatgacttcaccaccacgcaggtgggaatgcacgacattgtccgcagcttccggcagaccatggaccaatacagcacggagcccggcagatacaggttgaccacggcatatgctctcatttcttcccaggcttagtgtgtgatctgcagtgtatccctcacaaccaagtgtatttggaggttcaagtaataatgtaacaagcctgcataactctaattgattacagtttggttgtaccagggcctgccatattcctttcctgtttgcttattttgctgactttcagtttcctcttttgtaaaatgatgcagatcacactacgtacttcacaggagttttgtgaaaattaggttaatgaaaaagagattatattagctaaatgtta

SEQ ID NO: 183701 - DNA, 574 bp, Homo sapiens
  Payload ID: 16191
  Gene Symbol: SLC3A1
  Gene Name: solute carrier family 3 (amino acid transporter heavy chain), member 1
  ENST ID: ENST00000427285
  CDS Start-End: 146-574
agcgacatcgtcaactattgctgagtaccaacacttgaagttgctttttattcttggagactggtagagattttaagtgaaggattctaataattttctggggatataatttaaatattcagtctatctgggctcaagctccaagatgagcggaatgtttctttcttccaaattgactaccattttgcttctcttcacaaacaagagtttggatcctggacagaagattcaagaaaatacattattaagtgtgtatggaaactccagttggcactttgacgaagtgcgaaaccaatgttattttcatcagtttatgaaagagcaacctgatttaaatttccgcaatcctgatgttcaagaagaaataaaagaaattttacggttctggctcacaaagggtgttgatggttttagtttggatgctgttaaattcctcctagaagcaaagcacctgagagatgagatccaagtaaataagacccaaatcccggacacggtcacacaatactcggagctgtaccatgacttcaccaccacgcaggtgggaatgcacgacattgtccgcagcttccgg

SEQ ID NO: 183702 - DNA, 1737 bp, Homo sapiens
  Payload ID: 16191
  Gene Symbol: SLC3A1
  Gene Name: solute carrier family 3 (amino acid transporter heavy chain), member 1
  ENST ID: ENST00000611973
  CDS Start-End: 79-1737
aagaccaagcattcagcaagccactcttccacctcccttactgcaggaaggcactccgaagacataagtcggtgagacatggctgaagataaaagcaagagagactccatcgagatgagtatgaagggatgccagacaaacaacgggtttgtccataatgaagacattctggagcagaccccggatccaggaagctcaacagacaacctgaagcacagcaccaggggcatccttggctcccaggagcccgacttcaagggcgtccagccctatgcggggatgcccaaggaggtgctgttccagttctctggccaggcccgctaccgcatacctcgggagatcctcttctggctcacagtggcttctgtgctggtgctcatcgcggccaccatagccatcattgccctctctccaaagtgcctagactggtggcaggaggggcccatgtaccagatctacccaaggtctttcaaggacagtaacaaggatgggaacggagatctgaaaggtattcaagataaactggactacatcacagctttaaatataaaaactgtttggattacttcattttataaatcgtcccttaaagatttcagatatggtgttgaagatttccgggaagttgatcccatttttggaacgatggaagattttgagaatctggttgcagccatacatgataaaggtttaaaattaatcatcgatttcataccaaaccacacgagtgataaacatatttggtttcaattgagtcggacacggacaggaaaatatactgattattatatctggcatgactgtacccatgaaaatggcaaaaccattccacccaacaactggttaagtgtgtatggaaactccagttggcactttgacgaagtgcgaaaccaatgttattttcatcagtttatgaaagagcaacctgatttaaatttccgcaatcctgatgttcaagaagaaataaaagaaattttacggttctggctcacaaagggtgttgatggttttagtttggatgctgttaaattcctcctagaagcaaagcacctgagagatgagatccaagtaaataagacccaaatcccggacacggtcacacaatactcggagctgtaccatgacttcaccaccacgcaggtgggaatgcacgacattgtccgcagcttccggcagaccatggaccaatacagcacggagcccggcagatacaggttcatggggactgaagcctatgcagagagtattgacaggaccgtgatgtactatggattgccatttatccaagaagctgattttcccttcaacaattacctcagcatgctagacactgtttctgggaacagcgtgtatgaggttatcacatcctggatggaaaacatgccagaaggaaaatggcctaactggatgattggtggaccagacagttcacggctgacttcgcgtttggggaatcagtatgtcaacgtgatgaacatgcttcttttcacactccctggaactcctataacttactatggagaagaaattggaatgggaaatattgtagccgcaaatctcaatgaaagctatgatattaatacccttcgctcaaagtcaccaatgcagtgggacaatagttcaaatgctggtttttctgaagctagtaacacctggttacctaccaattcagattaccacactgtgaatgttgatgtaatcttgctccgtcacccatgctcgagtgcagtggcgtga

SEQ ID NO: 183703 - DNA, 1904 bp, Homo sapiens
  Payload ID: 16192
  Gene Symbol: SLC3A2
  Gene Name: solute carrier family 3 (amino acid transporter heavy chain), member 2
  Uniprot ID: P08195
  ENST ID: ENST00000338663
  CDS Start-End: 153-1742
cagaggccgcgcctgctgctgagcagatgcagtagccgaaactgcgcggaggcacagaggccggggagagcgttctgggtccgagggtccaggtaggggttgagccaccatctgaccgcaagctgcgtcgtgtcgccggttctgcaggcaccatgagccaggacaccgaggtggatatgaaggaggtggagctgaatgagttagagcccgagaagcagccgatgaacgcggcgtctggggcggccatgtccctggcgggagccgagaagaatggtctggtgaagatcaaggtggcggaagacgaggcggaggcggcagccgcggctaagttcacgggcctgtccaaggaggagctgctgaaggtggcaggcagccccggctgggtacgcacccgctgggcactgctgctgctcttctggctcggctggctcggcatgcttgctggtgccgtggtcataatcgtgcgagcgccgcgttgtcgcgagctaccggcgcagaagtggtggcacacgggcgccctctaccgcatcggcgaccttcaggccttccagggccacggcgcgggcaacctggcgggtctgaaggggcgtctcgattacctgagctctctgaaggtgaagggccttgtgctgggtccaattcacaagaaccagaaggatgatgtcgctcagactgacttgctgcagatcgaccccaattttggctccaaggaagattttgacagtctcttgcaatcggctaaaaaaaagagcatccgtgtcattctggaccttactcccaactaccggggtgagaactcgtggttctccactcaggttgacactgtggccaccaaggtgaaggatgctctggagttttggctgcaagctggcgtggatgggttccaggttcgggacatagagaatctgaaggatgcatcctcattcttggctgagtggcaaaatatcaccaagggcttcagtgaagacaggctcttgattgcggggactaactcctccgaccttcagcagatcctgagcctactcgaatccaacaaagacttgctgttgactagctcatacctgtctgattctggttctactggggagcatacaaaatccctagtcacacagtatttgaatgccactggcaatcgctggtgcagctggagtttgtctcaggcaaggctcctgacttccttcttgccggctcaacttctccgactctaccagctgatgctcttcaccctgccagggacccctgttttcagctacggggatgagattggcctggatgcagctgcccttcctggacagcctatggaggctccagtcatgctgtgggatgagtccagcttccctgacatcccaggggctgtaagtgccaacatgactgtgaagggccagagtgaagaccctggctccctcctttccttgttccggcggctgagtgaccagcggagtaaggagcgctccctactgcatggggacttccacgcgttctccgctgggcctggactcttctcctatatccgccactgggaccagaatgagcgttttctggtagtgcttaactttggggatgtgggcctctcggctggactgcaggcctccgacctgcctgccagcgccagcctgccagccaaggctgacctcctgctcagcacccagccaggccgtgaggagggctcccctcttgagctggaacgcctgaaactggagcctcacgaagggctgctgctccgcttcccctacgcggcctgacttcagcctgacatggacccactacccttctcctttccttcccaggccctttggcttctgatttttctcttttttaaaaacaaacaaacaaactgttgcagattatgagtgaacccccaaatagggtgttttctgccttcaaataaaagtcacccctgcatg

SEQ ID NO: 183704 - DNA, 1993 bp, Homo sapiens
  Payload ID: 16192
  Gene Symbol: SLC3A2
  Gene Name: solute carrier family 3 (amino acid transporter heavy chain), member 2
  Uniprot ID: P08195
  ENST ID: ENST00000377889
  CDS Start-End: 127-1833
gcaggagcggtgagatcactgcctcacggcgatcctggactgacggtcacgactgcctaccctctaaccctgttctgagctgccccttgcccacacaccccaaacctgtgtgcaggatccgcctccatggagctacagcctcctgaagcctcgatcgccgtcgtgtcgattccgcgccagttgcctggctcacattcggaggctggtgtccagggtctcagcgcgggggacgactcaggcaccatgagccaggacaccgaggtggatatgaaggaggtggagctgaatgagttagagcccgagaagcagccgatgaacgcggcgtctggggcggccatgtccctggcgggagccgagaagaatggtctggtgaagatcaaggtggcggaagacgaggcggaggcggcagccgcggctaagttcacgggcctgtccaaggaggagctgctgaaggtggcaggcagccccggctgggtacgcacccgctgggcactgctgctgctcttctggctcggctggctcggcatgcttgctggtgccgtggtcataatcgtgcgagcgccgcgttgtcgcgagctaccggcgcagaagtggtggcacacgggcgccctctaccgcatcggcgaccttcaggccttccagggccacggcgcgggcaacctggcgggtctgaaggggcgtctcgattacctgagctctctgaaggtgaagggccttgtgctgggtccaattcacaagaaccagaaggatgatgtcgctcagactgacttgctgcagatcgaccccaattttggctccaaggaagattttgacagtctcttgcaatcggctaaaaaaaagagcatccgtgtcattctggaccttactcccaactaccggggtgagaactcgtggttctccactcaggttgacactgtggccaccaaggtgaaggatgctctggagttttggctgcaagctggcgtggatgggttccaggttcgggacatagagaatctgaaggatgcatcctcattcttggctgagtggcaaaatatcaccaagggcttcagtgaagacaggctcttgattgcggggactaactcctccgaccttcagcagatcctgagcctactcgaatccaacaaagacttgctgttgactagctcatacctgtctgattctggttctactggggagcatacaaaatccctagtcacacagtatttgaatgccactggcaatcgctggtgcagctggagtttgtctcaggcaaggctcctgacttccttcttgccggctcaacttctccgactctaccagctgatgctcttcaccctgccagggacccctgttttcagctacggggatgagattggcctggatgcagctgcccttcctggacagcctatggaggctccagtcatgctgtgggatgagtccagcttccctgacatcccaggggctgtaagtgccaacatgactgtgaagggccagagtgaagaccctggctccctcctttccttgttccggcggctgagtgaccagcggagtaaggagcgctccctactgcatggggacttccacgcgttctccgctgggcctggactcttctcctatatccgccactgggaccagaatgagcgttttctggtagtgcttaactttggggatgtgggcctctcggctggactgcaggcctccgacctgcctgccagcgccagcctgccagccaaggctgacctcctgctcagcacccagccaggccgtgaggagggctcccctcttgagctggaacgcctgaaactggagcctcacgaagggctgctgctccgcttcccctacgcggcctgacttcagcctgacatggacccactacccttctcctttccttcccaggccctttggcttctgatttttctcttttttaaaaacaaacaaacaaactgttgcagattatgagtgaacccccaaatagggtgttttctgccttcaaataaaagtcacccctgca

SEQ ID NO: 183705 - DNA, 2161 bp, Homo sapiens
  Payload ID: 16192
  Gene Symbol: SLC3A2
  Gene Name: solute carrier family 3 (amino acid transporter heavy chain), member 2
  Uniprot ID: P08195
  ENST ID: ENST00000377890
  CDS Start-End: 169-2061
accgaccgcattgcggcttggttttctcacccagtgcatgtggcaggagcggtgagatcactgcctcacggcgatcctggactgacggtcacgactgcctaccctctaaccctgttctgagctgccccttgcccacacaccccaaacctgtgtgcaggatccgcctccatggagctacagcctcctgaagcctcgatcgccgtcgtgtcgattccgcgccagttgcctggctcacattcggaggctggtgtccagggtctcagcgcgggggacgactcagagttggggtctcactgtgttgcccagactggtctcgaactcttggcctcaggtgatcctcttccctcagcttcccagaatgccgagatgatagagacggggtctgactgtgttacccaggctggtcttcaactcttggcctcaagtgatcctcctgccttagcttccaagaatgctgaggttacaggcaccatgagccaggacaccgaggtggatatgaaggaggtggagctgaatgagttagagcccgagaagcagccgatgaacgcggcgtctggggcggccatgtccctggcgggagccgagaagaatggtctggtgaagatcaaggtggcggaagacgaggcggaggcggcagccgcggctaagttcacgggcctgtccaaggaggagctgctgaaggtggcaggcagccccggctgggtacgcacccgctgggcactgctgctgctcttctggctcggctggctcggcatgcttgctggtgccgtggtcataatcgtgcgagcgccgcgttgtcgcgagctaccggcgcagaagtggtggcacacgggcgccctctaccgcatcggcgaccttcaggccttccagggccacggcgcgggcaacctggcgggtctgaaggggcgtctcgattacctgagctctctgaaggtgaagggccttgtgctgggtccaattcacaagaaccagaaggatgatgtcgctcagactgacttgctgcagatcgaccccaattttggctccaaggaagattttgacagtctcttgcaatcggctaaaaaaaagagcatccgtgtcattctggaccttactcccaactaccggggtgagaactcgtggttctccactcaggttgacactgtggccaccaaggtgaaggatgctctggagttttggctgcaagctggcgtggatgggttccaggttcgggacatagagaatctgaaggatgcatcctcattcttggctgagtggcaaaatatcaccaagggcttcagtgaagacaggctcttgattgcggggactaactcctccgaccttcagcagatcctgagcctactcgaatccaacaaagacttgctgttgactagctcatacctgtctgattctggttctactggggagcatacaaaatccctagtcacacagtatttgaatgccactggcaatcgctggtgcagctggagtttgtctcaggcaaggctcctgacttccttcttgccggctcaacttctccgactctaccagctgatgctcttcaccctgccagggacccctgttttcagctacggggatgagattggcctggatgcagctgcccttcctggacagcctatggaggctccagtcatgctgtgggatgagtccagcttccctgacatcccaggggctgtaagtgccaacatgactgtgaagggccagagtgaagaccctggctccctcctttccttgttccggcggctgagtgaccagcggagtaaggagcgctccctactgcatggggacttccacgcgttctccgctgggcctggactcttctcctatatccgccactgggaccagaatgagcgttttctggtagtgcttaactttggggatgtgggcctctcggctggactgcaggcctccgacctgcctgccagcgccagcctgccagccaaggctgacctcctgctcagcacccagccaggccgtgaggagggctcccctcttgagctggaacgcctgaaactggagcctcacgaagggctgctgctccgcttcccctacgcggcctgacttcagcctgacatggacccactacccttctcctttccttcccaggccctttggcttctgatttttctcttttttaaaaacaaacaaacaaactgttgca

SEQ ID NO: 183706 - DNA, 2222 bp, Homo sapiens
  Payload ID: 16192
  Gene Symbol: SLC3A2
  Gene Name: solute carrier family 3 (amino acid transporter heavy chain), member 2
  ENST ID: ENST00000377891
  CDS Start-End: 160-2055
attgcggcttggttttctcacccagtgcatgtggcaggagcggtgagatcactgcctcacggcgatcctggactgacggtcacgactgcctaccctctaaccctgttctgagctgccccttgcccacacaccccaaacctgtgtgcaggatccgcctccatggagctacagcctcctgaagcctcgatcgccgtcgtgtcgattccgcgccagttgcctggctcacattcggaggctggtgtccagggtctcagcgcgggggacgactcagagacggggtctgactgtgttacccaggctggtcttcaactcttggcctcaagtgatcctcctgccttagcttccaagaatgctgaggttacagtagaaacggggtttcaccatgttagccaggctgatattgaattcctgacctcaattgatccgactgcctcggcctccggaagtgctgggattacaggcaccatgagccaggacaccgaggtggatatgaaggaggtggagctgaatgagttagagcccgagaagcagccgatgaacgcggcgtctggggcggccatgtccctggcgggagccgagaagaatggtctggtgaagatcaaggtggcggaagacgaggcggaggcggcagccgcggctaagttcacgggcctgtccaaggaggagctgctgaaggtggcaggcagccccggctgggtacgcacccgctgggcactgctgctgctcttctggctcggctggctcggcatgcttgctggtgccgtggtcataatcgtgcgagcgccgcgttgtcgcgagctaccggcgcagaagtggtggcacacgggcgccctctaccgcatcggcgaccttcaggccttccagggccacggcgcgggcaacctggcgggtctgaaggggcgtctcgattacctgagctctctgaaggtgaagggccttgtgctgggtccaattcacaagaaccagaaggatgatgtcgctcagactgacttgctgcagatcgaccccaattttggctccaaggaagattttgacagtctcttgcaatcggctaaaaaaaagagcatccgtgtcattctggaccttactcccaactaccggggtgagaactcgtggttctccactcaggttgacactgtggccaccaaggtgaaggatgctctggagttttggctgcaagctggcgtggatgggttccaggttcgggacatagagaatctgaaggatgcatcctcattcttggctgagtggcaaaatatcaccaagggcttcagtgaagacaggctcttgattgcggggactaactcctccgaccttcagcagatcctgagcctactcgaatccaacaaagacttgctgttgactagctcatacctgtctgattctggttctactggggagcatacaaaatccctagtcacacagtatttgaatgccactggcaatcgctggtgcagctggagtttgtctcaggcaaggctcctgacttccttcttgccggctcaacttctccgactctaccagctgatgctcttcaccctgccagggacccctgttttcagctacggggatgagattggcctggatgcagctgcccttcctggacagcctatggaggctccagtcatgctgtgggatgagtccagcttccctgacatcccaggggctgtaagtgccaacatgactgtgaagggccagagtgaagaccctggctccctcctttccttgttccggcggctgagtgaccagcggagtaaggagcgctccctactgcatggggacttccacgcgttctccgctgggcctggactcttctcctatatccgccactgggaccagaatgagcgttttctggtagtgcttaactttggggatgtgggcctctcggctggactgcaggcctccgacctgcctgccagcgccagcctgccagccaaggctgacctcctgctcagcacccagccaggccgtgaggagggctcccctcttgagctggaacgcctgaaactggagcctcacgaagggctgctgctccgcttcccctacgcggcctgacttcagcctgacatggacccactacccttctcctttccttcccaggccctttggcttctgatttttctcttttttaaaaacaaacaaacaaactgttgcagattatgagtgaacccccaaatagggtgttttctgccttcaaataaaagtcacccctgcatggtgaa

SEQ ID NO: 183707 - DNA, 565 bp, Homo sapiens
  Payload ID: 16192
  Gene Symbol: SLC3A2
  Gene Name: solute carrier family 3 (amino acid transporter heavy chain), member 2
  ENST ID: ENST00000539458
  CDS Start-End: 129-565
agatgcagtagccgaaactgcgcggaggcacagaggccggggagagcgttctgggtccgagggtccaggtaggggttgagccaccatctgaccgcaagctgcgtcgtgtcgccggttctgcaggcaccatgagccaggacaccgaggtggatatgaaggaggtggagctgaatgagttagagcccgagaagcagccgatgaacgcggcgtctggggcggccatgtccctggcgggagccgagaagaatggtctggtgaagatcaaggtggcggaagacgaggcggaggcggcagccgcggctaagttcacgggcctgtccaaggaggagctgctgaaggtggcaggcagccccggctgggtacgcacccgctgggcactgctgctgctcttctggctcggctggctcggcatgcttgctggtctgaaggggcgtctcgattacctgagctctctgaaggtgaagggccttgtgctgggtccaattcacaagaaccagaaggatgatgtcgctcagactgacttgctgcagatcgaccccaattttggctccaaggaagattttga

SEQ ID NO: 183708 - DNA, 1300 bp, Homo sapiens
  Payload ID: 16192
  Gene Symbol: SLC3A2
  Gene Name: solute carrier family 3 (amino acid transporter heavy chain), member 2
  ENST ID: ENST00000539891
  CDS Start-End: 1098-1300
agttgcaaccggtttctgaagtaatgtgcaggactccttacatcagctcctctgagtctcgtgattcagccttgcctccctctctccccctttgccccctccccgtcccacccttaggcgctgggagaagggagggtggggaggtcaggggcctctcagaggggcctcacttgttaacccagcccccatttcaggtctgaaggggcgtctcgattacctgagctctctgaaggtgaagggccttgtgctgggtccaattcacaagaaccagaaggatgatgtcgctcagactgacttgctgcagatcgaccccaattttggctccaaggaagattttgacagtctcttgcaatcggctaaaaaaaagatagagacaattttcaacatgttgaccggtctggttttgaactcgcctggcctgccttcccatatcttaaggcccttccttgctcacatctgtttcaatggaatgaattttgcccgggttcaaattcaagcttttgtaccaagcatccgtgtcattctggaccttactcccaactaccggggtgagaactcgtggttctccactcaggttgacactgtggccaccaaggtgaaggcctcaggaaactgggagaggggggatcttgactgacattttagatcctgtctgctgctcactgattatgactgtggacgcgtctccctgcttctctgggtctgtttcttcatctctaaaataggatgctctggagttttggctgcaagctggcgtggatgggttccaggttcgggacatagagaatctgaaggatgcatcctcattcttggctgagtggcaaaatatcaccaagggcttcagtgaagacaggctcttgattgcggggactaactcctccgaccttcagcagatcctgagcctactcgaatccaacaaagacttgctgttgactagctcatacctgtctgattctggttctactggggagcatacaaaatccctagtcacacagtatttgaatgccactggcaatcgctggtgcagctggagtttgtctcaggcaaggctcctgacttccttcttgccggctcaacttctccgactctaccagctgatgctcttcaccctgccagggacccctgttttcagctacggggatgagattggcctggatgcagctgcccttcctggacagcctatggaggctccagtcatgctgtgggatgagtccagcttccctgacatcccaggggctgtaagtgccaacatgactgtgaagggccagagtgaagaccctggctccctcctttccttgtt

SEQ ID NO: 183709 - DNA, 741 bp, Homo sapiens
  Payload ID: 16192
  Gene Symbol: SLC3A2
  Gene Name: solute carrier family 3 (amino acid transporter heavy chain), member 2
  ENST ID: ENST00000538084
  CDS Start-End: 1-741
cttcccagaatgccgagatgatagagacggggtctgactgtgttacccaggctggtcttcaactcttggcctcaagtgatcctcctgccttagcttccaagaatgctgaggttacagaaacggggtttcaccatgttagccaggctgatattgaattcctgacctcaattgatccgactgcctcggcctccggaagtgctgggattacaggcaccatgagccaggacaccgaggtggatatgaaggaggtggagctgaatgagttagagcccgagaagcagccgatgaacgcggcgtctggggcggccatgtccctggcgggagccgagaagaatggtctggtgaagatcaaggtggcggaagacgaggcggaggcggcagccgcggctaagttcacgggcctgtccaaggaggagctgctgaaggtggcaggcagccccggctgggtacgcacccgctgggcactgctgctgctcttctggctcggctggctcggcatgcttgctggtgccgtggtcataatcgtgcgagcgccgcgttgtcgcgagctaccggcgcagaagtggtggcacacgggcgccctctaccgcatcggcgaccttcaggccttccagggccacggcgcgggcaacctggcgggtctgaaggggcgtctcgattacctgagctctctgaaggtgaagggccttgtgctgggtccaattcacaagaaccagaaggatgatgtcgctcagactgact

SEQ ID NO: 183710 - DNA, 534 bp, Homo sapiens
  Payload ID: 16192
  Gene Symbol: SLC3A2
  Gene Name: solute carrier family 3 (amino acid transporter heavy chain), member 2
  ENST ID: ENST00000539507
  CDS Start-End: 1-367
gctcttgattgcggggactaactcctccgaccttcagcagatcctgagcctactcgaatccaacaaagacttgctgttgactagctcatacctgtctgattctggttctactggggagcatacaaaatccctagtcacacagtatttgaatgccactggcaatcgctggtgcagctggagtttgtctcaggcaaggctcctgacttccttcttgccggctcaacttctccgactctaccagctgatgctcttcaccctgccagggacccctgttttcagctacggggatgagattggcctggatgcagctgcccttcctggacagcctcacgaagggctgctgctccgcttcccctacgcggcctgacttcagcctgacatggacccactacccttctcctttccttcccaggccctttggcttctgatttttctcttttttaaaaacaaacaaacaaactgttgcagattatgagtgaacccccaaatagggtgttttctgccttcaaataaaagtcacccctgcatggtgaa

SEQ ID NO: 183711 - DNA, 589 bp, Homo sapiens
  Payload ID: 16192
  Gene Symbol: SLC3A2
  Gene Name: solute carrier family 3 (amino acid transporter heavy chain), member 2
  ENST ID: ENST00000544377
  CDS Start-End: 185-589
gcaagccttggtgggggaaaaggcagaagttgtgactggctgcctctgagagtgcaagtagccatgcaaagttgggaaaaccagacggcggccggagccgtgaaccaggggcaaatggaggatggtgttggggtagtcactagcctgccggaatggaagaagaggggcgtttgggggcggcaccatgagccaggacaccgaggtggatatgaaggaggtggagctgaatgagttagagcccgagaagcagccgatgaacgcggcgtctggggcggccatgtccctggcgggagccgagaagaatggtctggtgaagatcaaggtggcggaagacgaggcggaggcggcagccgcggctaagttcacgggcctgtccaaggaggagctgctgaaggtggcaggcagccccggctgggtacgcacccgctgggcactgctgctgctcttctggctcggctggctcggcatgcttgctggtgccgtggtcataatcgtgcgagcgccgcgttgtcgcgagctaccggcgcagaagtggtggcacacgggcgccctctaccgcatcggcgaccttcaggccttccagggccac

SEQ ID NO: 183712 - DNA, 2084 bp, Homo sapiens
  Payload ID: 16192
  Gene Symbol: SLC3A2
  Gene Name: solute carrier family 3 (amino acid transporter heavy chain), member 2
  ENST ID: ENST00000535296
  CDS Start-End: 103-1902
cacggcgatcctggactgacggtcacgactgcctaccctctaaccctgttctgagctgccccttgcccacacaccccaaacctgtgtgcaggatccgcctccatggagctacagcctcctgaagcctcgatcgccgtcgtgtcgattccgcgccagttgcctggctcacattcggaggctggtgtccagggtctcagcgcgggggacgactcagagacggggtctgactgtgttacccaggctggtcttcaactcttggcctcaagtgatcctcctgccttagcttccaagaatgctgaggttacaggcaccatgagccaggacaccgaggtggatatgaaggaggtggagctgaatgagttagagcccgagaagcagccgatgaacgcggcgtctggggcggccatgtccctggcgggagccgagaagaatggtctggtgaagatcaaggtggcggaagacgaggcggaggcggcagccgcggctaagttcacgggcctgtccaaggaggagctgctgaaggtggcaggcagccccggctgggtacgcacccgctgggcactgctgctgctcttctggctcggctggctcggcatgcttgctggtgccgtggtcataatcgtgcgagcgccgcgttgtcgcgagctaccggcgcagaagtggtggcacacgggcgccctctaccgcatcggcgaccttcaggccttccagggccacggcgcgggcaacctggcgggtctgaaggggcgtctcgattacctgagctctctgaaggtgaagggccttgtgctgggtccaattcacaagaaccagaaggatgatgtcgctcagactgacttgctgcagatcgaccccaattttggctccaaggaagattttgacagtctcttgcaatcggctaaaaaaaagagcatccgtgtcattctggaccttactcccaactaccggggtgagaactcgtggttctccactcaggttgacactgtggccaccaaggtgaaggatgctctggagttttggctgcaagctggcgtggatgggttccaggttcgggacatagagaatctgaaggatgcatcctcattcttggctgagtggcaaaatatcaccaagggcttcagtgaagacaggctcttgattgcggggactaactcctccgaccttcagcagatcctgagcctactcgaatccaacaaagacttgctgttgactagctcatacctgtctgattctggttctactggggagcatacaaaatccctagtcacacagtatttgaatgccactggcaatcgctggtgcagctggagtttgtctcaggcaaggctcctgacttccttcttgccggctcaacttctccgactctaccagctgatgctcttcaccctgccagggacccctgttttcagctacggggatgagattggcctggatgcagctgcccttcctggacagcctatggaggctccagtcatgctgtgggatgagtccagcttccctgacatcccaggggctgtaagtgccaacatgactgtgaagggccagagtgaagaccctggctccctcctttccttgttccggcggctgagtgaccagcggagtaaggagcgctccctactgcatggggacttccacgcgttctccgctgggcctggactcttctcctatatccgccactgggaccagaatgagcgttttctggtagtgcttaactttggggatgtgggcctctcggctggactgcaggcctccgacctgcctgccagcgccagcctgccagccaaggctgacctcctgctcagcacccagccaggccgtgaggagggctcccctcttgagctggaacgcctgaaactggagcctcacgaagggctgctgctccgcttcccctacgcggcctgacttcagcctgacatggacccactacccttctcctttccttcccaggccctttggcttctgatttttctcttttttaaaaacaaacaaacaaactgttgcagattatgagtgaacccccaaatagggtgttttctgccttcaaataaaagtcacccctgcatggtgaagtcttccctctgctt

SEQ ID NO: 183713 - DNA, 269 bp, Homo sapiens
  Payload ID: 16192
  Gene Symbol: SLC3A2
  Gene Name: solute carrier family 3 (amino acid transporter heavy chain), member 2
  ENST ID: ENST00000541372
  CDS Start-End: 129-269
agatgcagtagccgaaactgcgcggaggcacagaggccggggagagcgttctgggtccgagggtccaggtaggggttgagccaccatctgaccgcaagctgcgtcgtgtcgccggttctgcaggcaccatgagccaggacaccgaggtggatatgaaggaggcggcagccgcggctaagttcacgggcctgtccaaggaggagctgctgaaggtggcaggcagccccggctgggtacgcacccgctgggcactgctgctgctcttctgg

SEQ ID NO: 183714 - DNA, 1486 bp, Homo sapiens
  Payload ID: 16192
  Gene Symbol: SLC3A2
  Gene Name: solute carrier family 3 (amino acid transporter heavy chain), member 2
  ENST ID: ENST00000536981
  CDS Start-End: 807-1334
tgcaggactccttacatcagctcctctgagtctcgtgattcagccttgcctccctctctccccctttgccccctccccgtcccacccttaggcgctgggagaagggagggtggggaggtcaggggcctctcagaggggcctcacttgttaacccagcccccatttcaggtctgaaggggcgtctcgattacctgagctctctgaaggtgaagggccttgtgctgggtccaattcacaagaaccagaaggatgatgtcgctcagactgacttgctgcagatcgaccccaattttggctccaaggaagattttgacagtctcttgcaatcggctaaaaaaaagagcatccgtgtcattctggaccttactcccaactaccggggtgagaactcgtggttctccactcaggttgacactgtggccaccaaggtgaaggatgctctggagttttggctgcaagctggcgtggatgggttccaggttcgggacatagagaatctgaaggatgcatcctcattcttggctgagtggcaaaatatcaccaagggcttcagtgaagacaggctcttgattgcggggactaactcctccgaccttcagcagatcctgagcctactcgaatccaacaaagacttgctgttgactagctcatacctgtctgattctggttctactggggagcatacaaaatccctagtcacacagtatttgaatgccactggcaatcgctggtgcagctggagtttgtctcaggcaaggctcctgacttccttcttgccggctcaacttctccgactctaccagctgatgctcttcaccctgccagggacccctgttttcagctacggggatgagattggcctggatgcagctgcccttcctggacagcctatggaggctccagtcatgctgtgggatgagtccagcttccctgacatcccaggggctgtaagtgccaacatgactgtgaagggccagagtgaagaccctggctccctcctttccttgttccggcggctgagtgaccagcggagtaaggagcgctccctactgcatggggacttccacgcgttctccgctgggcctggactcttctcctatatccgccactgggaccagaatgagcgttttctggtagtgcttaactttggggatgtgggcctctcggctggactgcaggcctccgacctgcctgccagcgccagcctgccagccaaggctgacctcctgctcagcacccagccaggccgtgaggagggctcccctcttgagctggaacgcctgaaactggagcctcacgaagggctgctgctccgcttcccctacgcggcctgacttcagcctgacatggacccactacccttctcctttccttcccaggccctttggcttctgatttttctcttttttaaaaacaaacaaacaaactgttgcagattatgagtgaacccccaaatagggtgttttctgccttcaaataaaagtca

SEQ ID NO: 183715 - DNA, 595 bp, Homo sapiens
  Payload ID: 16192
  Gene Symbol: SLC3A2
  Gene Name: solute carrier family 3 (amino acid transporter heavy chain), member 2
  ENST ID: ENST00000541425
  CDS Start-End: 1-75
ttctccactcaggttgacactgtggccaccaaggtgaaggcctcaggaaactgggagaggggggatcttgactgacattttagatcctgtctgctgctcactgattatgactgtggacgcgtctccctgcttctctgggtctgtttcttcatctctaaaataggatgctctggagttttggctgcaagctggcgtggatgggttccaggttcgggacatagagaatctgaaggatgcatcctcattcttggctgagtggcaaaatatcaccaagggcttcagtgaagacaggctcttgattgcggggactaactcctccgaccttcagcagatcctgagcctactcgaatccaacaaagacttgctgttgactagctcatacctgtctgattctggttctactggggagcatacaaaatccctagtcacacagtatttgaatgccactggcaatcgctggtgcagctggagtttgtctcaggcaaggctcctgacttccttcttgccggctcaacttctccgactctaccagctgatgctcttcaccctgccagggacccctgttttcagctacggggatgagattggcctggat

SEQ ID NO: 183716 - DNA, 5474 bp, Homo sapiens
  Payload ID: 16193
  Gene Symbol: SLC30A1
  Gene Name: solute carrier family 30 (zinc transporter), member 1
  Uniprot ID: Q9Y6M5
  ENST ID: ENST00000367001
  CDS Start-End: 131-1654
cctcagcggtttcccgaacggcccgactcgggcgctcctccgtgtcgcggtcgccgaccctccgcgtcccgccaacgccgccgctgcaccagtctccgggccgggctcggcgggccccgcagccgcagccatggggtgttggggtcggaaccggggccggctgctgtgcatgctggcgctgaccttcatgttcatggtgctggaggtggtggtgagccgggtgacctcgtcgctggcgatgctctccgactccttccacatgctgtcggacgtgctggcgctggtggtggcgctggtggccgagcgcttcgcccggcggacccacgccacccagaagaacacgttcggctggatccgagccgaggtaatgggggctctggtgaacgccatcttcctgactggcctctgtttcgccatcctgctggaggccatcgagcgcttcatcgagccgcacgagatgcagcagccgctggtggtccttggggtcggcgtggccgggctgctggtcaacgtgctggggctctgcctcttccaccatcacagcggcttcagccaggactccggccacggccactcgcacgggggtcacggccacggccacggcctccccaaggggcctcgcgttaagagcacccgccccgggagcagcgacatcaacgtggccccgggcgagcagggtcccgaccaggaggagaccaacaccctggtggccaataccagcaactccaacgggctgaaattggaccccgcagacccagaaaaccccagaagtggtgatacagtggaagtacaagtgaatggaaatcttgtcagagaacctgaccatatggaactggaagaagatagggctggacaacttaacatgcgtggagtttttctgcatgtccttggagatgccttgggttcagtgattgtagtagtaaatgccttagtcttttacttttcttggaaaggttgttctgaaggggatttttgtgtgaatccatgtttccctgacccctgcaaagcatttgtagaaataattaatagtactcatgcatcagtttatgaggctggtccttgctgggtgctatatttagatccaactctttgtgttgtaatggtttgtatacttctttacacaacctatccattacttaaggaatctgctcttattcttctacaaactgttcctaaacaaattgatatcagaaatttgataaaagaacttcgaaatgttgaaggagttgaggaagttcatgaattacatgtttggcaacttgctggaagcagaatcattgccactgctcacataaaatgtgaagatccaacatcatacatggaggtggctaaaaccattaaagacgtttttcataatcacggaattcacgctactaccattcagcctgaatttgctagtgtaggctctaaatcaagtgtagttccgtgtgaacttgcctgcagaacccagtgtgctttgaagcaatgttgtgggacactaccacaagccccttctggaaaggatgcagaaaagaccccagcagttagcatttcttgtttagaacttagtaacaatctagagaagaagcccaggaggactaaagctgaaaacatccctgctgttgtgatagagattaaaaacatgccaaacaaacaacctgaatcatctttgtgagtcttgaaaaagatgtgatatttgacttttgctttaaactgcaagaggaaaaagactccactgaaattctaagtttgccaagtagtgtaattgaagtccttgtctggtcacacagtttaattctatttttgtaagaacataatgggactgcataacagagttctatattacaattttgtgattattagtacagagtacagctatgctgtgactgttttggaaagccagttttaacactatgttacatttttgtttaaagtaagttaaaccttatataacataatgacatttgatttctggatttttcccatgataaaaattagggggataaataaaattgttactggaatttctctgcttttcttttcccccagtgttatactttattagaattataattgatagaactttaaaatcatcaacagtttgtttcctttgacattttaggtgatattgccctttgagatcattacatagcataatggcagcatattttaagagtgactcatggctattagtaggaaataagatcagttactatcctgtattctgtattgctggctattaaacagtaagataattaacaaattgaactacagtttacacacaatggggcaaatggggtagtaagagcaaggaagaaagtttaccaaactaaatatttaggttattgtatgataatattgagactacatttctaaattattttgagaatttcaactttttattctaccaaagttaatctgaaacttggacatgttcaccagcattactttctttgaaagattggtataaaaacattgagctgcaagtttatttacaaaatatataagtatttttaaggatgttgacacctaataattacatgctaaacgcaaacgattaatgtaatcttttaaaccgggcgtttgaaaaaaaattttcaaggtcatttcatgataaccaatcatgaatggatttaaatggagctttttgagcacaaccagcaatgtttgtgctttctaagagtcactgacttgagaggaaagaaaaccagaaggttaatgcagtttggatattaaattcttagcaaaattaataattaaagcaaaattaattaagattttgtaagtcatcctgtcttcacatactcagatcttccaatagtggcttattttgcaagatgccacaatatctacacagaaaattgtggctatttcattattgctatagatttcaaatccaacacaaatatttaagggtgtttaagttatatttttcttgatagagggtatgctttgtgacaaaattagatttttgtccttgaaaggattaatattagcatcagttatgtatagctctatttttctagaaacaaggtattctgactacttttatagctgactacttttgggatggctacgttttgggatttaaaatagttcattgtttaatgggttgtaagaggaaaaagtgttaggatttgacagttactttttaaagggatgatcttttgtggtgtgtgtttttcctagtataagcctattgctggcgatgggcctatttaagaacagctgattttttccagtgaaaatatggtaattttaggaacacagtttgtaagttcacatttactataatgggccaaaaccataacctgccagtttgcaatacatcttgatcttttaatattcttatctgatattgtgtaattcaattcctaaactgatagttaccttgaattttgcgaaaaggtttgggtggttttttttaaacatgaaattgagggatctcatctgggcgaacaagaagagaaagctgtgaattgtactgtatcatgtacattcctgatttaatactttacagaacattttattcagatatcaatttgttacataaacatttcagcaatgatacaaagataactgataaaatatattacattcaatgaggttttctttacaaatgctctacttgaggtctgtgtcttaaagatggcatgacacctaagtacaagacatcaactgaatgaggattttaaaaaatggtatataagcataggacaagggctatgtttgtttgtttttcaaaagtgctttgaagataacagcctttaggtttgagttatttcacttttcataatttttaagtagcttatatataatggtggtaccataggattttcttttttcaaatgactgtcggcagaaacagtgggcactgactcaccttttgagttttagcagagaattatttatttctttacaatgcactttctaacccattgtagctatattagcattatcttttaaaaaagacatgcttttgtatttaaatattgtaggatttaagtgtctttctcaaaatagcttattcctttctgaaagaaaatgagggaaatactctgaattattaggagacttaaacccaatatttaaatatgctattttataacactgcatcagttttaggagttgcatctctcctgctggctcttttatatttgagcaagatcagtgtagaatatgtgtttagaaacttgtctgttgtctcagtttagtgaaaaggaggtgctgcatgtgcctgaattaaaaccaagaaatttttccaagccaaatgcagccttagtgatgagagatttaattctccattgtcaccttttagcttttatgattgcttagttttttctgaaggatgtctgcattgtaaaactatggactaaaacctaaaaaacagaatcctcaaaaactttgctgtatgtgttttaacattttagagaacagtatgttgaataactaaggtatgtaacttgaataggaaaaatgtccatcaaatgcaccttggaaaatcacagtaggtagaaggctgtgttaaccgtttgtgtcttattaacatccttaagttaattttgaatttttgacagttttgagggaaaagacctatggaacctaatgtgaagtatttcgtatgttaactggtgttgagttgaagatttttactgtgtataagcagatatcatttgaatgataaaaatgtcattaacctgctgtcttaagatgttcacacaaatatggagagtaattctacaatataaaaatatttattttaatactgagtttcagttaagtcataaacagtgttaaaactcttgggaaggtgtaggggttttttgtttgtcatttttaaaattgaaactgtgtcatacagtgtttcacgtctctgaaattgggattataatagcactattttgatgtagctctaccgatactatgtggtaatgctattttgttttactaacaagctctggaatatttagcagtcattttcactggcacaagagccttttgtatgttattcaatttaaacttttaaaccaaaaattttatggtccagtgtctttggcaaaaagatgctggagggaatgtaacatacaattaatatgtggttatatatatatataaaaagacacaaattgccatgttatggttctgccttgaaacagcacaatgaagtgtatcagtatattctgtgattatgaaacttatatgttgtgttgttttgtgtcttctgttgcctgtcctttgggccagatgtgggccagttaaatgcagttatcatctcattaaatacagatgcagataaaatatctttagtgctgcaacattttacctaactttttgtatgttttcatgactgtgtgttattttccaaagctgttcctacctcaccatgaggctttatggattgttatgtattataaatgttctatatgagacagactactgtgtttcttctcatttattaaaagttaagtagaaaaataaactaattttaatatcta

SEQ ID NO: 183717 - DNA, 2494 bp, Homo sapiens
  Payload ID: 16194
  Gene Symbol: SLC30A2
  Gene Name: solute carrier family 30 (zinc transporter), member 2
  Uniprot ID: Q9BRI3
  ENST ID: ENST00000374276
  CDS Start-End: 238-1356
cggggcgcagcggctgacccgagacacgggagcgcttggcacgcggagccagagccggagctgcagccgcagcgggagccgggggagctcaggggccgcaggagccgggccggagtgagcgcacctcgcggggccctcggggcaggtgggtgagcgccacccggagtcccgcgcgcaactttcagggcgcactcggcggggcggctgcgcggctgccgggactcggcgcgggactgcatggaggccaaggagaagcagcatctgttggacgccaggccggcaatccggtcatacacgggatctctgtggcaggaaggggctggctggattcctctgccccgacctggcctggacttgcaggccattgagctggctgcccagagcaaccatcactgccatgctcagaagggtcctgacagtcactgtgaccccaagaaggggaaggcccagcgccagctgtatgtagcctctgccatctgcctgttgttcatgatcggagaagtcgttggtgggtacctggcacacagcttggctgtcatgactgacgcagcacacctgctcactgactttgccagcatgctcatcagcctcttctccctctggatgtcctcccggccagccaccaagaccatgaactttggctggcagagagctgagatcttgggagccctggtctctgtactgtccatctgggtcgtgacgggggtactggtgtacctggctgtggagcggctgatctctggggactatgaaattgacggggggaccatgctgatcacgtcgggctgcgctgtggctgtgaacatcataatggggttgacccttcaccagtctggccatgggcacagccacggcaccaccaaccagcaggaggagaaccccagcgtccgagctgccttcatccatgtgatcggcgactttatgcagagcatgggtgtcctagtggcagcctatattttatacttcaagccagaatacaagtatgtagaccccatctgcaccttcgtcttctccatcctggtcctggggacaaccttgaccatcctgagagatgtgatcctggtgttgatggaagggacccccaagggcgttgacttcacagctgttcgtgatctgctgctgtcggtggagggggtagaagccctgcacagcctgcatatctgggcactgacggtggcccagcctgttctgtctgtccacatcgccattgctcagaatacagacgcccaggctgtgctgaagacagccagcagccgcctccaagggaagttccacttccacaccgtgaccatccagatcgaggactactcggaggacatgaaggactgtcaggcatgccagggcccctcagactgactgctcagccaggcaccaactggggcatgaacaggacctgcaggtggctggactgagtgtcccccaggcccagccaggactttgcctaccccagctgtgttgtaaaccaggtccccctcctgacctctgccccactccaggaatggagctcttcccagcctcccatctgactacagccagggtggggactcagcgggtataaagctagtgtgaccctgctcttccagctcctgggccagctctggaagggctgtatttgggcctaatcctcagcaaatgttctaccactcgcaggggcaaaggtggtgagccacgggacgtccaaggggaggctggccccagcgcgcccatactgcctgcctcatgccccattctcagcctggctggcctttgcctttatgaatctgagcccctccatctgcctatagcaataggcacgggggtgaggaccctcacactctcatttgagcctccctgaggcagggagccaggaggcacctgaggcctatctgtgccttagtcacttcagctatgagccaaatgttccctttcctggaggggagaggcttcttactaggtaagagacaggtttcctctttccttatttcctcagctgtgccaacacaaaaaacaactttggcacaggtggtgggcagggggtagagagatttcagcttgggttctgcactaacagcctccaagccccctggcacttctgttgccctgagagtgtcccaggggattcagagtctccagaaagatatggctgggccaactctgttgcctacctggcctgacccagtcggagcctgacatggtggagggaaagggagacaagtggggctgcactcggtccagaggccagctaggagggaaaccgcagcttcctggggcttgtgtgtgaagattcctgacttaggggtggcttttgtttacaagatgcaagaggggaaacctgtccccgactcatcgagacaacatgcccagttatcagggagtcctgtgtcacaaggtctgtctctgccattgtaagcaagtgccttgggcgagctggcctctgccccacagtctcatctgtacaccgacagggttgatgcctccctcacagggttgagaacaagagccagttggccaagta

SEQ ID NO: 183718 - DNA, 3097 bp, Homo sapiens
  Payload ID: 16194
  Gene Symbol: SLC30A2
  Gene Name: solute carrier family 30 (zinc transporter), member 2
  Uniprot ID: Q9BRI3
  ENST ID: ENST00000374278
  CDS Start-End: 218-1189
gagacacgggagcgcttggcacgcggagccagagccggagctgcagccgcagcgggagccgggggagctcaggggccgcaggagccgggccggagtgagcgcacctcgcggggccctcggggcaggtgggtgagcgccacccggagtcccgcgcgcaactttcagggcgcactcggcggggcggctgcgcggctgccgggactcggcgcgggactgcatggaggccaaggagaagcagcatctgttggacgccaggccggcaatccggtcatacacgggatctctgtggcaggaaggggctggctggattcctctgccccgacctggcctggacttgcaggccattgagctggctgcccagagcaaccatcactgccatgctcagaagggtcctgacagtcactgtgaccccaagaaggggaaggcccagcgccagctgtatgtagcctctgccatctgcctgttgttcatgatcggagaagtcgttgagatcttgggagccctggtctctgtactgtccatctgggtcgtgacgggggtactggtgtacctggctgtggagcggctgatctctggggactatgaaattgacggggggaccatgctgatcacgtcgggctgcgctgtggctgtgaacatcataatggggttgacccttcaccagtctggccatgggcacagccacggcaccaccaaccagcaggaggagaaccccagcgtccgagctgccttcatccatgtgatcggcgactttatgcagagcatgggtgtcctagtggcagcctatattttatacttcaagccagaatacaagtatgtagaccccatctgcaccttcgtcttctccatcctggtcctggggacaaccttgaccatcctgagagatgtgatcctggtgttgatggaagggacccccaagggcgttgacttcacagctgttcgtgatctgctgctgtcggtggagggggtagaagccctgcacagcctgcatatctgggcactgacggtggcccagcctgttctgtctgtccacatcgccattgctcagaatacagacgcccaggctgtgctgaagacagccagcagccgcctccaagggaagttccacttccacaccgtgaccatccagatcgaggactactcggaggacatgaaggactgtcaggcatgccagggcccctcagactgactgctcagccaggcaccaactggggcatgaacaggacctgcaggtggctggactgagtgtcccccaggcccagccaggactttgcctaccccagctgtgttgtaaaccaggtccccctcctgacctctgccccactccaggaatggagctcttcccagcctcccatctgactacagccagggtggggactcagcgggtataaagctagtgtgaccctgctcttccagctcctgggccagctctggaagggctgtatttgggcctaatcctcagcaaatgttctaccactcgcaggggcaaaggtggtgagccacgggacgtccaaggggaggctggccccagcgcgcccatactgcctgcctcatgccccattctcagcctggctggcctttgcctttatgaatctgagcccctccatctgcctatagcaataggcacgggggtgaggaccctcacactctcatttgagcctccctgaggcagggagccaggaggcacctgaggcctatctgtgccttagtcacttcagctatgagccaaatgttccctttcctggaggggagaggcttcttactaggtaagagacaggtttcctctttccttatttcctcagctgtgccaacacaaaaaacaactttggcacaggtggtgggcagggggtagagagatttcagcttgggttctgcactaacagcctccaagccccctggcacttctgttgccctgagagtgtcccaggggattcagagtctccagaaagatatggctgggccaactctgttgcctacctggcctgacccagtcggagcctgacatggtggagggaaagggagacaagtggggctgcactcggtccagaggccagctaggagggaaaccgcagcttcctggggcttgtgtgtgaagattcctgacttaggggtggcttttgtttacaagatgcaagaggggaaacctgtccccgactcatcgagacaacatgcccagttatcagggagtcctgtgtcacaaggtctgtctctgccattgtaagcaagtgccttgggcgagctggcctctgccccacagtctcatctgtacaccgacagggttgatgcctccctcacagggttgagaacaagagccagttggccaagtacctgtggttgttgaagattggttacttttaccatcctggggacagggaactctgtggcccgaggctgcctcactgaggagtcaggtgggcttcccagcctccccaggggcagtgctgagtttgtcttgactgttctggcccaaggtgggaggaggtgggtttggtcacttgcctcccactttaaatctctgtctttccatctgtgaaatgacctctttgtgccttcccagcactgtcatcctgatcgcctgtgttctaggtaggtgggtccttcagcccctccaggtctgtgaaaagtctgtggaaagcactggcctggagaggggtggggggttgctggtgggtgctccattccaccacaatctcaggggactcaacctcccctacccaactccccacccccacccaagccatggcaggccccaggaacttgatcctgggctttgccgtatgccaagtccttacacccctctcaagagacagtcattggctgggcacggtggctcatgcctgcaatcccagcaccttgggaggctgaggcaggcagatgacttgaggccaggagttcgagaccagcctggccaatatggcgaaacctcatttctactaaaaatacaaaaactagccaggcgtggtggcttgtgcctgtaatcccagctactcgggaggctgaggcaggagaatcgcttgaaccggggaggcagaggttgcagtgagctgagatcacaccactgcactccagcctgggtgacagagcgagactccagctt

SEQ ID NO: 183719 - DNA, 2260 bp, Homo sapiens
  Payload ID: 16195
  Gene Symbol: SLC30A3
  Gene Name: solute carrier family 30 (zinc transporter), member 3
  Uniprot ID: Q99726
  ENST ID: ENST00000233535
  CDS Start-End: 354-1520
gggacggggctgtggagatgaggagttctccagaactcgggtggcggggcgctcccgggctctggcgcggggaaatggggctttggcagtgggggcggggcttaagggtggggagaggccggggagcctggaggcggagcttggggagctcgccccacgcggggcggggctccggcggcagcgggatctgcagttcggactccgcgcgccacagtcgctgcagttcgctccactctggtggccccgccgccctgcggggatcccgggggtcggcgggctgctcggacttggcgcggggccggcccggcctctctcttcctcggtggggcctagacggtcggggcaccgggaacatggagccctctccagccgctgggggcttggagaccactcgcctggtgagcccccgggaccgcggtggcgccggaggcagcctgcgtttgaagagtctcttcacagagccctcagagcccctccctgaggagtccaaacctgtggagatgcccttccaccactgccacagggacccccttccgccgccgggccttacccctgagaggctgcatgcacggaggcagctatatgctgcctgtgccgtttgctttgtcttcatggctggggaggtggtcggcgggtatctggcacacagcctggccatcatgaccgatgcagcccacttgctggcggatgtgggcagcatgatgggcagcctcttctccctctggctctccacccgtccagccacccgcaccatgacctttggctggcaccgttcagagactctgggggctttggcctctgtggtctccctctggatggtcactggcatcctcctgtacctggccttcgtccgcctgctgcacagcgactaccacatcgaggggggtgccatgctgctgaccgccagcatcgcagtctgtgccaacctgttaatggcctttgtgctgcaccaggctgggcccccccacagccacgggtctaggggagcagagtatgcaccgctggaggaggggcctgaagagcccctgcccctggggaacaccagcgtccgggcggcatttgtgcacgtgctgggggacctcctgcagagctttggggtactggctgcctccatcctcatctacttcaagcctcaatacaaggcagccgaccccatcagcaccttcctcttctccatctgtgcccttggatccaccgctcccaccctccgagacgttcttcgaatcctcatggaaggtaccccccgcaatgtggggttcgaacctgtgcgggatacgctgttgtcggtgccaggagtccgggcaacccatgagctgcacctgtgggcccttacgctcacttaccatgttgcctctgcacacctggccatcgactccaccgctgaccctgaagccgtcctggctgaagcctcatcccggctctactcccggtttggattctccagctgcaccctgcaggtcgagcagtatcagccggagatggcccagtgcctgcgctgccaggaacccccccaagcctgagccatggccctgccctcaccccactgccaggccgaggctcagccccagactctcagcatctgctgccctgatcacagagacgggaccgagccaggtccataccccttcctctctccctcctaccacctgccagtttccccagcctcagccccagccccagccccagtgggcaagaccaaagtgtggcggggagtggggtgggagtcaggggaatagatgtgactagttcaggggcggggactcccaggcctcagtgtggcagggtgtgttgaaggcctgtggtgccatctccccatggttcatgtggagccacgaacatcctttccctgcagtccatttgtctgtgtggcaggctggctggctgggggcatctgcctgtctatgtgctgttggtgtgcctatgcctgggggaggtcagtaggggccccctccccacatggccctcgctctgtctatgcaggggccccaaagcccgcactttgtccgtgtgtcttagccctgtggttttgtctgtgtgtgtgtgtgtgtgtgtgtgtgtgtgtgtgtgtgtgttcttggtgctgtggcctgtgtgtctctgtgcctatgtggctgtgctatggtttctatgagtctgctccatccatgtgtctgtttgggggtctatctctccatccctctgttggtgctgtgcccttggctatccctgaaagagggaggactccgctgcagctccaccaataaacttgtgtctcactgca

SEQ ID NO: 183720 - DNA, 904 bp, Homo sapiens
  Payload ID: 16195
  Gene Symbol: SLC30A3
  Gene Name: solute carrier family 30 (zinc transporter), member 3
  ENST ID: ENST00000445870
  CDS Start-End: 1-904
cactcgcctggtgagcccccgggaccgcggtggcgccggaggcagcctgcgtttgaagagtctcttcacagagccctcagagcccctccctgaggagtccaaacctgtggagatgcccttccaccactgccacagggacccccttccgccgccgggccttacccctgagaggctgcatgcacggaggcagctatatgctgcctgtgccgtttgctttgtcttcatggctggggaggtggtcggcgggtatctggcacacagcctggccatcatgaccgatgcagcccacttgctggcggatgtgggcagcatgatgggcagcctcttctccctctggctctccacccgtccagccacccgcaccatgacctttggctggcaccgttcagaatggcctttgtgctgcaccaggctgggcccccccacagccacgggtctaggggagcagagtatgcaccgctggaggaggggcctgaagagcccctgcccctggggaacaccagcgtccgggcggcatttgtgcacgtgctgggggacctcctgcagagctttggggtactggctgcctccatcctcatctacttcaagcctcaatacaaggcagccgaccccatcagcaccttcctcttctccatctgtgcccttggatccaccgctcccaccctccgagacgttcttcgaatcctcatggaaggtaccccccgcaatgtggggttcgaacctgtgcgggatacgctgttgtcggtgccaggagtccgggcaacccatgagctgcacctgtgggcccttacgctcacttaccatgttgcctctgcacacctggccatcgactccaccgctgaccctgaagccgtcctggctgaagcctcatcccggctctactcccggtttggattctccagct

SEQ ID NO: 183721 - DNA, 590 bp, Homo sapiens
  Payload ID: 16195
  Gene Symbol: SLC30A3
  Gene Name: solute carrier family 30 (zinc transporter), member 3
  ENST ID: ENST00000426569
  CDS Start-End: 295-590
gagggcttagcaggcctgcggcccaaggcagcgtaggagcgttgctgccaggccttggggcagggattcccaccgagcccctcttccccagcaggagggcaccacccatcttgatggcccaactcactccaggaaacacaatgggtttgctgaccgtggcggatgagagtggcggcaggtgcgaggggagagaacattgagcatttgaagcttcgacttgaggctcggccaccgactttgcttctcttcacagagccctcagagcccctccctgaggagtccaaacctgtggagatgcccttccaccactgccacagggacccccttccgccgccgggccttacccctgagaggctgcatgcacggaggcagctatatgctgcctgtgccgtttgctttgtcttcatggctggggaggtggtcggcgggtatctggcacacagcctggccatcatgaccgatgcagcccacttgctggcggatgtgggcagcatgatgggcagcctcttctccctctggctctccacccgtccagccacccgcaccatgacctttggctggcaccgttcagagactctgggggctttggc

SEQ ID NO: 183722 - DNA, 997 bp, Homo sapiens
  Payload ID: 16195
  Gene Symbol: SLC30A3
  Gene Name: solute carrier family 30 (zinc transporter), member 3
  ENST ID: ENST00000426924
  CDS Start-End: 308-997
ctgctctcaaaccaccccacttctgtccctcagaggtgggacagtggggagaggaggaagaggactcagaggctggagaaggaagagaaaaggcgttgctgtgggaaagacctggcaaggaaaaggcagcggaaccccagagagcagggtagacgcctgcggcccaggagaaccgagcaaggcaaggagctcaaagggagagctctgagtgtgcagggcacctctggccctgtgccgactcctcacctgggtctggccctttacctgggagtcgttctcttaagccaggagggcaccacccatcttgatggcccaactcactccaggaaacacaatgggtttgctgaccgtggcggatgagagtctcttcacagagccctcagagcccctccctgaggagtccaaacctgtggagatgcccttccaccactgccacagggacccccttccgccgccgggccttacccctgagaggctgcatgcacggaggcagctatatgctgcctgtgccgtttgctttgtcttcatggctggggaggtggtcggcgggtatctggcacacagcctggccatcatgaccgatgcagcccacttgctggcggatgtgggcagcatgatgggcagcctcttctccctctggctctccacccgtccagccacccgcaccatgacctttggctggcaccgttcagagactctgggggctttggcctctgtggtctccctctggatggtcactggcatcctcctgtacctggccttcgtccgcctgctgcacagcgactaccacatcgaggggggtgccatgctgctgaccgccagcatcgcagtctgtgccaacctgttaatggcctttgtgctgcaccaggctgggcccccccacagccacgggtctaggggagcagagtatgcaccgctggaggaggggcctgaagagcccctgcccctggggaacaccagcgtccgggcggcatttgtgcacgtgctgggggacctc

SEQ ID NO: 183723 - DNA, 540 bp, Homo sapiens
  Payload ID: 16195
  Gene Symbol: SLC30A3
  Gene Name: solute carrier family 30 (zinc transporter), member 3
  ENST ID: ENST00000450118
  CDS Start-End: 209-540
acagcgggccgggggtggcaggagaaccgccaacgcgccccgccggcccccgcgcctgccgccaccgtccacctgcccctctgagcggccgtccgacctccctgcccacccccgtgggccatcttgtctgtcggctgaccgtccgtttgtctccggaatttggcaggagccctcagagcccctccctgaggagtccaaacctgtggagatgcccttccaccactgccacagggacccccttccgccgccgggccttacccctgagaggctgcatgcacggaggcagctatatgctgcctgtgccgtttgctttgtcttcatggctggggaggtggtcggcgggtatctggcacacagcctggccatcatgaccgatgcagcccacttgctggcggatgtgggcagcatgatgggcagcctcttctccctctggctctccacccgtccagccacccgcaccatgacctttggctggcaccgttcagagactctgggggctttggcctctgtggtctccctctggatggtcactggcatcct

SEQ ID NO: 183724 - DNA, 834 bp, Homo sapiens
  Payload ID: 16195
  Gene Symbol: SLC30A3
  Gene Name: solute carrier family 30 (zinc transporter), member 3
  ENST ID: ENST00000424577
  CDS Start-End: 324-834
gcttagcaggcctgcggcccaaggcagcgtaggagcgttgctgccaggccttggggcagggattcccaccgagcccctcttccccagcaggagggcaccacccatcttgatggcccaactcactccaggaaacacaatgggtttgctgaccgtggcggatgagagtggcggcaggtgcgaggggagagaacattgagcatttgaagcttcgacttgaggctcggccaccgactttgctgtaatgggtccgctcctgtttctgcctccgcgtgagggttgcggccacagggtgacggcgtggtgggcgacacccccgcgcaggcatgcacagagtggtggtcgttgggcgaagtctcttcacagagccctcagagcccctccctgaggagtccaaacctgtggagatgcccttccaccactgccacagggacccccttccgccgccgggccttacccctgagaggctgcatgcacggaggcagctatatgctgcctgtgccgtttgctttgtcttcatggctggggaggtggtcggcgggtatctggcacacagcctggccatcatgaccgatgcagcccacttgctggcggatgtgggcagcatgatgggcagcctcttctccctctggctctccacccgtccagccacccgcaccatgacctttggctggcaccgttcagagactctgggggctttggcctctgtggtctccctctggatggtcactggcatcctcctgtacctggccttcgtccgcctgctgcacagcgactaccacatcgaggggggtgccatgctgctgaccgccagcatcgcagtctgtgccaacctgt

SEQ ID NO: 183725 - DNA, 899 bp, Homo sapiens
  Payload ID: 16195
  Gene Symbol: SLC30A3
  Gene Name: solute carrier family 30 (zinc transporter), member 3
  ENST ID: ENST00000432351
  CDS Start-End: 180-899
gactgtcacagcttcgagtgcacaatcctcttcccaccccctcccattctacagtggcggcaggtgcgaggggagagaacattgagcatttgaagcttcgacttgaggctcggccaccgactttgcttctcttcacagagccctcagagcccctccctgaggagtccaaacctgtggagatgcccttccaccactgccacagggacccccttccgccgccgggccttacccctgagaggctgcatgcacggaggcagctatatgctgcctgtgccgtttgctttgtcttcatggctggggaggtggtcggcgggtatctggcacacagcctggccatcatgaccgatgcagcccacttgctggcggatgtgggcagcatgatgggcagcctcttctccctctggctctccacccgtccagccacccgcaccatgacctttggctggcaccgttcagagactctgggggctttggcctctgtggtctccctctggatggtcactggcatcctcctgtacctggccttcgtccgcctgctgcacagcgactaccacatcgaggggggtgccatgctgctgaccgccagcatcgcagtctgtgccaacctgttaatggcctttgtgctgcaccaggctgggcccccccacagccacgggtctaggggagcagagtatgcaccgctggaggaggggcctgaagagcccctgcccctggggaacaccagcgtccgggcggcatttgtgcacgtgctgggggacctcctgcagagctttggggtactggctgcctccatcctcatctacttcaagcctcaatacaaggcagccgaccccatcagcaccttcctcttctccatctgtgcccttggatccaccgctcccaccctccgagacgttctt

SEQ ID NO: 183726 - DNA, 7157 bp, Homo sapiens
  Payload ID: 16196
  Gene Symbol: SLC30A4
  Gene Name: solute carrier family 30 (zinc transporter), member 4
  Uniprot ID: O14863
  ENST ID: ENST00000261867
  CDS Start-End: 316-1605
cgcgcagggcggggagaggcggtggctgtgggcgtccggccccgaacctgtcagacctggggagccggcctccagcagcgggcgcggcgggcgcgagcacgaccccactctcctgcggccgcgggtggagcagcgcgagcccgcctcgctgagccggccgggggcggggagatgagttgcggccccgcggcagcgccccaggatggggagggacgcgcggcactgccctcgagaactggcgctccggtgaagtaggcgccgccggccgtccgcctcccccaagccgttccgcaccgcggccgctcagcctctgccatggccggctctggcgcgtggaagcgcctcaaatctatgctaaggaaggatgatgcgccgctgtttttaaatgacaccagcgcctttgacttctcggatgaggcgggggacgaggggctttctcggttcaacaaacttcgagttgtggtggccgatgacggttccgaagccccggaaaggcctgttaacggggcgcacccgaccctccaggccgacgatgattccttactggaccaagacttacctttgaccaacagtcagctgagtttgaaggtggactcctgtgacaactgcagcaaacagagagagatactgaagcagagaaaggtgaaagccaggttgaccattgctgccgttctgtacttgcttttcatgattggagaacttgtaggtggatacattgcaaatagcctagcaatcatgacagatgcacttcatatgttaactgacctaagcgccatcatactcaccctgcttgctttgtggctatcatcaaaatcaccaaccaaaagattcacctttggatttcatcgcttagaggttttgtcagctatgattagtgtgctgttggtgtatatacttatgggattcctcttatatgaagctgtgcaaagaactatccatatgaactatgaaataaatggagatataatgctcatcaccgcagctgttggagttgcagttaatgtaataatggggtttctgttgaaccagtctggtcaccgtcactcccattcccactccctgccttcaaattcccctaccagaggttctgggtgtgaacgtaaccatgggcaggatagcctggcagtgagagctgcatttgtacatgctttgggagatttggtacagagtgttggtgtgctaatagctgcatacatcatacgattcaagccagaatacaagattgctgaccccatctgtacatacgtattttcattacttgtggcttttacaacatttcgaatcatatgggatacagtagttataatactagaaggtgtgccaagccatttgaatgtagactatatcaaagaagccttgatgaaaatagaagatgtatattcagtcgaagatttaaatatctggtctctcacttcaggaaaatctactgccatagttcacatacagctaattcctggaagttcatctaaatgggaggaagtacagtccaaagcaaaccatttattattgaacacatttggcatgtatagatgtactattcagcttcagagttacaggcaagaagtggacagaacttgtgcaaattgtcagagttctagtccctaattttatgtattttgggaactcctgccttatttatcctgcagtcacagacttgagagcaataaatgcaaacctaaatgagaaaatggaatccctgacagctgtgtccgtatcaagcatcagtctctcaaacagttgccccagcctgacagtgctagtctctgtttaatggtaaaaggagactttgccataattttcagatgaagatgtttcccaaacactgtttacagaatgagatgtgactctacagatacctcatagaagacaatccaagatcatacttcattaacttgacagagtacgtgtcttaaaggaagcatcaagaattcaatatttgcatttaaaaatactttttaaggccattttatattaagccagtgctggaaaactgaattttttttattatgtataataatctcgacacccagcttctggaattgctgctttctttttacagaaattactacccaacagatttcaggaagtactagtagttatcccaaaagtggaataagcatgtattcctaagtgtttcagaaatgttttatttcacacataagtcttaatgttattgttatgattatactttataaacaaccttttccagatgctacagggttttgaatctcaaagttaacatttttcattatttgtaatcttagaaccaaatctttatttattgtggtcactgttattaaatgatttaggaaatactttcaatattattctgaatggctgaagttagtcttaaactcaaattactatatgatgatttaaaacaaaataaaagagcgaggatgggggttggagtttcaggtttatgtcttcccgacatcacttttatcattcatgaaattgtcttaaaaaagcaagagactgcaaaatgtaaacagtaatcttctgtccctttaagaactgccaacaatttgtacaaaaaatgtggtacgttggttcctgcctccactccaggtcatctgtgtgtttagcctttcagggtaaactctagagggttcagtttataattcccacctttcacatatagttcaacaacattaatccagagagaattttatgttttatgatatgggttatgttttattatatattttatgttttatgatatgggttagggattctccatggactccagaaaccctaaaatacaattttgaggttttccaataataccatagcagaaatgtccaaggggttgggggaagatattactttgagaaaacagaaatgtaaaggatttttgaccttatatatgtgtgtggttttgtttttgtttttgttcttgagagagtctcactctgtcacccaggctggagtgcagtggcgtgacctctgctcactgtaacctctgcctcctgggttcaagtgattcttctgcctcagcctcccaactagctgggactacaggtacaccacacccagctcatttttttgtatttttagtagagacagggttttgccacattggcctgtctggtcttgaactcctgacctcaggtgatccgcctgccttggccttccagagtgctgggattacagcatgagccaccatgcctggcctgtatgtgtgtgttttaaagcactagatagggatggacattaaatctgtgttgcagggaaactaaacagaggtttccaaactgaaggcaacctaattgtaaatgcctgtgttaaagaggcagcttgactgttcatgtttcattttgcaaccattggttttgagattatcttttatgcacatttggagtcccttttcaacagtgacagtttcttacacgaagaatggatatggttattgggctcctctaagaatcagagtagggtaacaatgtaccaggcaaattgtaagttgaaattctagataagcatgcagatgacttacaatataaatgaagaataggaaacattttatcttcttaccaagtaccttactataagtaaacctaagataagaaaacccagatttacctataagattgttgggagttaatggtgtcaataaaaggattgatggtccctctaatgaaacccagtagatgtttgttgaattgaactgaaaatttatgtggccagacacagtggctcatgcctgtaatctcagcatttggggaggcaaaggtggaagtatccctcgaggccaagagttcatgaccagcctggtcttttgtagagaccctgtctctacaaaaatataaaaatcagccaggcgtcgtgcacacctgtagtatcagctacttgtaaggctgtggcagaagtgctttagcccaggaggttgaggctgcagtgagccatgtccacaccattgcactgcagcctgagtaacaaaatgagaccctatctcaaaaacaaaaaggaaaagaaaatatacatgatgggattcctattgtgaagtcatttaaaataatgacttgaatttctcagaaatttcaggagcatataaactatttaaatcaaaatattcttacatatagaaaccaagtaagaataaatgagagatatttcagtggacatctggacatatttatggactttgagtatctagcaagtagaaaggaaaaaaatattcatcatactctaatcatttttttatatctattgagcttgtttcttgtaaacttttctttatcttataaaggcatatctcgcttttgtatcgacctgttccttaaaaaatgtatttgataaaacaggctaaaattcatttgagtattgaaaagaattctttttttttttttaagatggtgtctcactgtcacccaggctggagtgcagtggcacagttgggctcactgcagcctctgcctcccaggctcaagtggtcctcccatctcagcctcccaagtagctggtaccacaggcatgcaccaccacacccagctaattttttgtatttttggtagacacagtgtttcaccatgttgcccaggctggtcttgaactcctgagctcaagtgatctgcccacctcggcctcccaaagtgctgggcttatgggcatgaaccactgtgcccagccaaaaagaatccttttgtaaaatacagaaacactgcaaacctttgtaaatcttttttttttttttttttttttttttttaatgagatggggtctccctatgttgcccaggctggtcttgagctcctgggctcaagaaatccttccacctcgggctcccaaagtgctgagattacagggtgtgagctaccgcacccagccatgaaaacttctgtaaatcttaactatcgtgttctgcttaaagtgaggtacacataaagtttcctgtgctttgtttttgtaggaaaaagtacatagtttgtatctttaccttacggagtctatgagatttgagaatttgatttcactttttgtaacttaacccacagaaaaggacattaacttagcagataggaccaaggactgaatgacttctgacaaaaagcgtttggtctatccttcacttgttgagctacaaccatgcattacacttctcagctgagctctcaaagagctctatgccctgtgaaaagcagtggctgagttggatgaacacatagcattattaattttgcactgggaaaacagattatgacaggaccacagaccacaatataaaaacttggcagttctttggtgtgatatattttaattagtatttgcaaataatcagagttacttgtgtacataaacgtgtgtttcacaactatggccagatgcaaccttttggtctgtttcaggaaaagacctattattccactaacaattatgctgccttagaaacataatgggagtgtaattgaagaaagcatgtctcagaaggttttgatatgcagaactggaagctattgtaattcctacatacatttccattagctatgccttatgtaatgtgagtgcagatttttacaacttagagttcccatcagtgtttttttgccacatcaccgggtttcttattttactgttttcttttcaactttgggtgctttatttccattctctaaaactaagtttcttgctcttacgagacttagtgttccttttgaacccaggtgttccacctgacagtgtttgtctttcatagactttccagaatagacatagtcaagatcagacacgtgagcttctctctcattttaatgtgaggaaaatcatctttcagagacaaggcaccgcttagaaatgtatgtccaggtatgaaagaacctttttaaaatggctggttgttccagatccagatttctctgcacactggacttcgtagagtaagtgtggtagacaaagagactacactgcacaaccaccagtgaatatcattgctaagaagactttgggtcgtgtttctcagccactctcacagcttttgtagacttatttgattttgaaacaagcagttagctaaatctattttccttttatgcatatatgttaattggctcaacttaatatggtgttcttacagaatatgagcccatttgaaataaggttttaggcaattttgctgttggctctgatttgtatatagcaaatttaaagttacagagtgtttcctagatagaagattagttcatttggttcattttgtctttgaagcaagccaagctcatgagccagttggttatttgtcataaatgaacacccatcactatatgctatgttgaggggaggcaagtctgatcttcgaataattgataaagtttaatatctttgtagccaaaatacaatttgcaaaccctaactccagatgtgtcgtatgaatcttgacaaccaggtcttgagatttgttttactgattgccaatcaggtatattatttgtgatgttcgtgggagcatgcaaattagaagacagtgttgtgggagttcctcagtattgaattacatgtgtgcactcaggcctgccagtcactgaattctgacttgtaaagggtttaacctgctgttccaatcattgaggaccaatttgctttttgataagattggaaaacatttatggagactttcccagttaaatctatgacagtgtccacttaaatagtgcaatttagtatattctcagataactgcaacacaaaattgaaatgtgccagtatgtcatctttctacctggaagatactgtatatttggaaagtttatgcttctctcaataaatacatgttattaaataagccatatcacagtttaagaaattgtatatactttatcatatgccctttcagaaaccaggtattttgcatatgattgattttagaaagattttgaagctggggtttgtccatgttaattaagatcaaagtatatatatatatatatatatgtgctgtatttgcaactttcacattgtaatttcctatacacttattaaagtattgttttgccatgtggtttattaaataaaaatgtacagtctcttaaatatctgctctttttattaagtaatattagtaggcctaaaaacattgttcttaaaagaaaatcttttataattataatgtcattttataatgccctcttatatgtttaagaaataaaactgaaaaaaatctt

SEQ ID NO: 183727 - DNA, 1317 bp, Homo sapiens
  Payload ID: 16197
  Gene Symbol: SLC30A5
  Gene Name: solute carrier family 30 (zinc transporter), member 5
  Uniprot ID: Q8TAD4
  ENST ID: ENST00000380860
  CDS Start-End: 266-622
gcctgatgacgtggcttggcaacgtccctaccgccgctgcttcccgggaacctggcgccgccggaactgatcgcggcctagtcccgacgcgtgtgtgctagtgagccggagccggcgacggcggcagtggcggcccggcctgcaggagcccgacggggtctctgccatgggggagtgacgcgcctgcacccgctgttccgcggcagcggcgagacatgaggagaccccgcgacaggggcagcggcggcggctcgtgagccccgggatggaggagaaatacggcggggacgtgctggccggccccggcggcggcggcggccttgggccggtggacgtacccagcgctcgattaacaaaatatattgtgttactatgtttcactaaatttttgaaggctgtgggacttttcgaatcatatgatctcctaaaagctgttcacattgttcagttcatttttatattaaaacttgggactgcattttttatggttttgtttcaaaagccattttcttctgggaaaactattaccaaacaccagataattggatcactaaaaattcctggtagaaaagaatttaaagacaaaaagttaaatgatcctaggaaactagtgggaaactgagaaatcataaaattgtactctgaagaaaaagatttcaaaatctaccagcagacaagaatatagataatggaaaacagaatactgtcctttttttttttctttctttttttgagaaagagtcttgctccatcgcccaggctgcagtgcagtgacacgatcttgtctcactgcaacctctgcctcccgggttcaagcgattctcctgcctcagcctcctgagtagctggaattacaggcacccaccaccacacccagctcatttttgtatttttagtagagacggggcttcattcaccacattggccagcctggtcttgaactcctgacctcaggtgatctgcctgcctcggcctcacaaagtgctaggattacaggcatgagccacagcacccggcccagaataagaatactgtcttggaaatctagacttagtcaagggatcttatgttttctatttacaaaatatgtaatgatttcacctttaaaatatttgttattattatctttctgtattttatttaaaatttggatatatagcaaaatatatgtgactgaaatttttaatttttttgtttccatttatagtggatcaaaatatttaaacatgcagttgctgggtgtattatttcactcttgtggttttttggcctcactctttgtggaccactaaggtaaataaaaatgcatattttgaa

SEQ ID NO: 183728 - DNA, 4360 bp, Homo sapiens
  Payload ID: 16197
  Gene Symbol: SLC30A5
  Gene Name: solute carrier family 30 (zinc transporter), member 5
  Uniprot ID: Q8TAD4
  ENST ID: ENST00000396591
  CDS Start-End: 611-2908
gcactccagcctgggcaacaggagcgaaactccatctcaaaacaaaaaaaaaaagaatccctaacgcagaggaaaagattggtgagctttgtttaatcacacacgctgtacattttccacgccctccccctctgccctacaggaatccgctgtacttctgacggcccataggtggcactgtagggacaggtaagtgcacagggagcgccacccggagaggctgataggaggcggagcttcaatgcgacacaacgtggcgggaggagcctaagggacgaggaaaggcgagtgttctgcttgcgcagacgcaaggctgggcactcccccgggagtgagggttgctgggcctgatgacgtggcttggcaacgtccctaccgccgctgcttcccgggaacctggcgccgccggaactgatcgcggcctagtcccgacgcgtgtgtgctagtgagccggagccggcgacggcggcagtggcggcccggcctgcaggagcccgacggggtctctgccatgggggagtgacgcgcctgcacccgctgttccgcggcagcggcgagacatgaggagaccccgcgacaggggcagcggcggcggctcgtgagccccgggatggaggagaaatacggcggggacgtgctggccggccccggcggcggcggcggccttgggccggtggacgtacccagcgctcgattaacaaaatatattgtgttactatgtttcactaaatttttgaaggctgtgggacttttcgaatcatatgatctcctaaaagctgttcacattgttcagttcatttttatattaaaacttgggactgcattttttatggttttgtttcaaaagccattttcttctgggaaaactattaccaaacaccagtggatcaaaatatttaaacatgcagttgctgggtgtattatttcactcttgtggttttttggcctcactctttgtggaccactaaggactttgctgctatttgagcacagtgatattgttgtcatttcactactcagtgttttgttcaccagttctggaggaggaccagcaaagacaaggggagctgcttttttcattattgctgtgatctgtttattgctttttgacaatgatgatctcatggctaaaatggctgaacaccctgaaggacatcatgacagtgctctaactcatatgctttacacagccattgccttcttaggtgtggcagatcacaagggtggagtattattgctagtactggctttgtgttgtaaagttggttttcatacagcttccagaaagctctctgtcgacgttggtggagctaaacgtcttcaagctttatctcatcttgtttctgtgcttctcttgtgcccatgggtcattgttctttctgtgacaactgagagtaaagtggagtcttggttttctctcattatgccttttgcaacggttatcttttttgtcatgatcctggatttctacgtggattccatttgttcagtcaaaatggaagtttccaaatgtgctcgttatggatcctttcccatttttattagtgctctcctttttggaaatttttggacacatccaataacagaccagcttcgggctatgaacaaagcagcacaccaggagagcactgaacacgtcctgtctggaggagtggtagtgagtgctatattcttcattttgtctgccaatatcttatcatctccctctaagagaggacaaaaaggtacccttattggatattctcctgaaggaacacctctttataacttcatgggtgatgcttttcagcatagctctcaatcgatccctaggtttattaaggaatcactaaaacaaattcttgaggagagtgactctaggcagatcttttacttcttgtgcttgaatctgctttttacctttgtggaattattctatggcgtgctgaccaatagtctgggcctgatctcggatggattccacatgctttttgactgctctgctttagtcatgggactttttgctgccctgatgagtaggtggaaagccactcggattttctcctatgggtacggccgaatagaaattctgtctggatttattaatggactttttctaatagtaatagcgttttttgtgtttatggagtcagtggctagattgattgatcctccagaattagacactcacatgttaacaccagtctcagttggagggctgatagtaaaccttattggtatctgtgcctttagccatgcccatagccatgcccatggagcttctcaaggaagctgtcactcatctgatcacagccattcacaccatatgcatggacacagtgaccatgggcatggtcacagccacggatctgcgggtggaggcatgaatgctaacatgaggggtgtatttctacatgttttggcagatacacttggcagcattggtgtgatcgtatccacagttcttatagagcagtttggatggttcatcgctgacccactctgttctctttttattgctatattaatatttctcagtgttgttccactgattaaagatgcctgccaggttctactcctgagattgccaccagaatatgaaaaagaactacatattgctttagaaaagatacagaaaattgaaggattaatatcataccgagaccctcatttttggcgtcattctgctagtattgtggcaggaacaattcatatacaggtgacatctgatgtgctagaacaaagaatagtacagcaggttacaggaatacttaaagatgctggagtaaacaatttaacaattcaagtggaaaaggaggcatactttcaacatatgtctggcctaagtactggatttcatgatgttctggctatgacaaaacaaatggaatccatgaaatactgcaaagatggtacttacatcatgtgagataactcaagaattacccctggagaataaacaatgaagattaaatgactcagtatttgtaatattgccagaaggataaaaattacacattaactgtacagaaacagagttccctactactggatcaaggaatctttcttgaaggaaatttaaatacagaatgaaacattaatggtaaaagtggagtaattatttaaattatgtgtataaaaggaatcaaattttgagtaaacatgatgtattacatcatcttcaaaaatagatatgatggattctagtgaagaccaaaattacttctgtttactttctatcaggaagcatctccattgtaaatatgtatttacatgtttattacaaagacccaaatgaaaaatttttagtccattttttgcatagcctaaagataaaataggaataaaagttctatatttatggattttctgtatataaaactggtttctaattataacttaagtccattaagtaaaatctgtattgccactttaaatgtaaactaaattatttgggagaaacttcaaccactgatatgagataagcaatgagaatagggaagtgtataacatcacagtttttgatgtattacaaaaatcaaccactctataaaataaattttttttacttttggtaatatttgcaaatgaataattaatttattagggtaaagaacttatactaagttgtgtccatgttattcatttacttaccatgttcctttaaagtagaatatttcctttcttgttatatatttgacattccaagctgcttatcaagctggtatccaagcagtggtaagctttcatcctttcttagctccataacgttgtgaaacagccagttaagagaatcgtaaataattgtcaactcacagttgaattctctgcctatgtaggtaacttttttctaatttctggaacatatagatatataagaaatatcaaagaataggtagttatttcaaagtttaataagtaaaacttgttcataaacatttgagcaccatgaaatcaaaataccctataactactttctatagtcatatctaatttatatttttttcatttccagttgtaactagatatgtagtaaagtctgaaaagactttaccatagacaataacatgcagttttatcagcaccaaagaatgttgtccaaaagaaactttttaatacctgtctttctatttataacatctgaatattttcattcttatattaagaattttgataagtagattgaatttagtatgagtactattttcttatatataccacaatggcaaacatgtattataaatcatatttttgtcttaccaattttaatatatgaggggttttagaaatttgttgtaagttatttttatattccttgtcttttgcatattttttggccaaaatcttcaatacatattaaaatttttgagtggtgggaaaa

SEQ ID NO: 183729 - DNA, 681 bp, Homo sapiens
  Payload ID: 16197
  Gene Symbol: SLC30A5
  Gene Name: solute carrier family 30 (zinc transporter), member 5
  Uniprot ID: Q8TAD4
  ENST ID: ENST00000502979
  CDS Start-End: 59-292
ggcgagacatgaggagaccccgcgacaggggcagcggcggcggctcgtgagccccgggatggaggagaaatacggcggggacgtgctggccggccccggcggcggcggcggccttgggccggtggacgtacccagcgctcggactgcattttttatggttttgtttcaaaagccattttcttctgggaaaactattaccaaacaccagataattggatcactaaaaattcctggtagaaaagaatttaaagacaaaaagttaaatgatcctaggaaactagtgggaaactgagaaatcataaaattgtactctgaagaaaaagatttcaaaatctaccagcagacaagaatatagataatggaaaacagaatactgtcctttttttttttctttctttttttgagaaagagtcttgctccatcgcccaggctgcagtgcagtgacacgatcttgtctcactgcaacctctgcctcccgggttcaagcgattctcctgcctcagcctcctgagtagctggaattacaggcacccaccaccacacccagctcatttttgtatttttagtagagacggggcttcattcaccacattggccagcctggtcttgaactcctgacctcaggtgatctgcctgcctcggcctcacaaagtgctaggattacaggcatgagccacagca

SEQ ID NO: 183730 - DNA, 763 bp, Homo sapiens
  Payload ID: 16197
  Gene Symbol: SLC30A5
  Gene Name: solute carrier family 30 (zinc transporter), member 5
  ENST ID: ENST00000511158
  CDS Start-End: 1-254
cactgattaaagatgcctgccaggttctactcctgagattgccaccagaatatgaaaaagaactacatattgctttagaaaaggttacaggaatacttaaagatgctggagtaaacaatttaacaattcaagtggaaaaggaggcatactttcaacatatgtctggcctaagtactggatttcatgatgttctggctatgacaaaacaaatggaatccatgaaatactgcaaagatggtacttacatcatgtgagataactcaagaattacccctggagaataaacaatgaagattaaatgactcagtatttgtaatattgccagaaggataaaaattacacattaactgtacagaaacagagttccctactactggatcaaggaatctttcttgaaggaaatttaaatacagaatgaaacattaatggtaaaagtggagtaattatttaaattatgtgtataaaaggaatcaaattttgagtaaacatgatgtattacatcatcttcaaaaatagatatgatggattctagtgaagaccaaaattacttctgtttactttctatcaggaagcatctccattgtaaatatgtatttacatgtttattacaaagacccaaatgaaaaatttttagtccattttttgcatagcctaaagataaaataggaataaaagttctatatttatggattttctgtatataaaactggtttctaattataacttaagtccattaagtaaaatctgtattgccactttaaat

SEQ ID NO: 183731 - DNA, 382 bp, Homo sapiens
  Payload ID: 16197
  Gene Symbol: SLC30A5
  Gene Name: solute carrier family 30 (zinc transporter), member 5
  ENST ID: ENST00000504103
  CDS Start-End: 168-382
tagtgagccggagccggcgacggcggcagtggcggcccggcctgcaggagcccgacggggtctctgccatgggggagtgacgcgcctgcacccgctgttccgcggcagcggcgagacatgaggagaccccgcgacaggggcagcggcggcggctcgtgagccccgggatggaggagaaatacggcggggacgtgctggccggccccggcggcggcggcggccttgggccggtggacgtacccagcgctcggactgcattttttatggttttgtttcaaaagccattttcttctgggaaaactattaccaaacaccagtggatcaaaatatttaaacatgcagttgctgggtgtattatttcactcttgtggttttttggcct

SEQ ID NO: 183732 - DNA, 555 bp, Homo sapiens
  Payload ID: 16197
  Gene Symbol: SLC30A5
  Gene Name: solute carrier family 30 (zinc transporter), member 5
  ENST ID: ENST00000513937
  CDS Start-End: 1-196
actttttgctgccctgatgagtaggtggaaagccactcggattttctcctatgggtacggccgaatagaaattctgtctggatttattaatggactttttctaatagtaatagcgttttttgtgtttatggagtcagtggctagattgattgatcctccagaattagacactcacatgttaacaccatgcccatagccatgcccatggagcttctcaaggaagctgtcactcatctgatcacagccattcacaccatatgcatggacacagtgaccatgggcatggtcacagccacggatctgcgggtggaggcatgaatgctaacatgaggggtgtatttctacatgttttggcagatacacttggcagcattggtgtgatcgtatccacagttcttatagagcagtttggatggttcatcgctgacccactctgttctctttttattgctatattaatatttctcagtgttgttccactgattaaagatgcctgccaggttctactcctgagattgccaccagaatatgaaaaagaactacatattgctttag

SEQ ID NO: 183733 - DNA, 3999 bp, Homo sapiens
  Payload ID: 16197
  Gene Symbol: SLC30A5
  Gene Name: solute carrier family 30 (zinc transporter), member 5
  ENST ID: ENST00000621204
  CDS Start-End: 1469-2551
agacgcaaggctgggcactcccccgggagtgagggttgctgggcctgatgacgtggcttggcaacgtccctaccgccgctgcttcccgggaacctggcgccgccggaactgatcgcggcctagtcccgacgcgtgtgtgctagtgagccggagccggcgacggcggcagtggcggcccggcctgcaggagcccgacggggtctctgccatgggggagtgacgcgcctgcacccgctgttccgcggcagcggcgagacatgaggagaccccgcgacaggggcagcggcggcggctcgtgagccccgggatggaggagaaatacggcggggacgtgctggccggccccggcggcggcggcggccttgggccggtggacgtacccagcgctcgattaacaaaatatattgtgttactatgtttcactaaatttttgaaggctgtgggacttttcgaatcatatgatctcctaaaagctgttcacattgttcagttcatttttatattaaaacttgggactgcattttttatggttttgtttcaaaagccattttcttctgggaaaactattaccaaacaccagtggatcaaaatatttaaacatgcagttgctgggtgtattatttcactcttgtggttttttggcctcactctttgtggaccactaaggactttgctgctatttgagcacagtgatattgttgtcatttcactactcagtgttttgttcaccagttctggaggaggaccagcaaagacaaggggagctgcttttttcattattgctgtgatctgtttattgctttttgacaatgatgatctcatggctaaaatggctgaacaccctgaaggacatcatgacagtgctctaactcatatgctttacacagccattgccttcttaggtgtggcagatcacaagggtggagtattattgctagtactggctttgtgttgtaaagttggttttcatacagcttccagaaagctctctgtcgacgttggtggagctaaacgtcttcaagctttatctcatcttgtttctgtgcttctcttgtgcccatgggtcattgttctttctgtgacaactgagagtaaagtggagtcttggttttctctcattatgccttttgcaacggttatcttttttgtcatgatcctggatttctacgtggattccatttgttcagtcaaaatggaagtttccaaatgtgctcgttatggatcctttcccatttttattagtgctctcctttttggaaatttttggacacatccaataacagaccagcttcgggctatgaacaaagcagcacaccaggagagcactgaacacgtcctgtctggaggagtggtagtgagtgctatattcttcattttgtctgccaatatcttatcatctccctctaagagaggacaaaaaggtacccttattggatattctcctgaaggaacacctctttataacttcatgggtgatgcttttcagcatagctctcaatcgatccctaggtttattaaggaatcactaaaacaaattcttgaggagagtgactctaggcagatcttttacttcttgtgcttgaatctgctttttacctttgtggaattattctatggcgtgctgaccaatagtctgggcctgatctcggatggattccacatgctttttgactgctctgctttagtcatgggactttttgctgccctgatgagtaggtggaaagccactcggattttctcctatgggtacggccgaatagaaattctgtctggatttattaatggactttttctaatagtaatagcgttttttgtgtttatggagtcagtggctagattgattgatcctccagaattagacactcacatgttaacaccatgccatagccatgcccatggagcttctcaaggaagctgtcactcatctgatcacagccattcacaccatatgcatggacacagtgaccatgggcatggtcacagccacggatctgcgggtggaggcatgaatgctaacatgaggggtgtatttctacatgttttggcagatacacttggcagcattggtgtgatcgtatccacagttcttatagagcagtttggatggttcatcgctgacccactctgttctctttttattgctatattaatatttctcagtgttgttccactgattaaagatgcctgccaggttctactcctgagattgccaccagaatatgaaaaagaactacatattgctttagaaaagatacagaaaattgaaggattaatatcataccgagaccctcatttttggcgtcattctgctagtattgtggcaggaacaattcatatacaggtgacatctgatgtgctagaacaaagaatagtacagcaggttacaggaatacttaaagatgctggagtaaacaatttaacaattcaagtggaaaaggaggcatactttcaacatatgtctggcctaagtactggatttcatgatgttctggctatgacaaaacaaatggaatccatgaaatactgcaaagatggtacttacatcatgtgagataactcaagaattacccctggagaataaacaatgaagattaaatgactcagtatttgtaatattgccagaaggataaaaattacacattaactgtacagaaacagagttccctactactggatcaaggaatctttcttgaaggaaatttaaatacagaatgaaacattaatggtaaaagtggagtaattatttaaattatgtgtataaaaggaatcaaattttgagtaaacatgatgtattacatcatcttcaaaaatagatatgatggattctagtgaagaccaaaattacttctgtttactttctatcaggaagcatctccattgtaaatatgtatttacatgtttattacaaagacccaaatgaaaaatttttagtccattttttgcatagcctaaagataaaataggaataaaagttctatatttatggattttctgtatataaaactggtttctaattataacttaagtccattaagtaaaatctgtattgccactttaaatgtaaactaaattatttgggagaaacttcaaccactgatatgagataagcaatgagaatagggaagtgtataacatcacagtttttgatgtattacaaaaatcaaccactctataaaataaattttttttacttttggtaatatttgcaaatgaataattaatttattagggtaaagaacttatactaagttgtgtccatgttattcatttacttaccatgttcctttaaagtagaatatttcctttcttgttatatatttgacattccaagctgcttatcaagctggtatccaagcagtggtaagctttcatcctttcttagctccataacgttgtgaaacagccagttaagagaatcgtaaataattgtcaactcacagttgaattctctgcctatgtaggtaacttttttctaatttctggaacatatagatatataagaaatatcaaagaataggtagttatttcaaagtttaataagtaaaacttgttcataaacatttgagcaccatgaaatcaaaataccctataactactttctatagtcatatctaatttatatttttttcatttccagttgtaactagatatgtagtaaagtctgaaaagactttaccatagacaataacatgcagttttatcagcaccaaagaatgttgtccaaaagaaactttttaatacctgtctttctatttataacatctgaatattttcattcttatattaagaattttgataagtagattgaatttagtatgagtactattttcttatatataccacaatggcaaacatgtattataaatcatatttttgtcttaccaattttaatatatgaggggttttagaaatttgttgtaagttatttttatattccttgtcttttgcatattttttggccaaaatcttcaatacatattaaaatttttgagtggtggg

SEQ ID NO: 183734 - DNA, 5089 bp, Homo sapiens
  Payload ID: 16198
  Gene Symbol: SLC30A6
  Gene Name: solute carrier family 30 (zinc transporter), member 6
  Uniprot ID: Q6NXT4
  ENST ID: ENST00000282587
  CDS Start-End: 38-1423
agaacggcttccggcgggagctgtgcagctccttatcatggggacaattcatctctttcgaaaaccacaaagatccttttttggcaagttgttacgggaatttagacttgtagcagctgaccgaaggtcctggaagatactgctctttggtgtaataaacttgatatgtactggcttcctgcttatgtggtgcagttctactaatagtatagctttaactgcctatacttacctgaccatttttgatctttttagtttaatgacatgtttaataagttactgggtaacattgaggaaacctagccctgtctattcatttgggtttgaaagattagaagtcctggctgtatttgcctccacagtcttggcacagttgggagctctctttatattaaaagaaagtgcagaacgctttttggaacagcccgagatacacacgggaagattattagttggtacttttgtggctctttgtttcaacctgttcacgatgctttctattcggaataaaccttttgcttatgtctcagaagctgctagtacgagctggcttcaagagcatgttgcagatcttagtcgaagcttgtgtggaattattccgggacttagcagtatcttccttccccgaatgaatccatttgttttgattgatcttgctggagcatttgctctttgtattacatatatgctcattgaaattaataattattttgccgtagacactgcctctgctatagctattgccttgatgacatttggcactatgtatcccatgagtgtgtacagtgggaaagtcttactccagacaacaccaccccatgttattggtcagttggacaaactcatcagagaggtatctaccttagatggagttttagaagtccgaaatgaacatttttggaccctaggttttggctcattggctggatcagtgcatgtaagaattcgacgagatgccaatgaacaaatggttcttgctcatgtgaccaacaggctgtacactctagtgtctactctaactgttcaaattttcaaggatgactggattaggcctgccttattgtctgggcctgttgcagccaatgtcctaaacttttcagatcatcacgtaatcccaatgcctcttttaaagggtactgatgatttgaacccagttacatcaactccagctaaacctagtagtccacctccagaattttcatttaacactcctgggaaaaatgtgaacccagttattcttctaaacacacaaacaaggccttatggttttggtctcaatcatggacacacaccttacagcagcatgcttaatcaaggacttggagttccaggaattggagcaactcaaggattgaggactggttttacaaatataccaagtagatatggaactaataatagaattggacaaccaagaccatgatagactctaacttatttttataaggaatattgactccttggcttccaatttatttagtaatccaactttgcattgactgtttaatcatttactctaaatgttagataatagtagtcttgttcacatttcatgaaacctatgaaactatatttttgtaaaatgtatttgtgacagtgaaatcctcgtaaatgttaaaggctttaaataggcttcctttagaaaatgtgtttctttaaatttggattttggtatctttggttttgtagttgactgcagtgtgatgtgaccttacctttataagagccacttgatggagtagatctgtcacattactaagatacgatatttctttttttttccgagacggagtcttgctctgccactgtgcccggccaatacattattattaacttaaggctgtactttattaaggcttccttagtttttgttttgttttgttttttgagatggagtctcactctgtcgcccaggctggaatgcagtggcatgatctcagctcactgcaacctctgcctcctgagttcaaatgattctcctgcctcagcctcccgagtagctgggattacaggcacctgccaccacgcccagctaatttttgtatttttagtaaagacgggggatttcaccatgttggccaggctggtcttgaactcctgacctcatgatccacccaccttagcctcccaaagtgctgggattaggtgtgagccaccgcacctggccgatattttctttaatgaaatttataaatatgcttcttgaataatacacattttgggaaagggaaaaatgtctgttcaaaaagtaaaagtctcttttatagcttttccaaacttaattgctaaatttttctttgaggttctcctgaattatgtcttacaaactaaaagcaaaaatttttagcagaaattttggaatacattctatctagcacaatttgaatttttaattatcaagatttttgttaaagtttctctcctttaaaaattttagtacatttgtaaatagtccatggttctcagtgttttattttgattaagtgactacccaacttttggtgatatgcagtgaaagaatcccaattttctatgttacatttaatcaaatactgacataatgaatttatctttcctgacacattttcattcattggctttttaatttcttattttattaacaaaatatatcagatatattaccaaaacacatggagttccatacataatatggaatttgatgtcttttcaagttgcacaaagaatttgagcatatataattttaccaaagcataatggaccttagattatagaatacagcattgttaggtctgcagtgggcagtttctttttgttttgctttgtcaaaaatgggaaattgttaactgtgatgaaatgtgagaattacatagattatgttattttttagttgttttccaaatgcagagtttaaggactttctaacatggctagtattacttccaaaaagtataacaagcagcagtcacacatgacctaggagggttttttattgttttattttattatgcattccataacagttttaaaatgggattttgagaatggacttaactttcctggaatccaatgctcctggagatttatgactttcccagccatcagccagctatctagagaagatttttgtttttcttttgcaacagtttcttcagtcaactcattcactttcaaataggagcagcactttgaaatcctttttcttcactgtggattaaaaacatccaagaagccatctctgtcaagcagaattgtcatctgtggtaataagtgaccatgtcctaaatacctttttcttagtgaggagttggtcattgtctttggcatctgcaacccctgttcaggcatgtgacctgctaaagaaatacagcctacactaccttgactactggggaaaatgatacttcgtaaaatgtaataaggcaacctgttccttggcctttatcttatgttttccaactattactgtatctgttattggtctactattacaggatgattcttcttcctccattgatctcaactaaatatgaattagggtcatgcatgaaatctgaactgccgtgtcctgagttatggttaagaggtatgtgctgccaccccatgcatgtcttccccatccccataggattttaaagtgttcaggtaccaaacacagttctgtgtgaggttttatgcctacttcctcaacaccaattcagaggcaacacctgtgcatctgtcccaccaaaggtgctttaatacctaccttcactatttgagaaaggacactcacagttgcctgtgggttatgaaagaattggccctacgtcctgcatgtaagatgttacaggggacattgggccaggcattattatatagagaagtcttatttgccaagctctgactaacttctggatatgaaaataaggaacttgcccagcataggcctataggcagcagccttactagtaaatcttgccacagaatcacttgaagctagacagagaaagaagttcaatttaaatatttgtcccattgtttgtgattaggatgtaagctttgtggaatgtaattaaccctgctttacgaagtcaccatattataataggaaaaacactgcctaggaggcaagagatctgaattccagttctgatgctgccactgtgtaaggaagtagttttataacccatgggcaaatcatctgagctttctcatctgtaaagttagggagaggaattaattagttgatctgtaaaataatcagcttcaaaacgttatggctaaatctgtagaatgtatgcccaattgctaaacggatgttgtgcccagaattttatctagtgactacctcaacatacaggccaagcgttacctacaccaacacccaagccattaatttgaggtgccatgagaataggtgaaccacagcctaacaccatttaggtttttgtgtttttttcaggcttgcctctacttaaatatatttagatgagagagttctcttagacttctttctttgtaaggaagggttatttggggaagtgttggaaaaaagattagggcagggtacccttagtttatatagggtacaaaagaatgggaaacatcttccctttcttctttaatctctgaagtcatgtttggaattacatataatgtagcaggtactggagaggacctgaatttcaagcttctgatttagctgtttgtaaacttccaagttttgcttgactaaagaatgctgatcttttttgggagtctgatctccttctaatatcagaaagtgctttttatattccagattgcttgaattaaactgtttggattaaagaacatatatggagtttcctctctggttttaaataatctttctttattcagtagctattaataatttatctcatattcagcgaatatttattgagaatattgttgagaatctcttacatgccaggcactatactaagttaatatgcattcagtataccagttggtgtgacccagaccaaaggtaacacaaagatgaatgagaattccttcaaggcgccgataatcctagtaggagagctaagacacaaaactgttgcatgtttttaatcatcaaattaaacttctttccacgtcctta

SEQ ID NO: 183735 - DNA, 4758 bp, Homo sapiens
  Payload ID: 16198
  Gene Symbol: SLC30A6
  Gene Name: solute carrier family 30 (zinc transporter), member 6
  Uniprot ID: Q6NXT4
  ENST ID: ENST00000357055
  CDS Start-End: 61-1359
gttctgggaaaactcgagcacccagaacggcttccggcgggagctgtgcagctccttatcatgtcctggaagatactgctctttggtgtaataaacttgatatgtactggcttcctgcttatgtggtgcagttctactaatagtatagctttaactgcctatacttacctgaccatttttgatctttttagtttaatgacatgtttaataagttactgggtaacattgaggaaacctagccctgtctattcatttgggtttgaaagattagaagtcctggctgtatttgcctccacagtcttggcacagttgggagctctctttatattaaaagaaagtgcagaacgctttttggaacagcccgagatacacacgggaagattattagttggtacttttgtggctctttgtttcaacctgttcacgatgctttctattcggaataaaccttttgcttatgtctcagaagctgctagtacgagctggcttcaagagcatgttgcagatcttagtcgaagcttgtgtggaattattccgggacttagcagtatcttccttccccgaatgaatccatttgttttgattgatcttgctggagcatttgctctttgtattacatatatgctcattgaaattaataattattttgccgtagacactgcctctgctatagctattgccttgatgacatttggcactatgtatcccatgagtgtgtacagtgggaaagtcttactccagacaacaccaccccatgttattggtcagttggacaaactcatcagagaggtatctaccttagatggagttttagaagtccgaaatgaacatttttggaccctaggttttggctcattggctggatcagtgcatgtaagaattcgacgagatgccaatgaacaaatggttcttgctcatgtgaccaacaggctgtacactctagtgtctactctaactgttcaaattttcaaggatgactggattaggcctgccttattgtctgggcctgttgcagccaatgtcctaaacttttcagatcatcacgtaatcccaatgcctcttttaaagggtactgatgatttgaacccagttacatcaactccagctaaacctagtagtccacctccagaattttcatttaacactcctgggaaaaatgtgaacccagttattcttctaaacacacaaacaaggccttatggttttggtctcaatcatggacacacaccttacagcagcatgcttaatcaaggacttggagttccaggaattggagcaactcaaggattgaggactggttttacaaatataccaagtagatatggaactaataatagaattggacaaccaagaccatgatagactctaacttatttttataaggaatattgactccttggcttccaatttatttagtaatccaactttgcattgactgtttaatcatttactctaaatgttagataatagtagtcttgttcacatttcatgaaacctatgaaactatatttttgtaaaatgtatttgtgacagtgaaatcctcgtaaatgttaaaggctttaaataggcttcctttagaaaatgtgtttctttaaatttggattttggtatctttggttttgtagttgactgcagtgtgatgtgaccttacctttataagagccacttgatggagtagatctgtcacattactaagatacgatatttctttttttttccgagacggagtcttgctctgccactgtgcccggccaatacattattattaacttaaggctgtactttattaaggcttccttagtttttgttttgttttgttttttgagatggagtctcactctgtcgcccaggctggaatgcagtggcatgatctcagctcactgcaacctctgcctcctgagttcaaatgattctcctgcctcagcctcccgagtagctgggattacaggcacctgccaccacgcccagctaatttttgtatttttagtaaagacgggggatttcaccatgttggccaggctggtcttgaactcctgacctcatgatccacccaccttagcctcccaaagtgctgggattaggtgtgagccaccgcacctggccgatattttctttaatgaaatttataaatatgcttcttgaataatacacattttgggaaagggaaaaatgtctgttcaaaaagtaaaagtctcttttatagcttttccaaacttaattgctaaatttttctttgaggttctcctgaattatgtcttacaaactaaaagcaaaaatttttagcagaaattttggaatacattctatctagcacaatttgaatttttaattatcaagatttttgttaaagtttctctcctttaaaaattttagtacatttgtaaatagtccatggttctcagtgttttattttgattaagtgactacccaacttttggtgatatgcagtgaaagaatcccaattttctatgttacatttaatcaaatactgacataatgaatttatctttcctgacacattttcattcattggctttttaatttcttattttattaacaaaatatatcagatatattaccaaaacacatggagttccatacataatatggaatttgatgtcttttcaagttgcacaaagaatttgagcatatataattttaccaaagcataatggaccttagattatagaatacagcattgttaggtctgcagtgggcagtttctttttgttttgctttgtcaaaaatgggaaattgttaactgtgatgaaatgtgagaattacatagattatgttattttttagttgttttccaaatgcagagtttaaggactttctaacatggctagtattacttccaaaaagtataacaagcagcagtcacacatgacctaggagggttttttattgttttattttattatgcattccataacagttttaaaatgggattttgagaatggacttaactttcctggaatccaatgctcctggagatttatgactttcccagccatcagccagctatctagagaagatttttgtttttcttttgcaacagtttcttcagtcaactcattcactttcaaataggagcagcactttgaaatcctttttcttcactgtggattaaaaacatccaagaagccatctctgtcaagcagaattgtcatctgtggtaataagtgaccatgtcctaaatacctttttcttagtgaggagttggtcattgtctttggcatctgcaacccctgttcaggcatgtgacctgctaaagaaatacagcctacactaccttgactactggggaaaatgatacttcgtaaaatgtaataaggcaacctgttccttggcctttatcttatgttttccaactattactgtatctgttattggtctactattacaggatgattcttcttcctccattgatctcaactaaatatgaattagggtcatgcatgaaatctgaactgccgtgtcctgagttatggttaagaggtatgtgctgccaccccatgcatgtcttccccatccccataggattttaaagtgttcaggtaccaaacacagttctgtgtgaggttttatgcctacttcctcaacaccaattcagaggcaacacctgtgcatctgtcccaccaaaggtgctttaatacctaccttcactatttgagaaaggacactcacagttgcctgtgggttatgaaagaattggccctacgtcctgcatgtaagatgttacaggggacattgggccaggcattattatatagagaagtcttatttgccaagctctgactaacttctggatatgaaaataaggaacttgcccagcataggcctataggcagcagccttactagtaaatcttgccacagaatcacttgaagctagacagagaaagaagttcaatttaaatatttgtcccattgtttgtgattaggatgtaagctttgtggaatgtaattaaccctgctttacgaagtcaccatattataataggaaaaacactgcctaggaggcaagagatctgaattccagttctgatgctgccactgtgtaaggaagtagttttataacccatgggcaaatcatctgagctttctcatctgtaaagttagggagaggaattaattagttgatctgtaaaataatcagcttcaaaacgttatggctaaatctgtagaatgtatgcccaattgctaaacggatgttgtgcccagaattttatctagtgactacctcaacatacaggccaagcgttacctacaccaacacccaagccattaatttgaggtgccatgagaataggtgaaccacagcctaacaccatttaggtttttgtgtttttttcaggcttgcctctacttaaatatatttagatgagagagttctcttagacttctttctttgtaaggaagggttatttggggaagtgttggaaaaaagattagggcagggtacccttagtttatatagggtacaaaagaatgggaaacatcttccctttcttctttaatctctgaagtcatgtttggaattacatataatgtagcaggtactggagaggacctgaatttcaagcttctgatttagctgtttgtaaacttccaagttttgcttgactaaagaatgctgatcttttttgggagtctgatctccttctaatatcagaaagtgctttttatattccagattgcttgaattaaactgtttggattaaagaacatatatggagtttcctctctggtttta

SEQ ID NO: 183736 - DNA, 2354 bp, Homo sapiens
  Payload ID: 16198
  Gene Symbol: SLC30A6
  Gene Name: solute carrier family 30 (zinc transporter), member 6
  Uniprot ID: Q6NXT4
  ENST ID: ENST00000379343
  CDS Start-End: 38-1543
agaacggcttccggcgggagctgtgcagctccttatcatggggacaattcatctctttcgaaaaccacaaagatccttttttggcaagttgttacgggaatttagacttgtagcagctgaccgaaggtcctggaagatactgctctttggtgtaataaacttgatatgtactggcttcctgcttatgtggtgcagttctactaatagtatagctttaactgcctatacttacctgaccatttttgatctttttagagacggggtttcaccattttggctgggctggtctcaaactcctgacctcaagtggtccacccacctcggcctaccaaagtgctgggataacaggcgtgagctaccgtgcctgagcaatagtttaatgacatgtttaataagttactgggtaacattgaggaaacctagccctgtctattcatttgggtttgaaagattagaagtcctggctgtatttgcctccacagtcttggcacagttgggagctctctttatattaaaagaaagtgcagaacgctttttggaacagcccgagatacacacgggaagattattagttggtacttttgtggctctttgtttcaacctgttcacgatgctttctattcggaataaaccttttgcttatgtctcagaagctgctagtacgagctggcttcaagagcatgttgcagatcttagtcgaagcttgtgtggaattattccgggacttagcagtatcttccttccccgaatgaatccatttgttttgattgatcttgctggagcatttgctctttgtattacatatatgctcattgaaattaataattattttgccgtagacactgcctctgctatagctattgccttgatgacatttggcactatgtatcccatgagtgtgtacagtgggaaagtcttactccagacaacaccaccccatgttattggtcagttggacaaactcatcagagaggtatctaccttagatggagttttagaagtccgaaatgaacatttttggaccctaggttttggctcattggctggatcagtgcatgtaagaattcgacgagatgccaatgaacaaatggttcttgctcatgtgaccaacaggctgtacactctagtgtctactctaactgttcaaattttcaaggatgactggattaggcctgccttattgtctgggcctgttgcagccaatgtcctaaacttttcagatcatcacgtaatcccaatgcctcttttaaagggtactgatgatttgaacccagttacatcaactccagctaaacctagtagtccacctccagaattttcatttaacactcctgggaaaaatgtgaacccagttattcttctaaacacacaaacaaggccttatggttttggtctcaatcatggacacacaccttacagcagcatgcttaatcaaggacttggagttccaggaattggagcaactcaaggattgaggactggttttacaaatataccaagtagatatggaactaataatagaattggacaaccaagaccatgatagactctaacttatttttataaggaatattgactccttggcttccaatttatttagtaatccaactttgcattgactgtttaatcatttactctaaatgttagataatagtagtcttgttcacatttcatgaaacctatgaaactatatttttgtaaaatgtatttgtgacagtgaaatcctcgtaaatgttaaaggctttaaataggcttcctttagaaaatgtgtttctttaaatttggattttggtatctttggttttgtagttgactgcagtgtgatgtgaccttacctttataagagccacttgatggagtagatctgtcacattactaagatacgatatttctttttttttccgagacggagtcttgctctgccactgtgcccggccaatacattattattaacttaaggctgtactttattaaggcttccttagtttttgttttgttttgttttttgagatggagtctcactctgtcgcccaggctggaatgcagtggcatgatctcagctcactgcaacctctgcctcctgagttcaaatgattctcctgcctcagcctcccgagtagctgggattacaggcacctgccaccacgcccagctaatttttgtatttttagtaaagacgggggatttcaccatgttggccaggctggtcttgaactcctgacctcatgatccacccaccttagcctcccaaagtgctgggattaggtgtgagccaccgcacctggccgatattttctttaatgaaatttataaatatgcttcttgaataatacacattttgggaaagggaaaaa

SEQ ID NO: 183737 - DNA, 4589 bp, Homo sapiens
  Payload ID: 16198
  Gene Symbol: SLC30A6
  Gene Name: solute carrier family 30 (zinc transporter), member 6
  ENST ID: ENST00000406369
  CDS Start-End: 40-1203
ggcttccggcgggagctgtgcagctccttatcatgtttaatgacatgtttaataagttactgggtaacattgaggaaacctagccctgtctattcatttgggtttgaaagattagaagtcctggctgtatttgcctccacagtcttggcacagttgggagctctctttatattaaaagaaagtgcagaacgctttttggaacagcccgagatacacacgggaagattattagttggtacttttgtggctctttgtttcaacctgttcacgatgctttctattcggaataaaccttttgcttatgtctcagaagctgctagtacgagctggcttcaagagcatgttgcagatcttagtcgaagcttgtgtggaattattccgggacttagcagtatcttccttccccgaatgaatccatttgttttgattgatcttgctggagcatttgctctttgtattacatatatgctcattgaaattaataattattttgccgtagacactgcctctgctatagctattgccttgatgacatttggcactatgtatcccatgagtgtgtacagtgggaaagtcttactccagacaacaccaccccatgttattggtcagttggacaaactcatcagagaggtatctaccttagatggagttttagaagtccgaaatgaacatttttggaccctaggttttggctcattggctggatcagtgcatgtaagaattcgacgagatgccaatgaacaaatggttcttgctcatgtgaccaacaggctgtacactctagtgtctactctaactgttcaaattttcaaggatgactggattaggcctgccttattgtctgggcctgttgcagccaatgtcctaaacttttcagatcatcacgtaatcccaatgcctcttttaaagggtactgatgatttgaacccagttacatcaactccagctaaacctagtagtccacctccagaattttcatttaacactcctgggaaaaatgtgaacccagttattcttctaaacacacaaacaaggccttatggttttggtctcaatcatggacacacaccttacagcagcatgcttaatcaaggacttggagttccaggaattggagcaactcaaggattgaggactggttttacaaatataccaagtagatatggaactaataatagaattggacaaccaagaccatgatagactctaacttatttttataaggaatattgactccttggcttccaatttatttagtaatccaactttgcattgactgtttaatcatttactctaaatgttagataatagtagtcttgttcacatttcatgaaacctatgaaactatatttttgtaaaatgtatttgtgacagtgaaatcctcgtaaatgttaaaggctttaaataggcttcctttagaaaatgtgtttctttaaatttggattttggtatctttggttttgtagttgactgcagtgtgatgtgaccttacctttataagagccacttgatggagtagatctgtcacattactaagatacgatatttctttttttttccgagacggagtcttgctctgccactgtgcccggccaatacattattattaacttaaggctgtactttattaaggcttccttagtttttgttttgttttgttttttgagatggagtctcactctgtcgcccaggctggaatgcagtggcatgatctcagctcactgcaacctctgcctcctgagttcaaatgattctcctgcctcagcctcccgagtagctgggattacaggcacctgccaccacgcccagctaatttttgtatttttagtaaagacgggggatttcaccatgttggccaggctggtcttgaactcctgacctcatgatccacccaccttagcctcccaaagtgctgggattaggtgtgagccaccgcacctggccgatattttctttaatgaaatttataaatatgcttcttgaataatacacattttgggaaagggaaaaatgtctgttcaaaaagtaaaagtctcttttatagcttttccaaacttaattgctaaatttttctttgaggttctcctgaattatgtcttacaaactaaaagcaaaaatttttagcagaaattttggaatacattctatctagcacaatttgaatttttaattatcaagatttttgttaaagtttctctcctttaaaaattttagtacatttgtaaatagtccatggttctcagtgttttattttgattaagtgactacccaacttttggtgatatgcagtgaaagaatcccaattttctatgttacatttaatcaaatactgacataatgaatttatctttcctgacacattttcattcattggctttttaatttcttattttattaacaaaatatatcagatatattaccaaaacacatggagttccatacataatatggaatttgatgtcttttcaagttgcacaaagaatttgagcatatataattttaccaaagcataatggaccttagattatagaatacagcattgttaggtctgcagtgggcagtttctttttgttttgctttgtcaaaaatgggaaattgttaactgtgatgaaatgtgagaattacatagattatgttattttttagttgttttccaaatgcagagtttaaggactttctaacatggctagtattacttccaaaaagtataacaagcagcagtcacacatgacctaggagggttttttattgttttattttattatgcattccataacagttttaaaatgggattttgagaatggacttaactttcctggaatccaatgctcctggagatttatgactttcccagccatcagccagctatctagagaagatttttgtttttcttttgcaacagtttcttcagtcaactcattcactttcaaataggagcagcactttgaaatcctttttcttcactgtggattaaaaacatccaagaagccatctctgtcaagcagaattgtcatctgtggtaataagtgaccatgtcctaaatacctttttcttagtgaggagttggtcattgtctttggcatctgcaacccctgttcaggcatgtgacctgctaaagaaatacagcctacactaccttgactactggggaaaatgatacttcgtaaaatgtaataaggcaacctgttccttggcctttatcttatgttttccaactattactgtatctgttattggtctactattacaggatgattcttcttcctccattgatctcaactaaatatgaattagggtcatgcatgaaatctgaactgccgtgtcctgagttatggttaagaggtatgtgctgccaccccatgcatgtcttccccatccccataggattttaaagtgttcaggtaccaaacacagttctgtgtgaggttttatgcctacttcctcaacaccaattcagaggcaacacctgtgcatctgtcccaccaaaggtgctttaatacctaccttcactatttgagaaaggacactcacagttgcctgtgggttatgaaagaattggccctacgtcctgcatgtaagatgttacaggggacattgggccaggcattattatatagagaagtcttatttgccaagctctgactaacttctggatatgaaaataaggaacttgcccagcataggcctataggcagcagccttactagtaaatcttgccacagaatcacttgaagctagacagagaaagaagttcaatttaaatatttgtcccattgtttgtgattaggatgtaagctttgtggaatgtaattaaccctgctttacgaagtcaccatattataataggaaaaacactgcctaggaggcaagagatctgaattccagttctgatgctgccactgtgtaaggaagtagttttataacccatgggcaaatcatctgagctttctcatctgtaaagttagggagaggaattaattagttgatctgtaaaataatcagcttcaaaacgttatggctaaatctgtagaatgtatgcccaattgctaaacggatgttgtgcccagaattttatctagtgactacctcaacatacaggccaagcgttacctacaccaacacccaagccattaatttgaggtgccatgagaataggtgaaccacagcctaacaccatttaggtttttgtgtttttttcaggcttgcctctacttaaatatatttagatgagagagttctcttagacttctttctttgtaaggaagggttatttggggaagtgttggaaaaaagattagggcagggtacccttagtttatatagggtacaaaagaatgggaaacatcttccctttcttctttaatctctgaagtcatgtttggaattacatataatgtagcaggtactggagaggacctgaatttcaagcttctgatttagctgtttgtaaacttccaagttttgcttgactaaagaatgctgatcttttttgggagtctgatctccttctaatatcagaaagtgctttttatattccagattgcttgaattaaactgtttggattaaagaacatatatggagtttc

SEQ ID NO: 183738 - DNA, 2207 bp, Homo sapiens
  Payload ID: 16198
  Gene Symbol: SLC30A6
  Gene Name: solute carrier family 30 (zinc transporter), member 6
  ENST ID: ENST00000449777
  CDS Start-End: 38-133
agaacggcttccggcgggagctgtgcagctccttatcatggggacaattcatctctttcgaaaaccacaaagatccttttttggcaagttgttacgggaatttagacttgtagcagctgaccgaagggtttgaaagattagaagtcctggctgtatttgcctccacagtcttggcacagttgggagctctctttatattaaaagaaagtgcagaacgctttttggaacagcccgagatacacacgggaagattattagttggtacttttgtggctctttgtttcaacctgttcacgatgctttctattcggaataaaccttttgcttatgtctcagaagcttgtgtggaattattccgggacttagcagtatcttccttccccgaatgaatccatttgttttgattgatcttgctggagcatttgctctttgtattacatatatgctcattgaaattaataattattttgccgtagacactgcctctgctatagctattgccttgatgacatttggcactatgtatcccatgagtgtgtacagtgggaaagtcttactccagacaacaccaccccatgttattggtcagttggacaaactcatcagagaggtatctaccttagatggagttttagaagtccgaaatgaacatttttggaccctaggttttggctcattggctggatcagtgcatgtaagaattcgacgagatgccaatgaacaaatggttcttgctcatgtgaccaacaggctgtacactctagtgtctactctaactgttcaaattttcaaggatgactggattaggcctgccttattgtctgggcctgttgcagccaatgtcctaaacttttcagatcatcacgtaatcccaatgcctcttttaaagggtactgatgatttgaacccagttacatcaactccagctaaacctagtagtccacctccagaattttcatttaacactcctgggaaaaatgtgaacccagttattcttctaaacacacaaacaaggccttatggttttggtctcaatcatggacacacaccttacagcagcatgcttaatcaaggacttggagttccaggaattggagcaactcaaggattgaggactggttttacaaatataccaagtagatatggaactaataatagaattggacaaccaagaccatgatagactctaacttatttttataaggaatattgactccttggcttccaatttatttagtaatccaactttgcattgactgtttaatcatttactctaaatgttagataatagtagtcttgttcacatttcatgaaacctatgaaactatatttttgtaaaatgtatttgtgacagtgaaatcctcgtaaatgttaaaggctttaaataggcttcctttagaaaatgtgtttctttaaatttggattttggtatctttggttttgtagttgactgcagtgtgatgtgaccttacctttataagagccacttgatggagtagatctgtcacattactaagatacgatatttctttttttttccgagacggagtcttgctctgccactgtgcccggccaatacattattattaacttaaggctgtactttattaaggcttccttagtttttgttttgttttgttttttgagatggagtctcactctgtcgcccaggctggaatgcagtggcatgatctcagctcactgcaacctctgcctcctgagttcaaatgattctcctgcctcagcctcccgagtagctgggattacaggcacctgccaccacgcccagctaatttttgtatttttagtaaagacgggggatttcaccatgttggccaggctggtcttgaactcctgacctcatgatccacccaccttagcctcccaaagtgctgggattaggtgtgagccaccgcacctggccgatattttctttaatgaaatttataaatatgcttcttgaataatacacattttgggaaagggaaaaatgtctgttcaaaaagtaaaagtctcttttatagcttttccaaacttaattgctaaatttttctttgaggttctcctgaattatgtcttacaaactaaaagcaaaaatttttagcagaaattttggaatacattctatctagcacaatttgaatttttaattatcaagatttttgttaaagtttctctcctttaaaaattttagtacatttgtaaat

SEQ ID NO: 183739 - DNA, 573 bp, Homo sapiens
  Payload ID: 16198
  Gene Symbol: SLC30A6
  Gene Name: solute carrier family 30 (zinc transporter), member 6
  ENST ID: ENST00000440718
  CDS Start-End: 38-573
agaacggcttccggcgggagctgtgcagctccttatcatgtcctggaagatactgctctttggtgtaataaacttgatatgtactggcttcctgcttatgtggtgcagttctactaatagtatagctttaactgcctatacttacctgaccatttttgatctttttagtttaatgacatgtttaataagttactgggtaacattgaggaaacctagccctgtctattcatttgggtttgaaagattagaagtcctggctgtatttgcctccacagtcttggcacagttgggagctctctttatattaaaagaaagtgcagaacgctttttggaacagcccgagatacacacgggaagattattagttggtacttttgtggctctttgtttcaacctgttcacgatgctttctattcggaataaaccttttgcttatgtctcagaagctgctagtacgagctggcttcaagagcatgttgcagatcttagtcgaagcttgtgtggaattattccgggacttagcagtatcttccttccccgaatgaatccatttgttttgattgatcttgctgg

SEQ ID NO: 183740 - DNA, 570 bp, Homo sapiens
  Payload ID: 16198
  Gene Symbol: SLC30A6
  Gene Name: solute carrier family 30 (zinc transporter), member 6
  ENST ID: ENST00000457724
  CDS Start-End: 20-388
agctgtgcagctccttatcatggggacaattcatctctttcgaaaaccacaaagatccttttttggcaagttgttacgggaatttagacttgtagcagctgaccgaaggtcctggaagatactgctctttggtgtaataaacttgatatgtactggcttcctgcttatgtggtgcagttctactaatagtatagctttaactgcctatacttacctgaccatttttgatctttttagtttaatgacatgtttaataagttactgggtaacattgaggaaacctagccctgtctattcatttgggcctgcttttctctgcatgtcctgttcagtctctcagaccacttttctccaccaatccgaaatgatgctcctatcaagaccttaattcacaccttctcaccttcatccgagagaggaaataataaattactactgttaaaataatatttatggtttgaaagattagaagtcctggctgtatttgcctccacagtcttggcacagttgggagctctctttatattaaaagaaagtgcagaacgctttttggaacagcccgagatacac

SEQ ID NO: 183741 - DNA, 4776 bp, Homo sapiens
  Payload ID: 16198
  Gene Symbol: SLC30A6
  Gene Name: solute carrier family 30 (zinc transporter), member 6
  Uniprot ID: Q6NXT4
  ENST ID: ENST00000435660
  CDS Start-End: 61-1377
gttctgggaaaactcgagcacccagaacggcttccggcgggagctgtgcagctccttatcatggggacaattcatctctttcgaaaaccacaaagatccttttttggcaagttgttacgggaatttagacttgtagcagctgaccgaaggtcctggaagatactgctctttggtgtaataaacttgatatgtactggcttcctgcttatgtggtgcagttctactaatagtatagctttaactgcctatacttacctgaccatttttgatctttttagtttaatgacatgtttaataagttactgggtaacattgaggaaacctagccctgtctattcatttgggtttgaaagattagaagtcctggctgtatttgcctccacagtcttggcacagttgggagctctctttatattaaaagaaagtgcagaacgctttttggaacagcccgagatacacacgggaagattattagttggtacttttgtggctctttgtttcaacctgttcacgatgctttctattcggaataaaccttttgcttatgtctcagaagctgctagtacgagctggcttcaagagcatgttgcagatcttagtcgaagcttgtgtggaattattccgggacttagcagtatcttccttccccgaatgaatccatttgttttgattgatcttgctggagcatttgctctttgtattacatatatgctcattgaaattaataattattttgccgtagacactgcctctgctatagctattgccttgatgacatttggcactatgtatcccatgagtgtgtacagtgggaaagtcttactccagacaacaccaccccatgttattggtcagttggacaaactcatcagagaggctggatcagtgcatgtaagaattcgacgagatgccaatgaacaaatggttcttgctcatgtgaccaacaggctgtacactctagtgtctactctaactgttcaaattttcaaggatgactggattaggcctgccttattgtctgggcctgttgcagccaatgtcctaaacttttcagatcatcacgtaatcccaatgcctcttttaaagggtactgatgatttgaacccagttacatcaactccagctaaacctagtagtccacctccagaattttcatttaacactcctgggaaaaatgtgaacccagttattcttctaaacacacaaacaaggccttatggttttggtctcaatcatggacacacaccttacagcagcatgcttaatcaaggacttggagttccaggaattggagcaactcaaggattgaggactggttttacaaatataccaagtagatatggaactaataatagaattggacaaccaagaccatgatagactctaacttatttttataaggaatattgactccttggcttccaatttatttagtaatccaactttgcattgactgtttaatcatttactctaaatgttagataatagtagtcttgttcacatttcatgaaacctatgaaactatatttttgtaaaatgtatttgtgacagtgaaatcctcgtaaatgttaaaggctttaaataggcttcctttagaaaatgtgtttctttaaatttggattttggtatctttggttttgtagttgactgcagtgtgatgtgaccttacctttataagagccacttgatggagtagatctgtcacattactaagatacgatatttctttttttttccgagacggagtcttgctctgccactgtgcccggccaatacattattattaacttaaggctgtactttattaaggcttccttagtttttgttttgttttgttttttgagatggagtctcactctgtcgcccaggctggaatgcagtggcatgatctcagctcactgcaacctctgcctcctgagttcaaatgattctcctgcctcagcctcccgagtagctgggattacaggcacctgccaccacgcccagctaatttttgtatttttagtaaagacgggggatttcaccatgttggccaggctggtcttgaactcctgacctcatgatccacccaccttagcctcccaaagtgctgggattaggtgtgagccaccgcacctggccgatattttctttaatgaaatttataaatatgcttcttgaataatacacattttgggaaagggaaaaatgtctgttcaaaaagtaaaagtctcttttatagcttttccaaacttaattgctaaatttttctttgaggttctcctgaattatgtcttacaaactaaaagcaaaaatttttagcagaaattttggaatacattctatctagcacaatttgaatttttaattatcaagatttttgttaaagtttctctcctttaaaaattttagtacatttgtaaatagtccatggttctcagtgttttattttgattaagtgactacccaacttttggtgatatgcagtgaaagaatcccaattttctatgttacatttaatcaaatactgacataatgaatttatctttcctgacacattttcattcattggctttttaatttcttattttattaacaaaatatatcagatatattaccaaaacacatggagttccatacataatatggaatttgatgtcttttcaagttgcacaaagaatttgagcatatataattttaccaaagcataatggaccttagattatagaatacagcattgttaggtctgcagtgggcagtttctttttgttttgctttgtcaaaaatgggaaattgttaactgtgatgaaatgtgagaattacatagattatgttattttttagttgttttccaaatgcagagtttaaggactttctaacatggctagtattacttccaaaaagtataacaagcagcagtcacacatgacctaggagggttttttattgttttattttattatgcattccataacagttttaaaatgggattttgagaatggacttaactttcctggaatccaatgctcctggagatttatgactttcccagccatcagccagctatctagagaagatttttgtttttcttttgcaacagtttcttcagtcaactcattcactttcaaataggagcagcactttgaaatcctttttcttcactgtggattaaaaacatccaagaagccatctctgtcaagcagaattgtcatctgtggtaataagtgaccatgtcctaaatacctttttcttagtgaggagttggtcattgtctttggcatctgcaacccctgttcaggcatgtgacctgctaaagaaatacagcctacactaccttgactactggggaaaatgatacttcgtaaaatgtaataaggcaacctgttccttggcctttatcttatgttttccaactattactgtatctgttattggtctactattacaggatgattcttcttcctccattgatctcaactaaatatgaattagggtcatgcatgaaatctgaactgccgtgtcctgagttatggttaagaggtatgtgctgccaccccatgcatgtcttccccatccccataggattttaaagtgttcaggtaccaaacacagttctgtgtgaggttttatgcctacttcctcaacaccaattcagaggcaacacctgtgcatctgtcccaccaaaggtgctttaatacctaccttcactatttgagaaaggacactcacagttgcctgtgggttatgaaagaattggccctacgtcctgcatgtaagatgttacaggggacattgggccaggcattattatatagagaagtcttatttgccaagctctgactaacttctggatatgaaaataaggaacttgcccagcataggcctataggcagcagccttactagtaaatcttgccacagaatcacttgaagctagacagagaaagaagttcaatttaaatatttgtcccattgtttgtgattaggatgtaagctttgtggaatgtaattaaccctgctttacgaagtcaccatattataataggaaaaacactgcctaggaggcaagagatctgaattccagttctgatgctgccactgtgtaaggaagtagttttataacccatgggcaaatcatctgagctttctcatctgtaaagttagggagaggaattaattagttgatctgtaaaataatcagcttcaaaacgttatggctaaatctgtagaatgtatgcccaattgctaaacggatgttgtgcccagaattttatctagtgactacctcaacatacaggccaagcgttacctacaccaacacccaagccattaatttgaggtgccatgagaataggtgaaccacagcctaacaccatttaggtttttgtgtttttttcaggcttgcctctacttaaatatatttagatgagagagttctcttagacttctttctttgtaaggaagggttatttggggaagtgttggaaaaaagattagggcagggtacccttagtttatatagggtacaaaagaatgggaaacatcttccctttcttctttaatctctgaagtcatgtttggaattacatataatgtagcaggtactggagaggacctgaatttcaagcttctgatttagctgtttgtaaacttccaagttttgcttgactaaagaatgctgatcttttttgggagtctgatctccttctaatatcagaaagtgctttttatattccagattgcttgaattaaactgtttggattaaagaacatatatggagtttcctctctggtttta

SEQ ID NO: 183742 - DNA, 2359 bp, Homo sapiens
  Payload ID: 16198
  Gene Symbol: SLC30A6
  Gene Name: solute carrier family 30 (zinc transporter), member 6
  ENST ID: ENST00000454324
  CDS Start-End: 38-217
agaacggcttccggcgggagctgtgcagctccttatcatggggacaattcatctctttcgaaaaccacaaagatccttttttggcaagttgttacgggaatttagacttgtagcagctgaccgaaggtcctggaagatactgctctttggtgtaataaacttgatatgtactggcttcctgcttatgtggtgcagttctactaatagtatagtttaatgacatgtttaataagttactgggtaacattgaggaaacctagccctgtctattcatttgggtttgaaagattagaagtcctggctgtatttgcctccacagtcttggcacagttgggagctctctttatattaaaagaaagtgcagaacgctttttggaacagcccgagatacacacgggaagattattagttggtacttttgtggctctttgtttcaacctgttcacgatgctttctattcggaataaaccttttgcttatgtctcagaagataatttaagtattttcttcttaaagctgctagtacgagctggcttcaagagcatgttgcagatcttagtcgaagcttgtgtggaattattccgggacttagcagtatcttccttccccgaatgaatccatttgttttgattgatcttgctggagcatttgctctttgtattacatatatgctcattgaaattaataattattttgccgtagacactgcctctgctatagctattgccttgatgacatttggcactatgtatcccatgagtgtgtacagtgggaaagtcttactccagacaacaccaccccatgttattggtcagttggacaaactcatcagagaggtatctaccttagatggagttttagaagtccgaaatgaacatttttggaccctaggttttggctcattggctggatcagtgcatgtaagaattcgacgagatgccaatgaacaaatggttcttgctcatgtgaccaacaggctgtacactctagtgtctactctaactgttcaaattttcaaggatgactggattaggcctgccttattgtctgggcctgttgcagccaatgtcctaaacttttcagatcatcacgtaatcccaatgcctcttttaaagggtactgatgatttgaacccagttacatcaactccagctaaacctagtagtccacctccagaattttcatttaacactcctgggaaaaatgtgaacccagttattcttctaaacacacaaacaaggccttatggttttggtctcaatcatggacacacaccttacagcagcatgcttaatcaaggacttggagttccaggaattggagcaactcaaggattgaggactggttttacaaatataccaagtagatatggaactaataatagaattggacaaccaagaccatgatagactctaacttatttttataaggaatattgactccttggcttccaatttatttagtaatccaactttgcattgactgtttaatcatttactctaaatgttagataatagtagtcttgttcacatttcatgaaacctatgaaactatatttttgtaaaatgtatttgtgacagtgaaatcctcgtaaatgttaaaggctttaaataggcttcctttagaaaatgtgtttctttaaatttggattttggtatctttggttttgtagttgactgcagtgtgatgtgaccttacctttataagagccacttgatggagtagatctgtcacattactaagatacgatatttctttttttttccgagacggagtcttgctctgccactgtgcccggccaatacattattattaacttaaggctgtactttattaaggcttccttagtttttgttttgttttgttttttgagatggagtctcactctgtcgcccaggctggaatgcagtggcatgatctcagctcactgcaacctctgcctcctgagttcaaatgattctcctgcctcagcctcccgagtagctgggattacaggcacctgccaccacgcccagctaatttttgtatttttagtaaagacgggggatttcaccatgttggccaggctggtcttgaactcctgacctcatgatccacccaccttagcctcccaaagtgctgggattaggtgtgagccaccgcacctggccgatattttctttaatgaaatttataaatatgcttcttgaataatacacattttgggaaagggaaaaatgtctgttcaaaaagtaaaagtctcttttatagcttttccaaacttaattgctaaatttttctttgaggttctcctgaattatgtcttacaaactaaaagcaaaaatttttagcagaaattttggaatacattctatctagc

SEQ ID NO: 183743 - DNA, 1281 bp, Homo sapiens
  Payload ID: 16199
  Gene Symbol: SLC30A7
  Gene Name: solute carrier family 30 (zinc transporter), member 7
  Uniprot ID: Q8NEW0
  ENST ID: ENST00000357650
  CDS Start-End: 10-1140
gcagagaagatgttgcccctgtccatcaaagacgatgaatacaaaccacccaagttcaatttgttcggcaagatctcgggctggtttaggtctatactgtccgacaagacttcccggaacctgtttttcttcctgtgcctgaacctctctttcgcttttgtggaactactctacggcatctggagcaactgcttaggcttgatttccgactcttttcacatgtttttcgatagcactgccattttggctggactggcagcttctgttatttcaaaatggagagataatgatgctttctcctatgggtatgttagagcggaagttctggctggctttgtcaatggcctatttttgatcttcactgctttttttattttctcagaaggagttgagagagcattagcccctccagatgtccaccatgagagactgcttcttgtttccattcttgggtttgtggtaaacctaataggaatatttgttttcaaacatggaggtcatggacattctcatggctctggccacggacacagtcattccctctttaatggtgctctagatcaggcacatggccatgtcgatcattgccatagccatgaagtgaaacatggtgctgcacatagccatgatcatgctcatggacatggacactttcattctcatgatggcccgtccttaaaagaaacaacaggacccagcagacagattttacaaggtgtatttttacatatcctagcagatacacttggaagtattggtgtaattgcttctgccatcatgatgcaaaattttggtctgatgatagcagatcctatctgttcaattcttatagccattcttatagttgtaagtgttattcctcttttaagagaatctgttggaatattaatgcagagaactcctcccctattagaaaatagtctgcctcagtgctatcagagggtacagcagttgcaaggagtttacagtttacaggaacagcacttctggactttatgttctgacgtttatgttgggaccttgaaattaatagtagcacctgatgctgatgctaggtggattttaagccaaacacataatatttttactcaggctggagtgagacagctctacgtacagattgactttgcagccatgtagtgaatggaaagaaattatgcaccttttatggaccaaatttttctggtactgtacgatccaaaacattgtacccagctttttaaaagagagaaattatcactacaactcccgagcactaagtagacggggtagagtcagccg

SEQ ID NO: 183744 - DNA, 623 bp, Homo sapiens
  Payload ID: 16199
  Gene Symbol: SLC30A7
  Gene Name: solute carrier family 30 (zinc transporter), member 7
  ENST ID: ENST00000370111
  CDS Start-End: 1-262
tgttattcctcttttaagagaatctgttggaatattaatgcagagaactcctcccctattagaaaatagtctgcctcagtgctatcagagggtacagcagttgcaaggagtttacagtttacaggaacagcacttctggactttatgttctgacgtttatgttgggaccttgaaattaatagtagcacctgatgctgatgctaggtggattttaagccaaacacataatatttttactcaggaaactggaagaggaaaatgagaatctgtaaaacttgaagctgtcctcatcgggccagatggataaagcaaaatgacttttttttcttttttttttctgttagactgagcttttgtggaaagctgtaagccctcaggggaaggatatcagcttgagtaattaactcatgattatgcaaagaaaatttacctagcctctttgtttttcctttctttgttattgccttgggctacttcattttttattaccatcttctctgtttagggctaggagtaaggaaaatgacagagacaataaaaagagcccaagttttgcccattttgctttcactaacaatgttgttgaaaaataaaagaaattaagacaatttatttgaacaata

SEQ ID NO: 183745 - DNA, 7898 bp, Homo sapiens
  Payload ID: 16199
  Gene Symbol: SLC30A7
  Gene Name: solute carrier family 30 (zinc transporter), member 7
  Uniprot ID: Q8NEW0
  ENST ID: ENST00000370112
  CDS Start-End: 188-1318
gcgcggcccgggccggaagtaagcgaattcccgggtgtgtgtctgtgtctgtctgtgtctcgcagcggcgcgcggccccggacaagcgctggggattcccgtttgaggcgtcactactgtcactgccatcaccccacggagccacttctagaggggagtagacccggcccttcgccgggcagagaagatgttgcccctgtccatcaaagacgatgaatacaaaccacccaagttcaatttgttcggcaagatctcgggctggtttaggtctatactgtccgacaagacttcccggaacctgtttttcttcctgtgcctgaacctctctttcgcttttgtggaactactctacggcatctggagcaactgcttaggcttgatttccgactcttttcacatgtttttcgatagcactgccattttggctggactggcagcttctgttatttcaaaatggagagataatgatgctttctcctatgggtatgttagagcggaagttctggctggctttgtcaatggcctatttttgatcttcactgctttttttattttctcagaaggagttgagagagcattagcccctccagatgtccaccatgagagactgcttcttgtttccattcttgggtttgtggtaaacctaataggaatatttgttttcaaacatggaggtcatggacattctcatggctctggccacggacacagtcattccctctttaatggtgctctagatcaggcacatggccatgtcgatcattgccatagccatgaagtgaaacatggtgctgcacatagccatgatcatgctcatggacatggacactttcattctcatgatggcccgtccttaaaagaaacaacaggacccagcagacagattttacaaggtgtatttttacatatcctagcagatacacttggaagtattggtgtaattgcttctgccatcatgatgcaaaattttggtctgatgatagcagatcctatctgttcaattcttatagccattcttatagttgtaagtgttattcctcttttaagagaatctgttggaatattaatgcagagaactcctcccctattagaaaatagtctgcctcagtgctatcagagggtacagcagttgcaaggagtttacagtttacaggaacagcacttctggactttatgttctgacgtttatgttgggaccttgaaattaatagtagcacctgatgctgatgctaggtggattttaagccaaacacataatatttttactcaggctggagtgagacagctctacgtacagattgactttgcagccatgtagtgaatggaaagaaattatgcaccttttatggaccaaatttttctgccagtaagaatttcagttgtgggcctccagtcttctggaatgtcttcactgcagctgctggaaatcactgctttcattcccacaaaaccagtattacttttttttaaaaaaagaaagaaattggaaatctgtgctatacgtaatgtcataattgttgacgttcttcagtataatcatgtttgttaaattgtttgtaccttgcaaacttatgaaccaaaccatattgggttttcaaagtgcctttgtatccaaaaatgtatttgccagcatagaaatgtaccatcaagagtcatgtatgttttatttttgtttttattttttattttttgagatggagtctcgctctgtagccaggctggagtgcagtggcataatctcagctcactgcaacctctgcttcccgggttcaagctattctcctgcctcagccttctgagtagctgcgactatgggcgtgtgccaccatgcccagctaatttttgcatttttagtagagatggggtttcaccatgttggccaggatggtcttgatctcttgacctcgtgatccgtccacctcagcctcccaaagtgctgggattacaggtgtgagccaccacgcccggctatgtttttttttttttttttttttttttttaacaatggatattctgtaaaatatcctgtacaaaacaagactattgccagtaatgtatacaaattgtctttttgtgtacttccagcataggtttggatatatgaacatttttcttttattgttttatcttcacagaaaataaaaggtgttaatttgctttttaaaacaaatttaattatcacattttaaattactttgtggactgtgttttcaaaactttgcaaattcatctgttacacagaaaattttgacttaaaacatctgctgaattccaaatttctgtaatagctactgtatctgtgataaactttcctatatctttccttgccatttctatggattttataatgaaagaaaaaggcattggagactgaaggcagaaatggttgtgacagtgctgtttggctttttcattcttcaaatgccaagtcatccactttgttttcctgtttaggctttgcacaaatacaattgctttcaggaatcctaaagcagcattttattgagtttgaattattaaaggtacagaggaaatgtggtgatgtagaacttttcctaacacaggtatctaggaagtaagtgctgagttgattttctaggttcttacgtatttgaaaaataaaattgcaattcgagataagtgcttgagcactctacttaagtattctctgtgttttatgaagagaaaatgatctgattttcccttatacttcattttacaatacatattcccttttaacttaaaaaaattgtaaatgtgggagaaaaaaccctgcaggatggaaacaattattaagaatgtagatcaataagtactttttagtgatgtggcagaaatccctgttgattctaagttttagagtgtcttttcccctatttctgacctacaactataaactactctctattaggagaactagaccactttcttcattcttttctaaactgctgcagattgccgtgaactctatcaatagtctcttttccgcaggcaaagtggcattttctaaacatgtttgcttactgccaggtggtttgaaatctatgatttactgcagtagtatgtgcttaaaacaactgttgaggtcttttaagcaggaaagttcaaaaggaagtgtcctgataatggtactggtttttctacaaatataagtagtcattagaagtttgcaaccaccaccaagtctgagagaactctgggatattctgtgggttttggcatattagatagagaaaatgacagatctagatgaagggagcttttggatgtgtgcctttaaaaactgattatgtataaatactgatatttcacatacggagatatttgaagacccaagtctgcctttcacagagccctccattccaagtttagtttttgtcaaaatatgaatcattttatttgactgtactatcagtacacaaatgcatgagtatgtttatacagtgttagactgatgtgaatttgcatttgttacattacattgccagcgcatatcatttagcaagttggcattaacatttatgctttaattaaatgccagtatacctatgtgtgcagcagtaaaaaattagtgagaaaaagcaactttttgtcactcttaggaaatattttgtcttattagtgttcttggcacatgtatattactaaagtagataattccaatgagaaatactaccagattattgttataaaattaatttacaatgtccctgatattgagctaactcttaaaaaaaccaaacaaaactcgtatctgagtgtaactttgccaatattttaaaagccaaaatattctctggacaacaaatttgtattgctcagggacagtttaccttgcctggtaaaccttcccaaacagaaatatagctatactatctttggttttgtttttttgttttttttgtttgtttgtattagatggaatttcactcttgtcgcccaggctggagtgtagtggcgcagtctcagctcactgcaacctccacctcccgggttcaagtgattctcctgtctcagctccctgagtaactggaattacaggtgcacgccaccacgcccggctaatttttgtgtttttagcagagacagggtttcaccacgttggccagggtggtcttggactcctgacctcaggtcatcctcctgcctcggcctcccaaagtgctgagactacaggtgtgagccaccgtgctcagccactagctttggttttttaaacatagattatattcctcaagatgaagggcttaacatatccacagcttcctcagtttgctaactccccatgcatctttgtgaaggacagtatctagtttatctgtaggtcagtgttccttgtgctgtcatttcccttatatctggaatttgtcagcattcctgaaaacctacacgtgtatatcagtaaccaaaatgctatgccttttttgcacctttgtacagcagccaaatcatgaactcaaaatgtatttgatcacagttctataatgtttttacctacctattatggaataatcagtttttacagagattattaatatggtagaaccctgttatgtaattccaaaacttaagaaccatatttacattgcttaacacagaattttacatctaagcaaggactggctttagaagcagtgtagttctacctctcattttacagatgagaaaaccgaagcccagaaaaactctcatttgctcaaagtcacagagaaaattagtggcaaagccaaaaagattcagatcttctgactcgaagttgagagttctttatactctattatgctgcctctccagtgtaatatttgcctttctgtaaatgggattaaatatgatttgtaaataaaggacatctgacctccttttttggtacattaaggcactttataaatggacttttattgtctcatttttcgtatataattatttccatcatattctttatggaagatgcaattaattttaacttttttactcttataaaaccagttcctgacattttaaaaaacaatatctgtaaaatggatccttttatgagtgaatttttctgctaattgcccaaggctaaatccaatttaaggattgcttagtttctttattttgtttatggtctctgaactggtatttttttataaaccaggctaattcacaggtcataccatttcattcttgtcgtgttggcttccagtcactggaaaagcttttgcattttaaagatttttagagccatgcaaaactgggcattaaatgttgcataaagcaaatcttttaagtaaggtaaaatgttgaagtcttaaccagaattcctacaactaattactaaaactgctatttctaactcttcatgaaagcattacctttggaaagttaaactttttttttcctttcatcaccgtctttgaaacaaattattttccaattcataagaactttggtaaaaaaaaaaataaaaggaaattatatgtttttctttggacattcattggaaggcttgttgaagacatgatcccccagaagccttagtgacccagatctcaaccagagactcaagatagcctcaaatacagtgaaagattatgtatccaaaaaaaaaaaaaaaaaaaaaagaaaaggagcagggaaggacagttctagttaaagccaaatggatgtgagtctgacaagggtgtctttgatttatatttcctaactgcaaattacacagaaagtgagaatggggaataacttttattaagtatttatgtgccaggcggttagtgtggccttcatgttattacatttaatcctcaaatttctacaaaggaataattttgcatgattttatgattgacggagcattttcaaatctcctctaattctcataacatctctgtgaggaaggaatttttatccttattttacagatgaggaagctgtttggagataatttaagtgacttgcctggggaatctagccagtagtagagtactgattaatcaggtgctgacatctgctctgctttgtgtatgtaattcagcagtgcttcaaagatccaagaagctgtagcagatctcaatacactctcctataaaattagtgaataatcaccatgacaaaattggtatggcggaacagtcattatacattatttagactcattccttcttccagtgcccttatgattatttcctacctttaccattgatcttaaactgtgcaggctaaaaagaggaaccagaactcccttaagcacttttaagactatttaaaaaataaagttttgttggcattgaagagtaagctgcttaagggactgaatgaaaagatagtaccctttgtggctgtatgaagagagaaactgaatttctatccaagagaccttaatttagtttattagggaattatcttccccaaaagtacaagtaattttgcactgcaggagaaggataagtagatttgatttacatcacattttatacacacctttcaaaaggaagaaatctgtttcataaatagtagtaatctatgcttaaacttaacatttaatgttgacttcttacaacagccttgaaaattatttgtaattttgatcatgatgttggaaagcttgtaataaagaatatctttctcttctgcatccttttatcctcaaacttagcatggattcacatgctgagtaaatgtttggttaactagtgaacattttagatagttgtgtcaaaaataagggttagggataggtaaaaccagtaatttactgttttttacagaagacatctcagcatttctttggcatttttgcacaaataaatgactatatattcaccttggccatttttttttttaagtagccctatgagctgctcattctttttcatatacagtggaagtatacagatgttatccattttacaaattgttggatcggaatttgacagaattgggactgtggaacctgggtcacttgaattttctatattttgtatggccaaatcaggaaccagacagtctccatagtctcctttgtttttatggaaaattgccatattcacatatttcatttatcctaatgtattgtcatccaaaatgaaagaggtctttcttgaaggtgctttaaagacatcactacatgtattcaattactgatttaaatattcccagaattattttttacctttctctttttcctctcaaacacaaaattttagtagtacctccctctatttcttcactgatttttcatctgttttcattgttatttccactatagaacttctactttatactagcggggaaaatttttttatttagaattttaatatttgaattttgtttatgtatcacatactgtgctacagttagcctcaatgaagattctattttgaactagacatcctgtcaatagtttgtcaagtaacttcattgcttcctttgatagcaattcagtgaaattttttcccaagtgatattttcccccaacttttgtgagtttgataaataggatgagtcttttatattggaaatactgtgaatggaaaattgccaaatcccttcttagtatattttaagcaccctacaacactttacctccctgcctttagtggtatttaaacatatggccaagttagtatttgggtttgattcctttggtgaagattaaggcatcaaaacatttcttaaaatgtttgagtacaaggctaagttataatgtcaactttcaaagactatgttgtgattcggtttgaatatgctgaagtgagcaattatgatttgcccaagtgcaatacaacaaatctataatgtatatttcacattttctacttgaacacattcatgtatatattttgttaaacttcatatgtatttaaaaagaatcatgaactgtatcaaaattctttcaataaaatttctatttaaaaatc

SEQ ID NO: 183746 - DNA, 5430 bp, Homo sapiens
  Payload ID: 16200
  Gene Symbol: SLC30A8
  Gene Name: solute carrier family 30 (zinc transporter), member 8
  Uniprot ID: Q8IWU4
  ENST ID: ENST00000427715
  CDS Start-End: 435-1397
ttttaagaagcatcaagaaagcctgcctgtctaactttggaaatatcaccctcatgctgtcttcccaggatgtctctctccctaagtaagagatgttacttcctggagggaatgcagtgttgggaatctgaagacccagctttgagctgaatttgctttgtgatacctggagagaagacgtgttttcttgacaacagcacagtacctagtgagttcaacaacaacgacaacaacagccgcagctcatcctggccgtcatggagtttcttgaaagaacgtatcttgtgaatgataaagctgccaagatgtatgctttcacactagaaagaaggagctgcaaatgaacacttcatagcaatgtggaactccaacagaaaccggtgaataaagatcagtgtcccagagagagaccagaggagctggagtcaggaggcatgtaccactgccacagtggctccaagcccacagaaaagggggcgaatgagtacgcctatgccaagtggaaactctgttctgcttcagcaatatgcttcattttcatgattgcagaggtcgtgggtgggcacattgctgggagtcttgctgttgtcacagatgctgcccacctcttaattgacctgaccagtttcctgctcagtctcttctccctgtggttgtcatcgaagcctccctctaagcggctgacatttggatggcaccgagcagagatccttggtgccctgctctccatcctgtgcatctgggtggtgactggcgtgctagtgtacctggcatgtgagcgcctgctgtatcctgattaccagatccaggcgactgtgatgatcatcgtttccagctgcgcagtggcggccaacattgtactaactgtggttttgcaccagagatgccttggccacaatcacaaggaagtacaagccaatgccagcgtcagagctgcttttgtgcatgcccttggagatctatttcagagtatcagtgtgctaattagtgcacttattatctactttaagccagagtataaaatagccgacccaatctgcacattcatcttttccatcctggtcttggccagcaccatcactatcttaaaggacttctccatcttactcatggaaggtgtgccaaagagcctgaattacagtggtgtgaaagagcttattttagcagtcgacggggtgctgtctgtgcacagcctgcacatctggtctctaacaatgaatcaagtaattctctcagctcatgttgctacagcagccagccgggacagccaagtggttcggagagaaattgctaaagcccttagcaaaagctttacgatgcactcactcaccattcagatggaatctccagttgaccaggaccccgactgccttttctgtgaagacccctgtgactagctcagtcacaccgtcagtttcccaaatttgacaggccaccttcaaacatgctgctatgcagtttctgcatcatagaaaataaggaaccaaaggaagaaattcatgtcatggtgcaatgcacattttatctatttatttagttccattcaccatgaaggaagaggcactgagatccatcaatcaattggattatatactgatcagtagctgtgttcaattgcaggaatgtgtatatagattattcctgagtggagccgaagtaacagctgtttgtaactatcggcaataccaaattcatctcccttccaataatgcatcttgagaacacataggtaaatttgaactcaggaaagtcttactagaaatcagtggaagggacaaatagtcacaaaattttaccaaaacattagaaacaaaaaataaggagagccaagtcaggaataaaagtgactctgtatgctaacgccacattagaacttggttctctcaccaagctgtaatgtgatttttttttctactctgaattggaaatatgtatgaatatacagagaagtgcttacaactaatttttatttacttgtcacattttggcaataaatccctcttatttctaaattctaacttgtttatttcaaaactttatataatcactgttcaaaaggaaatattttcacctaccagagtgcttaaacactggcaccagccaaagaatgtggttgtagagacccagaagtcttcaagaacagccgacaaaaacattcgagttgaccccaccaagttgttgccacagataatttagatatttacctgcaagaaggaataaagcagatgcaaccaattcattcagtccacgagcatgatgtgagcactgctttgtgctagacattgggcttagcattgaaactataaagaggaatcagacgcagcaagtgcttctgtgttctggtagcaactcaacactatctgtggagagtaaactgaagatgtgcaggccaacattctggaaatcctatgtcaatgggtttggtttggaacctggacttctgcatttttaaaagttacccagagatgcttctaaagatgagccatagtctagaagattgtcaaccacaggagttcattgagtgggacagctagacacatacattggcagctacaatagtatcatgaattgcaatgatgtagtggggtataaaaggaaagcgatggatattgccggatgggcatggccagtgatgtttcacgtcattgaggtgacagctctgctggactttgaattacatatggaggctctccaggaagacgaagaagagaaggacattctaggcaaaaagaagactaggcacaaggcacacttatgtttgtctgttagcttttagttgaaaaagcaaaatacatgatgcaaagaaacctctccacgctgtgatttttaaaactacatactttttgcaactttatggttatgagtattgtagagaacaggagataggtcttagatgatttttatgttgttgtcagactctagcaaggtactagaaacctagcaggcattaataattgttgaggcaatgactctgaggctatatctgggccttgtcattatttatcatttatatttgtatttttttctgaaatttgagggccaagaaaacattgactttgactgaggaggtcacatctgtgccatctctgcaaatcaatcagcaccactgaaataactacttagcattctgctgagctttccctgctcagtagagacaaatatactcatcccccacctcagtgagcttgtttaggcaaccaggattagagctgctcaggttcccaacgtctcctgccacatcgggttctcaaaatggaaagaatggtttatgccaaatcacttttcctgtctgaaggaccactgaatggttttgtttttccatattttgcataggacgccctaaagactaggtgacttggcaaacacacaagtgttagtataattctttgcttctgcttctttttgaaaatcatgtttagatttgattttaagtcagaaattcactgaatgtcaggtaatcattatggagggagatttgtgtgtcaaccaaagtaattgtcccatggccccagggtatttctgttgtttccctgaaattctgcttttttagtcagctagattgaaaactctgaacagtagatgtttatatggcaaaatgcaagacaatctacaagggagattttaaggattttgagatgaaaaaacagatgctactcaggggctttatgaaccatccatcaattctgaagttctgactctcccattaccctttccctggtgtggtcagaactccaggtcactggaagttagtggaatcatgtagttgaattctttacttcaagacattgtattctctccagctatcaaaacattaatgatcttttatgtcttttttttgttattgttatactttaagttctggggtacatgtgcggaacatgtaggtttgttacataggtatacatgtgccatggtggtttgctgcactcatcaacctgtcatctacattcttttatgtctgtctttcaaagcaacactctgttcttctgagtagtgaaatcaggtcaactttaccaccagcctccatttttaatatgcttcaccatcatccagcacctacttaagatttatctagggctctgtggtgatgttaggacccataaaagaaatttatgccttccatatgtttggttacagatgggaaatgggaatgttgaaggacatgaaagaaaggatgtttacacattaagcatcagttctgaagctagattgtctgagtttgaatcttagctcttccctttattagctctgtgacctcgagctagttacttaaatgctctgatcctctatttcctgatcagtgaaacctccctattcaaatgtgtgagagtttaataaattaggacacttaaaaatgttggagcagtgcatagcatgtagtgttcagtacatgttaaatgttgttttttattatgtacaaacatgagtgggcacagaattttaaatcatctcaacttttgagaaattttgagttatcaacaccgttcccacaagacagtggcaaaattattggtgagaattaaacagctgtttctcagaggaagcaatggaggcttgctgggataaaggcatttactgagaggctgttacctagtgagagtgatgaattaattaaaatagtcgaatccctttctgactgtctctgaaagcttccgcttttatctttgaagagcagaattgtcactccaaggacatttattaataaaaagaacaactgtccagtgcaatgaaggcaaagtcataggtctcccaagtcttaccccattcctgtgaaatatcaagttcttggcttttctctgtcatgtagcctcaactttctctgaccgggtgcatttctttctctggtttctaaattgccagtggcaaatttggatcacttacttaatatctgttaaattttgtgacccaacaaagtcttttagcactgtggtgtcaaaaagaaaaacacctcccaggcatatacattttatagattcctggagaatgttgctctccagctccatccccacccaatgaaatatgatccagagagtcttgcaaagagacaagcctcattttccacaattagctctaaagtgcctccaggaaatgattttctcagctcatctctctgtattccctgttttggatcacagggcaatctgtttaaatgactaattacagaaatcattaaaggcaccaagcaaatgtcatctctgaatacacacatcccaagctttacaaatcctgcctggcttgacagtgatgaggccacttaacagtccagcgcaggcggatgttaaaaaaaataaaaaggtgaccatctgcggtttagttttttaactttctgatttcacacttaacgtctgtcattctgttactgggcacctgtttaaattctattttaaaatgttaatgtgtgttgtttaaaataaaatcaagaaagagaga

SEQ ID NO: 183747 - DNA, 2520 bp, Homo sapiens
  Payload ID: 16200
  Gene Symbol: SLC30A8
  Gene Name: solute carrier family 30 (zinc transporter), member 8
  Uniprot ID: Q8IWU4
  ENST ID: ENST00000456015
  CDS Start-End: 1-1110
atggagtttcttgaaagaacgtatcttgtgaatgataaagctgccaagatgtatgctttcacactagaaagtgtggaactccaacagaaaccggtgaataaagatcagtgtcccagagagagaccagaggagctggagtcaggaggcatgtaccactgccacagtggctccaagcccacagaaaagggggcgaatgagtacgcctatgccaagtggaaactctgttctgcttcagcaatatgcttcattttcatgattgcagaggtcgtgggtgggcacattgctgggagtcttgctgttgtcacagatgctgcccacctcttaattgacctgaccagtttcctgctcagtctcttctccctgtggttgtcatcgaagcctccctctaagcggctgacatttggatggcaccgagcagagatccttggtgccctgctctccatcctgtgcatctgggtggtgactggcgtgctagtgtacctggcatgtgagcgcctgctgtatcctgattaccagatccaggcgactgtgatgatcatcgtttccagctgcgcagtggcggccaacattgtactaactgtggttttgcaccagagatgccttggccacaatcacaaggaagtacaagccaatgccagcgtcagagctgcttttgtgcatgcccttggagatctatttcagagtatcagtgtgctaattagtgcacttattatctactttaagccagagtataaaatagccgacccaatctgcacattcatcttttccatcctggtcttggccagcaccatcactatcttaaaggacttctccatcttactcatggaaggtgtgccaaagagcctgaattacagtggtgtgaaagagcttattttagcagtcgacggggtgctgtctgtgcacagcctgcacatctggtctctaacaatgaatcaagtaattctctcagctcatgttgctacagcagccagccgggacagccaagtggttcggagagaaattgctaaagcccttagcaaaagctttacgatgcactcactcaccattcagatggaatctccagttgaccaggaccccgactgccttttctgtgaagacccctgtgactagctcagtcacaccgtcagtttcccaaatttgacaggccaccttcaaacatgctgctatgcagtttctgcatcatagaaaataaggaaccaaaggaagaaattcatgtcatggtgcaatgcacattttatctatttatttagttccattcaccatgaaggaagaggcactgagatccatcaatcaattggattatatactgatcagtagctgtgttcaattgcaggaatgtgtatatagattattcctgagtggagccgaagtaacagctgtttgtaactatcggcaataccaaattcatctcccttccaataatgcatcttgagaacacataggtaaatttgaactcaggaaagtcttactagaaatcagtggaagggacaaatagtcacaaaattttaccaaaacattagaaacaaaaaataaggagagccaagtcaggaataaaagtgactctgtatgctaacgccacattagaacttggttctctcaccaagctgtaatgtgatttttttttctactctgaattggaaatatgtatgaatatacagagaagtgcttacaactaatttttatttacttgtcacattttggcaataaatccctcttatttctaaattctaacttgtttatttcaaaactttatataatcactgttcaaaaggaaatattttcacctaccagagtgcttaaacactggcaccagccaaagaatgtggttgtagagacccagaagtcttcaagaacagccgacaaaaacattcgagttgaccccaccaagttgttgccacagataatttagatatttacctgcaagaaggaataaagcagatgcaaccaattcattcagtccacgagcatgatgtgagcactgctttgtgctagacattgggcttagcattgaaactataaagaggaatcagacgcagcaagtgcttctgtgttctggtagcaactcaacactatctgtggagagtaaactgaagatgtgcaggccaacattctggaaatcctatgtcaatgggtttggtttggaacctggacttctgcatttttaaaagttacccagagatgcttctaaagatgagccatagtctagaagattgtcaaccacaggagttcattgagtgggacagctagacacatacattggcagctacaatagtatcatgaattgcaatgatgtagtggggtataaaaggaaagcgatggatattgccggatgggcatggccagtgatgtttcacgtcattgaggtgacagctctgctggactttgaattacatatggaggctctccaggaagacgaagaagagaaggacattctaggcaaaaagaagactaggcacaaggcacacttatgtttgtctgttagcttttagttgaaaaagcaaaatacatgatgcaaagaaa

SEQ ID NO: 183748 - DNA, 549 bp, Homo sapiens
  Payload ID: 16200
  Gene Symbol: SLC30A8
  Gene Name: solute carrier family 30 (zinc transporter), member 8
  ENST ID: ENST00000524274
  CDS Start-End: 287-549
ttttgttttttggcaactggaagcagtggggatgaaatattttcctaaggcgtctcaggactgaactggcagcaaaatagatgtctctctccctaagtaagagatgttacttcctggagggaatgcagtgttgggaatctgaagacccagctttgagctgaatttgctttgtgatacctgaaggagctgcaaatgaacacttcatagcaatgtggaactccaacagaaaccggtgaataaagatcagtgtcccagagagagaccagaggagctggagtcaggaggcatgtaccactgccacagtggctccaagcccacagaaaagggggcgaatgagtacgcctatgccaagtggaaactctgttctgcttcagcaatatgcttcattttcatgattgcagaggtcgtgggtgggcacattgctgggagtcttgctgttgtcacagatgctgcccacctcttaattgacctgaccagtttcctgctcagtctcttctccctgtggttgtcatcgaagcctccctctaagcggctgacatttggatggca

SEQ ID NO: 183749 - DNA, 1393 bp, Homo sapiens
  Payload ID: 16200
  Gene Symbol: SLC30A8
  Gene Name: solute carrier family 30 (zinc transporter), member 8
  Uniprot ID: Q8IWU4
  ENST ID: ENST00000521243
  CDS Start-End: 321-1283
gggctgccagcatgctgtcacctctcaataggagatcagttaatgcatactgaaggaaggcttgttggagaagaatcctctcctgaaccctgtggagactctagaatcctgcggatgtctctctccctaagtaagagatgttacttcctggagggaatgcagtgttgggaatctgaagacccagctttgagctgaatttgctttgtgatacctgaaggagctgcaaatgaacacttcatagcaatgtggaactccaacagaaaccggtgaataaagatcagtgtcccagagagagaccagaggagctggagtcaggaggcatgtaccactgccacagtggctccaagcccacagaaaagggggcgaatgagtacgcctatgccaagtggaaactctgttctgcttcagcaatatgcttcattttcatgattgcagaggtcgtgggtgggcacattgctgggagtcttgctgttgtcacagatgctgcccacctcttaattgacctgaccagtttcctgctcagtctcttctccctgtggttgtcatcgaagcctccctctaagcggctgacatttggatggcaccgagcagagatccttggtgccctgctctccatcctgtgcatctgggtggtgactggcgtgctagtgtacctggcatgtgagcgcctgctgtatcctgattaccagatccaggcgactgtgatgatcatcgtttccagctgcgcagtggcggccaacattgtactaactgtggttttgcaccagagatgccttggccacaatcacaaggaagtacaagccaatgccagcgtcagagctgcttttgtgcatgcccttggagatctatttcagagtatcagtgtgctaattagtgcacttattatctactttaagccagagtataaaatagccgacccaatctgcacattcatcttttccatcctggtcttggccagcaccatcactatcttaaaggacttctccatcttactcatggaaggtgtgccaaagagcctgaattacagtggtgtgaaagagcttattttagcagtcgacggggtgctgtctgtgcacagcctgcacatctggtctctaacaatgaatcaagtaattctctcagctcatgttgctacagcagccagccgggacagccaagtggttcggagagaaattgctaaagcccttagcaaaagctttacgatgcactcactcaccattcagatggaatctccagttgaccaggaccccgactgccttttctgtgaagacccctgtgactagctcagtcacaccgtcagtttcccaaatttgacaggccaccttcaaacatgctgctatgcagtttctgcatcatagaaaataaggaaccaaaggaagaaattcatgtcatg

SEQ ID NO: 183750 - DNA, 5242 bp, Homo sapiens
  Payload ID: 16200
  Gene Symbol: SLC30A8
  Gene Name: solute carrier family 30 (zinc transporter), member 8
  Uniprot ID: Q8IWU4
  ENST ID: ENST00000519688
  CDS Start-End: 247-1209
tttgcttccaaaactgggcagtgagttcaacaacaacgacaacaacagccgcagctcatcctggccgtcatggagtttcttgaaagaacgtatcttgtgaatgataaagctgccaagatgtatgctttcacactagaaagaaggagctgcaaatgaacacttcatagcaatgtggaactccaacagaaaccggtgaataaagatcagtgtcccagagagagaccagaggagctggagtcaggaggcatgtaccactgccacagtggctccaagcccacagaaaagggggcgaatgagtacgcctatgccaagtggaaactctgttctgcttcagcaatatgcttcattttcatgattgcagaggtcgtgggtgggcacattgctgggagtcttgctgttgtcacagatgctgcccacctcttaattgacctgaccagtttcctgctcagtctcttctccctgtggttgtcatcgaagcctccctctaagcggctgacatttggatggcaccgagcagagatccttggtgccctgctctccatcctgtgcatctgggtggtgactggcgtgctagtgtacctggcatgtgagcgcctgctgtatcctgattaccagatccaggcgactgtgatgatcatcgtttccagctgcgcagtggcggccaacattgtactaactgtggttttgcaccagagatgccttggccacaatcacaaggaagtacaagccaatgccagcgtcagagctgcttttgtgcatgcccttggagatctatttcagagtatcagtgtgctaattagtgcacttattatctactttaagccagagtataaaatagccgacccaatctgcacattcatcttttccatcctggtcttggccagcaccatcactatcttaaaggacttctccatcttactcatggaaggtgtgccaaagagcctgaattacagtggtgtgaaagagcttattttagcagtcgacggggtgctgtctgtgcacagcctgcacatctggtctctaacaatgaatcaagtaattctctcagctcatgttgctacagcagccagccgggacagccaagtggttcggagagaaattgctaaagcccttagcaaaagctttacgatgcactcactcaccattcagatggaatctccagttgaccaggaccccgactgccttttctgtgaagacccctgtgactagctcagtcacaccgtcagtttcccaaatttgacaggccaccttcaaacatgctgctatgcagtttctgcatcatagaaaataaggaaccaaaggaagaaattcatgtcatggtgcaatgcacattttatctatttatttagttccattcaccatgaaggaagaggcactgagatccatcaatcaattggattatatactgatcagtagctgtgttcaattgcaggaatgtgtatatagattattcctgagtggagccgaagtaacagctgtttgtaactatcggcaataccaaattcatctcccttccaataatgcatcttgagaacacataggtaaatttgaactcaggaaagtcttactagaaatcagtggaagggacaaatagtcacaaaattttaccaaaacattagaaacaaaaaataaggagagccaagtcaggaataaaagtgactctgtatgctaacgccacattagaacttggttctctcaccaagctgtaatgtgatttttttttctactctgaattggaaatatgtatgaatatacagagaagtgcttacaactaatttttatttacttgtcacattttggcaataaatccctcttatttctaaattctaacttgtttatttcaaaactttatataatcactgttcaaaaggaaatattttcacctaccagagtgcttaaacactggcaccagccaaagaatgtggttgtagagacccagaagtcttcaagaacagccgacaaaaacattcgagttgaccccaccaagttgttgccacagataatttagatatttacctgcaagaaggaataaagcagatgcaaccaattcattcagtccacgagcatgatgtgagcactgctttgtgctagacattgggcttagcattgaaactataaagaggaatcagacgcagcaagtgcttctgtgttctggtagcaactcaacactatctgtggagagtaaactgaagatgtgcaggccaacattctggaaatcctatgtcaatgggtttggtttggaacctggacttctgcatttttaaaagttacccagagatgcttctaaagatgagccatagtctagaagattgtcaaccacaggagttcattgagtgggacagctagacacatacattggcagctacaatagtatcatgaattgcaatgatgtagtggggtataaaaggaaagcgatggatattgccggatgggcatggccagtgatgtttcacgtcattgaggtgacagctctgctggactttgaattacatatggaggctctccaggaagacgaagaagagaaggacattctaggcaaaaagaagactaggcacaaggcacacttatgtttgtctgttagcttttagttgaaaaagcaaaatacatgatgcaaagaaacctctccacgctgtgatttttaaaactacatactttttgcaactttatggttatgagtattgtagagaacaggagataggtcttagatgatttttatgttgttgtcagactctagcaaggtactagaaacctagcaggcattaataattgttgaggcaatgactctgaggctatatctgggccttgtcattatttatcatttatatttgtatttttttctgaaatttgagggccaagaaaacattgactttgactgaggaggtcacatctgtgccatctctgcaaatcaatcagcaccactgaaataactacttagcattctgctgagctttccctgctcagtagagacaaatatactcatcccccacctcagtgagcttgtttaggcaaccaggattagagctgctcaggttcccaacgtctcctgccacatcgggttctcaaaatggaaagaatggtttatgccaaatcacttttcctgtctgaaggaccactgaatggttttgtttttccatattttgcataggacgccctaaagactaggtgacttggcaaacacacaagtgttagtataattctttgcttctgcttctttttgaaaatcatgtttagatttgattttaagtcagaaattcactgaatgtcaggtaatcattatggagggagatttgtgtgtcaaccaaagtaattgtcccatggccccagggtatttctgttgtttccctgaaattctgcttttttagtcagctagattgaaaactctgaacagtagatgtttatatggcaaaatgcaagacaatctacaagggagattttaaggattttgagatgaaaaaacagatgctactcaggggctttatgaaccatccatcaattctgaagttctgactctcccattaccctttccctggtgtggtcagaactccaggtcactggaagttagtggaatcatgtagttgaattctttacttcaagacattgtattctctccagctatcaaaacattaatgatcttttatgtcttttttttgttattgttatactttaagttctggggtacatgtgcggaacatgtaggtttgttacataggtatacatgtgccatggtggtttgctgcactcatcaacctgtcatctacattcttttatgtctgtctttcaaagcaacactctgttcttctgagtagtgaaatcaggtcaactttaccaccagcctccatttttaatatgcttcaccatcatccagcacctacttaagatttatctagggctctgtggtgatgttaggacccataaaagaaatttatgccttccatatgtttggttacagatgggaaatgggaatgttgaaggacatgaaagaaaggatgtttacacattaagcatcagttctgaagctagattgtctgagtttgaatcttagctcttccctttattagctctgtgacctcgagctagttacttaaatgctctgatcctctatttcctgatcagtgaaacctccctattcaaatgtgtgagagtttaataaattaggacacttaaaaatgttggagcagtgcatagcatgtagtgttcagtacatgttaaatgttgttttttattatgtacaaacatgagtgggcacagaattttaaatcatctcaacttttgagaaattttgagttatcaacaccgttcccacaagacagtggcaaaattattggtgagaattaaacagctgtttctcagaggaagcaatggaggcttgctgggataaaggcatttactgagaggctgttacctagtgagagtgatgaattaattaaaatagtcgaatccctttctgactgtctctgaaagcttccgcttttatctttgaagagcagaattgtcactccaaggacatttattaataaaaagaacaactgtccagtgcaatgaaggcaaagtcataggtctcccaagtcttaccccattcctgtgaaatatcaagttcttggcttttctctgtcatgtagcctcaactttctctgaccgggtgcatttctttctctggtttctaaattgccagtggcaaatttggatcacttacttaatatctgttaaattttgtgacccaacaaagtcttttagcactgtggtgtcaaaaagaaaaacacctcccaggcatatacattttatagattcctggagaatgttgctctccagctccatccccacccaatgaaatatgatccagagagtcttgcaaagagacaagcctcattttccacaattagctctaaagtgcctccaggaaatgattttctcagctcatctctctgtattccctgttttggatcacagggcaatctgtttaaatgactaattacagaaatcattaaaggcaccaagcaaatgtcatctctgaatacacacatcccaagctttacaaatcctgcctggcttgacagtgatgaggccacttaacagtccagcgcaggcggatgttaaaaaaaataaaaaggtgaccatctgcggtttagttttttaactttctgatttcacacttaacgtctgtcattctgttactgggcacctgtttaaattctattttaaaatgttaatgtgtgttgtttaaaataaaatcaagaaagagaga

SEQ ID NO: 183751 - DNA, 587 bp, Homo sapiens
  Payload ID: 16200
  Gene Symbol: SLC30A8
  Gene Name: solute carrier family 30 (zinc transporter), member 8
  ENST ID: ENST00000518396
  CDS Start-End: 479-587
acaattgaatcagatatcatatgaaagacatacacacttcatgtaatgctacctgcaagtctccctagaaaagcagtttttgtaggtgaaaacaatgaagccaggtaatattgcaaggaggctgtaattttagcagacctaccaacaacactgatgtaggaagctcattattttaatttctggagccttttaattttttctttagaaagtgtataaataattgcagtgctgctttgcttccaaaactgggcagtgagttcaacaacaacgacaacaacagccgcagctcatcctggccgtcatggagtttcttgaaagaacgtatcttgtgaatgataaagctgccaagatgtatgctttcacactagaaagaaggagctgcaaatgaacacttcatagcaatgtggaactccaacagaaaccggtgaataaagatcagtgtcccagagagagaccagaggagctggagtcaggaggcatgtaccactgccacagtggctccaagcccacagaaaagggggcgaatgagtacgcctatgccaagtggaaactctgttctgcttcagcaatatgcttcattttcatga

SEQ ID NO: 183752 - DNA, 823 bp, Homo sapiens
  Payload ID: 16200
  Gene Symbol: SLC30A8
  Gene Name: solute carrier family 30 (zinc transporter), member 8
  ENST ID: ENST00000518521
  CDS Start-End: 668-823
tctgacagctgcttagaggtcatcttagaactaaattccaaagaaataattttaggctgataaagagtccagaaaaaggaggagggagagaaaaagaaagaattagtttagtgtagcgaatggtagctatttgcagctcacccacgtgtgctccgaaggtcaaaaccctacatcagcaatttgtagcaagctcttgagctcctctacctcttagaaagcacaattgaatcagatatcatatgaaagacatacacacttcatgtaatgctacctgcaagtctccctagaaaagcagtttttgtaggtgaaaacaatgaagccaggtaatattgcaaggaggctgtaattttagcagacctaccaacaacactgatgtaggaagctcattattttaatttctggagccttttaattttttctttagaaagtgtataaataattgcagtgctgctttgcttccaaaactgggcagtgagttcaacaacaacgacaacaacagccgcagctcatcctggccgtcatggagtttcttgaaagaacgtatcttgtgaatgataaagctgccaagatgtatgctttcacactagaaagtgtggaactccaacagaaaccggtgaataaagatcagtgtcccagagagagaccagaggagctggagtcaggaggcatgtaccactgccacagtggctccaagcccacagaaaagggggcgaatgagtacgcctatgccaagtggaaactctgttctgcttcagcaatatgcttcattttcatgattgcagaggtcgtgggtgggcacattgctgggagtcttgctgttgtc

SEQ ID NO: 183753 - DNA, 6218 bp, Homo sapiens
  Payload ID: 16201
  Gene Symbol: SLC30A9
  Gene Name: solute carrier family 30 (zinc transporter), member 9
  Uniprot ID: Q6PML9
  ENST ID: ENST00000264451
  CDS Start-End: 181-1887
acttccgctacctccacggcaggcgtcgctaaatgacgttgccgtttccgggtcacccaggcagcttgtggcggcgaagccatcggtgttcgctgatgtccagtctatggagtcagttggtaccggtggcggcgcggaggcagaaggcggtgtccgagtaggggcctctgccccaccaggatgttacccggcttggccgccgccgcggcccacagatgtagctggtcctccctgtgccggctccgtctgcgatgcagggcggcggcctgtaatcccagcgaccgccaggagtggcagaatttagtgacatttggaagcttttcaaacatggttccctgtagtcatccatatattggtaccctgagtcaagtaaagttgtactccacaaatgttcagaaagaaggacagggatcacaaacactcagagtggaaaaagtaccatcatttgaaacagcagaaggtataggcacagaactcaaagctccacttaagcaagaacctctccaagtaagagttaaagcagtccttaagaaaagggagtatggctcaaagtacactcagaataatttcatcactggagtcagagcgataaatgagttctgcctcaaatccagtgatctagaacaacttcgaaaaatcagacgacgaagtccccatgaagatactgagtcttttactgtatacttgagatcagatgtggaagcaaaatctttggaagtttggggaagccctgaagctcttgccagagagaaaaaattgcgtaaggaagcagaaatagaatacagagaaaggctatttagaaaccaaaaaatattaagagaatacagagatttcttgggaaataccaagccacgctccagaacagcatcagtgttttttaagggaccaggaaaagtggtgatggttgcaatttgcatcaatggattaaactgcttctttaaatttcttgcctggatttataccggttcagcaagtatgttctcagaagctatacactcattatctgatacttgtaatcagggtttactagcattgggcatcagtaagtctgttcaaacaccagatccttctcatccgtacggattttcaaatatgcgctatatttcttcgctaattagtggtgttggtattttcatgatgggtgcaggactatcttggtaccatggagtcatgggattgcttcatcctcaaccaatagaatcccttctatgggcatattgtattttagcaggatcattagtatctgaaggagcaacacttcttgttgctgtaaatgaacttcgtaggaatgctcgggctaaaggaatgtcattttacaagtatgtaatggaaagtcgtgatcctagtacaaatgtgatattattggaggatactgctgcagtcttgggagttataatagcagccacttgcatgggccttacttctataacaggcaatccactgtatgacagcctaggttctttgggtgtgggcaccttattaggcatggtctcagcattcctcatctacactaacacagaagcactcttagggcggtccatccagccagaacaagtacaacggctcactgaactcctggagaatgacccatcagtaagggcaattcatgatgttaaagccacagatctgggattaggtaaagtaagatttaaggcagaagtagattttgatgggcgagttgttacaagatcatatttggaaaaacaagattttgaccaaatgttacaagaaattcaagaagtgaaaactcctgaagaactagagacctttatgcttaaacatggagaaaatattattgatactttaggagctgaagtagatagacttgagaaggaactgaaaaaacgaaatcctgaagttcgacatgtagatttggagatactgtgagtttgatggaatgaatcacctgggtggggaccttggaaacaagtttgtccgtccactctacaaagtttcctcctctcctacactgaaagactcagtgccatgcagaagccttttttttaagatgaaggaaatattttatgtaaagagcaactcagcaggacacagaactaaaactactacttacatctaacagacacactacaagttgaatcaatttgaaaatcatgtttttatgcttccatagggaacattttggttatttaaattgttcataatgtcccatatttcacctgttcagtgtatactgtactttgcaatcatctttccttttttcacattggtaaaaataagtggcatccataggatcatgatttttaatttgttgcctctgaagatttcactccatcaagatctgccaatcttcaatattctggctaaatcttggtatgtggtttttaaacagtcactccgtttcaaagtctgtctttccttatagaatgtggaaattatttctccataccttgtgattttgacctgagtgctaagagaatcactctccttacctagttatctacaaatgttcattccagaaatgtttagttactgaattgaatgaagacatctcagtacactcttttaggtcatagtagttgccattttgtaaaatttcttttttcttctttgcttttttccccttatttggtttaatttttctaatgttaggagatatagtcctagatatttccatgggccagtgtgatgacttttttttaaatgaggttcagtaccataatgtttatttactggaagataatgcatttataagcattttaaaattctgtaaagtgggttagaaatatttataattttacaggcaggacagcatttgacttttatttaaaaggcggcactacttatgtaaatctgagctgtgggatatttcttgctttaagagagagacagaatctctcactgaaactcatggtcatgattttgtataatatagttcatactgtgtctgtgagtttcttcagttacaaatgggcatttagtatagttatattgactataacatgtaagtaaatagctttctactgaccctaagttatcaaggtggaaaaaaaacatgcaattcagtaattgaaaatgtggtgaaaagctgcagctgtcatcatcaaaacaactcataacatactttaaaatgttcaggtagcagtgagcattgttcatatgagaatggcggctgggtgatctctttgctgaattaatgagttcttaacatgtggacccaactgcctgtgtgagatctgtgtcttaaaacttactggaatggaaatctatgaattattgcaaattgtaatgctggaaacaaaaaataaatccttggttaaagggtttgtaatggtgatttttgacccagaaatctcatttactggaaaattgtgagactttacgttggtgtatttttcttttttttttttttactattacagagtattttgcatgctgtacattttaagtgaaataacattccagttttatttttaagatagaaaattgttatatatatatataatttgatactctattcttacagtttcaaattccttatcccttctttacaaaaaaaactttttttttacctgttatgatttattctatacttttttcttcttccttcccctttcccacttgccatttattacttcatgtcattgccatatgagaaagtaccaaattatatccagtttcctcctagtgatattactctgaaaaatttcacaaagccagacaagaataattactcattttttttcccaagacgaccctcaaagttaatgtgcagcaggtattccaaatggtaattttttttttttaggattccctaataaaaaaaaaaaaaattctgatatttctttttaaatctgattttggttgaggtcataccattcttaaataataattgaaggtttatgttgccatcttttctaattctgttttgcactgataaacttacataaagtttgtttatgtaaaataagacataaaggagtacaacatatcaaggaatttgagtatttatgtggaatcaggaaatttttctagagtcactgaattttcaaatcagagaatttgggctggatatggtggcttatgcctgtaatcccagcactttgggaggccgaggcaggaggattgcttgagctcaggaggtcaagaccagcctgggcaacacagcgagacctcatctctactaaaaaaagttagccgggtgtggtggtgctcacctgtgttagtccattctcacactgctataaagaaatacctgagactgagtaatcaaaaaaagagctttaattggctcatggttctgcagactgaacaggaaacatagcagcttctgcttctggggaggcctcgggaaacttcattcatggcagaatacgaaggggaagcagtcatagccagaggaagagcaagaggcggggattgggggtaggtgccacactcttgtaaacaaccagatctcatgagaactcactatacagtaccaagaggggaaggtgctaaagtattcatgagaactccacccccgtgatccagtcatctcccaccaggccctacctccaacatgggattacaattcgacatgagatttggtggggacaaagatccaaagcatatcagcatctgtagtcacagctacttgggaggccgaggtgggaggatcacttgagccccagaggtcgaggctgcaatgagctatgatcatgccactccagcctgaatgacagagtgagatcctgtctcaaaaagagaatttgggtctctttctccaaaaataaggctatatttagtttttcaggtttcttgttattttaccaaattaatgtttcttactttgtatctactttggcatatagcatttgagtattaaagcatataaatcatttttaaggaaaatattctctgcaggagaataattacaaaaataatactggacagaggaggggcagtcaagggtccatgattgattccttcttgcccaaaactaaaatctaggatttatcaaaggtgaggtatacagtggtccctgacttataatggttgcacttaagaatttttatgatgggtttattggcacataacccaataataagtaaaaagcatctgtacctacttttagctttggctgagaatggatctctaattcactgtaagtagcagtccccaaactatataaggtggcacagttttcatcatggcagtgggaggatgaggggtggagtgtttttgttttttttgtttttttttgagacagagtttcgttcttgttgcccaggctggagtgcactggcacaattgcagctcaccgcaaccttcacctcccgattcaagtgattctcctgcctcctgagtagctgggattacaggcatgcgccaccacacccggctaattttgtatttctggtttagacaaggtttctccatgttggtcaggctggtcttgaactgccgacctcaggtgatccgccctcctcggcttcccaaagtgctgggattacaggtgtgagccactgctccggtgatctgtttttaagtggagtatcctgggggcctatagtatccaactccaaagaggtaagttcctgaacatacactaaagaacctgtgagataagatcagacggaaaaattttcaaattttttcaaaagcaaaggtaatccctgcatacatcctcctacacacacacacatagtgcaaagtgaataacaaaatgtcataaggcttgagtttttggtatatggctttcagtgttaccttatctcataatttaggtaatgatttttgctaaaatgataaccatctaaagagtgcctaagttttaagtctcgtaactttttgaggaagaatgctgggaactacagaaaactgcataggcatttagaatttgtattatcttcttagactgcatttgtcaagctttggcagcatttcttttaaatgtgatgaaccccaatttgccaaactgtcagaagtcagtgaagcaaagaatcgaaggtaaaatgttgattcaaagattgtctcccctaaatccttcatttctttctctgaaatggaactttggaagccatttatatagattagtctgacagcctttatatttgcatgtaagtttacttgcatccttagacttggctttatgcaaaaagaaaatttttattcgttatattgtatttcatctgtctgatttccctggcacattaagatggtcctggtccctcaggatactttttcccttaataaatgtcatatgtaaataaaggcaa

SEQ ID NO: 183754 - DNA, 2217 bp, Homo sapiens
  Payload ID: 16201
  Gene Symbol: SLC30A9
  Gene Name: solute carrier family 30 (zinc transporter), member 9
  ENST ID: ENST00000513699
  CDS Start-End: 151-510
aaatgacgttgccgtttccgggtcacccaggcagcttgtggcggcgaagccatcggtgttcgctgatgtccagtctatggagtcagttggtaccggtggcggcgcggaggcagaaggcggtgtccgagtaggggcctctgccccaccaggatgttacccggcttggccgccgccgcggcccacagatgtagctggtcctccctgtgccggctccgtctgcgatgcagggcggcggcctgtaatcccagcgaccgccaggagtggcagaatttagtgacatttggaagcttttcaaacatggttccctgtagtcatccatatattggtaccctgagtcaagtaaagttgtactccacaaatgttcagaaagaaggacagggatcacaaacactcagagtggaaaaagtaccatcatttgaaacagcagaaggtataggcacagaactcaaagctccacttaagcaagaacctctccaagtaagagcccaagaaaggaataatggcaaataagaatcatcaattgcattatcatttttagaagagtaaggcaattaaagaacaagaggcccacacttttcagctactgcttattcaaatccagttaaagcagtccttaagaaaagggagtatggctcaaagtacactcagaataatttcatcactggagtcagagcgataaatgagttctgcctcaaatccagtgatctagaacaacttcgaaaaatcagacgacgaagtccccatgaagatactgagtcttttactgtatacttgagatcagatgtggaagcaaaatctttggaagtttggggaagccctgaagctcttgccagagagaaaaaattgcgtaaggaagcagaaatagaatacagagaaaggctatttagaaaccaaaaaatattaagagaatacagagatttcttgggaaataccaagccacgctccagaacagcatcagtgttttttaagggaccaggaaaagtggtgatggttgcaatttgcatcaatggattaaactgcttctttaaatttcttgcctggatttataccggttcagcaagtatgttctcagaagctatacactcattatctgatacttgtaatcagggtttactagcattgggcatcagtaagtctgttcaaacaccagatccttctcatccgtacggattttcaaatatgcgctatatttcttcgctaattagtggtgttggtattttcatgatgggtgcaggactatcttggtaccatggagtcatgggattgcttcatcctcaaccaatagaatcccttctatgggcatattgtattttagcaggatcattagtatctgaaggagcaacacttcttgttgctgtaaatgaacttcgtaggaatgctcgggctaaaggaatgtcattttacaagtatgtaatggaaagtcgtgatcctagtacaaatgtgatattattggaggatactgctgcagtcttgggagttataatagcagccacttgcatgggccttacttctataacaggcaatccactgtatgacagcctaggttctttgggtgtgggcaccttattaggcatggtctcagcattcctcatctacactaacacagaagcactcttagggcggtccatccagccagaacaagtacaacggctcactgaactcctggagaatgacccatcagtaagggcaattcatgatgttaaagccacagatctgggattaggtaaagtaagatttaaggcagaagtagattttgatgggcgagttgttacaagatcatatttggaaaaacaagattttgaccaaatgttacaagaaattcaagaagtgaaaactcctgaagaactagagacctttatgcttaaacatggagaaaatattattgatactttaggagctgaagtagatagacttgagaaggaactgaaaaaacgaaatcctgaagttcgacatgtagatttggagatactgtgagtttgatggaatgaatcacctgggtggggaccttggaaacaagtttgtccgtccactctacaaagtttcctcctctcctacactgaaagactcagtgccatgcagaagccttttttttaagatgaaggaaatattttatgtaaagagcaactcagcaggacacagaactaaaactactacttacatctaacagacacactacaagttgaatcaatttgaaaatcatgtttttatgcttccata

SEQ ID NO: 183755 - DNA, 3650 bp, Homo sapiens
  Payload ID: 16202
  Gene Symbol: SLC30A10
  Gene Name: solute carrier family 30, member 10
  Uniprot ID: Q6XR72
  ENST ID: ENST00000356609
  CDS Start-End: 212-883
actgcccccgccactcctttagactctggacgtgcggggactggtggcgctcggcctcgcgttataaaaagcggtggggcagggccggcgagacaatctgggaggcgggtaccgggcctcacggatccgcgccgcgccccccacctgtggctgcgcgcggggtgggctgcgctcccctgggcggcgccgggcgcccggggctggtggcgagatgggccgctactctggcaagacgtgccggctgctcttcatgctggtgctcaccgtcgccttcttcgtggcggagctggtctccggctacctgggcaactccatcgcgctgctctccgactccttcaacatgctctccgacctgatctcgctgtgcgtgggcctgagcgccggctacatcgcccggcgccccacccggggcttcagcgccacctacggctacgcccgcgccgaggtggtgggcgcgctgagcaacgcggtcttcctcaccgcgctctgcttcaccatcttcgtggaggccgtgctgcgcctggcccggcccgagcgcatcgatgaccccgagctggtgctcatcgtcggcgtcctggggctgttggtcaacgtggtggggctgctcatcttccaggactgcgccgcctggttcgcgtgctgcctccggggacgcagtcgccgcctgcagcagcggcagcagctggcggagggctgtgtccccggcgctttcggggggcctcagggcgcggaggacccgcggcgcgcggcggacccgacagccccaggctcggactcggccgtaaccctccgggggacctcggtggaaaggaagcgggagaagggggcgaccgtgttcgcaaacgtagcagaacttatacacaacacaaggtttcttctttgaatgcaggtgattccttcaacacccagaatgagccagaagacatgatgaaaaaagagaaaaagtctgaagctctgaatatcagaggtgtacttttgcatgtgatgggagatgccctggggtccgtggttgtggtcatcacggccatcatattctatgtgcttcccctgaagagtgaggacccgtgtaactggcagtgttacattgaccccagcctgactgtcctcatggtcatcatcattttgtcatctgccttcccgcttatcaaggagaccgctgccattctgctacagatggtcccaaaaggagtcaacatggaagagctgatgagtaaactctctgctgtgcctggaattagcagtgtacatgaagtgcacatctgggaacttgtaagtggaaagattattgccaccctgcacatcaagtatcctaaggacaggggatatcaagatgccagcacaaaaattcgagaaatcttccaccatgcgggaatccacaatgtgaccatccagtttgaaaatgtggacttgaaggaacccctggagcagaaggacttactgttgctctgcaactcaccctgcatctccaagggctgtgctaagcagctgtgttgtccccccggggcactgcctctggctcacgtcaatggctgtgctgagcacaatggtgggccctctctagacacatacggaagtgatggcctcagtagaagagacgcaagagaagtggctattgaagtgtctttggatagctgtctgagtgaccacggacaaagtcttaacaaaactcaggaggaccaatgttatgtcaacagaacgcatttttaatctggtactcacataatcagaccatatagacgaggcactttggaaccacaagcttggctcacaaaaagagctttctgggttgtaggcccagactagacttgcagcatgcatgctctgtgttcactaggggttggctgtttgggattttagttaaacgtgtctgtgaatttttatgtaactaactcctttccattcccctgggtgtctcatgctgctctttgactgtttcagcttgaacatgcattttctaaagcaaactgcactagtgtatatatcagggacattaaagtctgggactggggctcaatagctgcggatacagtgttcaaagaagttcttgtttctaaactgattagaacttctagctaatgctcaggtgagatcatagcttaaatacattgaaaaaactaaagtaccacaatagctgtatttttcccaatccccttaacgatcataaaagaggcaagttaagtatttctggcactgaagaaatatcttttttctttgattcatttttgaataaatataaaatgaataactattaaggtagaaaatattctcagaacattctagaggaggtaaaggttagtaggagggcgttggccatctctacattttgtgaggtgagagaaaactaatgtttactttctgctgtgaactgaactgcagctatagaatgtttcaaatgcttaaatatataatacatttttttccatggaagtgagggaatatttcagtttcctgaagtatgacacaaatactcatatactgtcttttagagtcagtatagttggagctgttttcatttagtgctttgataatgatttacttatttttccaaatttcgtttgaattttctttcatatgattgcattgatctatgcagcatttaccagaaaagagtattcctgggatagcagaatgcataacactgagtgttaattcttgtgaaataaataagctagactgccttctctttaattagacatattttaaagtatttattatagttgtcaactagtaactcaatgaaaaagttgatgcccaagggagaaatgagaattagcttaattgctgcctttaatgtgtttttgaggaacttaaaattttctttcatgtcgctgatccatattaccaagttcaaataaaatttttataatcggattcagacccataaccaaactatgttggtagtagagaagcatctgtcatgtttttaacacattgctcagacatcagtatttaaatcagaacagtctcacaggtatgagaaaatgggaagtgcctcactagacaactagtatcatctctggtagactgcaagattgtctgaaaataaccatctcttagtgtgtaaagtcctgttcagaatctgcacagggtttttcagaggtgctgggttgataatgaaggcagcatccacagaacaaacatcatatttaaacaatgtatcttagtcctaaatttgaaggctaaaataaataagcagctatgatccgtaggataggaaattattatttttttctttttttgtagagacagggtctcgctatgttgcccagctggccttgaactcctagcctcaagtgattctctcgccttggcctcccaaagcactgggagaacagtcatgagccactgcacctggccaggaaattctttattccttgaaaatgtattatctgagtttaaattggctgtgaagtaggtaaatagaaaaatgcctaaaaatgtttttatttctaggagcttattgggctaggttatatgccctttataagctcaaaggggttaataagtaagaatttctatttttagtattaaaagtgtggcatgtactcacacaaaacagtgcatcctcttaagaaacttggcatggagatcagtgggccagattctcctacataaacattggttgaaattccttagagccaaaaaagaaa

SEQ ID NO: 183756 - DNA, 1915 bp, Homo sapiens
  Payload ID: 16202
  Gene Symbol: SLC30A10
  Gene Name: solute carrier family 30, member 10
  Uniprot ID: Q6XR72
  ENST ID: ENST00000366926
  CDS Start-End: 163-1620
ctcggcctcgcgttataaaaagcggtggggcagggccggcgagacaatctgggaggcgggtaccgggcctcacggatccgcgccgcgccccccacctgtggctgcgcgcggggtgggctgcgctcccctgggcggcgccgggcgcccggggctggtggcgagatgggccgctactctggcaagacgtgccggctgctcttcatgctggtgctcaccgtcgccttcttcgtggcggagctggtctccggctacctgggcaactccatcgcgctgctctccgactccttcaacatgctctccgacctgatctcgctgtgcgtgggcctgagcgccggctacatcgcccggcgccccacccggggcttcagcgccacctacggctacgcccgcgccgaggtggtgggcgcgctgagcaacgcggtcttcctcaccgcgctctgcttcaccatcttcgtggaggccgtgctgcgcctggcccggcccgagcgcatcgatgaccccgagctggtgctcatcgtcggcgtcctggggctgttggtcaacgtggtggggctgctcatcttccaggactgcgccgcctggttcgcgtgctgcctccggggacgcagtcgccgcctgcagcagcggcagcagctggcggagggctgtgtccccggcgctttcggggggcctcagggcgcggaggacccgcggcgcgcggcggacccgacagccccaggctcggactcggccgtaaccctccgggggacctcggtggaaaggaagcgggagaagggggcgaccgtgttcgcaaacgtagcaggtgattccttcaacacccagaatgagccagaagacatgatgaaaaaagagaaaaagtctgaagctctgaatatcagaggtgtacttttgcatgtgatgggagatgccctggggtccgtggttgtggtcatcacggccatcatattctatgtgcttcccctgaagagtgaggacccgtgtaactggcagtgttacattgaccccagcctgactgtcctcatggtcatcatcattttgtcatctgccttcccgcttatcaaggagaccgctgccattctgctacagatggtcccaaaaggagtcaacatggaagagctgatgagtaaactctctgctgtgcctggaattagcagtgtacatgaagtgcacatctgggaacttgtaagtggaaagattattgccaccctgcacatcaagtatcctaaggacaggggatatcaagatgccagcacaaaaattcgagaaatcttccaccatgcgggaatccacaatgtgaccatccagtttgaaaatgtggacttgaaggaacccctggagcagaaggacttactgttgctctgcaactcaccctgcatctccaagggctgtgctaagcagctgtgttgtccccccggggcactgcctctggctcacgtcaatggctgtgctgagcacaatggtgggccctctctagacacatacggaagtgatggcctcagtagaagagacgcaagagaagtggctattgaagtgtctttggatagctgtctgagtgaccacggacaaagtcttaacaaaactcaggaggaccaatgttatgtcaacagaacgcatttttaatctggtactcacataatcagaccatatagacgaggcactttggaaccacaagcttggctcacaaaaagagctttctgggttgtaggcccagactagacttgcagcatgcatgctctgtgttcactaggggttggctgtttgggattttagttaaacgtgtctgtgaatttttatgtaactaactcctttccattcccctgggtgtctcatgctgctctttgactgtttcagcttgaacatgcattttctaaagcaaactgcactagtgtatatatcagggacattaaagtctggg

SEQ ID NO: 183757 - DNA, 4744 bp, Homo sapiens
  Payload ID: 16203
  Gene Symbol: SLC31A1
  Gene Name: solute carrier family 31 (copper transporter), member 1
  Uniprot ID: O15431
  ENST ID: ENST00000374212
  CDS Start-End: 153-725
gcggtggtggacacgtcgagccgggtagaagtggaggggccgttcgaagagtcgtgagggggtgacgggttaagattcggagagagaggtgctagtggctggacttgacctggaaagaatcttctgctgactctcaacttttcctggaaaaaatggatcattcccaccatatggggatgagctatatggactccaacagtaccatgcaaccttctcaccatcacccaaccacttcagcctcacactcccatggtggaggagacagcagcatgatgatgatgcctatgaccttctactttggctttaagaatgtggaactactgttttccggtttggtgatcaatacagctggagaaatggctggagcttttgtggcagtgtttttactagcaatgttctatgaaggactcaagatagcccgagagagcctgctgcgtaagtcacaagtcagcattcgctacaattccatgcctgtcccaggaccaaatggaaccatccttatggagacacacaaaactgttgggcaacagatgctgagctttcctcacctcctgcaaacagtgctgcacatcatccaggtggtcataagctacttcctcatgctcatcttcatgacctacaacgggtacctctgcattgcagtagcagcaggggccggtacaggatacttcctcttcagctggaagaaggcagtggtagtggatatcacagagcattgccattgacatcaaactctatggcgtggccttatcgattgcagtgggaagttgttgaagacttgaagacgtgattcctgctccaatcatcccttcttgctcctctttgtgcacgtacacacacacacacacacacacacacacacacccctgctcaacagaggtttagtttacagtctctgaactaaagtagtaacctcccaaattgttttttctaataagctgagattcccatttctcttaaggagaagccacccatgagatgtcttttccttctccatcatcttagagccaagttatatgttcttgtctaatccatgtagctttttgttcaatgacttgatcatctgcttcctttttgaatttttaacagatagtaagtaaatttggtggttttttcccctgggtcagtgatggaaaggggttaacttcagccaggattgatggcagctgagggaaattcttgcccaactaaacccagaactcaaacttaacattagaaaataaggtccagggccggacacagtggcccatgcctgtaatcccagcactttggggggccaaggcaggctggatcacctgaggacaggagttcgagaccagtctggccaacatggggaaaccccgtctctactaaaaatacaaaaattagccgggcatggtggtgggcgcctgtaatcccagctactcagaaggctgaggcaggagaatcacttgaacctaggaggcggaggttgcagtgagccaagatggcgccattgcactccagcctgggtgacaagagtgaaactccatctcaaaaaaaaagaaaagaaggtccagcttttggattcaatgagtgggaaatacattgtgcctttctctagatgtgatacgttataccaaaatctttgtagtgtgcagagcggtggtttgagactaaatacaggcttagaacttgcagagtgtgtattcttggatggctgatgcatcgacttgcattcccacttaacactttgattagcatgaacttgccaatcaaaaaatgacaatcaatttgagaaaatagaaatagatatttttaaataaaaccattcacagtttactttgtcttgataccttggtttgtcccagctgaagtgaagcaagagagtttgaattaatttttccattataatgttttcgcatgtctgcctctaaaactgtgattttcaagctttagcgtgcatcagaatcacctgtagggcttgttaaaacactaattgctgggcctcaacccaaaagcccccaaagtggcacttctgagttcctgctgatgttacaagggaccacacttttgagaatctgtgctttaagctaaggaaatattgcctggtgggttggctgcctggtattgggcatggaaatttgaattgctgattggtagatggtgtgtctggacttaactcacgtagtaaatactgctgatcaatacctaatcattccacatttattgagctccacctgtgtgtatgtgtacccaagcacacatgtgtgaagggctatagccaaagtatttttactagcctgtatgaaatcactagtccttatttttaaaggtctatggtttcttggaagtagtttgattgttgagagagacctttgatctgcagtgtaaatctaccagtcatgggccagaagggcaaaagcccagctttctctttggaaagactcaggctgtggtttgttgatggccaggttttcctcaggctccaacaactgtgcttataccaagcagatcctcatcctccatataatcatctttgttattcgtgggggtttaattacattacaagtggccaaaacccctgttctcagtgaagaaccacattggatttgtattctgttcagttgtagtctacactgcagtcttattcctggttcaaactacctctttaaattgatttgtcttgtgctggtctgttaaatcctgccctccttggtgctagatccagttgtgcctcagggcagaggaaacaaaacacagctatcctgttggcctgtgttgtggttttgaagtttgtactttctctgtgggtgccagttaaatattggagagcaaggaatgtggacttgtatggctttgaaccaagagagggttatgagcctactggattgaggttaaaatccaagaaccaacatttagagctttgtgcttttctctcattccatcactttgtaatgatgatacttaacatgagcagggtgaatgacaggtactgacgaagtccaacacaaaggtataatacagcctgttgtctaaagccaaggagtcataaaaccatgagaaataaataggaatcaatagttagtagtgacattggtgctctctagaaatctcagcatgagctgctatagaataccctcccagcaacaaaacctaatcagtaaggccagctagacccaatggctcatgcctgtaatcccaacactttgggaggccaaggtgggaggatggcttgtgtccagaagttcgagaccagcctggacaacatagtgagatcctatctctataaaaaatcaaaaattagccaggcatggtggtgcatacctatagtcctggctatttgggaggctgaggcaggaggattgctttagccctggaggtcgaggctgcagtaagccatgattgcgccactgcactcagcccgggtgacaaagcaagaccctgtctcagaaaaaaagaaaattcaaggccagttaagacaaaatgctatgactttgaaattcacagaaagaaataacagtttagattaggtcttcaggtattcaggatagagataatctcctgaaaaacctgaatttcagagattcttagactggctgccaaaggatgaagctagtgaaggagaaaaagcttaaattccatcttgagctcttggattgtgataatacaatgatttcattaacttttcatttctgtatacctgttcatttggaatttaatgcttgacttctttgttcattttggatctaaacttctcttttcttccttccccattcacatctattagaagactgcatcaccatttctttggcccccttactctgttgtcctttcccttttctttcagtttttttaatcgcatgtctagtatattaagtctccatagccctcctgatgcagtagacagtgctatgctgtggatataataccaaccagaaattggcatttataaacctgttaagagactttaagcatgcttcaagaggcagttgacccactggaatttctataaggctggtacccttcccagagttacagaatcttaggtgccgtctctagtctgtgagggaggaactcccagcatccccattgcccacaaatggaatcctcactgtatccactaggagattagaaattaaggtttcttcactacttctatggtagggttgtctgaaattccctttcaggctgtgggtactggtcttgggttctagtcataaggggttccttataaggagcaggcggaggggagtacactttcatgtgatttaattttgatcctgccctctccagctgctccttcaaaagatacatcaaaagatagaaactctgggctgggcacagtggctcacacactttgggaggccaagcgggggtgcagatcacctgaggtcaggagtttgagaccagcctggccaatgtggtgaaaccccatctctactaaaaatacaaaaattagctgggcgtggtggtgcatgcctgtaatcccagctactcgggaggctgaggcaggagaatcgcttgaacccaggaggcggaggttgcagtgagccaagatggcgccattgcactccagcctgggcgacaagagcaaaactccgtctcaaaaaaaaaaaaaagatacaaagtctgcatttgatataatgccttaattactgggtctacaattaatgttgactgttttagattgtaagctcctggagagcagtattgctgtagtaggaatgttttaacagtgtcatatgaaaaagaacaaaataaatattttgattttgtgattcta

SEQ ID NO: 183758 - DNA, 1785 bp, Homo sapiens
  Payload ID: 16204
  Gene Symbol: SLC31A2
  Gene Name: solute carrier family 31 (copper transporter), member 2
  Uniprot ID: O15432
  ENST ID: ENST00000259392
  CDS Start-End: 134-565
ctcgcccggaccacgtgatccgtgcggccagggtagctatcgcggcggcggcggcggcggcggttgaactgactcggagcgaggagacccgagcgagcagacgcggccctggcgcccgccctgcgcactcaccatggcgatgcatttcatcttctcagatacagcggtgcttctgtttgatttctggagtgtccacagtcctgctggcatggccctttcggtgttggtgctcctgcttctggctgtactgtatgaaggcatcaaggttggcaaagccaagctgctcaaccaggtactggtgaacctgccaacctccatcagccagcagaccatcgcagagacagacggggactctgcaggctcagattcattccctgttggcagaacccaccacaggtggtatttgtgtcactttggccagtctctaatccatgtcatccaggtggtcatcggctacttcatcatgctggccgtaatgtcctacaacacctggattttccttggtgtggtcttgggctctgctgtgggctactacctagcttacccacttctcagcacagcttagctggtgaggaacgtgcaggcactgaggctggagggacatggagccccctcttccagacactatacttccaactgccctttcttctgatggctattcctccaccttattcccagcccctggaaactttgagctgaagccagcacttgctccctggagttcggaagccattgcagcaaccttccttctcagccagcctacgtagggcccaggcatggtcttgtgtcttaagacagctgctgtgaccaaagggagaatggagataacaggggtggcagggttactgagcccatgacaatgcttctctgtgactcaaaccaggaatttccaaagatttcaagccagggagaagggttcttggtgatgcagggcatggaacctggacaccctcagctctcctgctttgtgccttatctacaggagcatcgcccattggacttcctgacctcttctgtctttgagggacagagaccaagctagatcctttttctcacctttctgcctttggaacacatgaagatcatctcgtctatggatcatgttgacaaactaagttttttttatttttcccattgaactcctagttggcaattttgcacattcatacaaaaaaatttttaatgaaatgatttcattgattcatgatggatggcagaaactgctgagacctatttccctttcttggggagagaataagtgacagctgattaaaggcagagacacaggactgctttcaggctcctggtttattctctgatagactgagctccttccaccagaaggcactgcctgcaggaagaagatgatctgatggccgtgggtgtctgggaagctcttcgtggcctcaatgccctcctttatcctcatctttcttctatgcagaacaaaaagctgcatctaataatgttcaatacttaatattctctatttattacttactgcttactcgtaatgatctagtggggaaacatgattcattcacttaaaatactgattaagccatgggcaggtactgactgaagatgcaatccaaccaaagccattacattttttgagttagatgggactctctggatagttgaacctcttcactttataaaaaaggaaagagagaaaatcactgctgtatactaaatacctcacagattagatgaaaagatggttgtaagctttgggaattaaaaacaaacaaatacattttagtaaatatatatttttaaata

SEQ ID NO: 183759 - DNA, 1750 bp, Homo sapiens
  Payload ID: 16204
  Gene Symbol: SLC31A2
  Gene Name: solute carrier family 31 (copper transporter), member 2
  ENST ID: ENST00000374220
  CDS Start-End: 46-267
ccgagcgagcagacgcggccctggcgcccgccctgcgcactcaccatggcgatgcatttcatcttctcagatacagcggtgcttctgtttgatttctggagtgtccacagtcctgctgggcaagaaactaaagcccagagacaggaagagagactcgtgcagggtcacacagcatggccctttcggtgttggtgctcctgcttctggctgtactgtatgaaggcatcaaggttggcaaagccaagctgctcaaccaggtactggtgaacctgccaacctccatcagccagcagaccatcgcagagacagacggggactctgcaggctcagattcattccctgttggcagaacccaccacaggtggtatttgtgtcactttggccagtctctaatccatgtcatccaggtggtcatcggctacttcatcatgctggccgtaatgtcctacaacacctggattttccttggtgtggtcttgggctctgctgtgggctactacctagcttacccacttctcagcacagcttagctggtgaggaacgtgcaggcactgaggctggagggacatggagccccctcttccagacactatacttccaactgccctttcttctgatggctattcctccaccttattcccagcccctggaaactttgagctgaagccagcacttgctccctggagttcggaagccattgcagcaaccttccttctcagccagcctacgtagggcccaggcatggtcttgtgtcttaagacagctgctgtgaccaaagggagaatggagataacaggggtggcagggttactgagcccatgacaatgcttctctgtgactcaaaccaggaatttccaaagatttcaagccagggagaagggttcttggtgatgcagggcatggaacctggacaccctcagctctcctgctttgtgccttatctacaggagcatcgcccattggacttcctgacctcttctgtctttgagggacagagaccaagctagatcctttttctcacctttctgcctttggaacacatgaagatcatctcgtctatggatcatgttgacaaactaagttttttttatttttcccattgaactcctagttggcaattttgcacattcatacaaaaaaatttttaatgaaatgatttcattgattcatgatggatggcagaaactgctgagacctatttccctttcttggggagagaataagtgacagctgattaaaggcagagacacaggactgctttcaggctcctggtttattctctgatagactgagctccttccaccagaaggcactgcctgcaggaagaagatgatctgatggccgtgggtgtctgggaagctcttcgtggcctcaatgccctcctttatcctcatctttcttctatgcagaacaaaaagctgcatctaataatgttcaatacttaatattctctatttattacttactgcttactcgtaatgatctagtggggaaacatgattcattcacttaaaatactgattaagccatgggcaggtactgactgaagatgcaatccaaccaaagccattacattttttgagttagatgggactctctggatagttgaacctcttcactttataaaaaaggaaagagagaaaatcactgctgtatactaaatacctcacagattagatgaaaagatggttgtaagctttgggaattaaaaacaaacaaatacattttagtaaatatatatttttaaata

SEQ ID NO: 183760 - DNA, 2574 bp, Homo sapiens
  Payload ID: 16205
  Gene Symbol: SLC32A1
  Gene Name: solute carrier family 32 (GABA vesicular transporter), member 1
  Uniprot ID: Q9H598
  ENST ID: ENST00000217420
  CDS Start-End: 264-1841
gctcgcgccccgcggcagctccgcagtgcactagccaccaccgccgccgccgccgctccgccagacctgctgccagcttgcccggtccagccctgagagagcctcgaacgccagctgcgagggtcatgagccagagagccccggggcgccgcgcggagagcaagcggagatagcgactttgcgccccccagccctcgccttcttgcatcgcgttccccgcatcctcgggtccttctgtcctttccgctgtccccaccgccgccatggccaccttgctccgcagcaagctgtccaacgtggccacgtccgtgtccaacaagtcccaggccaagatgagcggcatgttcgccaggatgggttttcaggcggccacggatgaggaggcggtgggcttcgcgcattgcgacgacctcgactttgagcaccgccagggcctgcagatggacatcctgaaagccgagggagagccctgcggggacgagggcgctgaagcgcccgtcgagggagacatccattatcagcgaggcagcggagctcctctgccgccctccggctccaaggaccaggtgggaggtggtggcgaattcgggggccacgacaagcccaaaatcacggcgtgggaggcaggctggaacgtgaccaacgccatccagggcatgttcgtgctgggcctaccctacgccatcctgcacggcggctacctggggttgtttctcatcatcttcgccgccgttgtgtgctgctacaccggcaagatcctcatcgcgtgcctgtacgaggagaatgaagacggcgaggtggtgcgcgtgcgggactcgtacgtggccatagccaacgcctgctgcgccccgcgcttcccaacgctgggcggccgagtggtgaacgtagcgcagatcatcgagctggtgatgacgtgcatcctgtacgtggtggtgagtggcaacctcatgtacaacagcttcccggggctgcccgtgtcgcagaagtcctggtccattatcgccacggccgtgctgctgccttgcgccttccttaagaacctcaaggccgtgtccaagttcagtctgctgtgcactctggcccacttcgtcatcaatatcctggtcatagcctactgtctatcgcgggcgcgcgactgggcctgggagaaggtcaagttctacatcgacgtcaagaagttccccatctccattggcatcatcgtgttcagctacacgtctcagatcttcctgccttcgctggagggcaatatgcagcagcccagcgagttccactgcatgatgaactggacgcacatcgcagcctgcgtgctcaagggcctcttcgcgctcgtcgcctacctcacctgggccgacgagaccaaggaggtcatcacggataacctgcccggctccatccgcgccgtggtcaacatctttctggtggccaaggcgctgttgtcctatcctctgccattctttgccgctgtcgaggtgctggagaagtcgctcttccaggaaggcagccgcgcctttttcccggcctgctacagcggcgacgggcgcctgaagtcctgggggctgacgctgcgctgcgcgctcgtcgtcttcacgctgctcatggccatttatgtgccgcacttcgcgctgctcatgggcctcaccggcagcctcacgggcgccggcctctgtttcttgctgcccagcctctttcacctgcgcctgctctggcgcaagctgctgtggcaccaagtcttcttcgacgtcgccatcttcgtcatcggcggcatctgcagcgtgtccggcttcgtgcactccctcgagggcctcatcgaagcctaccgaaccaacgcggaggactagggcgcaagggcgagcccccgccgcgcttctgcgctctctcccttctcccctcaccccgcccccaccagcccagtgcgccctgccgccgcgcttgggaggccaagctttaaacatctctggttcctagtttctgattattcggggatgggggggatgggaggggacagggattcacgatccatcgcgtctgcgtttctgttgtcctttcttttccacaacaccctggttttggggggaggcggggtgcatttgcgggcagggttctctgtccttccaagtggggccccgacactttggttccagtcatcgagggggttgggaagggagggagagggggcgcagctcgcaggcgtggcaacttgaccttgggggaatatttcacatccatccagagctcggaatctacagcgtccagccatttccagcaagagcgcttcccattccggagacgtttcaaccctgcagcgggaaaggctgactgggaaatccattttgggtgggcaatttccttcaacgaagccggaaggcgagaagccgcggcggggccagcttgcctgccggttttcaggaatctaaactctcatcttgtgcaatttatcaggtgtggaactgttctactgtgcgtgtggtgtgctcgtggtgaataagatgaaatgtatatcagaaaaaaatctatctctaatttagagtgcggtacataattatatccgcaaataaagaagagacaaaggct

SEQ ID NO: 183761 - DNA, 2404 bp, Homo sapiens
  Payload ID: 16206
  Gene Symbol: SLC33A1
  Gene Name: solute carrier family 33 (acetyl-CoA transporter), member 1
  Uniprot ID: O00400
  ENST ID: ENST00000359479
  CDS Start-End: 433-2082
atatgctttttctggagtcctgtagagaaagtgctctctgccgcattgatagcagcgagagctggaggtgttgggtcgggagaccagccgttcgatcccgccgcaggtaggagctggtttccatcctggcaccacggcacacacctccagcctcgagcccggcgctgctgcccgggggtctccttcaggctctttgacgccgttccagggggcacctatccaggcatcctctgggcctctagccagaggactggctcccggcttcagcactccgggctgcagtaagaagtgcccttatcgctctgagccctgccaccatcccgtgaaccaccgaaaccctggtccagcgcgacagccttggacctgggactggacggatccaaaacgctcagcctcggccccccacagacggggctctgcatcgtctctgatatgtcacccaccatctcccacaaggacagcagccggcaacggcggccagggaatttcagtcactctctggatatgaagagcggtcccctgccgccaggcggttgggatgacagtcatttggactcagcgggccgggaaggggacagagaagctcttctgggggataccggcactggcgacttcttaaaagccccacagagcttccgggccgaactaagcagcattttgctactactctttctttacgtgcttcagggtattcccctgggcttggcgggaagcatcccactcattttgcaaagcaaaaatgttagctatacagaccaagctttcttcagttttgtcttttggcccttcagtctcaaattactctgggccccgttggttgatgcggtctacgttaagaacttcggtcgtcgcaaatcttggcttgtcccgacacagtatatactaggactcttcatgatctatttatccactcaggtggaccgtttgcttgggaataccgatgacagaacacccgacgtgattgctctcactgtggcgttctttttgtttgaattcttggccgccactcaggacattgccgtcgatggttgggcgttaactatgttatccagggaaaatgtgggttatgcttctacttgcaattcggtgggccaaacagcgggttactttttgggcaatgttttgtttttggcccttgaatctgccgacttttgtaacaaatatttgcggtttcagcctcaacccagaggaatcgttactctttcagatttcctttttttctggggaactgtatttttaataacaacaacattggttgcccttctgaaaaaagaaaacgaagtatcagtagtaaaagaagaaacacaagggatcacagatacttacaagctgctttttgcaattataaaaatgccagcagttctgacattttgccttctgattctaactgcaaagattggtttttcagcagcagatgctgtaacaggactgaaattggtagaagagggagtacccaaagaacatttagccttattggcagttccaatggttcctttgcagataatactgcctctgattatcagcaaatacactgcaggtccccagccattaaacacattttacaaagccatgccctacagattattgcttgggttagaatatgccctactggtttggtggactcctaaagtagaacatcaagggggattccctatatattactatatcgtagtcctgctgagttatgctttacatcaggttacagtgtacagcatgtatgtttctataatggctttcaatgcaaaggttagtgatccacttattggaggaacatacatgacccttttaaataccgtgtccaatctgggaggaaactggccttctacagtagctctttggcttgtagatcccctcacagtaaaagagtgtgtaggagcatcaaaccagaattgtcgaacacctgatgctgttgagctttgcaaaaaactgggtggctcatgtgttacagccctggatggttattatgtggagtccattatttgtgttttcattggatttggttggtggttctttcttggtccaaaatttaaaaagttacaggatgaaggatcatcttcgtggaaatgcaaaaggaacaattaatatatatgctactggacattctagcaaggttgaattttagagtggggtttttataagtaatggaggataaaatgggtgggagaaaatggcacacagcacctgaagaaagatggggcagtgacctctagaactcatgcattgccattggaaagcctgtgttgggcatcgatgtcagatcctgaagaatcacctggaaaaaatcccatcctagaggcaaggaggctacaccaaaccatacactacagtactttgtcacatggttgtccattatcatgtattagagtctaaatgattacttgaataaagaaaaaaaaccacttaa

SEQ ID NO: 183762 - DNA, 9217 bp, Homo sapiens
  Payload ID: 16206
  Gene Symbol: SLC33A1
  Gene Name: solute carrier family 33 (acetyl-CoA transporter), member 1
  Uniprot ID: O00400
  ENST ID: ENST00000392845
  CDS Start-End: 382-2031
gcagcgagagctggaggtgttgggtcgggagaccagccgttcgatcccgccgcaggtaggagctggtttccatcctggcaccacggcacacacctccagcctcgagcccggcgctgctgcccgggggtctccttcaggctctttgacgccgttccagggggcacctatccaggcatcctctgggcctctagccagaggactggctcccggcttcagcactccgggctgcagtaagaagtgcccttatcgctctgagccctgccaccatcccgtgaaccaccgaaaccctggtccagcgcgacagccttggacctgggactggacggatccaaaacgctcagcctcggccccccacagacggggctctgcatcgtctctgatatgtcacccaccatctcccacaaggacagcagccggcaacggcggccagggaatttcagtcactctctggatatgaagagcggtcccctgccgccaggcggttgggatgacagtcatttggactcagcgggccgggaaggggacagagaagctcttctgggggataccggcactggcgacttcttaaaagccccacagagcttccgggccgaactaagcagcattttgctactactctttctttacgtgcttcagggtattcccctgggcttggcgggaagcatcccactcattttgcaaagcaaaaatgttagctatacagaccaagctttcttcagttttgtcttttggcccttcagtctcaaattactctgggccccgttggttgatgcggtctacgttaagaacttcggtcgtcgcaaatcttggcttgtcccgacacagtatatactaggactcttcatgatctatttatccactcaggtggaccgtttgcttgggaataccgatgacagaacacccgacgtgattgctctcactgtggcgttctttttgtttgaattcttggccgccactcaggacattgccgtcgatggttgggcgttaactatgttatccagggaaaatgtgggttatgcttctacttgcaattcggtgggccaaacagcgggttactttttgggcaatgttttgtttttggcccttgaatctgccgacttttgtaacaaatatttgcggtttcagcctcaacccagaggaatcgttactctttcagatttcctttttttctggggaactgtatttttaataacaacaacattggttgcccttctgaaaaaagaaaacgaagtatcagtagtaaaagaagaaacacaagggatcacagatacttacaagctgctttttgcaattataaaaatgccagcagttctgacattttgccttctgattctaactgcaaagattggtttttcagcagcagatgctgtaacaggactgaaattggtagaagagggagtacccaaagaacatttagccttattggcagttccaatggttcctttgcagataatactgcctctgattatcagcaaatacactgcaggtccccagccattaaacacattttacaaagccatgccctacagattattgcttgggttagaatatgccctactggtttggtggactcctaaagtagaacatcaagggggattccctatatattactatatcgtagtcctgctgagttatgctttacatcaggttacagtgtacagcatgtatgtttctataatggctttcaatgcaaaggttagtgatccacttattggaggaacatacatgacccttttaaataccgtgtccaatctgggaggaaactggccttctacagtagctctttggcttgtagatcccctcacagtaaaagagtgtgtaggagcatcaaaccagaattgtcgaacacctgatgctgttgagctttgcaaaaaactgggtggctcatgtgttacagccctggatggttattatgtggagtccattatttgtgttttcattggatttggttggtggttctttcttggtccaaaatttaaaaagttacaggatgaaggatcatcttcgtggaaatgcaaaaggaacaattaatatatatgctactggacattctagcaaggtaattgtagtttagttttaattcggagagcaatgataatcagtgcacaggagtataaaatattattttaaacagcgaaattaataatataaaatgccaaatggttgaaaaaatagaaacctttctgtatatttgatcatattttttttttgccttgtcaatgtatttaaagtttacttaaggtcaggaaattctaaaacaacttttctggccttgttatttgatgtatatcttttaaatttactgaccaaagcatgttttaagctgcaatgcagtagtcacgggtggtaaccatgtagtcaggtattgttattagtacctatcactgctgagctgtatttaaaattttggtacaatatataaaatggagaagagcttgatattcaggtactaaccacaactagtctgacattgttggcagttaaaatcttattttgaattgtaaattagttaaattttatgtggaatttgctgagaaaagaatatagactactgaaatgtcattttagttatttttcttatgaccacattgtacaaatgaatctgtgttaaaaagactattttaaatgtatttcctgcttttgtaagcattaaagatttataagaaaattattcaaactattttttataaaatgaaagttatgatttttaaacttattgattcctcttgcccctaccccctctttttggaagatattttgattccttataaacttttaccctaagcttatatatgttttctgtcacaagtgcttcctggcacacagacagccaatggaggggatcaaattcagtgttgtatgtatgtttatggcaacattttgaaaataaaaattaaatgtttttcttcaagtagtttttttttaattgctgagagaaaaaaacagtaaagctttctgattaagtaaaatttaaatgggcagtaccataatttaaaaaactaatactttaaagagagagacaaagatattttgtgcctttgacaaattaaatctaatagtggaaaaatgtttcttaattaagcactttactagtgaaaaagatctcacaatttatgccaaatcaggtactgtattttcatgtattaacacataaccttttgtttgaatactatagttttcagtggacagttgctattccaagaaaattaagcttttgagtactttagcaattcccagcgtattacatacacccagtgataaggttctttgcatgttttgtgttatgtattactctgactctttagagattatataaatcctccaaaagttagacgaaacaagatagtacattatgagtcttaattttatcattgtggaaaaatgtgtactaactcctgattttgttaattttataacataggttgaattttagagtggggtttttataagtaatggaggataaaatgggtgggagaaaatggcacacagcacctgaagaaagatggggcagtgacctctagaactcatgcattgccattggaaagcctgtgttgggcatcgatgtcagatcctgaagaatcacctggaaaaaatcccatcctagaggcaaggaggctacaccaaaccatacactacagtactttgtcacatggttgtccattatcatgtattagagtctaaatgattacttgaataaagaaaaaaaaccacttaactcttacatatgaaatgtgttttgatttttaatttttggattaagaaactcagattgccataataaccttttatttcttcccgtgtatattattacaaattatatatactttcaaacatagttttttttttttttaattgagacagagtctcactttgtcacccaggctggagtacagtggtgcaatctcggctcactgcaacctctgcctcctgggttcaagtgattctcctgccccagtcctctgagtagctgggactacaggcgcacaccaccacacccggctaatttttgtatttttagtagagatggggtttcaccatgttggccaggctggtcttgaactcctgacctcaagtgatccacccgcctcggcctcccaaagtgctgggattacaggcatgagccactgcgcccagccttcaaacatagttttaatgtcagtacatctttaatgacttgaagttttaaaacattttaagcctttaaggtgaaagccatttaattaatttgctctagaaataagcacaaaaaattatagttaatttgaatacatgtatgtaatgcatgtcaaaataacttgttaatagctatgtgcaactgtgttgcatacattgatcactaatggcatttaaaaatgatctgcctaaatctgaggatctgtttattataaatcagtagtactaaaatataccaccctgtttttatgttgtgggtgtttttcttgattgattgatcctgataaattaaacagtaccttcaagtatggacttttaactcctccagttaatgcatcatatgtttactggctaatattagattgaacatttttctctctatgtcagtatctccatatgcacattggttgccgcatatatacatctgagtttgaaaagttcttctgagattacctaaaagtaacaccacagattccttccattgtaaatactttattttattttattattattttttagagacatggtctcacttttgcccaagctggagtacagtgatgcaatcatagctcactgcagcctcaaattcctaggctcaagggatcttccttaggctggatgctgtggctcacacctgtaatcacaacactttaggaggccaaggcaggaggatcacttgaggtcaagagttcaagaccaacctggtcaatataataagaacctgtctttatgacttcttttttttttttaattatccaggcatggtggtacacaccagtagtcccagctacttgggaagcttaggcgggagggttacttgaacccaggaggtcaaggcttcagtaagcagtgattgtggtactacattcctgtctgggtgacagagtgagaccctgtctcaacaacaaaaaaggatctttccacctcagcctctctggtagctaggactacaggcacacagcactatgcccagctaataaaaaataataattttttatagaggtggggtccgctatattttccaggctagtcccaatctcatagcttcaagcagtcgtccagccttgacctctcaaaatgctgggattacaggtgtaagccaccgtgccctgcccatgataaatattttaattttgcctgataagtcataaaaagtttattcaacaccttaaatagatttctcaattttttaaaaatattaaacctttgaaatcgaaagtaatttttggatttcacccctttattgcaaggtttttgatgtctgtgggaaaaacccctgaattgcttgtgaaactctggatatgtaattttttttctttttctgaacagagtaaaatcttggatgggccatgatccaaaaatcatggttttgaaagtagaccgtactataagccataatcacaaatctgaggtaatagttgtgaaagtgtttaaaacatcctgaaaacaatgttgaaaaaaaaaatctatgataaaaactataaaatctctgcatatgttatactgtattgaacttgaaactttgaaggaattagagtagataagacattaatggtagaagagaaaccacaggggtgaattatatcctacaaaagagaaatcttcatgatttaaccttttttttctgagtgacttttattttgccttattaacagaaacctgagaaagtatgttgctttgtattaaatggttgagaccattatttgatataaaagctgaaaatttaatttttgtattttggagaattctgtggttccaagtaattgaaagaatgactaaagctgtatgtcatagaccctgctaaaatgaaataacttgttgggaacattccatgcagatttccaaaatgtattttaccttattattagagaaagaaaataaacttttaaaataatctgataactagcattcatatatttaataagtattttggttacagaagggaaggtgatactgtacattgtaactgctgagacttttttttaaccaatgtctttggtagatagcgaggcacaattattttctcttagggaggattttgaatacctattgcaggctgggcatggtggctcacgcctgtaatcccaaccctttgggaggccgaggtgggtggatcacttgaggtcaggagtttgagaccagcctggccaacatggtgaaacgccgtctctactaaaaatacaaaaattagccaggcatagggtggcacacgactgtaatcccagctactagggaggctgaggcaggagaattgcttgagcccgggaggcggagcttgcagtgagttgagattgcgccactacacttcagcctgggcgacagagcgagactccgtttcaaaaacaaacaaacaaaaacaaaacaaaaacacctactgcagaccatgttctttttactttattttattttattatttttttgagatggagtctggctctgttgcccaagctgctcactgcaacctccgcctcccgggttcaagcgattctcctgcctcagccttccaagtagctgggactacagatgtgcactactacgcccagcttatttttgtatttttggtcgagatggggttttgccatgttggccaggctgatctcaaactcctgaccttaggtgatcttcccgccttggcctcctaaagtgctgggattacaggcgtgagccaccgctgctggctctttttactttagattgtatctgcctgatttgacaatgccaaattttttatgtaatcaccatttggtttgggactgagagctctttcattttctaccagtcaaaccactattagagtcttcatgttacttccccaatttgctagcaaggtagaatcagcatggatagcttattttccttattggaattctgttttggaagaggcaggtcttatagcagggcagactaattaatgtgctgaactcattccctcctgcttaagtgaataaaaacttttatttgactatggattataaagattgcctttaaggagccttgtttattttggggaaggagaatggatattttgtaggagaaaaagactttatatagtaaatgaaaagtctatgggctgggtgtagtggctcatacctttaatcccaacactttgggatgccaaggtaggagtattgcttgagctcaggagatcgagaccagggagactgcatctctatttttaattaaaaaggaaagaaaaagaaagaaagttctatgactaatcacctttactctaaaaaaattttgcccaaatgtgtaatgaaagagatcatatttaaatatcagcaatattaatttgcatagctcataagaagtcttgactcatttagaaaaaggttgctacagtttaatagttttttattgtcaatatagacaatataactttataacaattttatgtgaagaataatgattaaatggcatgactgaaatgcacaaggtacaggtacaatccttagggagttatcttaaatttctttttttttttttttttgagatggagtcttgctctgtcgcccaggctggagtgcagtggcatgactccctgcaccctctgcctgctgggttcaagtgattctccttcctcagcctctccattagctgggattacaggtgccttccaccacacctggctaatttttttgtatagtatagacggggtttcaccatgttggtcaggctggtctcaaactcctgacctcgtgatctgcctgcctcggcctcccaaagtgctgggattgcaggtgtgagccactgcacctggcgggaattatcttaaatttctaaaattgaataccccagtcagctacaattaatcaatcactaatgtaaatattaaagcctattcttattttccttgaaatgatcttaaatgttggaaaagtttaattttgtagtcagagttagtgaaattgaaatttttttatcacctgcccctataaaattagagaaatataagattggaaaaaaatttgatatttaagaaagtggcatatttgaaccaggtgtgttggcttacacctgtagtcccattagtttgggaggcttaggcaggagaatcacttgaggtcaggagtttgagaccagcctggccaacatggtgaaaccctgtctctactgcaaatacagaaattagccgggcatggtggtgggcacctgtaatcccagctacttgggaggctgaggcaggagaatcggttgaacctgagagagggatgttgcagtgagccgagattgtgctactattctccagcctgggcaatagagtgagactcagtctcaattaaaaaaaaaaaaaaaaaatgcggccgggtccagtggctcacgtctgtaatcccagcactttgggaggccaaggcaggcagatcacttgaggtcaggagttgaagaccggcctgacccacatggagaaaccccatctctactaaaaatacaaaattagccgggtgtggtggcccaggtctgtaatcccatctactcgggaggctgaggcaggagaatcgcttgaacccgggaggcaggggttgcggtgagccgagatcgcaccatcgcactccagcctgggtgcaagagcgaaactctgtctcaaaaaaaaaaaggaagtggcatatttggtaaattgataaattaccactgtcaaattatattggtgagtctatatctattgttgtccccagatgttgcctttgcaagaattagtgtaaaattggaaaaaatactcaatgttgaaagctgtcattgttgagatctttatgaaattattgtgcccatgtccaagtttgaattagagatacacagcacacaatcatttctgttaccacttttggaatatctagcattagccttgatagttttgtgtggtgtgttttgagtatatctgaactgttagttatatttggttaatttattaaaagatgtgtgttaaaccttaatatttatgcagtgtttaagtatttggaatatatttgaaataaattatccagtgttttagataaatggttatttaattgcttaaagtgattctctaaaaaataaaacattaatgaaa

SEQ ID NO: 183763 - DNA, 764 bp, Homo sapiens
  Payload ID: 16206
  Gene Symbol: SLC33A1
  Gene Name: solute carrier family 33 (acetyl-CoA transporter), member 1
  ENST ID: ENST00000468581
  CDS Start-End: 1-328
gggcaatgttttgtttttggcccttgaatctgccgacttttgtaacaaatatttgcggtttcagcctcaacccagaggaatcgttactctttcagattggtttttcagcagcagatgctgtaacaggactgaaattggtagaagagggagtacccaaagaacatttagccttattggcagttccaatggttcctttgcagataatactgcctctgattatcagcaaatacactgcaggtccccagccattaaacacattttacaaagccatgccctacagattattgcttgggttagaatatgccctactggtttggtggactcctaaagtagaacatcaagggggattccctatatattactatatcgtagtcctgctgagttatgctttacatcaggttacagtgtacagcatgtatgtttctataatggctttcaatgcaaaggttagtgatccacttattggaggaacatacatgacccttttaaataccgtgtccaatctgggaggaaactggccttctacagtagctctttggcttgtagatcccctcacagtaaaagagtgtgtaggagcatcaaaccagaattgtcgaacacctgatgctgttgagctttgcaaaaaactgggtggctcatgtgttacagccctggatggttattatgtggagtccattatttgtgttttcattggatttggttggtggttctttcttggtccaaaatttaaaaagttacaggatgaaggatcatcttcgtggaaa

SEQ ID NO: 183764 - DNA, 1060 bp, Homo sapiens
  Payload ID: 16206
  Gene Symbol: SLC33A1
  Gene Name: solute carrier family 33 (acetyl-CoA transporter), member 1
  ENST ID: ENST00000475842
  CDS Start-End: 1-808
cgatgacagaacacccgacgtgattgctctcactgtggcgttctttttgtttgaattcttggccgccactcaggacattgccgtcgatggttgggcgttaactatgttatccagggaaaatattggtttttcagcagcagatgctgtaacaggactgaaattggtagaagagggagtacccaaagaacatttagccttattggcagttccaatggttcctttgcagataatactgcctctgattatcagcaaatacactgcaggtccccagccattaaacacattttacaaagccatgccctacagattattgcttgggttagaatatgccctactggtttggtggactcctaaagtagaacatcaagggggattccctatatattactatatcgtagtcctgctgagttatgctttacatcaggttacagtgtacagcatgtatgtttctataatggctttcaatgcaaaggttagtgatccacttattggaggaacatacatgacccttttaaataccgtgtccaatctgggaggaaactggccttctacagtagctctttggcttgtagatcccctcacagtaaaagagtgtgtaggagcatcaaaccagaattgtcgaacacctgatgctgttgagctttgcaaaaaactgggtggctcatgtgttacagccctggatggttattatgtggagtccattatttgtgttttcattggatttggttggtggttctttcttggtccaaaatttaaaaagttacaggatgaaggatcatcttcgtggaaatgcaaaaggaacaattaatatatatgctactggacattctagcaaggtaattgtagtttagttttaattcggagagcaatgataatcagtgcacaggagtataaaatattattttaaacagcgaaattaataatataaaatgccaaatggttgaaaaaatagaaacctttctgtatatttgatcatattttttttttgccttgtcaatgtatttaaagtttacttaaggtcaggaaattctaaaacaacttttctggccttgttatttga

SEQ ID NO: 183765 - DNA, 555 bp, Homo sapiens
  Payload ID: 16206
  Gene Symbol: SLC33A1
  Gene Name: solute carrier family 33 (acetyl-CoA transporter), member 1
  ENST ID: ENST00000496772
  CDS Start-End: 1-555
tggggaactgtatttttaataacaacaacattggttgcccttctgaaaaaagaaaacgaagtatcagtagtaaaagaagaaacacaagggatcacagatacttacaagctgctttttgcaattataaaaatgccagcagttctgacattttgccttctgattctaactgcaaaggttacagtgtacagcatgtatgtttctataatggctttcaatgcaaaggttagtgatccacttattggaggaacatacatgacccttttaaataccgtgtccaatctgggaggaaactggccttctacagtagctctttggcttgtagatcccctcacagtaaaagagtgtgtaggagcatcaaaccagaattgtcgaacacctgatgctgttgagctttgcaaaaaactgggtggctcatgtgttacagccctggatggttattatgtggagtccattatttgtgttttcattggatttggttggtggttctttcttggtccaaaatttaaaaagttacaggatgaaggatcatcttcgtggaaatgcaaaaggaacaat

SEQ ID NO: 183766 - DNA, 2573 bp, Homo sapiens
  Payload ID: 16207
  Gene Symbol: SLC34A1
  Gene Name: solute carrier family 34 (type II sodium/phosphate cotransporter), member 1
  Uniprot ID: Q06495
  ENST ID: ENST00000324417
  CDS Start-End: 92-2011
cttcattgagctgctgagcagaagctgaaacacagaattctaagcgttgctgagacccactgacctgcagacctcatagtgggtgcccaggatgttgtcctacggagagaggctggggtcccctgctgtctccccactcccagtccgtggggggcatgtgatgcgagggacggcctttgcctacgtgcccagccctcaggtcctacacaggatcccggggacctctgcctatgccttccccagcctgggccctgtggcccttgctgagcacacctgcccctgtggggaggtcctggagcgccatgaaccactgcctgccaagctggccctggaggaggagcagaagccagagtccaggctggtccccaagctgcgccaggctggcgccatgctgctcaaggtgccactgatgctcaccttcctctacctcttcgtctgctccctggacatgctcagctcggccttccagctggctggagggaaggtggctggtgacatcttcaaggataacgccatcctgtccaacccggtggccgggctggtggtggggatcctggtgaccgtgctggtgcagagctccagcacctccacatccatcatcgtcagcatggtctcctctggcttgctggaggtgagctctgccatccccatcatcatgggctccaacatcggcacctctgtcaccaacaccatcgtggccctgatgcaggcgggggacaggactgacttccggcgggccttcgcgggggccacggtgcatgactgctttaactggctgtcagtgctggtcctgctgcccctggaggctgccactggctacctgcaccacatcactcgacttgtggtggcctccttcaacatccatggtggccgtgatgctcctgacctgctcaagatcatcacagagcccttcacgaagctcatcatccagctggacgagtctgtgataaccagcattgccactggtgatgagtccctgaggaaccacagtctcatccagatctggtgccacccagactccttacaggctcccacctccatgtccagagcagaggccaactccagccagacccttggaaatgccaccatggagaaatgcaaccacatctttgtggacactggcctaccggacctggctgtggggctcatcctgctggcaggatccctggtgctgctgtgcacctgcctcatcctcctagtcaagatgctcaactccctgctcaagggccaagtggccaaggtcatccagaaggtcatcaatacggacttccctgcccccttcacctgggtcacaggctactttgccatggtggtgggcgccagcatgaccttcgtggtccagagcagttctgtgttcacctcggccatcaccccactcatcggtcttggtgtgatcagcattgagagggcctacccgctcacactgggttccaacatcggcaccaccaccacggccatcctggctgccctggccagccccagggagaagctgtccagcgctttccagattgccctctgtcacttcttcttcaacatctcgggtatccttctgtggtacccggtgccctgcacacgcctgcccatccgcatggccaaggcgctggggaaacgcacggccaagtaccgctggtttgccgtcctctatctccttgtctgcttcctgctgctgccctcactggtgtttggcatctccatggcaggctggcaggtcatggtaggtgtgggcacgcccttcggggccctgctggccttcgtggtgctcatcaatgtcctgcagagtcggagtcccgggcacctgcccaagtggttacagacatgggacttcctgcctcgctggatgcactccctgaagcccctggaccacctcatcacccgcgccaccctatgctgtgccaggcctgagccccgctcacccccgctgccccccagggtcttcctggaggagctaccccctgccacaccctccccccgtcttgcactgcctgctcaccacaatgccacccgcctctaggctgtgggcccagactacagcctggaatggggaaggcctggggtggaaaggcaggggagggagggtgtgtgtaggtatgtgcatgtgcctgtgccaccctgggtgccagtctctccttctgtagctccgcaaagctctgggcttgtgtgagagtgtcggtgtgtgtgcatgtgtgggggtgagtctgcatgtgcacctgtcatgtgtagaagcttgtatttgtgtacaggtgtgccagcccatgcaggtgtacacagacacacctgtgggaggctgtgtgcaggctgcaggatatctgggtatgatttcaggtcctctgcacgtgtacacatgactaggataggcaggagtaagggtgggtctgggtatatgactgtgcagctgtttgtgcatagatgttggtgcctgcgttactgaatttgcacacctccttgccaccttccttcctccaagataccatctcctcatcctaacccaggtcttcggcaccaccacaattaattcccttcccaacacttgcctgatggaaaaaaaacaaaggaattaaaactctcctcaggca

SEQ ID NO: 183767 - DNA, 1912 bp, Homo sapiens
  Payload ID: 16207
  Gene Symbol: SLC34A1
  Gene Name: solute carrier family 34 (type II sodium/phosphate cotransporter), member 1
  Uniprot ID: Q06495
  ENST ID: ENST00000512593
  CDS Start-End: 102-1124
gtcctggaggcttcattgagctgctgagcagaagctgaaacacagaattctaagcgttgctgagacccactgacctgcagacctcatagtgggtgcccaggatgttgtcctacggagagaggctggggtcccctgctgtctccccactcccagtccgtggggggcatgtgatgcgagggacggcctttgcctacgtgcccagccctcaggtcctacacaggatcccggggacctctgcctatgccttccccagcctgggccctgtggcccttgctgagcacacctgcccctgtggggaggtcctggagcgccatgaaccactgcctgccaagctggccctggaggaggagcagaagccagagtccaggctggtccccaagctgcgccaggctggcgccatgctgctcaaggtgccactgatgctcaccttcctctacctcttcgtctgctccctggacatgctcagctcggccttccagctggctggagggaaggtggctggtgacatcttcaaggataacgccatcctgtccaacccggtggccgggctggtggtggggatcctggtgaccgtgctggtgcagagctccagcacctccacatccatcatcgtcagcatggtctcctctggcttgctggaggtgagctctgccatccccatcatcatgggctccaacatcggcacctctgtcaccaacaccatcgtggccctgatgcaggcgggggacaggactgacttccggcgggccttcgcgggggccacggtgcatgactgctttaactggctgtcagtgctggtcctgctgcccctggaggctgccactggctacctgcaccacatcactcgacttgtggtggcctccttcaacatccatggtggccgtgatgctcctgacctgctcaagatcatcacagagcccttcacgaagctcatcatccagctggacgagtctgtgataaccagcattgccactggtgatgagtccctgaggaaccacagtctcatccagatctggtgccacccagactccttacagcaaaatctggaagggagagaaatcacacactttgatcttcgcaaaaagcaagccatggaagacagctctgttcctcactgcccctgagctccctgccggccacctactgcagcttccggcagatctcaaccagcagcctccacgtcctcacttgaagtcatcctcacccaggttcactctggggaggccgcccttgggcctttctctacggctgcagctgacacttgtccagctggtttctcttcctcactctaccaggaaatgctttccttaaacgctttctgcagggcagggtctcatttcctcggcttggagagtagctggtgggtgggacccaagctctcactttcatcccctttctgggacagcgccccgaaggagtgtgactcacacagcagtggatgtgcttggtcttgcaaagtgtgaagtgcgtcctggctcttcctgcccaaagacgggccacagagtctccccgtgctcccttccaacctgttcccattgacgccaactttcaccatgctggacctgaaccagcccgaaacagtctccagggaagctatgcaccagggagaggaggcaagtccaaggcctaccagatggggaaagcagcagcagcggcagttgagtgatcagacacttgagtctcccgggaccctgacaccgtcctgggaatcaccttcttatgtggccacactgtggactgtcaactatacctgcctggattaaacaagcatcttttgaggacttgcaacctgggaggcagggattatcacgtccccattttacagacgaggagcactgagccccagagaagtgcagtggcttgcccaagtccatgtaattgaggtaggatacaaatcctggtagaatcctga

SEQ ID NO: 183768 - DNA, 532 bp, Homo sapiens
  Payload ID: 16207
  Gene Symbol: SLC34A1
  Gene Name: solute carrier family 34 (type II sodium/phosphate cotransporter), member 1
  ENST ID: ENST00000504577
  CDS Start-End: 204-532
atctggaaaatagaacttggaagagacgatgtttcagggccttgcctgctctgtgctggggccaggcagctctgttgaagtccaggctctccaagagaggacaaagtcaaggaggccaggaaagccattgctttgttacccaaagggaacccaccgcgttgctgagacccactgacctgcagacctcatagtgggtgcccaggatgttgtcctacggagagaggctggggtcccctgctgtctccccactcccagtccgtggggggcatgtgatgcgagggacggcctttgcctacgtgcccagccctcaggtcctacacaggatcccggggacctctgcctatgccttccccagcctgggccctgtggcccttgctgagcacacctgcccctgtggggaggtcctggagcgccatgaaccactgcctgccaagctggccctggaggaggagcagaagccagagtccaggctggtccccaagctgcgccaggctggcgccatgctgctcaaggtgccactgatgctcacctt

SEQ ID NO: 183769 - DNA, 4122 bp, Homo sapiens
  Payload ID: 16208
  Gene Symbol: SLC34A2
  Gene Name: solute carrier family 34 (type II sodium/phosphate cotransporter), member 2
  Uniprot ID: O95436
  ENST ID: ENST00000382051
  CDS Start-End: 51-2123
tccacctggccgccgcctccagcccagcacctgcggagggagcgctgaccatggctccctggcctgaattgggagatgcccagcccaaccccgataagtacctcgaaggggccgcaggtcagcagcccactgcccctgataaaagcaaagagaccaacaaaacagataacactgaggcacctgtaaccaagattgaacttctgccgtcctactccacggctacactgatagatgagcccactgaggtggatgacccctggaacctacccactcttcaggactcggggatcaagtggtcagagagagacaccaaagggaagattctctgtttcttccaagggattgggagattgattttacttctcggatttctctactttttcgtgtgctccctggatattcttagtagcgccttccagctggttggaggaaaaatggcaggacagttcttcagcaacagctctattatgtccaaccctttgttggggctggtgatcggggtgctggtgaccgtcttggtgcagagctccagcacctcaacgtccatcgttgtcagcatggtgtcctcttcattgctcactgttcgggctgccatccccattatcatgggggccaacattggaacgtcaatcaccaacactattgttgcgctcatgcaggtgggagatcggagtgagttcagaagagcttttgcaggagccactgtccatgacttcttcaactggctgtccgtgttggtgctcttgcccgtggaggtggccacccattacctcgagatcataacccagcttatagtggagagcttccacttcaagaatggagaagatgccccagatcttctgaaagtcatcactaagcccttcacaaagctcattgtccagctggataaaaaagttatcagccaaattgcaatgaacgatgaaaaagcgaaaaacaagagtcttgtcaagatttggtgcaaaacttttaccaacaagacccagattaacgtcactgttccctcgactgctaactgcacctccccttccctctgttggacggatggcatccaaaactggaccatgaagaatgtgacctacaaggagaacatcgccaaatgccagcatatctttgtgaatttccacctcccggatcttgctgtgggcaccatcttgctcatactctccctgctggtcctctgtggttgcctgatcatgattgtcaagatcctgggctctgtgctcaaggggcaggtcgccactgtcatcaagaagaccatcaacactgatttcccctttccctttgcatggttgactggctacctggccatcctcgtcggggcaggcatgaccttcatcgtacagagcagctctgtgttcacgtcggccttgacccccctgattggaatcggcgtgataaccattgagagggcttatccactcacgctgggctccaacatcggcaccaccaccaccgccatcctggccgccttagccagccctggcaatgcattgaggagttcactccagatcgccctgtgccactttttcttcaacatctccggcatcttgctgtggtacccgatcccgttcactcgcctgcccatccgcatggccaaggggctgggcaacatctctgccaagtatcgctggttcgccgtcttctacctgatcatcttcttcttcctgatcccgctgacggtgtttggcctctcgctggccggctggcgggtgctggttggtgtcggggttcccgtcgtcttcatcatcatcctggtactgtgcctccgactcctgcagtctcgctgcccacgcgtcctgccgaagaaactccagaactggaacttcctgccgctgtggatgcgctcgctgaagccctgggatgccgtcgtctccaagttcaccggctgcttccagatgcgctgctgctgctgctgccgcgtgtgctgccgcgcgtgctgcttgctgtgtgactgccccaagtgctgccgctgcagcaagtgctgcgaggacttggaggaggcgcaggaggggcaggatgtccctgtcaaggctcctgagacctttgataacataaccattagcagagaggctcagggtgaggtccctgcctcggactcaaagaccgaatgcacggccttgtaggggacgccccagattgtcagggatggggggatggtccttgagttttgcatgctctcctccctcccacttctgcaccctttcaccacctcgaggagatttgctccccattagcgaatgaaattgatgcagtcctacctaactcgattccctttggcttggtggtaggcctgcagggcacttttattccaacccctggtcactcagtaatcttttactccaggaaggcacaggatggtacctaaagagaattagagaatgaacctggcgggacggatgtctaatcctgcgcctagctgggttggtcagtagaacctattttcagactcaaaaaccatcttcagaaagaaaaggcccagggaaggaatgtatgagaggctctcccagatgaggaagtgtactctctatgactatcaagctcaggcctctccctttttttaaaccaaagtctggcaaccaagagcagcagctccatggcctccttgccccagatcagcctgggtcaggggacatagtgtcattgtttggaaactgcagaccacaaggtgtgggtctatcccacttcctagtgctccccacattccccatcagggcttcctcacgtggacaggtgtgctagtccaggcagttcacttgcagtttccttgtcctcatgcttcggggatgggagccacgcctgaactagagttcaggctggatacatgtgctcacctgctgctcttgtcttcctaagagacagagagtggggcagatggaggagaagaaagtgaggaatgagtagcatagcattctgccaaaagggccccagattcttaatttagcaaactaagaagcccaattcaaaagcattgtggctaaagtctaacgctcctctcttggtcagataacaaaagccctccctgttggatcttttgaaataaaacgtgcaagttatccaggctcgtagcctgcatgctgccaccttgaatcccagggagtatctgcacctggaatagctctccacccctctctgcctccttactttctgtgcaagatgacttcctgggttaacttccttctttccatccacccacccactggaatctctttccaaacatttttccattttcccacagatgggctttgattagctgtcctctctccatgcctgcaaagctccagatttttggggaaagctgtacccaactggactgcccagtgaactgggatcattaagtacagtcgagcacacgtgtgtgcatgggtcaaaggggtgtgttccttctcatcctagatgccttctctgtgccttccacagcctcctgcctgattacaccactgcccccgccccaccctcagccatcccaattcttcctggccagtgcgctccagccttatctaggaaaggaggagtgggtgtagccgtgcagcaagattggggcctcccccatcccagcttctccaccatcccagcaagtcaggatatcagacagtcctcccctgaccctcccccttgtagatatcaattcccaaacagagccaaatactctatatctatagtcacagccctgtacagcatttttcataagttatatagtaaatggtctgcatgatttgtgcttctagtgctctcatttggaaatgaggcaggcttcttctatgaaatgtaaagaaagaaaccactttgtatattttgtaataccacctctgtggccatgcctgccccgcccactctgtatatatgtaagttaaacccgggcaggggctgtggccgtctttgtactctggtgatttttaaaaattgaatctttgtacttgcattgattgtataataattttgagaccaggtctcgctgtgttgctcaggctggtctcaaactcctgagatcaagcaatccgcccacctcagcctcccaaagtgctgagatcacaggcgtgagccaccaccaggcctgattgtaatttttttttttttttttttactggttatgggaagggagaaataaaatcatcaaacccaaaa

SEQ ID NO: 183770 - DNA, 2174 bp, Homo sapiens
  Payload ID: 16208
  Gene Symbol: SLC34A2
  Gene Name: solute carrier family 34 (type II sodium/phosphate cotransporter), member 2
  Uniprot ID: O95436
  ENST ID: ENST00000503434
  CDS Start-End: 105-2174
agtttgtttctattagggcccgtggccatcagcgaagggtccgtccttcagccgtcttggggagcaaagcccgcaatttatgttttccaagccacaaatggaccatggctccctggcctgaattgggagatgcccagcccaaccccgataagtacctcgaaggggccgcaggtcagcagcccactgcccctgataaaagcaaagagaccaacaaaaataacactgaggcacctgtaaccaagattgaacttctgccgtcctactccacggctacactgatagatgagcccactgaggtggatgacccctggaacctacccactcttcaggactcggggatcaagtggtcagagagagacaccaaagggaagattctctgtttcttccaagggattgggagattgattttacttctcggatttctctactttttcgtgtgctccctggatattcttagtagcgccttccagctggttggaggaaaaatggcaggacagttcttcagcaacagctctattatgtccaaccctttgttggggctggtgatcggggtgctggtgaccgtcttggtgcagagctccagcacctcaacgtccatcgttgtcagcatggtgtcctcttcattgctcactgttcgggctgccatccccattatcatgggggccaacattggaacgtcaatcaccaacactattgttgcgctcatgcaggtgggagatcggagtgagttcagaagagcttttgcaggagccactgtccatgacttcttcaactggctgtccgtgttggtgctcttgcccgtggaggtggccacccattacctcgagatcataacccagcttatagtggagagcttccacttcaagaatggagaagatgccccagatcttctgaaagtcatcactaagcccttcacaaagctcattgtccagctggataaaaaagttatcagccaaattgcaatgaacgatgaaaaagcgaaaaacaagagtcttgtcaagatttggtgcaaaacttttaccaacaagacccagattaacgtcactgttccctcgactgctaactgcacctccccttccctctgttggacggatggcatccaaaactggaccatgaagaatgtgacctacaaggagaacatcgccaaatgccagcatatctttgtgaatttccacctcccggatcttgctgtgggcaccatcttgctcatactctccctgctggtcctctgtggttgcctgatcatgattgtcaagatcctgggctctgtgctcaaggggcaggtcgccactgtcatcaagaagaccatcaacactgatttcccctttccctttgcatggttgactggctacctggccatcctcgtcggggcaggcatgaccttcatcgtacagagcagctctgtgttcacgtcggccttgacccccctgattggaatcggcgtgataaccattgagagggcttatccactcacgctgggctccaacatcggcaccaccaccaccgccatcctggccgccttagccagccctggcaatgcattgaggagttcactccagatcgccctgtgccactttttcttcaacatctccggcatcttgctgtggtacccgatcccgttcactcgcctgcccatccgcatggccaaggggctgggcaacatctctgccaagtatcgctggttcgccgtcttctacctgatcatcttcttcttcctgatcccgctgacggtgtttggcctctcgctggccggctggcgggtgctggttggtgtcggggttcccgtcgtcttcatcatcatcctggtactgtgcctccgactcctgcagtctcgctgcccacgcgtcctgccgaagaaactccagaactggaacttcctgccgctgtggatgcgctcgctgaagccctgggatgccgtcgtctccaagttcaccggctgcttccagatgcgctgctgctgctgctgccgcgtgtgctgccgcgcgtgctgcttgctgtgtgactgccccaagtgctgccgctgcagcaagtgctgcgaggacttggaggaggcgcaggaggggcaggatgtccctgtcaaggctcctgagacctttgataacataaccattagcagagaggctcagggtgaggtccctgcctcggactcaaagaccgaatgcacggccttgtag

SEQ ID NO: 183771 - DNA, 549 bp, Homo sapiens
  Payload ID: 16208
  Gene Symbol: SLC34A2
  Gene Name: solute carrier family 34 (type II sodium/phosphate cotransporter), member 2
  ENST ID: ENST00000513204
  CDS Start-End: 61-549
attgcggacctagagcccagactcccagggcagaaagcgccccacagactgataaagaccatggctccctggcctgaattgggagatgcccagcccaaccccgataagtacctcgaaggggccgcaggtcagcagcccactgcccctgataaaagcaaagagaccaacaaaaataacactgaggcacctgtaaccaagattgaacttctgccgtcctactccacggctacactgatagatgagcccactgaggtggatgacccctggaacctacccactcttcaggactcggggatcaagtggtcagagagagacaccaaagggaagattctctgtttcttccaagggattgggagattgattttacttctcggatttctctactttttcgtgtgctccctggatattcttagtagcgccttccagctggttggaggaaaaatggcaggacagttcttcagcaacagctctattatgtccaaccctttgttggggctggtgatcggggtgctggtgaccgtcttggtgcagagctccagcacctcaacg

SEQ ID NO: 183772 - DNA, 582 bp, Homo sapiens
  Payload ID: 16208
  Gene Symbol: SLC34A2
  Gene Name: solute carrier family 34 (type II sodium/phosphate cotransporter), member 2
  ENST ID: ENST00000507530
  CDS Start-End: 100-582
gtttctattagggcccgtggccatcagcgaagggtccgtccttcagccgtcttggggagcaaagcccgcaatttatgttttccaagccacaaatggaccatggctccctggcctgaattgggagatgcccagcccaaccccgataagtacctcgaaggggccgcaggtcagcagcccactgcccctgataaaagcaaagagaccaacaaaacagataacactgaggcacctgtaaccaagattgaacttctgccgtcctactccacggctacactgatagatgagcccactgaggtggatgacccctggaacctacccactcttcaggactcggggatcaagtggtcagagagagacaccaaagggaagattctctgtttcttccaagggattgggagattgattttacttctcggatttctctactttttcgtgtgctccctggatattcttagtagcgccttccagctggttggaggaaaaatggcaggacagttcttcagcaacagctctattatgtccaaccctttgttggggctggtgatcggggtgctggtgaccgtcttggtgcagagctccagc

SEQ ID NO: 183773 - DNA, 2162 bp, Homo sapiens
  Payload ID: 16208
  Gene Symbol: SLC34A2
  Gene Name: solute carrier family 34 (type II sodium/phosphate cotransporter), member 2
  Uniprot ID: O95436
  ENST ID: ENST00000504570
  CDS Start-End: 73-2142
atatatacccggggcgctgcgctccacctggccgccgcctccagcccagcacctgcggagggagcgctgaccatggctccctggcctgaattgggagatgcccagcccaaccccgataagtacctcgaaggggccgcaggtcagcagcccactgcccctgataaaagcaaagagaccaacaaaaataacactgaggcacctgtaaccaagattgaacttctgccgtcctactccacggctacactgatagatgagcccactgaggtggatgacccctggaacctacccactcttcaggactcggggatcaagtggtcagagagagacaccaaagggaagattctctgtttcttccaagggattgggagattgattttacttctcggatttctctactttttcgtgtgctccctggatattcttagtagcgccttccagctggttggaggaaaaatggcaggacagttcttcagcaacagctctattatgtccaaccctttgttggggctggtgatcggggtgctggtgaccgtcttggtgcagagctccagcacctcaacgtccatcgttgtcagcatggtgtcctcttcattgctcactgttcgggctgccatccccattatcatgggggccaacattggaacgtcaatcaccaacactattgttgcgctcatgcaggtgggagatcggagtgagttcagaagagcttttgcaggagccactgtccatgacttcttcaactggctgtccgtgttggtgctcttgcccgtggaggtggccacccattacctcgagatcataacccagcttatagtggagagcttccacttcaagaatggagaagatgccccagatcttctgaaagtcatcactaagcccttcacaaagctcattgtccagctggataaaaaagttatcagccaaattgcaatgaacgatgaaaaagcgaaaaacaagagtcttgtcaagatttggtgcaaaacttttaccaacaagacccagattaacgtcactgttccctcgactgctaactgcacctccccttccctctgttggacggatggcatccaaaactggaccatgaagaatgtgacctacaaggagaacatcgccaaatgccagcatatctttgtgaatttccacctcccggatcttgctgtgggcaccatcttgctcatactctccctgctggtcctctgtggttgcctgatcatgattgtcaagatcctgggctctgtgctcaaggggcaggtcgccactgtcatcaagaagaccatcaacactgatttcccctttccctttgcatggttgactggctacctggccatcctcgtcggggcaggcatgaccttcatcgtacagagcagctctgtgttcacgtcggccttgacccccctgattggaatcggcgtgataaccattgagagggcttatccactcacgctgggctccaacatcggcaccaccaccaccgccatcctggccgccttagccagccctggcaatgcattgaggagttcactccagatcgccctgtgccactttttcttcaacatctccggcatcttgctgtggtacccgatcccgttcactcgcctgcccatccgcatggccaaggggctgggcaacatctctgccaagtatcgctggttcgccgtcttctacctgatcatcttcttcttcctgatcccgctgacggtgtttggcctctcgctggccggctggcgggtgctggttggtgtcggggttcccgtcgtcttcatcatcatcctggtactgtgcctccgactcctgcagtctcgctgcccacgcgtcctgccgaagaaactccagaactggaacttcctgccgctgtggatgcgctcgctgaagccctgggatgccgtcgtctccaagttcaccggctgcttccagatgcgctgctgctgctgctgccgcgtgtgctgccgcgcgtgctgcttgctgtgtgactgccccaagtgctgccgctgcagcaagtgctgcgaggacttggaggaggcgcaggaggggcaggatgtccctgtcaaggctcctgagacctttgataacataaccattagcagagaggctcagggtgaggtccctgcctcggactcaaagaccgaatgcacggccttgtaggggacgccccagattgtcag

SEQ ID NO: 183774 - DNA, 2124 bp, Homo sapiens
  Payload ID: 16209
  Gene Symbol: SLC34A3
  Gene Name: solute carrier family 34 (type II sodium/phosphate cotransporter), member 3
  Uniprot ID: Q8N130
  ENST ID: ENST00000361134
  CDS Start-End: 187-1986
acacaggtaggagctcctaggaccaggctgaggcccagggacagtgaggccgaggctgggtggcctccaggccaagggcttgggccccatcctgagtctccaggacccaagggcaagagacgccaggcttgggcagcaggagggaggatctagacctgggcctgggtctgtccctgcccgaaatccatgccgagttcccttcccggcagccaggtcccccaccccactctggacgcggttgacctagtggaaaagactctgaggaatgaagggacctccagttctgctccagtcttggaggaaggggacacagacccctggaccctccctcagctgaaggacacaagccagccctggaaagagctccgcgtggccggcaggctgcgccgcgtggccggcagcgtcctcaaggcctgcgggctcctcggcagcctgtacttcttcatctgctctctggacgtcctcagctccgccttccagctgctgggcagcaaagtggccggagacatcttcaaggacaacgtggtgctgtccaaccctgtggctggactggtcattggcgtgctggtcacagccctggtgcagagttccagcacgtcctcctccatcgtggtcagcatggtggctgctaagctgctgactgtccgggtgtctgtgcccatcatcatgggtgtcaacgtaggcacatccatcaccagcaccctggtctcaatggcgcagtcaggggaccgggatgaatttcagagggctttcagcggctcggcggtgcacgggatcttcaactggctcacagtgctggtcctgctgccactggagagcgccacggccctgctggagaggctaagtgagctagccctgggtgccgccagcctgacacccagggcgcaggcgcccgacatcctcaaggtgctgacgaagccgctcacacacctcatcgtgcagttggactccgacatgatcatgagcagtgccacaggcaacgccactaacagcagtctcattaagcactggtgcggcaccacggggcagccgacccaggagaacagcagctgtggcgccttcggcccgtgcacagagaagaacagcacagccccggcggacaggctgccctgccgccacctgtttgcgggcacggagctcacggacctggccgtgggctgcatcctgctggccggctccctgctggtgctctgcggctgcctggtcctcatagtcaagctgctcaactctgtgctgcgcggccgcgtggcccaggtcgtgaggacagtcatcaatgcggacttccccttcccgctgggctggctcggcggctacctggccgtcctcgcgggcgccggcctgaccttcgcactgcagagcagcagcgtcttcacggcggccgtcgtgcccctcatgggggtcggggtgatcagtctggaccgggcgtaccccctcttactgggctccaacatcggcaccactaccacagccctgctggctgccctggccagccccgcagacaggatgctcagcgccctgcaggtcgccctcatccacttcttcttcaacctggccggcatcctgctgtggtacctggtgcctgcactgcggctgcccatcccgctggccaggcacttcggggtggtgaccgcccgttaccgctgggtggctggggtctacctgctgctcggattcctgctgctgcccctggcggccttcgggctctccctggcagggggcatggagctggccgctgtcgggggtcccctggtggggctggtgctcctcgtcatcctggttactgtcctgcagcggcgccggccggcctggctgcctgtccgcctgcgctcctgggcctggctccccgtctggctccattctctggagccctgggaccgcctggtgacccgctgctgcccctgcaacgtctgcagccccccgaaggccaccaccaaagaggcctactgctacgagaaccctgagatcttggcctcccagcagttgtgacgggcagttgctgagcagaccgccccaccctccccggctgggagggctctggagggccctggagggggggtccccgcggcagctgacctccggtcacctgcttccccttctgtgcaaataaaccaggctgttatctgg

SEQ ID NO: 183775 - DNA, 2162 bp, Homo sapiens
  Payload ID: 16209
  Gene Symbol: SLC34A3
  Gene Name: solute carrier family 34 (type II sodium/phosphate cotransporter), member 3
  Uniprot ID: Q8N130
  ENST ID: ENST00000538474
  CDS Start-End: 225-2024
atggagacaaggcctaggggccttggggccaggagggtacccccgtgagggcctgggctcctgggtaaacattaatgggctcagtacccagcaggtcatgtgcgcgatcaggggatctttgacctgcaactgctcccgccccgtgtctcctccctgcaggtgccccctcaccacccacacagcagatctagacctgggcctgggtctgtccctgcccgaaatccatgccgagttcccttcccggcagccaggtcccccaccccactctggacgcggttgacctagtggaaaagactctgaggaatgaagggacctccagttctgctccagtcttggaggaaggggacacagacccctggaccctccctcagctgaaggacacaagccagccctggaaagagctccgcgtggccggcaggctgcgccgcgtggccggcagcgtcctcaaggcctgcgggctcctcggcagcctgtacttcttcatctgctctctggacgtcctcagctccgccttccagctgctgggcagcaaagtggccggagacatcttcaaggacaacgtggtgctgtccaaccctgtggctggactggtcattggcgtgctggtcacagccctggtgcagagttccagcacgtcctcctccatcgtggtcagcatggtggctgctaagctgctgactgtccgggtgtctgtgcccatcatcatgggtgtcaacgtaggcacatccatcaccagcaccctggtctcaatggcgcagtcaggggaccgggatgaatttcagagggctttcagcggctcggcggtgcacgggatcttcaactggctcacagtgctggtcctgctgccactggagagcgccacggccctgctggagaggctaagtgagctagccctgggtgccgccagcctgacacccagggcgcaggcgcccgacatcctcaaggtgctgacgaagccgctcacacacctcatcgtgcagttggactccgacatgatcatgagcagtgccacaggcaacgccactaacagcagtctcattaagcactggtgcggcaccacggggcagccgacccaggagaacagcagctgtggcgccttcggcccgtgcacagagaagaacagcacagccccggcggacaggctgccctgccgccacctgtttgcgggcacggagctcacggacctggccgtgggctgcatcctgctggccggctccctgctggtgctctgcggctgcctggtcctcatagtcaagctgctcaactctgtgctgcgcggccgcgtggcccaggtcgtgaggacagtcatcaatgcggacttccccttcccgctgggctggctcggcggctacctggccgtcctcgcgggcgccggcctgaccttcgcactgcagagcagcagcgtcttcacggcggccgtcgtgcccctcatgggggtcggggtgatcagtctggaccgggcgtaccccctcttactgggctccaacatcggcaccactaccacagccctgctggctgccctggccagccccgcagacaggatgctcagcgccctgcaggtcgccctcatccacttcttcttcaacctggccggcatcctgctgtggtacctggtgcctgcactgcggctgcccatcccgctggccaggcacttcggggtggtgaccgcccgttaccgctgggtggctggggtctacctgctgctcggattcctgctgctgcccctggcggccttcgggctctccctggcagggggcatggagctggccgctgtcgggggtcccctggtggggctggtgctcctcgtcatcctggttactgtcctgcagcggcgccggccggcctggctgcctgtccgcctgcgctcctgggcctggctccccgtctggctccattctctggagccctgggaccgcctggtgacccgctgctgcccctgcaacgtctgcagccccccgaaggccaccaccaaagaggcctactgctacgagaaccctgagatcttggcctcccagcagttgtgacgggcagttgctgagcagaccgccccaccctccccggctgggagggctctggagggccctggagggggggtccccgcggcagctgacctccggtcacctgcttccccttctgtgcaaataaaccaggctgttatctgg

SEQ ID NO: 183776 - DNA, 1898 bp, Homo sapiens
  Payload ID: 16210
  Gene Symbol: SLC35B2
  Gene Name: solute carrier family 35 (adenosine 3'-phospho 5'-phosphosulfate transporter), member B2
  ENST ID: ENST00000393810
  CDS Start-End: 145-429
ggggagggaggcgggaagagcgcggcacttccgctggccgctggctcgctggccgctcctggaggcggcggcgggagcgcagggggcgcgcggcccggggactcgcattccccggttccccctccaccccacgcggcctggaccatggacgccagatggtgggcagtggtggtgctggctgcgttcccctccctaggggcaggtggggagactcccgaagcccctccggagtcatggacccagctatggttcttccgatttgtggtgaatgctgctggctatgccagctttatggtacctggctacctcctggtgcagtacttcaggcggaagaactacctggagaccggtgtcttatctgacttggggtgtgctgcaggaaagagtgatgacccgcagctatggggccacagccacatcaccgggtgagcgctttacggactcgcagttcctggtgctaatgaaccgagtgctggcactgattgtggctggcctctcctgtgttctctgcaagcagccccggcatggggcacccatgtaccggtactcctttgccagcctgtccaatgtgcttagcagctggtgccaatacgaagctcttaagttcgtcagcttccccacccaggtgctggccaaggcctctaaggtgatccctgtcatgctgatgggaaagcttgtgtctcggcgcagctacgaacactgggagtacctgacagccaccctcatctccattggggtcagcatgtttctgctatccagcggaccagagccccgcagctccccagccaccacactctcaggcctcatcttactggcaggttatattgcttttgacagcttcacctcaaactggcaggatgccctgtttgcctataagatgtcatcggtgcagatgatgtttggggtcaatttcttctcctgcctcttcacagtgggctcactgctagaacagggggccctactggagggaacccgcttcatggggcgacacagtgagtttgctgcccatgccctgctactctccatctgctccgcatgtggccagctcttcatcttttacaccattgggcagtttggggctgccgtcttcaccatcatcatgaccctccgccaggcctttgccatccttctttcctgccttctctatggccacactgtcactgtggtgggagggctgggggtggctgtggtctttgctgccctcctgctcagagtctacgcgcggggccgtctaaagcaacggggaaagaaggctgtgcctgttgagtctcctgtgcagaaggtttgagggtggaaagggcctgaggggtgaagtgaaataggaccctcccaccatccccttctgctgtaacctctgagggagctggctgaaagggcaaaatgcaggtgttttctcagtatcacagaccagctctgcagcaggggattggggagcccaggaggcagccttcccttttgccttaagtcacccatcttccagtaagcagtttattctgagccccgggggtagacagtcctcagtgaggggttttggggagtttggggtcaagagagcataggtaggttccagttactcttcccacaagttcccttaagtcttgccctagctgtgctctgccaccttccagactcactcccctctgcaaatacctgcatttcttaccctggtgagaaaagcacaagcggtgtaggctccaatgctgctttcccaggagggtgaagatggtgctgtgctgaggaaaggggatgcagagccctgcccagcaccaccacctcctatgctcctggatccctaggctctgttccatgagcctgttgcaggttttggtactttagaaatgtaactttttgctcttataattttattttattaaattaaattactgcagtggacttgg

SEQ ID NO: 183777 - DNA, 2043 bp, Homo sapiens
  Payload ID: 16210
  Gene Symbol: SLC35B2
  Gene Name: solute carrier family 35 (adenosine 3'-phospho 5'-phosphosulfate transporter), member B2
  Uniprot ID: Q8TB61
  ENST ID: ENST00000393812
  CDS Start-End: 145-1443
ggggagggaggcgggaagagcgcggcacttccgctggccgctggctcgctggccgctcctggaggcggcggcgggagcgcagggggcgcgcggcccggggactcgcattccccggttccccctccaccccacgcggcctggaccatggacgccagatggtgggcagtggtggtgctggctgcgttcccctccctaggggcaggtggggagactcccgaagcccctccggagtcatggacccagctatggttcttccgatttgtggtgaatgctgctggctatgccagctttatggtacctggctacctcctggtgcagtacttcaggcggaagaactacctggagaccggtaggggcctctgctttcccctggtgaaagcttgtgtgtttggcaatgagcccaaggcctctgatgaggttcccctggcgccccgaacagaggcggcagagaccaccccgatgtggcaggccctgaagctgctcttctgtgccacagggctccaggtgtcttatctgacttggggtgtgctgcaggaaagagtgatgacccgcagctatggggccacagccacatcaccgggtgagcgctttacggactcgcagttcctggtgctaatgaaccgagtgctggcactgattgtggctggcctctcctgtgttctctgcaagcagccccggcatggggcacccatgtaccggtactcctttgccagcctgtccaatgtgcttagcagctggtgccaatacgaagctcttaagttcgtcagcttccccacccaggtgctggccaaggcctctaaggtgatccctgtcatgctgatgggaaagcttgtgtctcggcgcagctacgaacactgggagtacctgacagccaccctcatctccattggggtcagcatgtttctgctatccagcggaccagagccccgcagctccccagccaccacactctcaggcctcatcttactggcaggttatattgcttttgacagcttcacctcaaactggcaggatgccctgtttgcctataagatgtcatcggtgcagatgatgtttggggtcaatttcttctcctgcctcttcacagtgggctcactgctagaacagggggccctactggagggaacccgcttcatggggcgacacagtgagtttgctgcccatgccctgctactctccatctgctccgcatgtggccagctcttcatcttttacaccattgggcagtttggggctgccgtcttcaccatcatcatgaccctccgccaggcctttgccatccttctttcctgccttctctatggccacactgtcactgtggtgggagggctgggggtggctgtggtctttgctgccctcctgctcagagtctacgcgcggggccgtctaaagcaacggggaaagaaggctgtgcctgttgagtctcctgtgcagaaggtttgagggtggaaagggcctgaggggtgaagtgaaataggaccctcccaccatccccttctgctgtaacctctgagggagctggctgaaagggcaaaatgcaggtgttttctcagtatcacagaccagctctgcagcaggggattggggagcccaggaggcagccttcccttttgccttaagtcacccatcttccagtaagcagtttattctgagccccgggggtagacagtcctcagtgaggggttttggggagtttggggtcaagagagcataggtaggttccagttactcttcccacaagttcccttaagtcttgccctagctgtgctctgccaccttccagactcactcccctctgcaaatacctgcatttcttaccctggtgagaaaagcacaagcggtgtaggctccaatgctgctttcccaggagggtgaagatggtgctgtgctgaggaaaggggatgcagagccctgcccagcaccaccacctcctatgctcctggatccctaggctctgttccatgagcctgttgcaggttttggtactttagaaatgtaactttttgctcttataattttattttattaaattaaattactgca

SEQ ID NO: 183778 - DNA, 1715 bp, Homo sapiens
  Payload ID: 16210
  Gene Symbol: SLC35B2
  Gene Name: solute carrier family 35 (adenosine 3'-phospho 5'-phosphosulfate transporter), member B2
  Uniprot ID: Q8TB61
  ENST ID: ENST00000537814
  CDS Start-End: 212-1111
ggggcggagggggccgcggggagggaggcgggaagagcgcggcacttccgctggccgctggctcgctggccgctcctggaggcggcggcgggagcgcagggggcgcgcggcccggggactcgcattccccggttccccctccaccccacgcggcctggaccatggacgccaggtgtcttatctgacttggggtgtgctgcaggaaagagtgatgacccgcagctatggggccacagccacatcaccgggtgagcgctttacggactcgcagttcctggtgctaatgaaccgagtgctggcactgattgtggctggcctctcctgtgttctctgcaagcagccccggcatggggcacccatgtaccggtactcctttgccagcctgtccaatgtgcttagcagctggtgccaatacgaagctcttaagttcgtcagcttccccacccaggtgctggccaaggcctctaaggtgatccctgtcatgctgatgggaaagcttgtgtctcggcgcagctacgaacactgggagtacctgacagccaccctcatctccattggggtcagcatgtttctgctatccagcggaccagagccccgcagctccccagccaccacactctcaggcctcatcttactggcaggttatattgcttttgacagcttcacctcaaactggcaggatgccctgtttgcctataagatgtcatcggtgcagatgatgtttggggtcaatttcttctcctgcctcttcacagtgggctcactgctagaacagggggccctactggagggaacccgcttcatggggcgacacagtgagtttgctgcccatgccctgctactctccatctgctccgcatgtggccagctcttcatcttttacaccattgggcagtttggggctgccgtcttcaccatcatcatgaccctccgccaggcctttgccatccttctttcctgccttctctatggccacactgtcactgtggtgggagggctgggggtggctgtggtctttgctgccctcctgctcagagtctacgcgcggggccgtctaaagcaacggggaaagaaggctgtgcctgttgagtctcctgtgcagaaggtttgagggtggaaagggcctgaggggtgaagtgaaataggaccctcccaccatccccttctgctgtaacctctgagggagctggctgaaagggcaaaatgcaggtgttttctcagtatcacagaccagctctgcagcaggggattggggagcccaggaggcagccttcccttttgccttaagtcacccatcttccagtaagcagtttattctgagccccgggggtagacagtcctcagtgaggggttttggggagtttggggtcaagagagcataggtaggttccagttactcttcccacaagttcccttaagtcttgccctagctgtgctctgccaccttccagactcactcccctctgcaaatacctgcatttcttaccctggtgagaaaagcacaagcggtgtaggctccaatgctgctttcccaggagggtgaagatggtgctgtgctgaggaaaggggatgcagagccctgcccagcaccaccacctcctatgctcctggatccctaggctctgttccatgagcctgttgcaggttttggtactttagaaatgtaactttttgctcttataattttattttattaaattaaattactgcagtgg

SEQ ID NO: 183779 - DNA, 1909 bp, Homo sapiens
  Payload ID: 16210
  Gene Symbol: SLC35B2
  Gene Name: solute carrier family 35 (adenosine 3'-phospho 5'-phosphosulfate transporter), member B2
  Uniprot ID: Q8TB61
  ENST ID: ENST00000538577
  CDS Start-End: 286-1305
ggggcggagggggccgcggggagggaggcgggaagagcgcggcacttccgctggccgctggctcgctggccgctcctggaggcggcggcgggagcgcagggggcgcgcggcccggggactcgcattccccggttccccctccaccccacgcggcctggaccatggacgccagatggtgggcagtggtggtgctggctgcgttcccctccctaggggcaggtggggagactcccgaagcccctccggagtcatggacccagctatggttcttccgatttgtggtgaatgctgctggctatgccagctttatggtacctggctacctcctggtgcagtacttcaggcggaagaactacctggagaccggtgtcttatctgacttggggtgtgctgcaggaaagagtgatgacccgcagctatggggccacagccacatcaccgggtgagcgctttacggactcgcagttcctggtgctaatgaaccgagtgctggcactgattgtggctggcctctcctgtgttctctgcaagcagccccggcatggggcacccatgtaccggtactcctttgccagcctgtccaatgtgcttagcagctggtgccaatacgaagctcttaagttcgtcagcttccccacccaggtgctggccaaggcctctaaggtgatccctgtcatgctgatgggaaagcttgtgtctcggcgcagctacgaacactgggagtacctgacagccaccctcatctccattggggtcagcatgtttctgctatccagcggaccagagccccgcagctccccagccaccacactctcaggcctcatcttactggcaggttatattgcttttgacagcttcacctcaaactggcaggatgccctgtttgcctataagatgtcatcggtgcagatgatgtttggggtcaatttcttctcctgcctcttcacagtgggctcactgctagaacagggggccctactggagggaacccgcttcatggggcgacacagtgagtttgctgcccatgccctgctactctccatctgctccgcatgtggccagctcttcatcttttacaccattgggcagtttggggctgccgtcttcaccatcatcatgaccctccgccaggcctttgccatccttctttcctgccttctctatggccacactgtcactgtggtgggagggctgggggtggctgtggtctttgctgccctcctgctcagagtctacgcgcggggccgtctaaagcaacggggaaagaaggctgtgcctgttgagtctcctgtgcagaaggtttgagggtggaaagggcctgaggggtgaagtgaaataggaccctcccaccatccccttctgctgtaacctctgagggagctggctgaaagggcaaaatgcaggtgttttctcagtatcacagaccagctctgcagcaggggattggggagcccaggaggcagccttcccttttgccttaagtcacccatcttccagtaagcagtttattctgagccccgggggtagacagtcctcagtgaggggttttggggagtttggggtcaagagagcataggtaggttccagttactcttcccacaagttcccttaagtcttgccctagctgtgctctgccaccttccagactcactcccctctgcaaatacctgcatttcttaccctggtgagaaaagcacaagcggtgtaggctccaatgctgctttcccaggagggtgaagatggtgctgtgctgaggaaaggggatgcagagccctgcccagcaccaccacctcctatgctcctggatccctaggctctgttccatgagcctgttgcaggttttggtactttagaaatgtaactttttgctcttataattttattttattaaattaaattactgcagtgg

SEQ ID NO: 183780 - DNA, 2014 bp, Homo sapiens
  Payload ID: 16210
  Gene Symbol: SLC35B2
  Gene Name: solute carrier family 35 (adenosine 3'-phospho 5'-phosphosulfate transporter), member B2
  Uniprot ID: Q8TB61
  ENST ID: ENST00000615337
  CDS Start-End: 259-1410
agaattactacccagccaacaaagcaaggagacaccttcatcctgtcagaaaacggggaaactaacacagaggagcggcttgggatgcagagcctcaatgtcctgtccacaagatggcaatgatggtgggcagtggtggtgctggctgcgttcccctccctaggggcaggtggggagactcccgaagcccctccggagtcatggacccagctatggttcttccgatttgtggtgaatgctgctggctatgccagctttatggtacctggctacctcctggtgcagtacttcaggcggaagaactacctggagaccggtaggggcctctgctttcccctggtgaaagcttgtgtgtttggcaatgagcccaaggcctctgatgaggttcccctggcgccccgaacagaggcggcagagaccaccccgatgtggcaggccctgaagctgctcttctgtgccacagggctccaggtgtcttatctgacttggggtgtgctgcaggaaagagtgatgacccgcagctatggggccacagccacatcaccgggtgagcgctttacggactcgcagttcctggtgctaatgaaccgagtgctggcactgattgtggctggcctctcctgtgttctctgcaagcagccccggcatggggcacccatgtaccggtactcctttgccagcctgtccaatgtgcttagcagctggtgccaatacgaagctcttaagttcgtcagcttccccacccaggtgctggccaaggcctctaaggtgatccctgtcatgctgatgggaaagcttgtgtctcggcgcagctacgaacactgggagtacctgacagccaccctcatctccattggggtcagcatgtttctgctatccagcggaccagagccccgcagctccccagccaccacactctcaggcctcatcttactggcaggttatattgcttttgacagcttcacctcaaactggcaggatgccctgtttgcctataagatgtcatcggtgcagatgatgtttggggtcaatttcttctcctgcctcttcacagtgggctcactgctagaacagggggccctactggagggaacccgcttcatggggcgacacagtgagtttgctgcccatgccctgctactctccatctgctccgcatgtggccagctcttcatcttttacaccattgggcagtttggggctgccgtcttcaccatcatcatgaccctccgccaggcctttgccatccttctttcctgccttctctatggccacactgtcactgtggtgggagggctgggggtggctgtggtctttgctgccctcctgctcagagtctacgcgcggggccgtctaaagcaacggggaaagaaggctgtgcctgttgagtctcctgtgcagaaggtttgagggtggaaagggcctgaggggtgaagtgaaataggaccctcccaccatccccttctgctgtaacctctgagggagctggctgaaagggcaaaatgcaggtgttttctcagtatcacagaccagctctgcagcaggggattggggagcccaggaggcagccttcccttttgccttaagtcacccatcttccagtaagcagtttattctgagccccgggggtagacagtcctcagtgaggggttttggggagtttggggtcaagagagcataggtaggttccagttactcttcccacaagttcccttaagtcttgccctagctgtgctctgccaccttccagactcactcccctctgcaaatacctgcatttcttaccctggtgagaaaagcacaagcggtgtaggctccaatgctgctttcccaggagggtgaagatggtgctgtgctgaggaaaggggatgcagagccctgcccagcaccaccacctcctatgctcctggatccctaggctctgttccatgagcctgttgcaggttttggtactttagaaatgtaactttttgctcttataattttattttattaaattaaattactgcagtgg

SEQ ID NO: 183781 - DNA, 2063 bp, Homo sapiens
  Payload ID: 16210
  Gene Symbol: SLC35B2
  Gene Name: solute carrier family 35 (adenosine 3'-phospho 5'-phosphosulfate transporter), member B2
  Uniprot ID: Q8TB61
  ENST ID: ENST00000619636
  CDS Start-End: 308-1459
acgtgactgccgcgcctcagcacgggggccgggtggggtcccggctgctcggccgtcggccagcatatcgctgcccggagccagcggggatgggagctgcggcttggttttgtgctccttggggagcttcgggcggaggggctggggaccctgacgtcccggatcgtggagatggtgggcagtggtggtgctggctgcgttcccctccctaggggcaggtggggagactcccgaagcccctccggagtcatggacccagctatggttcttccgatttgtggtgaatgctgctggctatgccagctttatggtacctggctacctcctggtgcagtacttcaggcggaagaactacctggagaccggtaggggcctctgctttcccctggtgaaagcttgtgtgtttggcaatgagcccaaggcctctgatgaggttcccctggcgccccgaacagaggcggcagagaccaccccgatgtggcaggccctgaagctgctcttctgtgccacagggctccaggtgtcttatctgacttggggtgtgctgcaggaaagagtgatgacccgcagctatggggccacagccacatcaccgggtgagcgctttacggactcgcagttcctggtgctaatgaaccgagtgctggcactgattgtggctggcctctcctgtgttctctgcaagcagccccggcatggggcacccatgtaccggtactcctttgccagcctgtccaatgtgcttagcagctggtgccaatacgaagctcttaagttcgtcagcttccccacccaggtgctggccaaggcctctaaggtgatccctgtcatgctgatgggaaagcttgtgtctcggcgcagctacgaacactgggagtacctgacagccaccctcatctccattggggtcagcatgtttctgctatccagcggaccagagccccgcagctccccagccaccacactctcaggcctcatcttactggcaggttatattgcttttgacagcttcacctcaaactggcaggatgccctgtttgcctataagatgtcatcggtgcagatgatgtttggggtcaatttcttctcctgcctcttcacagtgggctcactgctagaacagggggccctactggagggaacccgcttcatggggcgacacagtgagtttgctgcccatgccctgctactctccatctgctccgcatgtggccagctcttcatcttttacaccattgggcagtttggggctgccgtcttcaccatcatcatgaccctccgccaggcctttgccatccttctttcctgccttctctatggccacactgtcactgtggtgggagggctgggggtggctgtggtctttgctgccctcctgctcagagtctacgcgcggggccgtctaaagcaacggggaaagaaggctgtgcctgttgagtctcctgtgcagaaggtttgagggtggaaagggcctgaggggtgaagtgaaataggaccctcccaccatccccttctgctgtaacctctgagggagctggctgaaagggcaaaatgcaggtgttttctcagtatcacagaccagctctgcagcaggggattggggagcccaggaggcagccttcccttttgccttaagtcacccatcttccagtaagcagtttattctgagccccgggggtagacagtcctcagtgaggggttttggggagtttggggtcaagagagcataggtaggttccagttactcttcccacaagttcccttaagtcttgccctagctgtgctctgccaccttccagactcactcccctctgcaaatacctgcatttcttaccctggtgagaaaagcacaagcggtgtaggctccaatgctgctttcccaggagggtgaagatggtgctgtgctgaggaaaggggatgcagagccctgcccagcaccaccacctcctatgctcctggatccctaggctctgttccatgagcctgttgcaggttttggtactttagaaatgtaactttttgctcttataattttattttattaaattaaattactgcagtgg

SEQ ID NO: 183782 - DNA, 2137 bp, Homo sapiens
  Payload ID: 16211
  Gene Symbol: SLC35B3
  Gene Name: solute carrier family 35 (adenosine 3'-phospho 5'-phosphosulfate transporter), member B3
  Uniprot ID: Q9H1N7
  ENST ID: ENST00000379660
  CDS Start-End: 451-1656
gcggtggaaagtgcaggagtgggcgaggaggaggaggaagaggaggtgatggcgacggaccaggggagggggagatgctccgtctagctcagacgccacgcaggctgccgtcacccttccgggtgacataccggccttggggtacgcgtgccttcggggcctttcctgtgtttgggacccagatctcctctcctccagaaaaccttgacactgcccatcttcctcatccagaaggagcgttcgaggaatggatgaggtcgggatggaagaaacgggtgattcccttttttgaaagagcggaaaccggccgggcggtttccagggaggagcatctgttcctcctcgcccgtttttcgccctcgggctggcgagaactccctcaggtcccaatccgtggactcgcaggggccatgattgattccggagcgcagttaatcaaggcataatggcatggacttgacacagcaagcaaaagacatacagaacataacagtccaggaaaccaacaaaaataactctgaaagcattgaatgcagcaaaataacaatggatctcaagttcaacaattccaggaaatatatttctatcactgtgccatccaaaacccaaacaatgtcaccacacatcaagtcagttgacgacgttgtggtacttggcatgaatctcagcaagtttaacaaacttactcagtttttcatatgtgttgctggagtttttgtattttacctaatttatgggtatttacaggaattaatattttcagtggagggttttaagtcctgtggctggtaccttaccttagtgcagtttgccttttactccatatttggcctaatagaacttcagcttattcaggacaaaaggaggagaataccaggaaaaacctacatgataatagcttttctaactgtgggtactatggggttatcaaacacttccttgggctacctgaattaccctacccaagtcatcttcaagtgctgcaaattgattcctgttatgctaggaggagtttttattcaaggaaagcgttataatgttgcagatgtgtctgctgccatatgtatgagccttggcctgatatggtttaccctcgctgacagcacaactgcaccaaatttcaacctgacgggtgtggtgcttatttccctggcactatgtgcagatgccgtcattggaaatgttcaagagaaagctatgaaacttcataatgcttctaattctgaaatggtattgtattcgtattcaattggttttgtatacattttactgggattgacatgcactagtggattaggccctgcagtaacattttgtgcaaagaatccagttcggacctatggttatgcgttccttttttccctcactggatattttggaatctcctttgttctggctttgattaaaatttttggtgcacttattgctgtaacagtgacaacaggaagaaaagcaatgaccattgtactttcgtttatattctttgctaaaccattcacgtttcagtatgtatggtctggtttgttagttgtccttggtatatttcttaatgtttacagcaaaaatatggataaaataagactaccatcactgtatgatttgataaacaaatcagtggaagcaagaaagtcaaggacgctggcacagactgtatagacagtgattgtcctatttaaaatagaattttaagggaacaatcatcaattaattaactttccaaagggactgataaaaaccaaaggatctggaggcattgctatcccatttgtggacagatttcatatgaagttgttttgcggtgtcagccttttcttcagagcatttgtttgactgacttccaaagcaatcaagagagccacgtctagcagactttacaataaaatgtcaatatgaaggactgtaattcctagcagtttattgagaatttcactggaaatggaccatgtgttgcaagactaattggctataattatatcctatcaaagaaatcgatacgtaatagcagattgttttatattcattccattttgatggtgttatttaaattgattctctgttataagagtaaactgatgagttgaagtctggagagaataacattcattataaataaaattattctgtgatcttttttcaa

SEQ ID NO: 183783 - DNA, 1851 bp, Homo sapiens
  Payload ID: 16212
  Gene Symbol: SLC35A1
  Gene Name: solute carrier family 35 (CMP-sialic acid transporter), member A1
  Uniprot ID: P78382
  ENST ID: ENST00000369552
  CDS Start-End: 28-1041
agttccgcggggggctgtcggggaaccatggctgccccgagagacaatgtcactttattattcaagttatactgcttggcagtgatgaccctgatggctgcagtctataccatagctttaagatacacaaggacatcagacaaagaactctacttttcaaccacagccgtgtgtatcacagaagttataaagttattgctaagtgtgggaattttagctaaagaaactggtagtctgggtagattcaaagcatctttaagagaaaatgtcttggggagccccaaggaactgttgaagttaagtgtgccatcgttagtgtatgctgttcagaacaacatggctttcctagctcttagcaatctggatgcagcagtgtaccaggtgacctaccagttgaagattccgtgtactgctttatgcactgttttaatgttaaaccggacactcagcaaattacagtgggtttcagtttttatgctgtgtgctggagttacgcttgtacagtggaaaccagcccaagctacaaaagtggtggtggaacaaaatccattattagggtttggcgctatagctattgctgtattgtgctcaggatttgcaggagtatattttgaaaaagttttaaagagttcagatacttctctttgggtgagaaacattcaaatgtatctatcagggattattgtgacattagctggcgtctacttgtcagatggagctgaaattaaagaaaaaggatttttctatggttacacatattatgtctggtttgtcatctttcttgcaagtgttggtggcctctacacttctgttgtggttaagtacacagacaacatcatgaaaggcttttctgcagcagcggccattgtcctttccaccattgcttcagtaatgctgtttggattacagataacactcacctttgccctgggtactcttcttgtatgtgtttccatatatctctatggattacccagacaagacactacatccatccaacaaggagaaacagcttcaaaggagagagttattggtgtgtgattttagcctcacgtgagactccttttaagactaaaccatttgcattaaactagagccttaagtcaatctcagaaggtagcataaacaaataaaaattaactgtatggcatgatcagtgcggttatgtggaaacaacaacaaacaaacgaagctatctgagtgaactgctaatacagaaacttaatgtagacctgtttggggtctactattgttttagaatgaaggaattgtattattgtgtgtatatataatttgtaaataaaaagtatggagatgatacggtgttaaaaaaaatcatggtaaggctacaatactcaagtaacaaggtttgggacaatgtctaagggttaaagtgccaaagccatttctgtactaactgttctcttgttccggtaccggggagaaggatgacccctccttattctccaattcatgtacagtattttgtcctagcagcataaagacctagctcttttcttacaagaggcagaaacaagacaggctagttcataaacaaactgtgtaacttctcaaaatgaatctatttcataactcggacaatttctgggtggtgactgagtacccctttagtgagtacccctttagtgctatatttgtgccattcattatctggttcatatttcttttctgttagatgatacacatttcttcaaaaaaatttctaatgtcacttttgtacttttttaaataaagtatgtttaactgttgggctctcaataatttgtgaaatttcagtgttttctataatgttaatggggaaattcagcaataaactttatttgtaagaaa

SEQ ID NO: 183784 - DNA, 1720 bp, Homo sapiens
  Payload ID: 16212
  Gene Symbol: SLC35A1
  Gene Name: solute carrier family 35 (CMP-sialic acid transporter), member A1
  Uniprot ID: P78382
  ENST ID: ENST00000369556
  CDS Start-End: 80-916
acaaggggcggtccccggtgtcctgcgcgggggcgcggagggggcgggcgtcagttccgcggggggctgtcggggaaccatggctgccccgagagacaatgtcactttattattcaagttatactgcttggcagtgatgaccctgatggctgcagtctataccatagctttaagatacacaaggacatcagacaaagaactctacttttcaaccacagccgtgtgtatcacagaagttataaagttattgctaagtgtgggaattttagctaaagaaactggtagtctgggtagattcaaagcatctttaagagaaaatgtcttggggagccccaaggaactgttgaagttaagtgtgccatcgttagtgtatgctgttcagaacaacatggctttcctagctcttagcaatctggatgcagcagtgtaccaggtgacctaccagttgaagattccgtgtactgctttatgcactgttttaatgttaaaccggacactcagcaaattacagtgggtttcagtttttatgctgtgtgctggagttacgcttgtacagtggaaaccagcccaagctacaaaagtggtggtggaacaaaatccattattagggtttggcgctatagctattgctgtattgtgctcaggatttgcagttcttgcaagtgttggtggcctctacacttctgttgtggttaagtacacagacaacatcatgaaaggcttttctgcagcagcggccattgtcctttccaccattgcttcagtaatgctgtttggattacagataacactcacctttgccctgggtactcttcttgtatgtgtttccatatatctctatggattacccagacaagacactacatccatccaacaaggagaaacagcttcaaaggagagagttattggtgtgtgattttagcctcacgtgagactccttttaagactaaaccatttgcattaaactagagccttaagtcaatctcagaaggtagcataaacaaataaaaattaactgtatggcatgatcagtgcggttatgtggaaacaacaacaaacaaacgaagctatctgagtgaactgctaatacagaaacttaatgtagacctgtttggggtctactattgttttagaatgaaggaattgtattattgtgtgtatatataatttgtaaataaaaagtatggagatgatacggtgttaaaaaaaatcatggtaaggctacaatactcaagtaacaaggtttgggacaatgtctaagggttaaagtgccaaagccatttctgtactaactgttctcttgttccggtaccggggagaaggatgacccctccttattctccaattcatgtacagtattttgtcctagcagcataaagacctagctcttttcttacaagaggcagaaacaagacaggctagttcataaacaaactgtgtaacttctcaaaatgaatctatttcataactcggacaatttctgggtggtgactgagtacccctttagtgagtacccctttagtgctatatttgtgccattcattatctggttcatatttcttttctgttagatgatacacatttcttcaaaaaaatttctaatgtcacttttgtacttttttaaataaagtatgtttaactgttgggctctcaataatttgtgaaatttcagtgttttctataatgttaatggggaaattcagcaataaactttatttgt

SEQ ID NO: 183785 - DNA, 1653 bp, Homo sapiens
  Payload ID: 16212
  Gene Symbol: SLC35A1
  Gene Name: solute carrier family 35 (CMP-sialic acid transporter), member A1
  ENST ID: ENST00000369557
  CDS Start-End: 80-649
acaaggggcggtccccggtgtcctgcgcgggggcgcggagggggcgggcgtcagttccgcggggggctgtcggggaaccatggctgccccgagagacaatgtcactttattattcaagttatactgcttggcagtgatgaccctgatggctgcagtctataccatagctttaagatacacaaggacatcagacaaagaactctacttttcaaccacagccgtgtgtatcacagaagttataaagttattgctaagtgtgggaattttagctaaagaaactggtagtctgggtagattcaaagcatctttaagagaaaatgtcttggggagccccaaggaactgttgaagttaagtgtgccatcgttagtgtatgctgttcagaacaacatggctttcctagctcttagcaatctggatgcagcagtgtaccaggtgacctaccagttgaagattccgtgtactgctttatgcactgttttaatgttaaaccggacactcagcaaattacagtgggtttcagtttttatgctgtgtgctggagttacgcttgtacagtggaaaccagcccaagctacaaaagtggtgttcttgcaagtgttggtggcctctacacttctgttgtggttaagtacacagacaacatcatgaaaggcttttctgcagcagcggccattgtcctttccaccattgcttcagtaatgctgtttggattacagataacactcacctttgccctgggtactcttcttgtatgtgtttccatatatctctatggattacccagacaagacactacatccatccaacaaggagaaacagcttcaaaggagagagttattggtgtgtgattttagcctcacgtgagactccttttaagactaaaccatttgcattaaactagagccttaagtcaatctcagaaggtagcataaacaaataaaaattaactgtatggcatgatcagtgcggttatgtggaaacaacaacaaacaaacgaagctatctgagtgaactgctaatacagaaacttaatgtagacctgtttggggtctactattgttttagaatgaaggaattgtattattgtgtgtatatataatttgtaaataaaaagtatggagatgatacggtgttaaaaaaaatcatggtaaggctacaatactcaagtaacaaggtttgggacaatgtctaagggttaaagtgccaaagccatttctgtactaactgttctcttgttccggtaccggggagaaggatgacccctccttattctccaattcatgtacagtattttgtcctagcagcataaagacctagctcttttcttacaagaggcagaaacaagacaggctagttcataaacaaactgtgtaacttctcaaaatgaatctatttcataactcggacaatttctgggtggtgactgagtacccctttagtgagtacccctttagtgctatatttgtgccattcattatctggttcatatttcttttctgttagatgatacacatttcttcaaaaaaatttctaatgtcacttttgtacttttttaaataaagtatgtttaactgttgggctctcaataatttgtgaaatttcagtgttttctataatgttaatggggaaattcagcaataaactttatttgt

SEQ ID NO: 183786 - DNA, 724 bp, Homo sapiens
  Payload ID: 16212
  Gene Symbol: SLC35A1
  Gene Name: solute carrier family 35 (CMP-sialic acid transporter), member A1
  ENST ID: ENST00000544441
  CDS Start-End: 1-198
atggctgccccgagagacaatgtcactttattattcaagttatactgcttggcagtgatgaccctgatggctgcagtctataccatagctttaagatacacaaggacatcagacaaagaactctacttttcaaccacagccgtgtgtatcacagaagttataaagttattgctaagtgtgggaattttagctaagtgacctaccagttgaagattccgtgtactgctttatgcactgttttaatgttaaaccggacactcagcaaattacagtgggtttcagtttttatgctgtgtgctggagttacgcttgtacagtggaaaccagcccaagctacaaaagtggtggtggaacaaaatccattattagggtttggcgctatagctattgctgtattgtgctcaggatttgcaggagtatattttgaaaaagttttaaagagttcagatacttctctttggttcttgcaagtgttggtggcctctacacttctgttgtggttaagtacacagacaacatcatgaaaggcttttctgcagcagcggccattgtcctttccaccattgcttcagtaatgctgtttggattacagataacactcacctttgccctgggtactcttcttgtatgtgtttccatatatctctatggattacccagacaagacactacatccatccaacaaggagaaacagcttcaaaggagagagttattggtgtgtga

SEQ ID NO: 183787 - DNA, 1206 bp, Homo sapiens
  Payload ID: 16212
  Gene Symbol: SLC35A1
  Gene Name: solute carrier family 35 (CMP-sialic acid transporter), member A1
  ENST ID: ENST00000622775
  CDS Start-End: 42-611
acaatgtcactttattattcaagttatactgcttggcagtgatgaccctgatggctgcagtctataccatagctttaagatacacaaggacatcagacaaagaactctacttttcaaccacagccgtgtgtatcacagaagttataaagttattgctaagtgtgggaattttagctaaagaaactggtagtctgggtagattcaaagcatctttaagagaaaatgtcttggggagccccaaggaactgttgaagttaagtgtgccatcgttagtgtatgctgttcagaacaacatggctttcctagctcttagcaatctggatgcagcagtgtaccaggtgacctaccagttgaagattccgtgtactgctttatgcactgttttaatgttaaaccggacactcagcaaattacagtgggtttcagtttttatgctgtgtgctggagttacgcttgtacagtggaaaccagcccaagctacaaaagtggtggagtatattttgaaaaagtttaaagagttcagatacttctctttgggtgagaaacattcaaatgtatctatcagggattattgtgacattagctggcgtctacttgtcagatggagctgaaattaaagaaaaaggatttttctatggttacacatattatgtctggtttgtcatctttcttgcaagtgttggtggcctctacacttctgttgtggttaagtacacagacaacatcatgaaaggcttttctgcagcagcggccattgtcctttccaccattgcttcagtaatgctgtttggattacagataacactcacctttgccctgggtactcttcttgtatgtgtttccatatatctctatggattacccagacaagacactacatccatccaacaaggagaaacagcttcaaaggagagagttattggtgtgtgattttagcctcacgtgagactccttttaagactaaaccatttgcattaaactagagccttaagtcaatctcagaaggtagcataaacaaataaaaattaactgtatggcatgatcagtgcggttatgtggaaacaacaacaaacaaacgaagctatctgagtgaactgctaatacagaaacttaatgtagacctgtttggggtctactattgttttagaatgaaggaattgtattattgtgtgtatatataatttgtaaataaaaagtatggagatg

SEQ ID NO: 183788 - DNA, 4171 bp, Homo sapiens
  Payload ID: 16213
  Gene Symbol: SLC35C1
  Gene Name: solute carrier family 35 (GDP-fucose transporter), member C1
  Uniprot ID: Q96A29
  ENST ID: ENST00000314134
  CDS Start-End: 1397-2491
agtgcaccggaggaggtgagcgccaggtcgccttcgcggcccggggacacaggcagggacgcgggagctgatgcggctggaccggccggggaaacagtattttctggaaggggtaagagatgctgtcttgagcctttggaatctcggatccgggccgcccagaggacctcgacaggagcacagggaggacaaactgaagtccgagagaggcggcgtggcctccggcctcggggagcgctgccgggggtctcgggcttgggagagggcctgggggcggtgaaaatggggggaaaggaggggaccacaacattgttatggaagagtgagctcggattggcagagggacgcggggctgcaacgcgagtctccggaggtggaggggtccaggctgatgtagcgccgcccgggtcctgggtcggggttccgggaagtggacctgcgagccaagcctagccaagtcgggggacggaggctccggggcggacggagctgagggtgggcaggcgaggttgatggagcccttccaggaagcagggcgaggctcaagcacccagaaaaacctgtggctgccgaggtcccccgccagcagcgggcagcggagcgcaggggcggggctggggactggcgaactccgcctctctggggctgtcgctttaagggcaaggcggggcgtgcgggccctttaaggccacgtgggggcgtgtcaggaagtgagtccagggcccgcctcccggggagtcggcctcggatgtccggaggctcctgggctgagccggcgacagagcccgggaaggcagcgagacgtgggcgccggcccagccccctcccgcgtccttcagccccaagccccgagcccctctgacccttccgcagccctccctccagccgcgcccggcctccggcagctccctgtacgcctccctccccctgcccgcccctccctcccacagccgcccatgacgccctctcggcacctcttcccactctgccacgcgtccttttcctgcaccttcgccccgcgtacctactcctgccccgccctgccattcctctcccctcccttctctctgcgacccctccctgttaggccccagcctcttctcccctcacaggtcttctctgtcctggcctcaccgccttatcctattcctctcccttgccctgtgtcttgtctcagagccccctcggggtgggagtaggttgtggagcagcacaactgggctcaccccaaagcagaacttctcaatccatgaggacaatggggaggcctttaggccagcccacatgtgacaatggagggctgcggcttccttgcggagagcacaagtgagctcactgccctggactccagggaatcagagttctggccgcggggtgacccagctcctctgctaccatgaatagggcccctctgaagcggtccaggatcctgcacatggcgctgaccggggcctcagacccctctgcagaggcagaggccaacggggagaagccctttctgctgcgggcattgcagatcgcgctggtggtctccctctactgggtcacctccatctccatggtgttccttaataagtacctgctggacagcccctccctgcggctggacacccccatcttcgtcaccttctaccagtgcctggtgaccacgctgctgtgcaaaggcctcagcgctctggccgcctgctgccctggtgccgtggacttccccagcttgcgcctggacctcagggtggcccgcagcgtcctgcccctgtcggtggtcttcatcggcatgatcaccttcaataacctctgcctcaagtacgtcggtgtggccttctacaatgtgggccgctcactcaccaccgtcttcaacgtgctgctctcctacctgctgctcaagcagaccacctccttctatgccctgctcacctgcggtatcatcatcgggggcttctggcttggtgtggaccaggagggggcagaaggcaccctgtcgtggctgggcaccgtcttcggcgtgctggctagcctctgtgtctcgctcaacgccatctacaccacgaaggtgctcccggcggtggacggcagcatctggcgcctgactttctacaacaacgtcaacgcctgcatcctcttcctgcccctgctcctgctgctcggggagcttcaggccctgcgtgactttgcccagctgggcagtgcccacttctgggggatgatgacgctgggcggcctgtttggctttgccatcggctacgtgacaggactgcagatcaagttcaccagtccgctgacccacaatgtgtcgggcacggccaaggcctgtgcccagacagtgctggccgtgctctactacgaggagaccaagagcttcctctggtggacgagcaacatgatggtgctgggcggctcctccgcctacacctgggtcaggggctgggagatgaagaagactccggaggagcccagccccaaagacagcgagaagagcgccatgggggtgtgagcaccacaggcaccctggatggcccggccccggggcccgtacacaggcggggccagcacagtagtgaaggcggtctcctggaccccagaagcgtgctgtggtgtggactgggtgctacttatagacccaatcagaatacggtggttgagaaggaaccagtgtttacaagtaatatcagaaagttgaaggaaccagtgtttacaagtaataccagaaagttgccaaacccttctctatcctctcgtatttctgagtttttgtccttcccgagggagcaccctagtgagagttgaaccccttccttctgcctccagggcctgtctgcctccacatcactctgaggacagggacaggcaacaaccttgaagggacagcaatggcaaagccacaaaggcttcactgtactcaggggagatggccctaccacagccacctggagagggttgggaagccttccgtctgcggtgggcaggcagcctcaccctgggcccacagaccggccttcctttggaggaaagtgtggcctggactgagggaggaaatgagcgagttccctctgacaccagcagatccccaggggctgctgggcagtggcctgggaatggggtggattgtgagaaagtgctcaccatctatacaccctgtatgtccagcttttgaacacaagggaaccatgcttctcttagaggttaagcagggtcattaacatcctcccccagtccctaacatcacattgtcctgcgtggctcctctggccctgagtggcacctgtccctctggtctcccagcacctggcccaggtaacagccttctgaaagcagagccaaggagctgcttctctcttctcccagttctacctccccagaagccttcctccccaggtggggctgatggagcaagggtccagactaggagccttccaccccagctgtgtctggcgcccctagatctctgcaagggaggtgttacagctggttctgagccgcttgccttgtgatggtaagacaccaacctttacattcttccctgaggttgtggctgacagagcctgcttggccccactgttagtccagcgagctcctatatcaaaatgccgtaggccgggtggcttacaaacaacagaaacgtattgctcacagtcctggggggctgggacgcccaagatcaagaggccagcagattcggactccgctgagggctgtttcccgatccatagatggtgccttctcgctgtatcctcaatggtagaagcacaaacaagcaagctccttcctgcctcttttataaggactccaaccctgttcatgagggttccgcccccatgacccaatcagctccaaaggccccacctcctaatactgtcaccttgggggtgagaattccaatgtgaatttgcagggggagtgggggacacacacaaatttcggggccataccacccttcaccacaccctcctgcgctcagggtggcttgcagtccctggcccttctggtgggcatttggtatgtcctttctcttggggtgatttctgatgtttttactctatatagtgaaaagctagggagagcgggtcttctcccccctccctctccagtcccctcacaatcccagatgggttctaatgcagctgctggggcctgatgccctgagttgtttgtgattcaataaagaatccataag

SEQ ID NO: 183789 - DNA, 1756 bp, Homo sapiens
  Payload ID: 16213
  Gene Symbol: SLC35C1
  Gene Name: solute carrier family 35 (GDP-fucose transporter), member C1
  Uniprot ID: Q96A29
  ENST ID: ENST00000442528
  CDS Start-End: 478-1533
tccccgcacgcacttctggaagtgcaagccggtagcgcggcgggccagggatacagccaagtcccgggacgtgccagctgcggtaactgaagccgggtcccgggcgggcgggggtaccagggacaggagtagccttggaaagaggagagggcctcctcccacgaccgtccggatcaccgcctctccgccggcacccccggggcccatgccgcgaacaggccggcgaggctggcaaggtgcccgggcccggggcggaaagcaggaagtcgatcccgcgggcgcggcccagggtgcggcgctgcagatgcagcacggggtcgcggggcgggcgcccagtgcaccggaggaggtgagcgccaggtcgccttcgcggcccggggacacaggcagggacgcgggagctgatgcggctggaccggccggggaaacagtattttctggaagggggcccctctgaagcggtccaggatcctgcacatggcgctgaccggggcctcagacccctctgcagaggcagaggccaacggggagaagccctttctgctgcgggcattgcagatcgcgctggtggtctccctctactgggtcacctccatctccatggtgttccttaataagtacctgctggacagcccctccctgcggctggacacccccatcttcgtcaccttctaccagtgcctggtgaccacgctgctgtgcaaaggcctcagcgctctggccgcctgctgccctggtgccgtggacttccccagcttgcgcctggacctcagggtggcccgcagcgtcctgcccctgtcggtggtcttcatcggcatgatcaccttcaataacctctgcctcaagtacgtcggtgtggccttctacaatgtgggccgctcactcaccaccgtcttcaacgtgctgctctcctacctgctgctcaagcagaccacctccttctatgccctgctcacctgcggtatcatcatcgggggcttctggcttggtgtggaccaggagggggcagaaggcaccctgtcgtggctgggcaccgtcttcggcgtgctggctagcctctgtgtctcgctcaacgccatctacaccacgaaggtgctcccggcggtggacggcagcatctggcgcctgactttctacaacaacgtcaacgcctgcatcctcttcctgcccctgctcctgctgctcggggagcttcaggccctgcgtgactttgcccagctgggcagtgcccacttctgggggatgatgacgctgggcggcctgtttggctttgccatcggctacgtgacaggactgcagatcaagttcaccagtccgctgacccacaatgtgtcgggcacggccaaggcctgtgcccagacagtgctggccgtgctctactacgaggagaccaagagcttcctctggtggacgagcaacatgatggtgctgggcggctcctccgcctacacctgggtcaggggctgggagatgaagaagactccggaggagcccagccccaaagacagcgagaagagcgccatgggggtgtgagcaccacaggcaccctggatggcccggccccggggcccgtacacaggcggggccagcacagtagtgaaggcggtctcctggaccccagaagcgtgctgtggtgtggactgggtgctacttatagacccaatcagaatacggtggttgagaaggaaccagtgtttacaagtaatatcagaaagttgaaggaaccagtgtttacaagtaataccagaaagttgcc

SEQ ID NO: 183790 - DNA, 582 bp, Homo sapiens
  Payload ID: 16213
  Gene Symbol: SLC35C1
  Gene Name: solute carrier family 35 (GDP-fucose transporter), member C1
  ENST ID: ENST00000526817
  CDS Start-End: 367-582
tctggaagtgcaagccggtagcgcggcgggccagggatacagccaagtcccgggacgtgccagctgcggtaactgaagccgggtcccgggcgggcgggggtaccagggacaggagtagccttggaaagaggagagggcctcctcccacgaccgtccggatcaccgcctctccgccggcacccccggggcccatgccgcgaacaggccggcgaggctggcaaggtgcccgggcccggggcggaaagcaggaagtcgatcccgcgggcgcggcccagggtgcggcgctgcagatgcagcacggggtcgcggggcgggcgcccagtgcaccggaggagggcccctctgaagcggtccaggatcctgcacatggcgctgaccggggcctcagacccctctgcagaggcagaggccaacggggagaagccctttctgctgcgggcattgcagatcgcgctggtggtctccctctactgggtcacctccatctccatggtgttccttaataagtacctgctggacagcccctccctgcggctggacacccccatcttcgtcaccttctaccagtgcctggtgaccacg

SEQ ID NO: 183791 - DNA, 695 bp, Homo sapiens
  Payload ID: 16213
  Gene Symbol: SLC35C1
  Gene Name: solute carrier family 35 (GDP-fucose transporter), member C1
  ENST ID: ENST00000530471
  CDS Start-End: 200-695
ctcggatgtccggaggctcctgggctgagccggcgacagagcccgggaaggcagcgagacgtgggcgccggcccagccccctcccgcgtccttcagccccaagccccgagcccctctgacccttccgcagccctccctccagccgcgcccggcctccggcagctccctggcccctctgaagcggtccaggatcctgcacatggcgctgaccggggcctcagacccctctgcagaggcagaggccaacggggagaagccctttctgctgcgggcattgcagatcgcgctggtggtctccctctactgggtcacctccatctccatggtgttccttaataagtacctgctggacagcccctccctgcggctggacacccccatcttcgtcaccttctaccagtgcctggtgaccacgctgctgtgcaaaggcctcagcgctctggccgcctgctgccctggtgccgtggacttccccagcttgcgcctggacctcagggtggcccgcagcgtcctgcccctgtcggtggtcttcatcggcatgatcaccttcaataacctctgcctcaagtacgtcggtgtggccttctacaatgtgggccgctcactcaccaccgtcttcaacgtgctgctctcctacctgctgctcaagcagaccacctccttctatgccctgctcacctgcggtatcatcatcg

SEQ ID NO: 183792 - DNA, 2447 bp, Homo sapiens
  Payload ID: 16214
  Gene Symbol: SLC35C2
  Gene Name: solute carrier family 35 (GDP-fucose transporter), member C2
  Uniprot ID: Q9NQQ7
  ENST ID: ENST00000243896
  CDS Start-End: 484-1581
gagattccggcctggagctcccagggccgaggtcactttggtggcagttcatggagaatagcttgaggtgacaagacagcagacacgacgtgggtctctgggactgcctgtgccgttgtgggcagcccctccagagccctgagtcacgcagccttcagaggcacccatggctacgagaagcacagtctctgcctgaggctccagagcggccctttttccccagcagcagaccttgggacctgtgagcgctgcatccaattaaccatgggaagggtcagcaccagccaccagccccttaggtgaggactctgcctggggctctgctgatggttccgaatcatggagctgcagagagctcctccagcctggagacgttcttggtgaaagctgtggtctaactccaccggctcttcctgcacattgtattcaagaggggtgcctgcccccgctgactcaggagctccggtgctgcagccgccacgaatggggaggtgggccctcgatgtggcctttttgtggaaggcggtgttgaccctggggctggtgcttctctactactgcttctccatcggcatcaccttctacaacaagtggctgacaaagagcttccatttccccctcttcatgacgatgctgcacctggccgtgatcttcctcttctccgccctgtccagggcgctggttcagtgctccagccacagggcccgtgtggtgctgagctgggccgactacctcagaagagtggctcccacagctctggcgacggcgcttgacgtgggcttgtccaactggagcttcctgtatgtcaccgtctcgctgtacacaatgaccaaatcctcagctgtcctcttcatcttgatcttctctctgatcttcaagctggaggagctgcgcgcggcactggtcctggtggtcctcctcatcgccgggggtctcttcatgttcacctacaagtccacacagttcaacgtggagggcttcgccttggtgctgggggcctcgttcatcggtggcattcgctggaccctcacccagatgctcctgcagaaggctgaactcggcctccagaatcccatcgacaccatgttccacctgcagccactcatgttcctggggctcttccctctctttgctgtatttgaaggtctccatttgtccacatctgagaaaatcttccgtttccaggacacagggctgctcctgcgggtacttgggagcctcttccttggcgggattctcgcctttggtttgggcttctctgagttcctcctggtctccagaacctccagcctcactctctccattgccggcatttttaaggaagtctgcactttgctgttggcagctcatctgctgggcgatcagatcagcctcctgaactggctgggcttcgccctctgcctctcgggaatatccctccacgttgccctcaaagccctgcattccagaggtgatggtggccccaaggccttgaaggggctgggctccagccccgacctggagctgctgctccggagcagccagcgggaggaaggtgacaatgaggaggaggagtactttgtggcccaggggcagcagtgaccagccagggcaaatggcttagaagcaggccactccccagcctgctgccagcactcactgtgctcaagccgccagggctcatcatggtagctgggagctgtggacgggagtcaccaggtggtggggccaagccagggactcatgacttttgcccctcccttcagagcctggtcacacaaggggcgagcaccaggccagcctgggactggccagagctgggcccaagctgcgctggaatcgcagcaggagaggggagtgggctggttcttcccaccacttcccaggctctgacagccgagactcatttccaaggcacagcagctttctaaagggactgagtttggactgggttttggacctccaggggctggagcttcatcacctgggcagtgtcttttctcagagagcaggtttctttatagtttggaaataaatggttcacggtccactggccgccttgtgttgctggagacgtgggggcagggaggggacagtgtgggcctggcctctcctttcctttccctgcctggagccttcttcaaatgtctggtcttaagccaggcctccttcattttctcgctcctgttagaacaccagtcccctccccagtggggccccactgcacctgctggcaggaaataaatgaatgtttactgagtactgcattctggagaccttacatgttttcacagcctagtttgaatactggctttgtcactagctgtgtgaccctaagcaaatgacctaacctgtctgtgccgtagttttttaatctgtgaaatggggataatgtctatctcagagtccttttgaagattgagtcattattagtaacagattaaatgttatataagcatttcttttaa

SEQ ID NO: 183793 - DNA, 2175 bp, Homo sapiens
  Payload ID: 16214
  Gene Symbol: SLC35C2
  Gene Name: solute carrier family 35 (GDP-fucose transporter), member C2
  Uniprot ID: Q9NQQ7
  ENST ID: ENST00000317734
  CDS Start-End: 127-1311
aagttaccgcccgtgccgcggttcggcggcggcatccggcctcgcacttccggtggggagattccggcctggagctcccagggccgagcagaccttgggacctgtgagcgctgcatccaattaaccatgggaagggtcagcaccagccaccagccccttagaggggtgcctgcccccgctgactcaggagctccggtgctgcagccgccacgaatggggaggtgggccctcgatgtggcctttttgtggaaggcggtgttgaccctggggctggtgcttctctactactgcttctccatcggcatcaccttctacaacaagtggctgacaaagagcttccatttccccctcttcatgacgatgctgcacctggccgtgatcttcctcttctccgccctgtccagggcgctggttcagtgctccagccacagggcccgtgtggtgctgagctgggccgactacctcagaagagtggctcccacagctctggcgacggcgcttgacgtgggcttgtccaactggagcttcctgtatgtcaccgtctcgctgtacacaatgaccaaatcctcagctgtcctcttcatcttgatcttctctctgatcttcaagctggaggagctgcgcgcggcactggtcctggtggtcctcctcatcgccgggggtctcttcatgttcacctacaagtccacacagttcaacgtggagggcttcgccttggtgctgggggcctcgttcatcggtggcattcgctggaccctcacccagatgctcctgcagaaggctgaactcggcctccagaatcccatcgacaccatgttccacctgcagccactcatgttcctggggctcttccctctctttgctgtatttgaaggtctccatttgtccacatctgagaaaatcttccgtttccaggacacagggctgctcctgcgggtacttgggagcctcttccttggcgggattctcgcctttggtttgggcttctctgagttcctcctggtctccagaacctccagcctcactctctccattgccggcatttttaaggaagtctgcactttgctgttggcagctcatctgctgggcgatcagatcagcctcctgaactggctgggcttcgccctctgcctctcgggaatatccctccacgttgccctcaaagccctgcattccagaggtgatggtggccccaaggccttgaaggggctgggctccagccccgacctggagctgctgctccggagcagccagcgggaggaaggtgacaatgaggaggaggagtactttgtggcccaggggcagcagtgaccagccagggcaaatggcttagaagcaggccactccccagcctgctgccagcactcactgtgctcaagccgccagggctcatcatggtagctgggagctgtggacgggagtcaccaggtggtggggccaagccagggactcatgacttttgcccctcccttcagagcctggtcacacaaggggcgagcaccaggccagcctgggactggccagagctgggcccaagctgcgctggaatcgcagcaggagaggggagtgggctggttcttcccaccacttcccaggctctgacagccgagactcatttccaaggcacagcagctttctaaagggactgagtttggactgggttttggacctccaggggctggagcttcatcacctgggcagtgtcttttctcagagagcaggtttctttatagtttggaaataaatggttcacggtccactggccgccttgtgttgctggagacgtgggggcagggaggggacagtgtgggcctggcctctcctttcctttccctgcctggagccttcttcaaatgtctggtcttaagccaggcctccttcattttctcgctcctgttagaacaccagtcccctccccagtggggccccactgcacctgctggcaggaaataaatgaatgtttactgagtactgcattctggagaccttacatgttttcacagcctagtttgaatactggctttgtcactagctgtgtgaccctaagcaaatgacctaacctgtctgtgccgtagttttttaatctgtgaaatggggataatgtctatctcagagtccttttgaagattgagtcattattagtaacagattaaatgttatataagcatttctttt

SEQ ID NO: 183794 - DNA, 2505 bp, Homo sapiens
  Payload ID: 16214
  Gene Symbol: SLC35C2
  Gene Name: solute carrier family 35 (GDP-fucose transporter), member C2
  Uniprot ID: Q9NQQ7
  ENST ID: ENST00000372227
  CDS Start-End: 542-1639
gaaaagcagaagaaaaaccaggagaatgtggtatcgtggcacccaagagaaggttttttctaggaggaggaagtgatccattgtgtaaggtcactttggtggcagttcatggagaatagcttgaggtgacaagacagcagacacgacgtgggtctctgggactgcctgtgccgttgtgggcagcccctccagagccctgagtcacgcagccttcagaggcacccatggctacgagaagcacagtctctgcctgaggctccagagcggccctttttccccagcagcagaccttgggacctgtgagcgctgcatccaattaaccatgggaagggtcagcaccagccaccagccccttaggtgaggactctgcctggggctctgctgatggttccgaatcatggagctgcagagagctcctccagcctggagacgttcttggtgaaagctgtggtctaactccaccggctcttcctgcacattgtattcaagaggggtgcctgcccccgctgactcaggagctccggtgctgcagccgccacgaatggggaggtgggccctcgatgtggcctttttgtggaaggcggtgttgaccctggggctggtgcttctctactactgcttctccatcggcatcaccttctacaacaagtggctgacaaagagcttccatttccccctcttcatgacgatgctgcacctggccgtgatcttcctcttctccgccctgtccagggcgctggttcagtgctccagccacagggcccgtgtggtgctgagctgggccgactacctcagaagagtggctcccacagctctggcgacggcgcttgacgtgggcttgtccaactggagcttcctgtatgtcaccgtctcgctgtacacaatgaccaaatcctcagctgtcctcttcatcttgatcttctctctgatcttcaagctggaggagctgcgcgcggcactggtcctggtggtcctcctcatcgccgggggtctcttcatgttcacctacaagtccacacagttcaacgtggagggcttcgccttggtgctgggggcctcgttcatcggtggcattcgctggaccctcacccagatgctcctgcagaaggctgaactcggcctccagaatcccatcgacaccatgttccacctgcagccactcatgttcctggggctcttccctctctttgctgtatttgaaggtctccatttgtccacatctgagaaaatcttccgtttccaggacacagggctgctcctgcgggtacttgggagcctcttccttggcgggattctcgcctttggtttgggcttctctgagttcctcctggtctccagaacctccagcctcactctctccattgccggcatttttaaggaagtctgcactttgctgttggcagctcatctgctgggcgatcagatcagcctcctgaactggctgggcttcgccctctgcctctcgggaatatccctccacgttgccctcaaagccctgcattccagaggtgatggtggccccaaggccttgaaggggctgggctccagccccgacctggagctgctgctccggagcagccagcgggaggaaggtgacaatgaggaggaggagtactttgtggcccaggggcagcagtgaccagccagggcaaatggcttagaagcaggccactccccagcctgctgccagcactcactgtgctcaagccgccagggctcatcatggtagctgggagctgtggacgggagtcaccaggtggtggggccaagccagggactcatgacttttgcccctcccttcagagcctggtcacacaaggggcgagcaccaggccagcctgggactggccagagctgggcccaagctgcgctggaatcgcagcaggagaggggagtgggctggttcttcccaccacttcccaggctctgacagccgagactcatttccaaggcacagcagctttctaaagggactgagtttggactgggttttggacctccaggggctggagcttcatcacctgggcagtgtcttttctcagagagcaggtttctttatagtttggaaataaatggttcacggtccactggccgccttgtgttgctggagacgtgggggcagggaggggacagtgtgggcctggcctctcctttcctttccctgcctggagccttcttcaaatgtctggtcttaagccaggcctccttcattttctcgctcctgttagaacaccagtcccctccccagtggggccccactgcacctgctggcaggaaataaatgaatgtttactgagtactgcattctggagaccttacatgttttcacagcctagtttgaatactggctttgtcactagctgtgtgaccctaagcaaatgacctaacctgtctgtgccgtagttttttaatctgtgaaatggggataatgtctatctcagagtccttttgaagattgagtcattattagtaacagattaaatgttatataagcatttcttttaa

SEQ ID NO: 183795 - DNA, 2246 bp, Homo sapiens
  Payload ID: 16214
  Gene Symbol: SLC35C2
  Gene Name: solute carrier family 35 (GDP-fucose transporter), member C2
  Uniprot ID: Q9NQQ7
  ENST ID: ENST00000372230
  CDS Start-End: 283-1380
ccggcctggagctcccagggccgagcagaccttgggacctgtgagcgctgcatccaattaaccatgggaagggtcagcaccagccaccagccccttaggtgaggactctgcctggggctctgctgatggttccgaatcatggagctgcagagagctcctccagcctggagacgttcttggtgaaagctgtggtctaactccaccggctcttcctgcacattgtattcaagaggggtgcctgcccccgctgactcaggagctccggtgctgcagccgccacgaatggggaggtgggccctcgatgtggcctttttgtggaaggcggtgttgaccctggggctggtgcttctctactactgcttctccatcggcatcaccttctacaacaagtggctgacaaagagcttccatttccccctcttcatgacgatgctgcacctggccgtgatcttcctcttctccgccctgtccagggcgctggttcagtgctccagccacagggcccgtgtggtgctgagctgggccgactacctcagaagagtggctcccacagctctggcgacggcgcttgacgtgggcttgtccaactggagcttcctgtatgtcaccgtctcgctgtacacaatgaccaaatcctcagctgtcctcttcatcttgatcttctctctgatcttcaagctggaggagctgcgcgcggcactggtcctggtggtcctcctcatcgccgggggtctcttcatgttcacctacaagtccacacagttcaacgtggagggcttcgccttggtgctgggggcctcgttcatcggtggcattcgctggaccctcacccagatgctcctgcagaaggctgaactcggcctccagaatcccatcgacaccatgttccacctgcagccactcatgttcctggggctcttccctctctttgctgtatttgaaggtctccatttgtccacatctgagaaaatcttccgtttccaggacacagggctgctcctgcgggtacttgggagcctcttccttggcgggattctcgcctttggtttgggcttctctgagttcctcctggtctccagaacctccagcctcactctctccattgccggcatttttaaggaagtctgcactttgctgttggcagctcatctgctgggcgatcagatcagcctcctgaactggctgggcttcgccctctgcctctcgggaatatccctccacgttgccctcaaagccctgcattccagaggtgatggtggccccaaggccttgaaggggctgggctccagccccgacctggagctgctgctccggagcagccagcgggaggaaggtgacaatgaggaggaggagtactttgtggcccaggggcagcagtgaccagccagggcaaatggcttagaagcaggccactccccagcctgctgccagcactcactgtgctcaagccgccagggctcatcatggtagctgggagctgtggacgggagtcaccaggtggtggggccaagccagggactcatgacttttgcccctcccttcagagcctggtcacacaaggggcgagcaccaggccagcctgggactggccagagctgggcccaagctgcgctggaatcgcagcaggagaggggagtgggctggttcttcccaccacttcccaggctctgacagccgagactcatttccaaggcacagcagctttctaaagggactgagtttggactgggttttggacctccaggggctggagcttcatcacctgggcagtgtcttttctcagagagcaggtttctttatagtttggaaataaatggttcacggtccactggccgccttgtgttgctggagacgtgggggcagggaggggacagtgtgggcctggcctctcctttcctttccctgcctggagccttcttcaaatgtctggtcttaagccaggcctccttcattttctcgctcctgttagaacaccagtcccctccccagtggggccccactgcacctgctggcaggaaataaatgaatgtttactgagtactgcattctggagaccttacatgttttcacagcctagtttgaatactggctttgtcactagctgtgtgaccctaagcaaatgacctaacctgtctgtgccgtagttttttaatctgtgaaatggggataatgtctatctcagagtccttttgaagattgagtcattattagtaacagattaaatgttatataagcatttcttttaa

SEQ ID NO: 183796 - DNA, 588 bp, Homo sapiens
  Payload ID: 16214
  Gene Symbol: SLC35C2
  Gene Name: solute carrier family 35 (GDP-fucose transporter), member C2
  ENST ID: ENST00000420518
  CDS Start-End: 1-588
atggggaggtgggccctcgatgtggcctttttgtggaaggcggtgttgaccctggggctggtgcttctctactactgcttctccatcggcatcaccttctacaacaagtggctgacaaagagcttccatttccccctcttcatgacgatgctgcacctggccgtgatcttcctcttctccgccctgtccagggcgctggttcagtgctccagccacagggcccgtgtggtgctgagctgggccgactacctcagaagagtggctcccacagctctggcgacggcgcttgacgtgggcttgtccaactggagcttcctgtatgtcaccgtctcgcttccacacagttcaacgtggagggcttcgccttggtgctgggggcctcgttcatcggtggcattcgctggaccctcacccagatgctcctgcagaaggctgaactcggcctccagaatcccatcgacaccatgttccacctgcagccactcatgttcctggggctcttccctctctttgctgtatttgaaggtctccatttgtccacatctgagaaaatcttccgtttccaggacacagggctgctcctgcggg

SEQ ID NO: 183797 - DNA, 731 bp, Homo sapiens
  Payload ID: 16214
  Gene Symbol: SLC35C2
  Gene Name: solute carrier family 35 (GDP-fucose transporter), member C2
  ENST ID: ENST00000424568
  CDS Start-End: 259-731
gcagaccttgggacctgtgagcgctgcatccaattaaccatgggaagggtcagcaccagccaccagccccttaggtgaggactctgcctggggctctgctgatggttccgaatcatggagctgcagagagctcctccagcctggagacgttcttggtgaaagctgtggtctaactccaccggctcttcctgcacattgtattcaagaggggtgcctgcccccgctgactcaggagctccggtgctgcagccgccacgaatggggaggtgggccctcgatgtggcctttttgtggaaggcggtgttgaccctggggctggtgcttctctactactgcttctccatcggcatcaccttctacaacaagtggctgacaaagagcttccatttccccctcttcatgacgatgctgcacctggccgtgatcttcctcttctccgccctgtccagggcgctggttcagtgctccagccacagggcccgtgtggtgctgagctgggccgactacctcagaagagtggctcccacagctctggcgacggcgcttgacgtgggcttgtccaactggagcttcctgtatgtcaccgtctcgctcgcgcggcactggtcctggtggtcctcctcatcgccgggggtctcttcatgttcacctacaagtccacacagttcaacgtggagggcttcgccttggtgctgggggcctcgttcatcggtggcattcgctggaccctc

SEQ ID NO: 183798 - DNA, 5740 bp, Homo sapiens
  Payload ID: 16214
  Gene Symbol: SLC35C2
  Gene Name: solute carrier family 35 (GDP-fucose transporter), member C2
  Uniprot ID: Q9NQQ7
  ENST ID: ENST00000543605
  CDS Start-End: 292-1326
ggggagattccggcctggagctcccagggccgagcagaccttgggacctgtgagcgctgcatccaattaaccatgggaagggtcagcaccagccaccagccccttaggtgaggactctgcctggggctctgctgatggttccgaatcatggagctgcagagagctcctccagcctggagacgttcttggtgaaagctgtggtctaactccaccggctcttcctgcacattgtattcaagaggggtgcctgcccccgctgactcaggagctccggtgctgcagccgccacgaatggggaggtgggccctcgatgtggcctttttgtggaaggcggtgttgaccctggggctggtgcttctctactactgcttctccatcggcatcaccttctacaacaagtggctgacaaagagcttccatttccccctcttcatgacgatgctgcacctggccgtgatcttcctcttctccgccctgtccagggcgctggttcagtgctccagccacagggcccgtgtggtgctgagctgggccgactacctcagaagagtggctcccacagctctggcgacggcgcttgacgtgggcttgtccaactggagcttcctgtatgtcaccgtctcgctgtacacaatgaccaaatcctcagctgtcctcttcatcttgatcttctctctgatcttcaagctggaggagctgtccacacagttcaacgtggagggcttcgccttggtgctgggggcctcgttcatcggtggcattcgctggaccctcacccagatgctcctgcagaaggctgaactcggcctccagaatcccatcgacaccatgttccacctgcagccactcatgttcctggggctcttccctctctttgctgtatttgaaggtctccatttgtccacatctgagaaaatcttccgtttccaggacacagggctgctcctgcgggtacttgggagcctcttccttggcgggattctcgcctttggtttgggcttctctgagttcctcctggtctccagaacctccagcctcactctctccattgccggcatttttaaggaagtctgcactttgctgttggcagctcatctgctgggcgatcagatcagcctcctgaactggctgggcttcgccctctgcctctcgggaatatccctccacgttgccctcaaagccctgcattccagaggtgatggtggccccaaggccttgaaggggctgggctccagccccgacctggagctgctgctccggagcagccagcgggaggaaggtgacaatgaggaggaggagtactttgtggcccaggggcagcagtgaccagccagggcaaatggcttagaagcaggccactccccagcctgctgccagcactcactgtgctcaagccgccagggctcatcatggtagctgggagctgtggacgggagtcaccaggtggtggggccaagccagggactcatgacttttgcccctcccttcagagcctggtcacacaaggggcgagcaccaggccagcctgggactggccagagctgggcccaagctgcgctggaatcgcagcaggagaggggagtgggctggttcttcccaccacttcccaggctctgacagccgagactcatttccaaggcacagcagctttctaaagggactgagtttggactgggttttggacctccaggggctggagcttcatcacctgggcagtgtcttttctcagagagcaggtttctttatagtttggaaataaatggttcacggtccactggccgccttgtgttgctggagacgtgggggcagggaggggacagtgtgggcctggcctctcctttcctttccctgcctggagccttcttcaaatgtctggtcttaagccaggcctccttcattttctcgctcctgttagaacaccagtcccctccccagtggggccccactgcacctgctggcaggaaataaatgaatgtttactgagtactgcattctggagaccttacatgttttcacagcctagtttgaatactggctttgtcactagctgtgtgaccctaagcaaatgacctaacctgtctgtgccgtagttttttaatctgtgaaatggggataatgtctatctcagagtccttttgaagattgagtcattattagtaacagattaaatgttatataagcatttcttttaatccttttaacaactaagagactaaagcctggaaaagataaagagctgcttaagtggccgggctgaggttcacatccaagtctgtgtacgtctgtgtgtgcacgtgctgcacgtgacatccacacagcctcctggaacttcatgggcccctggggcttgggctttccactcctccttggccaagtcccacgtcttctctagactgcaggcctctctcaaatgaggaagggagggggcaagaccccagctctgatgtgctgtggactgagtctactcctgtaaactggttcccgggccatgggagacccccccggcccttggggacaaagctttccaggcgaagtgctcctaggcactcacagcaggtggcgccattgcaccacactggctcccagagcccagctgccctgccacggctatccagacaccggcagaaaaggggtgcttggaagaggacagtgggtatccatgggtggggacaaggatagggcttgttctaaaattgtttccatcaggttggagtcactaaagctcgttcggttaagcccaggagaactttaatactttaaaaatgggtctgcaaacttcctgtaaagggccagatagtaaatatttggggtttggggaccatatggcgtctgttgcagctactctgccatcgtagcacaaaagcagccatagatgacacagacccagggtgtggctgtcccagtgaaaccccatttacaaaagtaggatccagcttgctggctgaagtttaccagcaggagaaccctcaagaattctcgagtccaacttccacttctgcagcaggagactgaagccaggagggggcggtgactagcccgaggccctcagagcctccgtgctcaggagtcagaccgagatctgcctctaattcagattcccagcacagactcagcaggcggaggtggagcaccaagggcgcttggaagcggcctcttatctggctcctgcacctctgccccccttggattccgcaagctcagaggccaagattaaaggaggctcgtgctccagctggatgatgtgggaagagccagccaaggaggggggccagggcctcctccgtcttagaggctgcttgggatgcaggctgcttgggcggcagggggagtctgccagagccccgctggctcaggtggatgagagcttcctgtctgctcccccactgcccgcctcccagcacagggagcaagcgttgctgtctggtgcagtaattacaaggtgcagagcgggggcccttacctcgcacatgttgggttcaatgacagcccttcatttagcagcaattaccagctgaacctaaaggagggctccctctcctcccccacccagcccacccaatcgcctggcctcccaggccagacagcgtccacctcggcattgagccctagaaccacccatgctgtctgcagccattgcatctcagggctgcagcatcaccatggcaacgcggtgcttgcacaggttgaggggaagctgaggatgtgacttgtctctccaaggctgtggtgtctgtccccacacagccccagctccgaggcttctgcagaaggggcggagagaggactgacctgcaggttcgagtttcaagtgcttacctgcccaccacctctcccaggggcccacagtggaaggaaggttaatggctccaatatgtgaggacgtccacagttggtgttgtggtggcggtgagaatgggctgcagtttgcctgtgggagggacctgagccatcaggcagggcccggcataccttcatcttcactccggtacccttttctgccttgagggctcaagggattgtctccatctgtttctgctttatcctgctgtgaaaaacctgaaaatcccagtggcttgagagtagttacatggcaccaagagaattctcctcatggtacttgctgcagcttcctgcatcacacactagtgatggactgagggtggggactcccaggccatccatttaggtcgacagcattcagtgagtactggctacatggcagacactgccggacttggggacagagacattcatttttggagtcagccttcctcccagcccaggaaagtgatgaggcagtgggctggggaatggggaagaaagaacagaaaagaccgttcactgggcaccatctaggcctttgccataggttatttaatctgtaacagcccggtgcagtaaggactgattgtatttctttcctagctgtggaaactaagttccaagtggttaagcataacgatggctaaggatacaacctgcagacgccgtagagtgagagacgtgtctctctttgctgtgattagctgcgtgcttttggacacgttgctgatcttctccgagcctgtttccttgtctctacagaaggaataataatacatacacctgaaggaagctactgtgaaggtgaaataaaataatgtaggtaaagcacacagtgctcggctcatagtcatcaccactcaggaaatggagcaggaaggacgtcacataactcgcccagatgagaggaggagccagcgttggagctctggccttccaagatccccatctctgctgcagtgtctggtactgagcatgcacttaacagatgcttttttttttttttttttgacatggagtttttgctcttattgcccaggctggagtgcaatggcacgatcttggctcgctgcaacctccacctcccgggttcaagtgattctcctgtctcagcttcccaagtagctgggattacaggcacccaccaccatgcctggctaattttttgtatgtttagtacagggagctctaaagctgagatgcctttcagagttgtcccaagttggggtgagaggttcatggctttacgccacagcattttttgtatttttagtattttgtatttttgtatttcagtacatgttggccaggccggtcttgaactcctgacctcaggtaatccacctgccttgacctcccaaagtgctgggattacaggtgtgagccatcgcacccggcccagatgcttgttttttgaaggaatttccactagcggaaactaaagtggggattttacaggttctaacttccaaatgacttgccctgtaagaaggggctgctccctcccaccaccgcccattcctgccagcctccggtctcccagccatcccatggagttttcaccctaactgcacagccctgacatcagccacgtcccttcacccctgctttgtagtaaccaattagcttaacgtctgttcccatggttatttagtttcgttggcaactaacatacttcccagaaacaggccagcatctcccagtcccaccaccatcctgctggtggggccgtcctcttctggatgtcagatgagaactctcctgctggggaacaacagaaggacagaacatagaaccagaggaaaatgcattcaaatgcattccatcagtgtttctggacagtctacaatgtgccctggccggtgatcgctgctggagatatcgaagtcattaaaacatggtctctgtcctcaaggaa

SEQ ID NO: 183799 - DNA, 1672 bp, Homo sapiens
  Payload ID: 16215
  Gene Symbol: SLC35A2
  Gene Name: solute carrier family 35 (UDP-galactose transporter), member A2
  Uniprot ID: P78381
  ENST ID: ENST00000247138
  CDS Start-End: 224-1414
ggtgggtaggccgatcgggccgtgtccccggcctcccgatccgacggaatttggaaatcccggggctattcatacattgagcttttaggagcggaggagaaaagccaccaccctgacgatcccggctctcgctccaccttcactcaggtggcccggcagcggaagtgacgaacgcggaagtggtttttctgttgccgaggggacgggccgggcagatgccaacatggcagcggttggggctggtggttccaccgcggcgcccgggccaggggcggtttccgcgggtgcattggagccggggaccgccagtgcggctcacaggcgcctgaagtacatatccctagctgtgctggtggtccagaatgcctccctcatcctcagcatccgctacgcccgcacgttgccaggggaccgcttctttgccaccactgctgtggtcatggcggaagtgctcaaaggtctcacctgcctgctgctgctcttcgcacagaagaggggtaacgtgaagcacctggttctcttcctccatgaggctgtcctggtgcagtatgtggacacgctcaagctcgcagtgccctctctcatctacaccttgcagaataacctccagtatgttgccatctctaacctaccagctgccactttccaggtgacataccagctgaagatcctgaccacagcgctgttctccgtgctcatgctgaatcgcagcctttcccggctgcagtgggcctccctgctgctcctcttcactggcgtcgccattgtccaggcacagcaagccggtgggggaggcccacggccactggatcagaaccctggggcaggcctggcagccgtcgtggcctcctgtctctcctccggcttcgcaggtgtctactttgagaagatcctcaaaggcagctcaggctccgtgtggctgcgcaacctgcaactgggcctcttcggcacagcactgggcctggtggggctctggtgggctgagggtaccgccgtggccacccgtggtttcttttttgggtacacacctgctgtctggggcgtggtgctcaaccaggccttcggcgggctactggtggctgtggttgtcaagtacgctgacaatatcctcaagggctttgccacctccctgtccattgtgctgtccactgttgcctccattcgcctctttggcttccacgtggacccattatttgcccttggcgctggactcgtcattggtgctgtctacctctacagccttccccgaggtgcagccaaagccatagcctctgcctctgcctccgcctccgggccctgcgttcaccagcagcctcccgggcagccaccaccaccgcagctgtcttcccaccgtggagacctcatcacggagccctttctgccaaagttgctcaccaaggtgaagggttcctagccgctgggattgaagacattggcctggcctcgttctctcttcttgcccttggcccagctgggaccaaactctgatcagtattaggggtagagtgaggtagacactggactccctgtccccaccacccctgccccacccagggccaacatgactaagctctctcatgacccacctcagctcagccccccagcccctgccagctccacactatctcttagctgagtttttgcaaataaaatgtgttgtgtatcttgccga

SEQ ID NO: 183800 - DNA, 903 bp, Homo sapiens
  Payload ID: 16215
  Gene Symbol: SLC35A2
  Gene Name: solute carrier family 35 (UDP-galactose transporter), member A2
  ENST ID: ENST00000376512
  CDS Start-End: 42-533
gtttttctgttgccgaggggacgggccgggcagatgccaacatggcagcggttggggctggtggttccaccgcggcgcccgggccaggggcggtttccgcgggtgcattggagccggggaccgccagtgcggctcacaggcgcctgaagtacatatccctagctgtgctggtggtccagaatgcctccctcatcctcagcatccgctacgcccgcacgttgccaggggaccgcttctttgccaccactgctgtggtcatggcggaagtgctcaaaggtctcacctgcctgctgctgctcttcgcacagaagaggggtaacgtgaagcacctggttctcttcctccatgaggctgtcctggtgcagtatgtggacacgctcaagctcgcagtgccctctctcatctacaccttgcagaataacctccagtatgttgccatctctaacctaccagctgccactttccaggtgagccccaagcccagcatggccccagaggaactaactgggttggggactggagtatgggaatagcgtggtgggggggtgttgcagaggacaggggctatgtcaccttcagaatgtccttggaactccttcaacctcccttttctcgtctgtgaaaattgggggtggaaatagtaatgcctgttcactgagatgctaggatacttaaaagaaataatacctgtgaagagcccttgattggtgacagataagctttaggctatttgtgggcagctttgtgaaatggttaaagagcctggattctggggccaggctgtctgggttcaaatctcagctctgctaccttccagctgtgtgattttggggcacgtcacctaacctctctgtgccttagttttctcacctttaaattggggcttacagtggtgctcacttc

SEQ ID NO: 183801 - DNA, 1044 bp, Homo sapiens
  Payload ID: 16215
  Gene Symbol: SLC35A2
  Gene Name: solute carrier family 35 (UDP-galactose transporter), member A2
  ENST ID: ENST00000376515
  CDS Start-End: 82-738
atcgggggatgatctggaaagcgcgatcagtgaagcggacgaacggcaggataaggcgggtctagtgacaggaatgggccgatgaagctctgtagggatgctcacaggcgcctgaagtacatatccctagctgtgctggtggtccagaatgcctccctcatcctcagcatccgctacgcccgcacgttgccaggggaccgcttctttgccaccactgctgtggtcatggcggaagtgctcaaaggtctcacctgcctgctgctgctcttcgcacagaagaggggtaacgtgaagcacctggttctcttcctccatgaggctgtcctggtgcagtatgtggacacgctcaagctcgcagtgccctctctcatctacaccttgcagaataacctccagtatgttgccatctctaacctaccagctgccactttccagccttccccgaggtgcagccaaagccatagcctctgcctctgcctccgcctccgggccctgcgttcaccagcagcctcccgggcagccaccaccaccgcagctgtcttcccaccgtggagacctcatcacggagccctttctgccaaagtcagtgctggtgaagtgagggctggcagcaatggggggacacaagggagggggactggggtggagggtgttgggcatctgcaggacccaagtcgccaccctccggggcctggctcctctgggtttgggagatggtcttttctcccaggtcactgagacttctggaggggtgtgggactagagctgggtgtcacgtgaacccttcctggtagggtgacccccttcccctggagggggttttagagctgccgcctctgctccctctaacctctttggaggcagggttgggggtattgtcattcaaggccttttttttgtctgctccctccccgaccctgtgccctcttctggaggtttctcgtctgggagagtccctcccagcagtccctccacctccataaggacacactggacaaaactcccgcagctcttcaggaatgaccgatgcctacctgtggggtt

SEQ ID NO: 183802 - DNA, 3047 bp, Homo sapiens
  Payload ID: 16215
  Gene Symbol: SLC35A2
  Gene Name: solute carrier family 35 (UDP-galactose transporter), member A2
  Uniprot ID: P78381
  ENST ID: ENST00000376521
  CDS Start-End: 323-1504
atcgggggatgatctggaaagcgcgatcagtgaagcggacgaacggcaggataaggcgggtctagtgacaggaatgggccgatgaagctctgtagggatggtgggtaggccgatcgggccgtgtccccggcctcccgatccgacggaatttggaaatcccggggctattcatacattgagcttttaggagcggaggagaaaagccaccaccctgacgatcccggctctcgctccaccttcactcaggtggcccggcagcggaagtgacgaacgcggaagtggtttttctgttgccgaggggacgggccgggcagatgccaacatggcagcggttggggctggtggttccaccgcggcgcccgggccaggggcggtttccgcgggtgcattggagccggggaccgccagtgcggctcacaggcgcctgaagtacatatccctagctgtgctggtggtccagaatgcctccctcatcctcagcatccgctacgcccgcacgttgccaggggaccgcttctttgccaccactgctgtggtcatggcggaagtgctcaaaggtctcacctgcctgctgctgctcttcgcacagaagaggggtaacgtgaagcacctggttctcttcctccatgaggctgtcctggtgcagtatgtggacacgctcaagctcgcagtgccctctctcatctacaccttgcagaataacctccagtatgttgccatctctaacctaccagctgccactttccaggtgacataccagctgaagatcctgaccacagcgctgttctccgtgctcatgctgaatcgcagcctttcccggctgcagtgggcctccctgctgctcctcttcactggcgtcgccattgtccaggcacagcaagccggtgggggaggcccacggccactggatcagaaccctggggcaggcctggcagccgtcgtggcctcctgtctctcctccggcttcgcaggtgtctactttgagaagatcctcaaaggcagctcaggctccgtgtggctgcgcaacctgcaactgggcctcttcggcacagcactgggcctggtggggctctggtgggctgagggtaccgccgtggccacccgtggtttcttttttgggtacacacctgctgtctggggcgtggtgctcaaccaggccttcggcgggctactggtggctgtggttgtcaagtacgctgacaatatcctcaagggctttgccacctccctgtccattgtgctgtccactgttgcctccattcgcctctttggcttccacgtggacccattatttgcccttggcgctggactcgtcattggtgctgtctacctctacagccttccccgaggtgcagccaaagccatagcctctgcctctgcctccgcctccgggccctgcgttcaccagcagcctcccgggcagccaccaccaccgcagctgtcttcccaccgtggagacctcatcacggagccctttctgccaaagtcagtgctggtgaagtgagggctggcagcaatggggggacacaagggagggggactggggtggagggtgttgggcatctgcaggacccaagtcgccaccctccggggcctggctcctctgggtttgggagatggtcttttctcccaggtcactgagacttctggaggggtgtgggactagagctgggtgtcacgtgaacccttcctggtagggtgacccccttcccctggagggggttttagagctgccgcctctgctccctctaacctctttggaggcagggttgggggtattgtcattcaaggccttttttttgtctgctccctccccgaccctgtgccctcttctggaggtttctcgtctgggagagtccctcccagcagtccctccacctccataaggacacactggacaaaactcccgcagctcttcaggaatgaccgatgcctacctgtggggttcagttgcccatagtttgaggccttctctcctcccttaccaccgctctggatcatgttactagttccgtcttttgtgtggccttgggccagcttccttgataccttgaagatgggcttcttgtgagtccccagggagaaagggacaagagctaagatttttgcatcagcccttctggcagaaggtgtggtaggggccatttgttttttttagtggacttgggatttgtggtgtaatcatatcattaatgatccagggtgtgggaaaaatggaggtccttgaagtggctgaatctcattgtatttaagacactgtcagttgccagatgtaggcttatttttggagatgtctaggagaggaaaaagctaccaatcatactcttgatatccgtctggctgtgtgaggcacccctacctcatgggggtgtcttgggattgatgaactgtggaacctgcctcctgcgctccccaaagcttattaaccccttaactgtatcggggcggggtgtgtgtgtgcatggaagatgcctgggctgtctttgctatatgtaaatagagccattggatctttatttttgattaatttgttctgattttttggtttgttttttaaggaactgtaatgaacaaatgtcaggatatccaatgccaaataaagatgttgtatttatttagtccacgtgtagctttctgaccaggtgggcaccattactaaccccaggactaccagcctcaccaccgccgccctcacttgctcaggaaacccgcctgccagcctagcccagctttgtgtttttctttcctccccattcccaccacaggttgctcaccaaggtgaagggttcctagccgctgggattgaagacattggcctggcctcgttctctcttcttgcccttggcccagctgggaccaaactctgatcagtattaggggtagagtgaggtagacactggactccctgtccccaccacccctgccccacccagggccaacatgactaagctctctcatgacccacctcagctcagccccccagcccctgccagctccacactatctcttagctgagtttttgcaaataaaatgtgttgtgtatcttg

SEQ ID NO: 183803 - DNA, 865 bp, Homo sapiens
  Payload ID: 16215
  Gene Symbol: SLC35A2
  Gene Name: solute carrier family 35 (UDP-galactose transporter), member A2
  ENST ID: ENST00000376529
  CDS Start-End: 11-685
agatgccaacatggcagcggttggggctggtggttccaccgcggcgcccgggccaggggcggtttccgcgggtgcattggagccggggaccgccagtgcggctcacaggcgcctgaagtacatatccctagctgtgctggtggtccagaatgcctccctcatcctcagcatccgctacgcccgcacgttgccaggggaccgcttctttgccaccactgctgtggtcatggcggaagtgctcaaaggtctcacctgcctgctgctgctcttcgcacagaagaggggtaacgtgaagcacctggttctcttcctccatgaggctgtcctggtgcagtatgtggacacgctcaagctcgcagtgccctctctcatctacaccttgcagaataacctccagtatgttgccatctctaacctaccagctgccactttccagccttccccgaggtgcagccaaagccatagcctctgcctctgcctccgcctccgggccctgcgttcaccagcagcctcccgggcagccaccaccaccgcagctgtcttcccaccgtggagacctcatcacggagccctttctgccaaagttgctcaccaaggtgaagggttcctagccgctgggattgaagacattggcctggcctcgttctctcttcttgcccttggcccagctgggaccaaactctgatcagtattaggggtagagtgaggtagacactggactccctgtccccaccacccctgccccacccagggccaacatgactaagctctctcatgacccacctcagctcagccccccagcccctgccagctccacactatctcttagctgagtttttgcaaataaaatgtgttgtgtatcttg

SEQ ID NO: 183804 - DNA, 1857 bp, Homo sapiens
  Payload ID: 16215
  Gene Symbol: SLC35A2
  Gene Name: solute carrier family 35 (UDP-galactose transporter), member A2
  Uniprot ID: P78381
  ENST ID: ENST00000413561
  CDS Start-End: 1-607
catggcggaagtgctcaaaggtctcacctgcctgctgctgctcttcgcacagaagaggggtaacgtgaagcacctggttctcttcctccatgaggctgtcctggtgcagtatgtggacacgctcaagctcgcagtgccctctctcatctacaccttgcagaataacctccagtatgttgccatctctaacctaccagctgccactttccaggtgtctactttgagaagatcctcaaaggcagctcaggctccgtgtggctgcgcaacctgcaactgggcctcttcggcacagcactgggcctggtggggctctggtgggctgagggtaccgccgtggccacccgtggtttcttttttgggtacacacctgctgtctggggcgtggtgctcaaccaggccttcggcgggctactggtggctgtggttgtcaagtacgctgacaatatcctcaagggctttgccacctccctgtccattgtgctgtccactgttgcctccattcgcctctttggcttccacgtggacccattatttgcccttggcgctggactcgtcattggtgctgtctacctctacagccttccccgaggtgcagccaaagccatagcctctgcctctgcctccgcctccgggccctgcgttcaccagcagcctcccgggcagccaccaccaccgcagctgtcttcccaccgtggagacctcatcacggagccctttctgccaaagtcagtgctggtgaagtgagggctggcagcaatggggggacacaagggagggggactggggtggagggtgttgggcatctgcaggacccaagtcgccaccctccggggcctggctcctctgggtttgggagatggtcttttctcccaggtcactgagacttctggaggggtgtgggactagagctgggtgtcacgtgaacccttcctggtagggtgacccccttcccctggagggggttttagagctgccgcctctgctccctctaacctctttggaggcagggttgggggtattgtcattcaaggccttttttttgtctgctccctccccgaccctgtgccctcttctggaggtttctcgtctgggagagtccctcccagcagtccctccacctccataaggacacactggacaaaactcccgcagctcttcaggaatgaccgatgcctacctgtggggttcagttgcccatagtttgaggccttctctcctcccttaccaccgctctggatcatgttactagttccgtcttttgtgtggccttgggccagcttccttgataccttgaagatgggcttcttgtgagtccccagggagaaagggacaagagctaagatttttgcatcagcccttctggcagaaggtgtggtaggggccatttgttttttttagtggacttgggatttgtggtgtaatcatatcattaatgatccagggtgtgggaaaaatggaggtccttgaagtggctgaatctcattgtatttaagacactgtcagttgccagatgtaggcttatttttggagatgtctaggagaggaaaaagctaccaatcatactcttgatatccgtctggctgtgtgaggcacccctacctcatgggggtgtcttgggattgatgaactgtggaacctgcctcctgcgctccccaaagcttattaaccccttaactgtatcggggcggggtgtgtgtgtgcatggaagatgcctgggctgtctttgctatatgtaaatagagccattggatctttatttttgattaatttgttctgattttttggtttgttttttaaggaactgtaatgaacaaatgtcaggatatccaatgccaaataaagatgttgtatttattt

SEQ ID NO: 183805 - DNA, 1739 bp, Homo sapiens
  Payload ID: 16215
  Gene Symbol: SLC35A2
  Gene Name: solute carrier family 35 (UDP-galactose transporter), member A2
  Uniprot ID: P78381
  ENST ID: ENST00000445167
  CDS Start-End: 34-762
gttgccgaggggacgggccgggcagatgccaacatggcagcggttggggctggtggttccaccgcggcgcccgggccaggggcggtttccgcgggtgcattggagccggggaccgccagtgcggctcacaggcgcctgaagtacatatccctagctgtgctggtggtccagaatgcctccctcatcctcagcatccgctacgcccgcacgttgccaggggaccgcttctttgccaccactgctgtggtcatggcggaagtgctcaaaggtctcacctgcctgctgctgctcttcgcacagaagaggggtaacgtgaagcacctggttctcttcctccatgaggctgtcctggtgcagtatgtggacacgctcaagctcgcagtgccctctctcatctacaccttgcagaataacctccagtatgttgccatctctaacctaccagctgccactttccagccttccccgaggtgcagccaaagccatagcctctgcctctgcctccgcctccgggccctgcgttcaccagcagcctcccgggcagccaccaccaccgcagctgtcttcccaccgtggagacctcatcacggagccctttctgccaaagtcagtgctggtgaagtgagggctggcagcaatggggggacacaagggagggggactggggtggagggtgttgggcatctgcaggacccaagtcgccaccctccggggcctggctcctctgggtttgggagatggtcttttctcccaggtcactgagacttctggaggggtgtgggactagagctgggtgtcacgtgaacccttcctggtagggtgacccccttcccctggagggggttttagagctgccgcctctgctccctctaacctctttggaggcagggttgggggtattgtcattcaaggccttttttttgtctgctccctccccgaccctgtgccctcttctggaggtttctcgtctgggagagtccctcccagcagtccctccacctccataaggacacactggacaaaactcccgcagctcttcaggaatgaccgatgcctacctgtggggttcagttgcccatagtttgaggccttctctcctcccttaccaccgctctggatcatgttactagttccgtcttttgtgtggccttgggccagcttccttgataccttgaagatgggcttcttgtgagtccccagggagaaagggacaagagctaagatttttgcatcagcccttctggcagaaggtgtggtaggggccatttgttttttttagtggacttgggatttgtggtgtaatcatatcattaatgatccagggtgtgggaaaaatggaggtccttgaagtggctgaatctcattgtatttaagacactgtcagttgccagatgtaggcttatttttggagatgtctaggagaggaaaaagctaccaatcatactcttgatatccgtctggctgtgtgaggcacccctacctcatgggggtgtcttgggattgatgaactgtggaacctgcctcctgcgctccccaaagcttattaaccccttaactgtatcggggcggggtgtgtgtgtgcatggaagatgcctgggctgtctttgctatatgtaaatagagccattggatctttatttttgattaatttgttctgattttttggtttgttttttaaggaactgtaatgaacaaatgtcaggatatccaatgccaaataaagatgttgtatttattta

SEQ ID NO: 183806 - DNA, 877 bp, Homo sapiens
  Payload ID: 16215
  Gene Symbol: SLC35A2
  Gene Name: solute carrier family 35 (UDP-galactose transporter), member A2
  ENST ID: ENST00000446885
  CDS Start-End: 351-877
cgcgatcagtgaagcggacgaacggcaggataaggcgggtctagtgacaggaatgggccgatgaagctctgtagggatggtgggtaggccgatcgggccgtgtccccggcctcccgatccgacggaatttggaaatcccggggctattcatacattgagcttttaggagcggaggagaaaagccaccaccctgacgatcccggctctcgctccaccttcactcagctcacaggcgcctgaagtacatatccctagctgtgctggtggtccagaatgcctccctcatcctcagcatccgctacgcccgcacgttgccaggggaccgcttctttgccaccactgctgtggtcatggcggaagtgctcaaaggtctcacctgcctgctgctgctcttcgcacagaagaggggtaacgtgaagcacctggttctcttcctccatgaggctgtcctggtgcagtatgtggacacgctcaagctcgcagtgccctctctcatctacaccttgcagaataacctccagtatgttgccatctctaacctaccagctgccactttccaggtgacataccagctgaagatcctgaccacagcgctgttctccgtgctcatgctgaatcgcagcctttcccggctgcagtgggcctccctgctgctcctcttcactggcgtcgccattgtccaggcacagcaagccggtgggggaggcccacggccactggatcagaaccctggggcaggcctggcagccgtcgtggcctcctgtctctcctccggcttcgcaggtgtctactttgagaagatcctcaaaggcagctcaggctccgtgtggctgcgcaacctgcaactgggcctcttcggcacagcactgggcctggt

SEQ ID NO: 183807 - DNA, 1563 bp, Homo sapiens
  Payload ID: 16215
  Gene Symbol: SLC35A2
  Gene Name: solute carrier family 35 (UDP-galactose transporter), member A2
  Uniprot ID: P78381
  ENST ID: ENST00000452555
  CDS Start-End: 11-1276
agatgccaacatggcagcggttggggctggtggttccaccgcggcgcccgggccaggggcggtttccgcgggtgcattggagccggggaccgccagtgcggagttgcttctcacttgggaggaagccgaggcgcgtggccagggtttgcctcagccattacctgacacctcagtaaggattccagctcacaggcgcctgaagtacatatccctagctgtgctggtggtccagaatgcctccctcatcctcagcatccgctacgcccgcacgttgccaggggaccgcttctttgccaccactgctgtggtcatggcggaagtgctcaaaggtctcacctgcctgctgctgctcttcgcacagaagaggggtaacgtgaagcacctggttctcttcctccatgaggctgtcctggtgcagtatgtggacacgctcaagctcgcagtgccctctctcatctacaccttgcagaataacctccagtatgttgccatctctaacctaccagctgccactttccaggtgacataccagctgaagatcctgaccacagcgctgttctccgtgctcatgctgaatcgcagcctttcccggctgcagtgggcctccctgctgctcctcttcactggcgtcgccattgtccaggcacagcaagccggtgggggaggcccacggccactggatcagaaccctggggcaggcctggcagccgtcgtggcctcctgtctctcctccggcttcgcaggtgtctactttgagaagatcctcaaaggcagctcaggctccgtgtggctgcgcaacctgcaactgggcctcttcggcacagcactgggcctggtggggctctggtgggctgagggtaccgccgtggccacccgtggtttcttttttgggtacacacctgctgtctggggcgtggtgctcaaccaggccttcggcgggctactggtggctgtggttgtcaagtacgctgacaatatcctcaagggctttgccacctccctgtccattgtgctgtccactgttgcctccattcgcctctttggcttccacgtggacccattatttgcccttggcgctggactcgtcattggtgctgtctacctctacagccttccccgaggtgcagccaaagccatagcctctgcctctgcctccgcctccgggccctgcgttcaccagcagcctcccgggcagccaccaccaccgcagctgtcttcccaccgtggagacctcatcacggagccctttctgccaaagtcagtgctggtgaagtgagggctggcagcaatggggggacacaagggagggggactggggtggagggtgttgggcatctgcaggacccaagtcgccaccctccggggcctggctcctctgggtttgggagatggtcttttctcccaggtcactgagacttctggaggggtgtgggactagagctgggtgtcacgtgaacccttcctggtagggtgacccccttcccctggagggggttttagagctgccgcctctgctccctctaacctctttggaggcagggttgggggtattgtcattcaagg

SEQ ID NO: 183808 - DNA, 1614 bp, Homo sapiens
  Payload ID: 16215
  Gene Symbol: SLC35A2
  Gene Name: solute carrier family 35 (UDP-galactose transporter), member A2
  ENST ID: ENST00000616181
  CDS Start-End: 11-1231
agatgccaacatggcagcggttggggctggtggttccaccgcggcgcccgggccaggggcggtttccgcgggtgcattggagccggggaccgccagtgcgggtgagacagtctgcccgagcagtcgcatgggaggcggagctcacaggcgcctgaagtacatatccctagctgtgctggtggtccagaatgcctccctcatcctcagcatccgctacgcccgcacgttgccaggggaccgcttctttgccaccactgctgtggtcatggcggaagtgctcaaaggtctcacctgcctgctgctgctcttcgcacagaagaggggtaacgtgaagcacctggttctcttcctccatgaggctgtcctggtgcagtatgtggacacgctcaagctcgcagtgccctctctcatctacaccttgcagaataacctccagtatgttgccatctctaacctaccagctgccactttccaggtgacataccagctgaagatcctgaccacagcgctgttctccgtgctcatgctgaatcgcagcctttcccggctgcagtgggcctccctgctgctcctcttcactggcgtcgccattgtccaggcacagcaagccggtgggggaggcccacggccactggatcagaaccctggggcaggcctggcagccgtcgtggcctcctgtctctcctccggcttcgcaggtgtctactttgagaagatcctcaaaggcagctcaggctccgtgtggctgcgcaacctgcaactgggcctcttcggcacagcactgggcctggtggggctctggtgggctgagggtaccgccgtggccacccgtggtttcttttttgggtacacacctgctgtctggggcgtggtgctcaaccaggccttcggcgggctactggtggctgtggttgtcaagtacgctgacaatatcctcaagggctttgccacctccctgtccattgtgctgtccactgttgcctccattcgcctctttggcttccacgtggacccattatttgcccttggcgctggactcgtcattggtgctgtctacctctacagccttccccgaggtgcagccaaagccatagcctctgcctctgcctccgcctccgggccctgcgttcaccagcagcctcccgggcagccaccaccaccgcagctgtcttcccaccgtggagacctcatcacggagccctttctgccaaagtcagtgctggtgaagtgagggctggcagcaatggggggacacaagggagggggactggggtggagggtgttgggcatctgcaggacccaagtcgccaccctccggggcctggctcctctgggtttgggagatggtcttttctcccaggtcactgagacttctggaggggtgtgggactagagctgggtgtcacgtgaacccttcctggtagggtgacccccttcccctggagggggttttagagctgccgcctctgctccctctaacctctttggaggcagggttgggggtattgtcattcaaggccttttttttgtctgctccctccccgaccctgtgccctcttctggaggtttctcgtctgggagagtccctcccagcagtccctccacctccataag

SEQ ID NO: 183809 - DNA, 1008 bp, Homo sapiens
  Payload ID: 16215
  Gene Symbol: SLC35A2
  Gene Name: solute carrier family 35 (UDP-galactose transporter), member A2
  ENST ID: ENST00000635015
  CDS Start-End: 11-541
agatgccaacatggcagcggttggggctggtggttccaccgcggcgcccgggccaggggcggtttccgcgggtgcattggagccggggaccgccagtgcgggtgagacagtctgcccgagcagtcgcatgggaggcggagctcacaggcgcctgaagtacatatccctagctgtgctggtggtccagaatgcctccctcatcctcagcatccgctacgcccgcacgttgccaggggaccgcttctttgccaccactgctgtggtcatggcggaagtgctcaaaggtctcacctgcctgctgctgctcttcgcacagaagaggggtaacgtgaagcacctggttctcttcctccatgaggctgtcctggtgcagtatgtggacacgctcaagctcgcagtgccctctctcatctacaccttgcagaataacctccagtatgttgccatctctaacctaccagctgccactttccaggtgagccccaagcccagcatggccccagaggaactaactgggttggggactggagtatgggaatagcgtggtgggggggtgttgcagaggacaggggctatgtcaccttcagaatgtccttggaactccttcaacctcccttttctcgtctgtgaaaattgggggtggaaatagtaatgcctgttcactgagatgctaggatacttaaaagaaataatacctgtgaagagcccttgattggtgacagataagctttaggctatttgtgggcagctttgtgaaatggttaaagagcctggattctggggccaggctgtctgggttcaaatctcagctctgctaccttccagctgtgtgattttggggcacgtcacctaacctctctgtgccttagttttctcacctttaaattggggcttacagtggtgctcacttcagaatggtgttgtgagaattaaatgaatgaattcacgtgcagtgcctagaaccacactgatatattgtaagcactatgtaagtatttgctgacattg

SEQ ID NO: 183810 - DNA, 1424 bp, Homo sapiens
  Payload ID: 16215
  Gene Symbol: SLC35A2
  Gene Name: solute carrier family 35 (UDP-galactose transporter), member A2
  ENST ID: ENST00000635589
  CDS Start-End: 11-1009
agatgccaacatggcagcggttggggctggtggttccaccgcggcgcccgggccaggggcggtttccgcgggtgcattggagccggggaccgccagtgcgggtaacgtgaagcacctggttctcttcctccatgaggctgtcctggtgcagtatgtggacacgctcaagctcgcagtgccctctctcatctacaccttgcagaataacctccagtatgttgccatctctaacctaccagctgccactttccaggtgacataccagctgaagatcctgaccacagcgctgttctccgtgctcatgctgaatcgcagcctttcccggctgcagtgggcctccctgctgctcctcttcactggcgtcgccattgtccaggcacagcaagccggtgggggaggcccacggccactggatcagaaccctggggcaggcctggcagccgtcgtggcctcctgtctctcctccggcttcgcaggtgtctactttgagaagatcctcaaaggcagctcaggctccgtgtggctgcgcaacctgcaactgggcctcttcggcacagcactgggcctggtggggctctggtgggctgagggtaccgccgtggccacccgtggtttcttttttgggtacacacctgctgtctggggcgtggtgctcaaccaggccttcggcgggctactggtggctgtggttgtcaagtacgctgacaatatcctcaagggctttgccacctccctgtccattgtgctgtccactgttgcctccattcgcctctttggcttccacgtggacccattatttgcccttggcgctggactcgtcattggtgctgtctacctctacagccttccccgaggtgcagccaaagccatagcctctgcctctgcctccgcctccgggccctgcgttcaccagcagcctcccgggcagccaccaccaccgcagctgtcttcccaccgtggagacctcatcacggagccctttctgccaaagtcagtgctggtgaagtgagggctggcagcaatggggggacacaagggagggggactggggtggagggtgttgggcatctgcaggacccaagtcgccaccctccggggcctggctcctctgggtttgggagatggtcttttctcccaggtcactgagacttctggaggggtgtgggactagagctgggtgtcacgtgaacccttcctggtagggtgacccccttcccctggagggggttttagagctgccgcctctgctccctctaacctctttggaggcagggttgggggtattgtcattcaaggccttttttttgtctgctccctccccgaccctgtgccctcttctggaggtttctcgtctgggagagtccctcccagcagtccctccacctccataaggacacactggacaaaactcccgcagctcttca

SEQ ID NO: 183811 - DNA, 706 bp, Homo sapiens
  Payload ID: 16215
  Gene Symbol: SLC35A2
  Gene Name: solute carrier family 35 (UDP-galactose transporter), member A2
  ENST ID: ENST00000635460
  CDS Start-End: 1-526
ggcagcggttggggctggtggttccaccgcggcgcccgggccaggggcggtttccgcgggtgcattggagccggggaccgccagtgcggctcacaggcgcctgaagtacatatccctagctgtgctggtggtccagaatgcctccctcatcctcagcatccgctacgcccgcacgttgccaggggaccgcttctttgccaccactgctgtggtcatggcggaagtgctcaaaggtctcacctgcctgctgctgctcttcgcacagaagaggggtaacgtgaagcacctggttctcttcctccatgaggctgtcctggtgcagtatgtggacacgctcaagctcgcagtgccctctctcatctacaccttgcagaataacctccagtatgttgccatctctaacctaccagctgccactttccaggttgctcaccaaggtgaagggttcctagccgctgggattgaagacattggcctggcctcgttctctcttcttgcccttggcccagctgggaccaaactctgatcagtattaggggtagagtgaggtagacactggactccctgtccccaccacccctgccccacccagggccaacatgactaagctctctcatgacccacctcagctcagccccccagcccctgccagctccacactatctcttagctgagtttttgcaaataaaatgtgttgtgtatcttg

SEQ ID NO: 183812 - DNA, 486 bp, Homo sapiens
  Payload ID: 16215
  Gene Symbol: SLC35A2
  Gene Name: solute carrier family 35 (UDP-galactose transporter), member A2
  ENST ID: ENST00000634665
  CDS Start-End: 11-355
agatgccaacatggcagcggttggggctggtggttccaccgcggcgcccgggccaggggcggtttccgcgggtgcattggagccggggaccgccagtgcggctcacaggcgcctgaagtacatatccctagctgtgctggtggtccagaatgcctccctcatcctcagcatccgctacgcccgcacgttgccaggggaccgcttctttgccaccactgctgtggtcatggcggaagtgctcaaaggtctcacctgcctgctgctgctcttcgcacagaagaggggctgtcctggtgcagtatgtggacacgctcaagctcgcagtgccctctctcatctacaccttgcagaataacctccagtatgttgccatctctaacctaccagctgccactttccaggtgacataccagctgaagatcctgaccacagcgctgttctccgtgctcatgctgaatcgcagcctttcccggctgcagtgggcct

SEQ ID NO: 183813 - DNA, 533 bp, Homo sapiens
  Payload ID: 16215
  Gene Symbol: SLC35A2
  Gene Name: solute carrier family 35 (UDP-galactose transporter), member A2
  ENST ID: ENST00000634461
  CDS Start-End: 34-342
gttgccgaggggacgggccgggcagatgccaacatggcagcggttggggctggtggttccaccgcggcgcccgggccaggggcggtttccgcgggtgcattggagccggggaccgccagtgcgggtaacgtgaagcacctggttctcttcctccatgaggctgtcctggtgcagtatgtggacacgctcaagctcgcagtgccctctctcatctacaccttgcagaataacctccagtatgttgccatctctaacctaccagctgccactttccaggtgagccccaagcccagcatggccccagaggaactaactgggttggggactggagtatgggaatagcgtggtgggggggtgttgcagaggacaggggctatgtcaccttcagaatgtccttggaactccttcaacctcccttttctcgtctgtgaaaattgggggtggaaatagtaatgcctgttcactgagatgctaggatacttaaaagaaataatacctgtgaagagcccttgattggtgacagataagcttta

SEQ ID NO: 183814 - DNA, 2046 bp, Homo sapiens
  Payload ID: 16215
  Gene Symbol: SLC35A2
  Gene Name: solute carrier family 35 (UDP-galactose transporter), member A2
  ENST ID: ENST00000635285
  CDS Start-End: 16-1197
cgggcagatgccaacatggcagcggttggggctggtggttccaccgcggcgcccgggccaggggcggtttccgcgggtgcattggagccggggaccgccagtgcggctcacaggcgcctgaagtacatatccctagctgtgctggtggtccagaatgcctccctcatcctcagcatccgctacgcccgcacgttgccaggggaccgcttctttgccaccactgctgtggtcatggcggaagtgctcaaaggtctcacctgcctgctgctgctcttcgcacagaagaggggtaacgtgaagcacctggttctcttcctccatgaggctgtcctggtgcagtatgtggacacgctcaagctcgcagtgccctctctcatctacaccttgcagaataacctccagtatgttgccatctctaacctaccagctgccactttccaggtgacataccagctgaagatcctgaccacagcgctgttctccgtgctcatgctgaatcgcagcctttcccggctgcagtgggcctccctgctgctcctcttcactggcgtcgccattgtccaggcacagcaagccggtgggggaggcccacggccactggatcagaaccctggggcaggcctggcagccgtcgtggcctcctgtctctcctccggcttcgcaggtgtctactttgagaagatcctcaaaggcagctcaggctccgtgtggctgcgcaacctgcaactgggcctcttcggcacagcactgggcctggtggggctctggtgggctgagggtaccgccgtggccacccgtggtttcttttttgggtacacacctgctgtctggggcgtggtgctcaaccaggccttcggcgggctactggtggctgtggttgtcaagtacgctgacaatatcctcaagggctttgccacctccctgtccattgtgctgtccactgttgcctccattcgcctctttggcttccacgtggacccattatttgcccttggcgctggactcgtcattggtgctgtctacctctacagccttccccgaggtgcagccaaagccatagcctctgcctctgcctccgcctccgggccctgcgttcaccagcagcctcccgggcagccaccaccaccgcagctgtcttcccaccgtggagacctcatcacggagccctttctgccaaagtcagtgctggtgaagtgagggctggcagcaatggggggacacaagggagggggactggggtggagggtgttgggcatctgcaggacccaagtcgccaccctccggggcctggctcctctgggtttgggagatggtcttttctcccaggtcactgagacttctggaggggtgtgggactagagctgggtgtcacgtgaacccttcctggtagggtgacccccttcccctggagggggttttagagctgccgcctctgctccctctaacctctttggaggcagggttgggggtattgtcattcaaggccttttttttgtctgctccctccccgaccctgtgccctcttctggaggtttctcgtctgggagagtccctcccagcagtccctccacctccataaggacacactggacaaaactcccgcagctcttcaggaatgaccgatgcctacctgtggggttcagttgcccatagtttgaggccttctctcctcccttaccaccgctctggatcatgttactagttccgtcttttgtgtggccttgggccagcttccttgataccttgaagatgggcttcttgttgctcaccaaggtgaagggttcctagccgctgggattgaagacattggcctggcctcgttctctcttcttgcccttggcccagctgggaccaaactctgatcagtattaggggtagagtgaggtagacactggactccctgtccccaccacccctgccccacccagggccaacatgactaagctctctcatgacccacctcagctcagccccccagcccctgccagctccacactatctcttagctgagtttttgcaaataaaatgtgttgtgtatcttgccga

SEQ ID NO: 183815 - DNA, 584 bp, Homo sapiens
  Payload ID: 16215
  Gene Symbol: SLC35A2
  Gene Name: solute carrier family 35 (UDP-galactose transporter), member A2
  ENST ID: ENST00000635238
  CDS Start-End: 11-584
agatgccaacatggcagcggttggggctggtggttccaccgcggcgcccgggccaggggcggtttccgcgggtgcattggagccggggaccgccagtgcggctcacaggcgcctgaagtacatatccctagctgtgctggtggtccagaatgcctccctcatcctcagcatccgctacgcccgcacgttgccaggggaccgcttctttgccaccactgctgtggtcatggcggaagtgctcaaaggtaacgtgaagcacctggttctcttcctccatgaggctgtcctggtgcagtatgtggacacgctcaagctcgcagtgccctctctcatctacaccttgcagaataacctccagtatgttgccatctctaacctaccagctgccactttccaggtgacataccagctgaagatcctgaccacagcgctgttctccgtgctcatgctgaatcgcagcctttcccggctgcagtgggcctccctgctgctcctcttcactggcgtcgccattgtccaggcacagcaagccggtgggggaggcccacggccactggatcagaaccctggggcaggcctggcag

SEQ ID NO: 183816 - DNA, 2812 bp, Homo sapiens
  Payload ID: 16215
  Gene Symbol: SLC35A2
  Gene Name: solute carrier family 35 (UDP-galactose transporter), member A2
  ENST ID: ENST00000635628
  CDS Start-End: 11-193
agatgccaacatggcagcggttggggctggtggttccaccgcggcgcccgggccaggggcggtttccgcgggtgcattggagccggggaccgccagtgcgggtgagacagtctgcccgagcagtcgcatgggaggcggaggtcgggatcgctgggagtcgggaatgttcctcactaaactcacaggcgcctgaagtacatatccctagctgtgctggtggtccagaatgcctccctcatcctcagcatccgctacgcccgcacgttgccaggggaccgcttctttgccaccactgctgtggtcatggcggaagtgctcaaaggtctcacctgcctgctgctgctcttcgcacagaagaggggtaacgtgaagcacctggttctcttcctccatgaggctgtcctggtgcagtatgtggacacgctcaagctcgcagtgccctctctcatctacaccttgcagaataacctccagtatgttgccatctctaacctaccagctgccactttccaggtgacataccagctgaagatcctgaccacagcgctgttctccgtgctcatgctgaatcgcagcctttcccggctgcagtgggcctccctgctgctcctcttcactggcgtcgccattgtccaggcacagcaagccggtgggggaggcccacggccactggatcagaaccctggggcaggcctggcagccgtcgtggcctcctgtctctcctccggcttcgcaggtgtctactttgagaagatcctcaaaggcagctcaggctccgtgtggctgcgcaacctgcaactgggcctcttcggcacagcactgggcctggtggggctctggtgggctgagggtaccgccgtggccacccgtggtttcttttttgggtacacacctgctgtctggggcgtggtgctcaaccaggccttcggcgggctactggtggctgtggttgtcaagtacgctgacaatatcctcaagggctttgccacctccctgtccattgtgctgtccactgttgcctccattcgcctctttggcttccacgtggacccattatttgcccttggcgctggactcgtcattggtgctgtctacctctacagccttccccgaggtgcagccaaagccatagcctctgcctctgcctccgcctccgggccctgcgttcaccagcagcctcccgggcagccaccaccaccgcagctgtcttcccaccgtggagacctcatcacggagccctttctgccaaagtcagtgctggtgaagtgagggctggcagcaatggggggacacaagggagggggactggggtggagggtgttgggcatctgcaggacccaagtcgccaccctccggggcctggctcctctgggtttgggagatggtcttttctcccaggtcactgagacttctggaggggtgtgggactagagctgggtgtcacgtgaacccttcctggtagggtgacccccttcccctggagggggttttagagctgccgcctctgctccctctaacctctttggaggcagggttgggggtattgtcattcaaggccttttttttgtctgctccctccccgaccctgtgccctcttctggaggtttctcgtctgggagagtccctcccagcagtccctccacctccataaggacacactggacaaaactcccgcagctcttcaggaatgaccgatgcctacctgtggggttcagttgcccatagtttgaggccttctctcctcccttaccaccgctctggatcatgttactagttccgtcttttgtgtggccttgggccagcttccttgataccttgaagatgggcttcttgtgagtccccagggagaaagggacaagagctaagatttttgcatcagcccttctggcagaaggtgtggtaggggccatttgttttttttagtggacttgggatttgtggtgtaatcatatcattaatgatccagggtgtgggaaaaatggaggtccttgaagtggctgaatctcattgtatttaagacactgtcagttgccagatgtaggcttatttttggagatgtctaggagaggaaaaagctaccaatcatactcttgatatccgtctggctgtgtgaggcacccctacctcatgggggtgtcttgggattgatgaactgtggaacctgcctcctgcgctccccaaagcttattaaccccttaactgtatcggggcggggtgtgtgtgtgcatggaagatgcctgggctgtctttgctatatgtaaatagagccattggatctttatttttgattaatttgttctgattttttggtttgttttttaaggaactgtaatgaacaaatgtcaggatatccaatgccaaataaagatgttgtatttatttagtccacgtgtagctttctgaccaggtgggcaccattactaaccccaggactaccagcctcaccaccgccgccctcacttgctcaggaaacccgcctgccagcctagcccagctttgtgtttttctttcctccccattcccaccacaggttgctcaccaaggtgaagggttcctagccgctgggattgaagacattggcctggcctcgttctctcttcttgcccttggcccagctgggaccaaactctgatcagtattaggggtagagtgaggtagacactggactccctgtccccaccacccctgccccacccagggccaacatgactaagctctctcatgacccacctcagctcagccccccagcccctgccagctccacactatctcttagctgagtttttgcaaataaaatgtgttgtgtatcttg

SEQ ID NO: 183817 - DNA, 6162 bp, Homo sapiens
  Payload ID: 16216
  Gene Symbol: SLC35D1
  Gene Name: solute carrier family 35 (UDP-GlcA/UDP-GalNAc transporter), member D1
  Uniprot ID: Q9NTN3
  ENST ID: ENST00000235345
  CDS Start-End: 87-1154
ccaactcctggagtcccctgggagctgccgctgcaggcccccgagccgctaggccccgccgccaggccaccgctgctgcggcagccatggcggaagttcatagacgtcagcatgctcgggttaaaggagaagcccccgcgaaatcctccacactccgagatgaggaggagctggggatggcgtcggccgaaacgctgaccgtgtttctgaagctgctggccgccggcttttacggcgtgagctccttcctgatcgtggtggtgaataagagcgtgctcaccaattacagatttccctcctcactatgtgttggacttggccagatggtggccacagtggcagttctctgggtgggaaaggcgctcagagtagtcaagtttcctgaccttgacagaaatgtacctcgaaagacgtttccactacctctactatattttgggaaccaaatcacgggactgttcagcacaaagaaactgaacttgccaatgtttacagttctgagaaggttctccatcctgtttacaatgtttgctgaaggagttttactcaagaagactttttcttggggtattaaaatgactgtatttgcaatgattattggagcctttgtagctgccagctctgacttggcatttgatctggaaggatatgcttttattctgataaacgatgtcctaacagcagcaaatggtgcatacgtaaaacaaaaattagattcaaaagagctgggaaaatatggactgctctattacaatgcactgttcatgattctgcccaccctggccattgcgtatttcacaggagatgcacaaaaggctgtggagtttgaaggctgggctgacaccctctttcttctgcagttcaccctctcctgtgtgatggggtttatcttaatgtacgccacagtactctgcacgcagtataattctgctcttacaactacaatagttggctgtattaagaatatattaataacttatattggaatggtctttggtggagattatattttcacgtggacaaacttcattggtttaaatatcagcattgctgggagcctggtatattcctatatcactttcactgaagagcagctgagcaaacagtcagaggctaataacaagctggacattaaggggaaaggagcagtgtgaccagaggattgcttcatctgatacgtaggcctaagtttttaatcaactcagaacactggcagttcctacagagacactgaggtgtcttgattatggaggaaataaccattcctttgcacttgtacaatctgaggattgattgctgccttttaaaattttatgaagagagaaacttataattgactctattttaaatatgttgtttgaattaatttatatcagactggaaaaggtactgggctttttaatttatttttcttatatgccgacagtgaaacatcagtgttttgaaagtattttatttcataatttgatatccaggtgtccctgagagctgcatatgtaatgtttgccaactggagcttcatcattcaaattgttgctgcatctggaggcagtttagcctttcctctgctggaaatgcagacgaatatgtgaaatttctcttctttgaatcttatttcttatgattgcattgtcttcatcatatcatcattccatttgccaaggaaaacaactttggcactataaaaatatgtggggctttgaagtgtattgctatctatgttggcttccctgactttcataggatgagcagagtgcattccttgaaaacatgttctttttttgttgtgtagaatggggataatgaagggggtgagaaagtaggccttttactaatttttcatctatttgacttattgattcaactaaaatgttttaagtatatgtgccaggcattgtgctaaatgctggggatacagagatgtttgcagaggtagttgaaacatctcactcctgccatagtgactcaggtaaggttgagaatttagctctgttaatctattcagaagatgtcactaagagtaagttgtttcagcactcaaaagccgcaaatctgtaaattggattaagaacacctgccctacctacccggcaatagtgtgaatccaaatgctgcaatgtgagatgaggtacaagtaaagagctgtgttttgtaaaccagtgcagctcagcattgactccctctctaagtgaaaattgcagacaggcaagtctgttttcccttgccaccttcctttgggtttggttgctctttggatgaatatgatgaggtcccacatttctgaatttattggtttgaggggaaaggctggttagacgtctttgtattgtcaatggttggtttttctctggcagtgtcagtgttagagctatcatcttccttcttaaatggcatgagcaatgagcaaacttccctcctttcaacattctcacctacatcatgtgccccttggctcacctactgagcttgccaacttctctcaaaaccaatgctgcattttgggagagcagctgtgaatgggcactgcctaaattgcctcttggggtaatctggagggtggaggtgttaactcaaacataaccctatgacttgactcagagatatccattgactttgaggattagtgtgtttgctcaggccagttgtacagccagtgtgcaagagatttggtacctttgcactaatgcacacaccagtgtctatttcattgggtttggaatccactggactctgttgacctaaacagttagggttttgattttttttgatatgcaaatttatattgagatcattttcatattcctgtcttttggtttgtctttactaaagcttggctggtggtgctgtgtccctagaattatccctgcaaccaactcccaagttacaagcttcattaagagccttagactcacttttttctagcatcttctgacctgagaaaattccactgggagtaaaggatagtatcttgtgtcatatgggtcttactctccctattttaccaatgagaaaacaaaactcagagaaagatgacttgctaatacatcaaacccatgtcctttttattgaactatgctgccatttaattaaccgcccttcccctctgagggagtaaggaaacagatcctgagttcacttgagcactttcaaaaaagcaagcagttgattgaatttggtgtcagagaggagcatactttgcaaatcaggaagagtgacagcttaccctgtcctggaacccttatcccacttccaggctgactttagttgataatgcacttctggctgtaaatgttgccaacacttcctggttttgcttaggtacagtgaaagggcatagtgagagctatttttagtgattctgttctttctgtcagcaacatgaaggagggacgtttgaataatttttgttgtagaatatttcttcatgaaaggcttttgggtgtctttaacaggtgttgggctagagccccaccaggagttgaactgcctcttgggggtcaggttccctaggagatctgtcacctcttcaggagtatttgagaacattgtgtagttacagcttcactaaatgcacgtgacaggcttctgtgccttgggagccctggcttatgctgaaacttctggctgaccagagcagtacagcaactttgccctgtctgtgttctgcttcctggatgcatccttcagccactaaccagcattgcaagatggagcagggtgaacaagctggagactgaatagtcttttggagtttgcgttttgattattgcaggcgtgttacaatatactggtgatttacctggtactgtggcacctcccagaaagtctggtttttgccccatgtttgatatttactaggcagaaattctttgtcctgttaactgcctcctgggagaaaaagaggcaatacagagttaaatccttaatttgcccactgagacagatgagctgtggtattccaaaagacaaattctatgactagtgtctcctgttcaatgtaagtgagaccctctttggccaatctgcttctagtcaaggctaaatggattggaataaccctagttggccaggctacacattgccagcatgtcccgttgagttttaattgcctcatgtggctgtggactttatgagtcaatcatttgtaggctccagtttgcacctagtttttttttttaaaaagtgcatttacacgcttttggtagtcctgttttatcaagaatccatggagggttttggtcagtacagctggtgcaggatcctcacggagaaacagtggagtttcacattgagttggtttgaaatggcaccccaggactttgggcctgccttacttgatagcctcgttcagtgagcaaagacttagtgagcagctcttgtatgccaagtattttgctaagctctggaaaaaagataaacaagacatggttcttgctttcaaggagtgtgtaattctttagccagatatggaaacctggaccctgagtgggagaaaggagacagatgaaaggagtccgtgattttgtaaccaagagctgcctgcatggttatgagtatcactgattttagggacgccccacagagctaaagcatttttttaatccgagaggacttttgtaactcatattagttaatcttctagctctgagatagcaacacagctcttagaattctgtaagtagcttgaggcctcctcctctactgtacatgttcttgctttcccaaaattgtaagtttggtttttcctatgaacaagactgtaattgatttttctctccctgaggaaaaaagttcggaataaatgagacatggatatgaaactacttagcacaatgcctggtacatattaggccctcagcaaatgtggctaccgtgtcattatttcatggtgagactcaaggcaaaacaagattcttaatttatgctccgtaaatgctagaggcttgggcaatacggtctgtcctgaaaaacaggactctgtgtctcattgcctctagaatccttaggtagcagtttctgttcactgtcttttcttttttaaaaatatctgctggacacaattacggccattacatgatgcaggtgattctacctattttttaaaaagaacaaaatttcttttatattgtgacagtacattttaataaaggaaaattattttcttccccctactccccctccttttttttaaaaaaaaaaaaaaaaaagaaagaaggtcttgctctgtcgccagccaggctggagtgtaatggcgtaatcatagcagctcaccacagtctcaaactcctaggctcaagtgatcctcctgccttagcctgctaagtagctacgactataggcatgtgccattacgcctggctcgtttcttcctttttttttttttttctggtaaagacagggtctcactctgttgccagactggtctcaaactcctggcctcaagtaacccttctgtctcagcctcccaaagtgctgggattacaggtgtgtgccacatgtccggccaggaaaattattttctatcttaaagaaacatagttacattttagaatgtcaattcagttaaatctttctcagtttttacctttagatggctcctggaaaggccagcgttccttttcccctctctgaattgaaagcacttgaccccatgctgcccctgcttccaggcctgtctcagttgtcatatattgtgagtccctggcaccattactgttttctaagccagtcttctaggtcttactttcaggatgctgcttcatggcatgaggatatagtttacagtgttgtagtttttttttttttaaagctttgttctttaaaaatactttttaaaaagaaatctactggttagatttattgtctcacaaaaatgtttttagagattatttttttcacaaatgttttctttctcatgctgatgatcaactgatttttgtctacaggtgttagcttctcacagtattttttcattttagagtctatttaccaaatgaccatttttagtgttaaaaggtactgaggaattgaggtatgtaaatcaggtgacataaacatgaaaattatgtgcctaaatatttttgtaatggtgtaaaataaatactttttcctgaaaacaagtattaaaattcctttgtaactgcatacagagactaatccaga

SEQ ID NO: 183818 - DNA, 1613 bp, Homo sapiens
  Payload ID: 16217
  Gene Symbol: SLC35D2
  Gene Name: solute carrier family 35 (UDP-GlcNAc/UDP-glucose transporter), member D2
  Uniprot ID: Q76EJ3
  ENST ID: ENST00000253270
  CDS Start-End: 64-1077
ggccgggcgggaccagtgcgcagccggggctggcgggcggcggggtccgcggggccgcaggagatgacggccggcggccaggccgaggccgagggcgctggcggggagcccggcgcggcgcggctgccctcgcgggtggcccggctgctgtcggcgctcttctacgggacctgctccttcctcatcgtgcttgtcaacaaggcgctgctgaccacctacggtttcccgtcaccaattttccttggaattggacagatggcagccaccataatgatactatatgtgtccaagctaaacaaaatcattcacttccctgattttgataagaaaattcctgtaaagctgtttcctctgcctctcctctacgttggaaaccacataagtggattatcaagcacaagtaaattaagcctaccgatgttcaccgtgctcaggaaattcaccattccacttaccttacttctggaaaccatcatacttgggaagcagtattcactcaacatcatcctcagtgtctttgccattattctcggggctttcatagcagctgggtctgaccttgcttttaacttagaaggctatatttttgtattcctgaatgatatcttcacagcagcaaatggagtttataccaaacagaaaatggacccaaaggagctagggaaatacggagtacttttctacaatgcctgcttcatgattatcccaactcttattattagtgtctccactggagacctgcaacaggctactgaattcaaccaatggaagaatgttgtgtttatcctacagtttcttctttcctgttttttggggtttctgctgatgtactccacggttctgtgcagctattacaattcagccctgacgacagcagtggttggagccatcaagaatgtatccgttgcctacattgggatattaatcggtggagactacattttctctttgttaaactttgtagggttaaatatttgcatggcagggggcttgagatattcctttttaacactgagcagccagttaaaacctaaacctgtgggtgaagaaaacatctgtttggatttgaagagctaaagagtctgcagcaggattggagactgacttgtgactgcgggctgggggggcattcccagtaggaatgtgaagccagaggtttcggattcgtgacatccaccccctgggcaagtgagagcatctgcaaaatgcaaagagaactacctcatatgcaggatgagccaatggcagtctcaagaaatgtactcgggcgacaccttacctgtggaaagcaaatcttttcaaaataagccactgggactcggtaggtggagccccagctgctcttctagggacctatggggccttcgtggcatctctgtgctgtgtgctggggaggaggttgatgtaatggtgactcttttctgatcagcaccttggccgtgattcccaaggtcccagccaaagcaaagggccagttgtttcagtttaaacagacatgtctttagtctaataaaattagttaactgccagtaaagttatttgttagctttgatgaaagctatgttggtatctttccctaatcatcaaagtaaataaaaaatcatttctatgta

SEQ ID NO: 183819 - DNA, 889 bp, Homo sapiens
  Payload ID: 16217
  Gene Symbol: SLC35D2
  Gene Name: solute carrier family 35 (UDP-GlcNAc/UDP-glucose transporter), member D2
  ENST ID: ENST00000375257
  CDS Start-End: 49-540
gtgcgcagccggggctggcgggcggcggggtccgcggggccgcaggagatgacggccggcggccaggccgaggccgagggcgctggcggggagcccggcgcggcgcggctgccctcgcgggtggcccggctgctgtcggcgctcttctacgggacctgctccttcctcatcgtgcttgtcaacaaggcgctgctgaccacctacggtttcccgtcaccaattttccttggaattggacagatggcagccaccataatgatactatatgtgtccaagctaaacaaaatcattcacttccctgattttgataagaaaattcctgtaaagctgtttcctctgcctctcctctacgttggaaaccacataagtggattatcaagcacaagtaaattaagcctaccgatgttcaccgtgctcaggaaattcaccattccacttaccttacttctggaaaccatcatacttgggaagcagtattcactcaacatcatcctcagtgtctttgccattattctcggggctttcatagcagctgggtaagactttggactgtttctgctcaataacttctttgtgtctttgacaataggcccagccccatcctcagtttttcattttccatctggctgctgttgaattgagcaggcaagagacaaatctgttgaagttagtggaatccccatgtgttcctatgaaagtcaaagtgggtcccacattggccagaaaatttctgagaatatatgaagagagcattgcaagatattaatatagcttttcttcacaaaaagcagtgaactgtttacatttcttactgaatgtttgtcttcattataacaactttacttgagaagttcttaggcatttgattaataataacagacttacaaag

SEQ ID NO: 183820 - DNA, 1361 bp, Homo sapiens
  Payload ID: 16217
  Gene Symbol: SLC35D2
  Gene Name: solute carrier family 35 (UDP-GlcNAc/UDP-glucose transporter), member D2
  Uniprot ID: Q76EJ3
  ENST ID: ENST00000375259
  CDS Start-End: 77-826
tcttccccggcccggccgggcgggaccagtgcgcagccggggctggcgggcggcggggtccgcggggccgcaggagatgacggccggcggccaggccgaggccgagggcgctggcggggagcccggcgcggcgcggctgccctcgcgggtggcccggctgctgtcggcgctcttctacgggacctgctccttcctcatcgtgcttgtcaacaaggcgctgctgaccacctacggtttcccgtcaccaattttccttggaattggacagatggcagccaccataatgatactatatgtgtccaagctaaacaaaatcattcacttccctgattttgataagaaaattcctgtaaagctgtttcctctgcctctcctctacgttggaaaccacataagtggattatcaagcacaagtaaattaagcctaccgatgttcaccgtgctcaggaaattcaccattccacttaccttacttctggaaaccatcatacttgggaagcagtattcactcaacatcatcctcagtgtctttgccattattctcggggctttcatagcagctgggtttctgctgatgtactccacggttctgtgcagctattacaattcagccctgacgacagcagtggttggagccatcaagaatgtatccgttgcctacattgggatattaatcggtggagactacattttctctttgttaaactttgtagggttaaatatttgcatggcagggggcttgagatattcctttttaacactgagcagccagttaaaacctaaacctgtgggtgaagaaaacatctgtttggatttgaagagctaaagagtctgcagcaggattggagactgacttgtgactgcgggctgggggggcattcccagtaggaatgtgaagccagaggtttcggattcgtgacatccaccccctgggcaagtgagagcatctgcaaaatgcaaagagaactacctcatatgcaggatgagccaatggcagtctcaagaaatgtactcgggcgacaccttacctgtggaaagcaaatcttttcaaaataagccactgggactcggtaggtggagccccagctgctcttctagggacctatggggccttcgtggcatctctgtgctgtgtgctggggaggaggttgatgtaatggtgactcttttctgatcagcaccttggccgtgattcccaaggtcccagccaaagcaaagggccagttgtttcagtttaaacagacatgtctttagtctaataaaattagttaactgccagtaaagttatttgttagctttgatgaaagctatgttggtatctttccctaatcatcaaagtaaataaaaaatcatttctatgt

SEQ ID NO: 183821 - DNA, 5703 bp, Homo sapiens
  Payload ID: 16218
  Gene Symbol: SLC35A3
  Gene Name: solute carrier family 35 (UDP-N-acetylglucosamine (UDP-GlcNAc) transporter), member A3
  Uniprot ID: Q9Y2D2
  ENST ID: ENST00000370153
  CDS Start-End: 102-1205
aagcgaatgaagacggcagtgtgtgcctcagcgcctggtgcgtgcggagctagtgacgggtgggcccggctggggcccgtcattccttcagtgaacatcccatgagctctcgctcggtgttgagccctgtggtaggcacagatgcacccgaccagcacctggagctcaagaagccgcaggaacttaaagaaatggaaaggctgcccttggcaaatgaagataaaacaatgttcgccaacctaaaatacgtttccctgggaattttggtctttcagactaccagtttggttctaacaatgcgttattccagaactttaaaagaagaaggacctcgttatctatcttctacagcagtggttgttgctgaacttttgaagataatggcctgcattttattggtctacaaagacagcaaatgtagtctaagagcactgaatcgagtactacatgatgaaattcttaataaacctatggaaacacttaaacttgctattccatcagggatctatactcttcagaataatttactgtatgtggcactatcaaatctagatgcagctacttatcaggtcacgtatcagttaaaaattcttacaacagcattattttctgtgtctatgcttagtaaaaaattgggtgtataccagtggctgtccctagtaattttgatgacaggagttgcttttgtacagtggccctcagattctcagcttgattctaaggaactttcagctggttctcaatttgtaggactcatggcagttctcacagcatgtttttcaagtggctttgctggggtttactttgagaaaatcttaaaagaaacaaaacaatcagtgtggataagaaatattcagcttggtttctttggaagtatatttggattaatgggtgtatacatttatgatggagaactggtatcaaagaatggattttttcagggatataaccgactgacctggatagtagttgttcttcaggcacttggaggccttgtaatagctgctgttattaagtatgcagataatattttaaaaggatttgcaacctctttatcgataatattatcaacattgatctcctatttttggcttcaagattttgtgccaaccagtgtctttttccttggagccatccttgtaataacagctacttttttgtatggttatgatcccaaacctgcaggaaatcccactaaagcatagttgtatactatctttaactggtttttcacgatggggcactaggaatctcgacattaatcttgcacagaggacttctacagagtctgagaagatatcatcatgctgaatctgatcatactgttttttaaaagtttaaggataagacatgtgtatatgtaacaaaacacattgcatctagaaatcaaaacttgaaagtatttccagggattaggattagaaggaatattagaggaaacttgaaatctgagtttaaaaagattttacctttttgattgctgcagaaatgtcctatgcactctttgcaagagcacacaacaaatgtcagataccaatttttgcaaattagatttaatcttattaaatgtttttatcttactctttctgtacagatatatcaaatcacatgaaatatttaaagtttgaaaattataattacctataaagctgtgaaaaatagaagtataatttgaaaaaacatttcacttatcagagatttttatatttatacaaaagattactaaatgaaggattgctaaatgtttttggttcaattacataaaaattaatattctgggtctgatctgtcagagaataaatatcaaatctaaatttaatgtagagatacatactatttctccatatgaattttaagatattttagtgcttcaagactgctgaaagcaatccagttgctcctgtgctagatggtagccagagaattttatagtaatggaggttagcccttaatctcttcattgcatttcatttctgtaaatcagattaagtccttaatattattttaaattaaaatttgtgtgtaattgccattaaattttcaaaatgtaatttaaaaggattaaatactcatttaataatttaaaataattattgtataatatctacatttggagaattttgaactatcaagcatatactgtatacagttagaaagttattaaatgaacattttactcattgatctgtaaaaacttctttaatctacaactgtttacaaaaacaacattcaaacaaatagtacagatgtcagtgacagaacaaaatgacttttcttggagacattccagattgccatattactttattttaaacagcgctatgactttaaatccaaggctgctcggaagatttttttaggtctctcataagcctattcttccctgatcacatgagtgggagaggtagccaaattttgaattccctttctgtgttcccacaagagctgctgagaaggcctggcgcagtggctcacgcctgtaatcctagcagtttgggaggctgaggcaggtggatcacaaggtcaagagattgagactatcctgaccaacatggtgaaaccccgtctctaccaaaaatacaaaaattagctgggtgtggtggcacgcacctgtagtcccagctactcgggagactgaggcaggagaatcacttgaacccgggaggcagaggttgcagtaagtggagatcacgccactgcactccaacctgggcgacacagtgagagtctgtctcaaaaaaaagaaaaaaaaaaaagctactgagaaggagccaccattttgctttaaaatagtgggtttttttcctttttaatgaacactggagctgaggatgcagattacatgagttatttaataagttgattcaagagagagagagtatattagaaatggtaagatgatttggtgggcaaaaatgctttctataatttgaatatgggtttaatttaattattaactatagacagaattacttactgagtataagaagtattttactgtctgggcacagtggctcatgcctgtaatcccagcactttgggaggccgaggcgggtggatcacaaggtcaggaattcgagaccagcctggccagcatggtgaaatcccatctctactaataatacaaaaattagctgggcatggtggtgcgcgcctgtagtcccagctactcaggaggctgaggcaggagaatttcttgaacacaccaggtggaagttgcagtgagccaagatcgtgccactgcaccccagcctgggtgacagagcgagactccgtctcaaaaaaaaaaaaaagaaaacacacacacacacacacacacccacagtatgaatgaaaaaaataaaatacttctttttttttttttttgagacagagtctcactttgtcgccaggctggagtgctgtggcgcgatctcggcttactgcaacctcccactccctggttcaagggattctcctgcctcagcctctgagtagctgggattgcaggcgtgagccactgcgcccggcctatactgtatatatttttaaagactgttctaatagatataaaaactgtaaaaaataagtatttttatatagctctcatggattttattaaacagaattggctcaaaaatactatgttacagactgttgggtacccttgcctaacgtgaactggcagtgttaccttgcttttgcagtaatagtctacagattgcaggtctcatcaattccatccaaagtttaaaagcatttaaaattaccaaatctttaaaatcactttggtggtgattccaaattggtaccaagcaaactttctggatgcccaacatgattttcagtaaccaccctttagagtatttgtttactaagttcaccacattttgaacatggtagttttagactgcaataatatttagacttacattattacttactgctaagtaaaatctaaatcctgcaaatgcacagaattcaagctgaaatataatgatttatgtttagctcacattgaagtattggttggttacttatgtattaatgcagtgtgcattcacatttaatcaggtttagtctgtttctattttaataattttaaaaaattatacaagcaaattagatattagacatgttagttacaatggtaacacatttttaggtgtcgaaacacaattttcaaaattcctaatgaaagttataaaaatgtaaacaagaattgtaaaaatggacaaagtagtcaaatatattttcaaagcacaattttattagacaggcataatttacattttgcttttctagtgggtttgaaaatgtttattggagattgggctatgtagtttataatttttaattcataaaaaagtaatcatacatgagaaggtagacctgtgccctaggatcatgtcacatatacagataatgccatttccttgtgtgtgtgatgtgtgttttgatgacctccacaggccttactgtatcaagcttttataatgatgactccttcattatttaaattcctatactttttatttgttatcacgcaactactttgttcaatgtgaaaatgtgctaactcatgggagaagagtgccaattgatagttcttttagcaattaagaatatggtatttgggaagaaaagtttgaaatgcaacaaatggatatttcaacacagtagtattatattatcagttctttagtaagtgattttagagatgttgtaggctacttttacggtggaatatatagtatagagatgcaaaacttaaatgtttacatcaatttatattgaatgtcacataatttcatggaaggaaaggtagcttgatatttagattctaagatataatctgaaaggaaactaattatgttctctacacttactgtaatactgattattcttacatatcaaattattgaactttaaaaatttcattgtatagtcattaaactgagttgggttttttcttaaagggtttagcatcactcatttgatttacacattcacattataatatttaattatcatgggtgtatgctttacataaaaaaggtttataaaagttatttatgctatattgaaagtcatcttaagaatctccaggttatttaaagtagttataggagcagagaacaagcacctttatcaaaatctggtcctatgtgccttgctttaccaaatacctgatttttctggagggtgttcctgtaattcacaactgtagacacatgggcaaaattaggatttttaagaataaatacatttctatttttttggttgtttcaacattagctcttcaaattcattaacaaaattaaaataggtatattacaaaagcataaacatttgtgaacagtacttaaataaattgtgatactattgctccatcattgaactttttgaaactttaacaattgtataaaactgtcagtttgttgtttcatttgtaattacaaaataatttaaaaactttttaaaataatttggatcctgactttgtctatatctgtatttcatttgtttagaaagattcttttgggtttgataatgtaatttgtatatttaaattttttatggacataattcaaaggaatgtataaattggtcttttgttaaatggctttttaattgataaacttctcttgtcattttttggtatccagctattacctatttaatagatttattgaaatagattattttcataaagaactctat

SEQ ID NO: 183822 - DNA, 2347 bp, Homo sapiens
  Payload ID: 16218
  Gene Symbol: SLC35A3
  Gene Name: solute carrier family 35 (UDP-N-acetylglucosamine (UDP-GlcNAc) transporter), member A3
  Uniprot ID: Q9Y2D2
  ENST ID: ENST00000370155
  CDS Start-End: 393-1370
gagaggtgtagcagaaagcagtgccccaggcctccacgcgacggtgaagcaggaaccaggggctgccagcagagcagcccaggtgcgtcgccttagggacagagctgccaagtgccgagctggggctgccagagccgagccgggaacggcatttgccagagccgaggcggaagccggagcatttgggggacgggaccgcgggaacccggaaacgcctgggctgcaccgagctggcggtggctacggcgacgggagccggcggcgctgcgggtcagcggtcgcgtaggacccagcggactcggcagcctggggcgcccggcggagctgaaccgcggcccccggtggtgggctcagccggtcgagctgcgcgggaggcaaatgaagataaaacaatgttcgccaacctaaaatacgtttccctgggaattttggtctttcagactaccagtttggttctaacaatgcgttattccagaactttaaaagaagaaggacctcgttatctatcttctacagcagtggttgttgctgaacttttgaagataatggcctgcattttattggtctacaaagacagcaaatgtagtctaagagcactgaatcgagtactacatgatgaaattcttaataaacctatggaaacacttaaacttgctattccatcagggatctatactcttcagaataatttactgtatgtggcactatcaaatctagatgcagctacttatcaggtcacgtatcagttaaaaattcttacaacagcattattttctgtgtctatgcttagtaaaaaattgggtgtataccagtggctgtccctagtaattttgatgacaggagttgcttttgtacagtggccctcagattctcagcttgattctaaggaactttcagctggttctcaatttgtaggactcatggcagttctcacagcatgtttttcaagtggctttgctggggtttactttgagaaaatcttaaaagaaacaaaacaatcagtgtggataagaaatattcagcttggtttctttggaagtatatttggattaatgggtgtatacatttatgatggagaactggtatcaaagaatggattttttcagggatataaccgactgacctggatagtagttgttcttcaggcacttggaggccttgtaatagctgctgttattaagtatgcagataatattttaaaaggatttgcaacctctttatcgataatattatcaacattgatctcctatttttggcttcaagattttgtgccaaccagtgtctttttccttggagccatccttgtaataacagctacttttttgtatggttatgatcccaaacctgcaggaaatcccactaaagcatagttgtatactatctttaactggtttttcacgatggggcactaggaatctcgacattaatcttgcacagaggacttctacagagtctgagaagatatcatcatgctgaatctgatcatactgttttttaaaagtttaaggataagacatgtgtatatgtaacaaaacacattgcatctagaaatcaaaacttgaaagtatttccagggattaggattagaaggaatattagaggaaacttgaaatctgagtttaaaaagattttacctttttgattgctgcagaaatgtcctatgcactctttgcaagagcacacaacaaatgtcagataccaatttttgcaaattagatttaatcttattaaatgtttttatcttactctttctgtacagatatatcaaatcacatgaaatatttaaagtttgaaaattataattacctataaagctgtgaaaaatagaagtataatttgaaaaaacatttcacttatcagagatttttatatttatacaaaagattactaaatgaaggattgctaaatgtttttggttcaattacataaaaattaatattctgggtctgatctgtcagagaataaatatcaaatctaaatttaatgtagagatacatactatttctccatatgaattttaagatattttagtgcttcaagactgctgaaagcaatccagttgctcctgtgctagatggtagccagagaattttatagtaatggaggttagcccttaatctcttcattgcatttcatttctgtaaatcagattaagtccttaatattattttaaattaaaatttgtgtgtaattgccattaaattttcaaaatgtaatttaaaaggattaaatactcatttaataatttaaaataattattgtataatatctacatttggagaattttgaactatcaagcatatactgtatacagttagaaagttattaaatgaacattttactcatt

SEQ ID NO: 183823 - DNA, 748 bp, Homo sapiens
  Payload ID: 16218
  Gene Symbol: SLC35A3
  Gene Name: solute carrier family 35 (UDP-N-acetylglucosamine (UDP-GlcNAc) transporter), member A3
  ENST ID: ENST00000422078
  CDS Start-End: 75-748
ttgaaaagattttattctgaaagactcttgccttctcaggcctttggttagagaaagcaaatgaagataaaacaatgttcgccaacctaaaatacgtttccctgggaattttggtctttcagactaccagtttggttctaacaatgcgttattccagaactttaaaagaagaaggacctcgttatctatcttctacagcagtggttgttgctgaacttttgaagataatggcctgcattttattggtctacaaagacagcaaatgtagtctaagagcactgaatcgagtactacatgatgaaattcttaataaacctatggaaacacttaaacttgctattccatcagggatctatactcttcagaataatttactgtatgtggcactatcaaatctagatgcagctacttatcaggtcacgtatcagttaaaaattcttacaacagcattattttctgtgtctatgcttagtaaaaaattgggtgtataccagtggctgtccctagtaattttgatgacaggagttgcttttgtacagtggccctcagattctcagcttgattctaaggaactttcagctggttctcaatttgtaggactcatggcagttctcacagcatgtttttcaagtggctttgctggggtttactttgagaaaatcttaaaagaaacaaaacaatcagtgtggataagaaatattcagcttggtttctttggaagtatatttggattaatgggtgtatacat

SEQ ID NO: 183824 - DNA, 1759 bp, Homo sapiens
  Payload ID: 16218
  Gene Symbol: SLC35A3
  Gene Name: solute carrier family 35 (UDP-N-acetylglucosamine (UDP-GlcNAc) transporter), member A3
  Uniprot ID: Q9Y2D2
  ENST ID: ENST00000427993
  CDS Start-End: 302-1279
cgggaccgcgggaacccggaaacgcctgggctgcaccgagctggcggtggctacggcgacgggagccggcggcgctgcgggtcagcggtcgcgtaggacccagcggactcggcagcctggggcgcccggcggagctgaaccgcggcccccggtggtgggctcagccggtcgagctgcgcgggagggtctcactgtcaccttggctggagtacagaggcgcaatctcagctcactgcaacttccacctccctggctcaagtgatctcccaccttagcctcccaagcaaatgaagataaaacaatgttcgccaacctaaaatacgtttccctgggaattttggtctttcagactaccagtttggttctaacaatgcgttattccagaactttaaaagaagaaggacctcgttatctatcttctacagcagtggttgttgctgaacttttgaagataatggcctgcattttattggtctacaaagacagcaaatgtagtctaagagcactgaatcgagtactacatgatgaaattcttaataaacctatggaaacacttaaacttgctattccatcagggatctatactcttcagaataatttactgtatgtggcactatcaaatctagatgcagctacttatcaggtcacgtatcagttaaaaattcttacaacagcattattttctgtgtctatgcttagtaaaaaattgggtgtataccagtggctgtccctagtaattttgatgacaggagttgcttttgtacagtggccctcagattctcagcttgattctaaggaactttcagctggttctcaatttgtaggactcatggcagttctcacagcatgtttttcaagtggctttgctggggtttactttgagaaaatcttaaaagaaacaaaacaatcagtgtggataagaaatattcagcttggtttctttggaagtatatttggattaatgggtgtatacatttatgatggagaactggtatcaaagaatggattttttcagggatataaccgactgacctggatagtagttgttcttcaggcacttggaggccttgtaatagctgctgttattaagtatgcagataatattttaaaaggatttgcaacctctttatcgataatattatcaacattgatctcctatttttggcttcaagattttgtgccaaccagtgtctttttccttggagccatccttgtaataacagctacttttttgtatggttatgatcccaaacctgcaggaaatcccactaaagcatagttgtatactatctttaactggtttttcacgatggggcactaggaatctcgacattaatcttgcacagaggacttctacagagtctgagaagatatcatcatgctgaatctgatcatactgttttttaaaagtttaaggataagacatgtgtatatgtaacaaaacacattgcatctagaaatcaaaacttgaaagtatttccagggattaggattagaaggaatattagaggaaacttgaaatctgagtttaaaaagattttacctttttgattgctgcagaaatgtcctatgcactctttgcaagagcacacaacaaatgtcagataccaatttttgcaaattagatttaatcttattaaatgtttttatcttactctttctgtacagatatatcaaatcacatgaaatatttaaagtttgaaaattataattacctataaagctgtgaaaaatagaagtataatttgaaaaaacattt

SEQ ID NO: 183825 - DNA, 5533 bp, Homo sapiens
  Payload ID: 16218
  Gene Symbol: SLC35A3
  Gene Name: solute carrier family 35 (UDP-N-acetylglucosamine (UDP-GlcNAc) transporter), member A3
  Uniprot ID: Q9Y2D2
  ENST ID: ENST00000465289
  CDS Start-End: 393-1055
gagaggtgtagcagaaagcagtgccccaggcctccacgcgacggtgaagcaggaaccaggggctgccagcagagcagcccaggtgcgtcgccttagggacagagctgccaagtgccgagctggggctgccagagccgagccgggaacggcatttgccagagccgaggcggaagccggagcatttgggggacgggaccgcgggaacccggaaacgcctgggctgcaccgagctggcggtggctacggcgacgggagccggcggcgctgcgggtcagcggtcgcgtaggacccagcggactcggcagcctggggcgcccggcggagctgaaccgcggcccccggtggtgggctcagccggtcgagctgcgcgggaggcaaatgaagataaaacaatgttcgccaacctaaaatacgtttccctgggaattttggtctttcagactaccagtttggttctaacaatgcgttattccagaactttaaaagaagaaggacctcgttatctatcttctacagcagtggttgttgctgaacttttgaagataatggcctgcattttattggtctacaaagacagcaaatgtagtctaagagcactgaatcgagtactacatgatgaaattcttaataaacctatggaaacacttaaacttgctattccatcagggatctatactcttcagaataatttactgtatgtggcactatcaaatctagatgcagctacttatcaggtcacgtatcagttaaaaattcttacaacagcattattttctgtgtctatgcttagtaaaaaattgggtgtataccagtggctgtccctagtaattttgatgacaggagttgcttttgtacagtggccctcagattctcagcttgattctaaggaactttcagctggttctcaatttgtaggactcatggcagttctcacagcatgtttttcaagtggctttgctggggtttactttgagaaaatcttaaaagaaacaaaacaatcagtgtggataagaaatattcagcttgtgtctttttccttggagccatccttgtaataacagctacttttttgtatggttatgatcccaaacctgcaggaaatcccactaaagcatagttgtatactatctttaactggtttttcacgatggggcactaggaatctcgacattaatcttgcacagaggacttctacagagtctgagaagatatcatcatgctgaatctgatcatactgttttttaaaagtttaaggataagacatgtgtatatgtaacaaaacacattgcatctagaaatcaaaacttgaaagtatttccagggattaggattagaaggaatattagaggaaacttgaaatctgagtttaaaaagattttacctttttgattgctgcagaaatgtcctatgcactctttgcaagagcacacaacaaatgtcagataccaatttttgcaaattagatttaatcttattaaatgtttttatcttactctttctgtacagatatatcaaatcacatgaaatatttaaagtttgaaaattataattacctataaagctgtgaaaaatagaagtataatttgaaaaaacatttcacttatcagagatttttatatttatacaaaagattactaaatgaaggattgctaaatgtttttggttcaattacataaaaattaatattctgggtctgatctgtcagagaataaatatcaaatctaaatttaatgtagagatacatactatttctccatatgaattttaagatattttagtgcttcaagactgctgaaagcaatccagttgctcctgtgctagatggtagccagagaattttatagtaatggaggttagcccttaatctcttcattgcatttcatttctgtaaatcagattaagtccttaatattattttaaattaaaatttgtgtgtaattgccattaaattttcaaaatgtaatttaaaaggattaaatactcatttaataatttaaaataattattgtataatatctacatttggagaattttgaactatcaagcatatactgtatacagttagaaagttattaaatgaacattttactcattgatctgtaaaaacttctttaatctacaactgtttacaaaaacaacattcaaacaaatagtacagatgtcagtgacagaacaaaatgacttttcttggagacattccagattgccatattactttattttaaacagcgctatgactttaaatccaaggctgctcggaagatttttttaggtctctcataagcctattcttccctgatcacatgagtgggagaggtagccaaattttgaattccctttctgtgttcccacaagagctgctgagaaggcctggcgcagtggctcacgcctgtaatcctagcagtttgggaggctgaggcaggtggatcacaaggtcaagagattgagactatcctgaccaacatggtgaaaccccgtctctaccaaaaatacaaaaattagctgggtgtggtggcacgcacctgtagtcccagctactcgggagactgaggcaggagaatcacttgaacccgggaggcagaggttgcagtaagtggagatcacgccactgcactccaacctgggcgacacagtgagagtctgtctcaaaaaaaagaaaaaaaaaaaagctactgagaaggagccaccattttgctttaaaatagtgggtttttttcctttttaatgaacactggagctgaggatgcagattacatgagttatttaataagttgattcaagagagagagagtatattagaaatggtaagatgatttggtgggcaaaaatgctttctataatttgaatatgggtttaatttaattattaactatagacagaattacttactgagtataagaagtattttactgtctgggcacagtggctcatgcctgtaatcccagcactttgggaggccgaggcgggtggatcacaaggtcaggaattcgagaccagcctggccagcatggtgaaatcccatctctactaataatacaaaaattagctgggcatggtggtgcgcgcctgtagtcccagctactcaggaggctgaggcaggagaatttcttgaacacaccaggtggaagttgcagtgagccaagatcgtgccactgcaccccagcctgggtgacagagcgagactccgtctcaaaaaaaaaaaaaagaaaacacacacacacacacacacacccacagtatgaatgaaaaaaataaaatacttctttttttttttttttgagacagagtctcactttgtcgccaggctggagtgctgtggcgcgatctcggcttactgcaacctcccactccctggttcaagggattctcctgcctcagcctctgagtagctgggattgcaggcgtgagccactgcgcccggcctatactgtatatatttttaaagactgttctaatagatataaaaactgtaaaaaataagtatttttatatagctctcatggattttattaaacagaattggctcaaaaatactatgttacagactgttgggtacccttgcctaacgtgaactggcagtgttaccttgcttttgcagtaatagtctacagattgcaggtctcatcaattccatccaaagtttaaaagcatttaaaattaccaaatctttaaaatcactttggtggtgattccaaattggtaccaagcaaactttctggatgcccaacatgattttcagtaaccaccctttagagtatttgtttactaagttcaccacattttgaacatggtagttttagactgcaataatatttagacttacattattacttactgctaagtaaaatctaaatcctgcaaatgcacagaattcaagctgaaatataatgatttatgtttagctcacattgaagtattggttggttacttatgtattaatgcagtgtgcattcacatttaatcaggtttagtctgtttctattttaataattttaaaaaattatacaagcaaattagatattagacatgttagttacaatggtaacacatttttaggtgtcgaaacacaattttcaaaattcctaatgaaagttataaaaatgtaaacaagaattgtaaaaatggacaaagtagtcaaatatattttcaaagcacaattttattagacaggcataatttacattttgcttttctagtgggtttgaaaatgtttattggagattgggctatgtagtttataatttttaattcataaaaaagtaatcatacatgagaaggtagacctgtgccctaggatcatgtcacatatacagataatgccatttccttgtgtgtgtgatgtgtgttttgatgacctccacaggccttactgtatcaagcttttataatgatgactccttcattatttaaattcctatactttttatttgttatcacgcaactactttgttcaatgtgaaaatgtgctaactcatgggagaagagtgccaattgatagttcttttagcaattaagaatatggtatttgggaagaaaagtttgaaatgcaacaaatggatatttcaacacagtagtattatattatcagttctttagtaagtgattttagagatgttgtaggctacttttacggtggaatatatagtatagagatgcaaaacttaaatgtttacatcaatttatattgaatgtcacataatttcatggaaggaaaggtagcttgatatttagattctaagatataatctgaaaggaaactaattatgttctctacacttactgtaatactgattattcttacatatcaaattattgaactttaaaaatttcattgtatagtcattaaactgagttgggttttttcttaaagggtttagcatcactcatttgatttacacattcacattataatatttaattatcatgggtgtatgctttacataaaaaaggtttataaaagttatttatgctatattgaaagtcatcttaagaatctccaggttatttaaagtagttataggagcagagaacaagcacctttatcaaaatctggtcctatgtgccttgctttaccaaatacctgatttttctggagggtgttcctgtaattcacaactgtagacacatgggcaaaattaggatttttaagaataaatacatttctatttttttggttgtttcaacattagctcttcaaattcattaacaaaattaaaataggtatattacaaaagcataaacatttgtgaacagtacttaaataaattgtgatactattgctccatcattgaactttttgaaactttaacaattgtataaaactgtcagtttgttgtttcatttgtaattacaaaataatttaaaaactttttaaaataatttggatcctgactttgtctatatctgtatttcatttgtttagaaagattcttttgggtttgataatgtaatttgtatatttaaattttttatggacataattcaaaggaatgtataaattggtcttttgttaaatggctttttaattgataaa

SEQ ID NO: 183826 - DNA, 5218 bp, Homo sapiens
  Payload ID: 16218
  Gene Symbol: SLC35A3
  Gene Name: solute carrier family 35 (UDP-N-acetylglucosamine (UDP-GlcNAc) transporter), member A3
  Uniprot ID: Q9Y2D2
  ENST ID: ENST00000533028
  CDS Start-End: 228-1205
aagcgaatgaagacggcagtgtgtgcctcagcgcctggtgcgtgcggagctagtgacgggtgggcccggctggggcccgtcattccttcagtgaacatcccatgagctctcgctcggtgttgagccctgtggtaggcacagatgcacccgaccagcacctggagctcaagaagccgcaggaacttaaagaaatggaaaggctgcccttggcaaatgaagataaaacaatgttcgccaacctaaaatacgtttccctgggaattttggtctttcagactaccagtttggttctaacaatgcgttattccagaactttaaaagaagaaggacctcgttatctatcttctacagcagtggttgttgctgaacttttgaagataatggcctgcattttattggtctacaaagacagcaaatgtagtctaagagcactgaatcgagtactacatgatgaaattcttaataaacctatggaaacacttaaacttgctattccatcagggatctatactcttcagaataatttactgtatgtggcactatcaaatctagatgcagctacttatcaggtcacgtatcagttaaaaattcttacaacagcattattttctgtgtctatgcttagtaaaaaattgggtgtataccagtggctgtccctagtaattttgatgacaggagttgcttttgtacagtggccctcagattctcagcttgattctaaggaactttcagctggttctcaatttgtaggactcatggcagttctcacagcatgtttttcaagtggctttgctggggtttactttgagaaaatcttaaaagaaacaaaacaatcagtgtggataagaaatattcagcttggtttctttggaagtatatttggattaatgggtgtatacatttatgatggagaactggtatcaaagaatggattttttcagggatataaccgactgacctggatagtagttgttcttcaggcacttggaggccttgtaatagctgctgttattaagtatgcagataatattttaaaaggatttgcaacctctttatcgataatattatcaacattgatctcctatttttggcttcaagattttgtgccaaccagtgtctttttccttggagccatccttgtaataacagctacttttttgtatggttatgatcccaaacctgcaggaaatcccactaaagcatagttgtatactatctttaactggtttttcacgatggggcactaggaatctcgacattaatcttgcacagaggacttctacagagtctgagaagatatcatcatgctgaatctgatcatactgttttttaaaagtttaaggataagacatgtgtatatgtaacaaaacacattgcatctagaaatcaaaacttgaaagtatttccagggattaggattagaaggaatattagaggaaacttgaaatctgagtttaaaaagattttacctttttgattgctgcagaaatgtcctatgcactctttgcaagagcacacaacaaatgtcagataccaatttttgcaaattagatttaatcttattaaatgtttttatcttactctttctgtacagatatatcaaatcacatgaaatatttaaagtttgaaaattataattacctataaagctgtgaaaaatagaagtataatttgaaaaaacatttcacttatcagagatttttatatttatacaaaagattactaaatgaaggattgctaaatgtttttggttcaattacataaaaattaatattctgggtctgatctgtcagagaataaatatcaaatctaaatttaatgtagagatacatactatttctccatatgaattttaagatattttagtgcttcaagactgctgaaagcaatccagttgctcctgtgctagatggtagccagagaattttatagtaatggaggttagcccttaatctcttcattgcatttcatttctgtaaatcagattaagtccttaatattattttaaattaaaatttgtgtgtaattgccattaaattttcaaaatgtaatttaaaaggattaaatactcatttaataatttaaaataattattgtataatatctacatttggagaattttgaactatcaagcatatactgtatacagttagaaagttattaaatgaacattttactcattgatctgtaaaaacttctttaatctacaactgtttacaaaaacaacattcaaacaaatagtacagatgtcagtgacagaacaaaatgacttttcttggagacattccagattgccatattactttattttaaacagcgctatgactttaaatccaaggctgctcggaagatttttttaggtctctcataagcctattcttccctgatcacatgagtgggagaggtagccaaattttgaattccctttctgtgttcccacaagagctgctgagaaggcctggcgcagtggctcacgcctgtaatcctagcagtttgggaggctgaggcaggtggatcacaaggtcaagagattgagactatcctgaccaacatggtgaaaccccgtctctaccaaaaatacaaaaattagctgggtgtggtggcacgcacctgtagtcccagctactcgggagactgaggcaggagaatcacttgaacccgggaggcagaggttgcagtaagtggagatcacgccactgcactccaacctgggcgacacagtgagagtctgtctcaaaaaaaagaaaaaaaaaaaagctactgagaaggagccaccattttgctttaaaatagtgggtttttttcctttttaatgaacactggagctgaggatgcagattacatgagttatttaataagttgattcaagagagagagagtatattagaaatggtaagatgatttggtgggcaaaaatgctttctataatttgaatatgggtttaatttaattattaactatagacagaattacttactgagtataagaagtattttactgcgtgagccactgcgcccggcctatactgtatatatttttaaagactgttctaatagatataaaaactgtaaaaaataagtatttttatatagctctcatggattttattaaacagaattggctcaaaaatactatgttacagactgttgggtacccttgcctaacgtgaactggcagtgttaccttgcttttgcagtaatagtctacagattgcaggtctcatcaattccatccaaagtttaaaagcatttaaaattaccaaatctttaaaatcactttggtggtgattccaaattggtaccaagcaaactttctggatgcccaacatgattttcagtaaccaccctttagagtatttgtttactaagttcaccacattttgaacatggtagttttagactgcaataatatttagacttacattattacttactgctaagtaaaatctaaatcctgcaaatgcacagaattcaagctgaaatataatgatttatgtttagctcacattgaagtattggttggttacttatgtattaatgcagtgtgcattcacatttaatcaggtttagtctgtttctattttaataattttaaaaaattatacaagcaaattagatattagacatgttagttacaatggtaacacatttttaggtgtcgaaacacaattttcaaaattcctaatgaaagttataaaaatgtaaacaagaattgtaaaaatggacaaagtagtcaaatatattttcaaagcacaattttattagacaggcataatttacattttgcttttctagtgggtttgaaaatgtttattggagattgggctatgtagtttataatttttaattcataaaaaagtaatcatacatgagaaggtagacctgtgccctaggatcatgtcacatatacagataatgccatttccttgtgtgtgtgatgtgtgttttgatgacctccacaggccttactgtatcaagcttttataatgatgactccttcattatttaaattcctatactttttatttgttatcacgcaactactttgttcaatgtgaaaatgtgctaactcatgggagaagagtgccaattgatagttcttttagcaattaagaatatggtatttgggaagaaaagtttgaaatgcaacaaatggatatttcaacacagtagtattatattatcagttctttagtaagtgattttagagatgttgtaggctacttttacggtggaatatatagtatagagatgcaaaacttaaatgtttacatcaatttatattgaatgtcacataatttcatggaaggaaaggtagcttgatatttagattctaagatataatctgaaaggaaactaattatgttctctacacttactgtaatactgattattcttacatatcaaattattgaactttaaaaatttcattgtatagtcattaaactgagttgggttttttcttaaagggtttagcatcactcatttgatttacacattcacattataatatttaattatcatgggtgtatgctttacataaaaaaggtttataaaagttatttatgctatattgaaagtcatcttaagaatctccaggttatttaaagtagttataggagcagagaacaagcacctttatcaaaatctggtcctatgtgccttgctttaccaaatacctgatttttctggagggtgttcctgtaattcacaactgtagacacatgggcaaaattaggatttttaagaataaatacatttctatttttttggttgtttcaacattagctcttcaaattcattaacaaaattaaaataggtatattacaaaagcataaacatttgtgaacagtacttaaataaattgtgatactattgctccatcattgaactttttgaaactttaacaattgtataaaactgtcagtttgttgtttcatttgtaattacaaaataatttaaaaactttttaaaataatttggatcctgactttgtctatatctgtatttcatttgtttagaaagattcttttgggtttgataatgtaatttgtatatttaaattttttatggacataattcaaaggaatgtataaattggtcttttgttaaatggctttttaattgataaacttctcttgtcattttttggtatccagctattacctatttaatagatttattgaaatagattattttcataaagaactctatacaaa

SEQ ID NO: 183827 - DNA, 563 bp, Homo sapiens
  Payload ID: 16218
  Gene Symbol: SLC35A3
  Gene Name: solute carrier family 35 (UDP-N-acetylglucosamine (UDP-GlcNAc) transporter), member A3
  ENST ID: ENST00000532693
  CDS Start-End: 310-563
agtgtgtgcctcagcgcctggtgcgtgcggagctagtgacgggtgggcccggctggggcccgtcattccttcagtgaacatcccatgagctctcgctcggtgttgagccctgtggtaggcacagatgcacccgaccagcacctggagctcaagaagccgcaggaacttaaagaaatggaaaggctgcccttgggtctcactgtcaccttggctggagtacagaggcgcaatctcagctcactgcaacttccacctccctggctcaagtgatctcccaccttagcctcccaagcaaatgaagataaaacaatgttcgccaacctaaaatacgtttccctgggaattttggtctttcagactaccagtttggttctaacaatgcgttattccagaactttaaaagaagaaggacctcgttatctatcttctacagcagtggttgttgctgaacttttgaagataatggcctgcattttattggtctacaaagacagcaaatgtagtctaagagcactgaatcgagtactacatgatgaaattcttaataaacctatggaaacact

SEQ ID NO: 183828 - DNA, 6797 bp, Homo sapiens
  Payload ID: 16219
  Gene Symbol: SLC35B4
  Gene Name: solute carrier family 35 (UDP-xylose/UDP-N-acetylglucosamine transporter), member B4
  Uniprot ID: Q969S0
  ENST ID: ENST00000378509
  CDS Start-End: 301-1296
cggaagcgggaacgtcgcatcctgaggtaaaggtgcacggcatcctgggacatgtagtctggccggggctcggacgccccctcggatgaatgggaccgaagctgactgcgaactacagcttcttggcagcgtcggtgttggccgcgggagaaggggagaccgcggcggcccccagtgagagcggctttccaggacggtgcgatgtgctgcgcagcgaagaggcaggaggccggcttcctggggtagcggtacaggcgggcgcttactctgtgcgcttgcttccccaaccctgcaccggccatgcgcccggccttggcggtgggcctggtgttcgcaggctgctgcagtaacgtgatcttcctagagctcctggcccggaagcatccaggatgtgggaacattgtgacatttgcacaatttttatttattgctgtggaaggcttcctctttgaagctgatttgggaaggaagccaccagctatcccaataaggtactatgccataatggtgaccatgttcttcaccgtgagcgtggtgaacaactatgccctgaatctcaacattgccatgcccctgcatatgatatttagatccggttctctaattgccaacatgattctaggaattatcattttgaagaaaagatacagtatattcaaatatacctccattgccctggtgtctgtggggatatttatttgcacttttatgtcagcaaagcaggtgacttcccagtccagcttgagtgagaatgatggattccaggcatttgtgtggtggttactaggtattggggcattgacttttgctcttctgatgtcagcaaggatggggatattccaagagactctctacaaacgatttgggaaacactccaaggaggctttgttttataatcacgcccttccacttccgggtttcgtcttcttggcttctgatatttatgaccatgcagttctattcaataagtctgagttatatgaaattcccgtcatcggagtgaccctgcccatcatgtggttctacctcctcatgaacatcatcactcagtacgtgtgcatccggggtgtgtttatcctcaccacagaatgcgcctccctcaccgtcacgctcgtcgtgaccctacgcaaatttgtgagcctcatcttttccatcttgtacttccagaaccccttcaccctgtggcactggctgggcaccttgtttgtcttcattgggaccttaatgtacacagaggtgtggaacaacctagggaccacaaaaagtgagcctcagaaggacagcaagaagaactgaggcctgtctggagtacgtagaccagtgtcgtcgtgagggtgggaccctgtgaaggtctgaccaccgtttcgcttttgttaatgccgagctacccgcagtgctgagccagccgtgcaaaaggaaatcttcaggaggggacttctcacgttgctcagactgacacatgtagactaaatagaaacccctcagccctaaaatagaaaaaagaacagttctggactattgaacagcccattcatttatttctgttttgtttaccgacatattcagtattattcttgttttctgaattctgagtctcctgaacaaaaggcttactatccatggtcttggaaaagattgtcccttctcttgctgttgtaatgcatctctgctacagcagtcattgtcatcctgtgaccttatcccttttgtctcccatcaccttttccttcttcagcagcacctcacagtcagtcagacgctgcaggcaccactatcaccaggagtggccaagtaaaccgagacaccagtaacagcagggctggacttcctccagcgttttgggaaggaaagagatgttcccctgagctgattcccagtgacagtgcagcaagactagtgggactcctctttcccacattttgcttttttttttttctatgcaaaagtcagatgcttctatccattgctttctgtgattagggcggccctgcagcatatctcacagcagacacagtgttcataacaaagaaaggttgtgccgggcacggtggctcacacctgtaatcccagccctttgggaggctgaggtgggtgtatcacttgaggtcaggagttcaagaccaatctggccaacatggtgaaaccccatctctactaaaaatacgaaaattagctgggtgtgatggcgcatgcctgtaatcccagctacttgggaggctgaggcaggagaatcacttgaacccgggagatgaaggttgcagtgagctgaggtcgtgctactgcactcccgcctgggtgacagagtgagactctatctcaaaaaaaaaaaaaaaaaagaaaggttgttatggactggacacccctgaagcccattgcctaggccacagtggtgacggcaggatggccctgctcagcaccgcaagagccatggctgtccctgttggcccagccgggcactcacagggcagaagggtgggtctcaagtgggaggataaggcttcaccaccaggagattcccctctgcccgatgactctgttaagagtcacgacccatcaagggaatgcatagatggagatatatagtgtgtgatgtgtaaatcaggtcaaacctcaacgacaattgaaagttgttattgtcctatgaggtatcttagcattctcgatgggtattgaggatggttggatgtgctttattgtgtgtggaaacatgcctctctttgctaatcatttcagaggtccagttttcctttcactggacaatcttgaataggaggaacgctgttgctgtaatatgcgtagcttctgtgtgctcttgtgtagtctgtgtgtgatcaaagggcacggaagtggctgcactttcacatcccttttctttacttagctggaaccttacataccagtacatgctcctctgtaagcagctgaactcaccggccacttctctgtttgcctatagacaaagactgtgtgtgtgtgtgtgtatgtatgtgtgtgtgtgtggtgcacacattgtgttcttaaactgagacgtggctctgcaggtctcctgggctcattccatggtgtggtatgtttattccactgtccagagctattctctgatggatttgagcaacagcagtggagataaatgtcctagagtcaccaggtcgcttggagaagtcatttaagctgcctcgggtttttgttacttaaaatgtggatattatttctccacctaaatcactgagtttacagagtaataatgtgttgctctggacattgacagctttctagagccagtaatgggctcttctgaaggatgctgaattagaagtgaacctattcataggatcaaaagccacttgctttgaaatatgtagagttcctcagaattgacggtgctagaaatatccaagtgttaaataaccttttaaaagcaacaaaagctacttttttcttaccacttaatagaagaacctgtccctagaggcgacttcattgctatggatctggagtctctgaactcttaataggatgcagcctcacatacataatgtcacccattttatgttgatgaaaacattacaagttttcttcattgggtatgtgttgatgttcacagacagtacttgggcccattaggttttcgcgtctggtcttagagcatgtgtattcatctcagcgtgaatacctcagccagtcttatgaataggaggctatgtatgggcagggaatagattagattagaacactcgcacaagatgaccacatatagaagcagaaagccccaaattccctgggaactgttttttctctagtagctgaatataaggaaatatgtctaatggacaccagttaatactttttaaaactactctttaaaaaaaaaatacgttccccttggttaactgattttttaatccagggtggacattttttcaacctttattaaaaagacaaataaactattttgtagaagatcagactcctacttaactggaagagaaatgtctattaaatgtctctcctctttctctgggtcaagaccatgtaattttatgcttcagagatgaagatactgtttgtttacaaagagtttagtttttaagacatccaaaactctatgctagagcaaaaatcaaatagcaaaggacactagccagaaaatacagtgtgtgtgtgtgcacctgtgtgcctgctgaacaacttgacagtgtaacagataaggtaactgaagatggtggatatttgaattgtattagcttaatgtctacatatctttggccaaaactctattgtcatattagaaacatgttatctttttcatgtttattagtaatttatttttgattctttgttttctttttcgtccaactaaaacaactgtaatgtacttgatacatttatatcaagttctaaagtatttagacaaatccaaatactttgtttttagttttttcctcctttccatcctgttaaccacagtgaaacgctgcagtattttgatttggtcagtgctacggaggaagaccatgaaagctgaattggtctgtgccacccagagtaaacctcttctcttcttctggaaagatggcgtgatgtttttcaaggattctaataaatatcccgcagtcatctcctgagcagctttcctctgtttcacttcagaactccttcccccactttcttcactccagtttcttcacttgcagcgttttctgctaagaaagacttatcatcttgtatctgtttatgcctctcttctttggggcccctggatgtttttgtggatttttacagagtatttatatctgcacagcgtgtattttgttatacattcttacaagcattgatattggggggtacattcataatagtgagaatatctggcagaatgtgtgaatgccatatctgtagatgacgatgaatgtgaagggttaatgtagaaatgtttgtttattctgttacagctcaaaatggaggctgagaatctctaccaccattcccttctctatttgagaatctctaccaccattcccttctctatttgggaaacaatactctcttattttgctatttttaccttcccattaactggcttcactcaacagtgccagatacctatggagaggggaagtaaaacaccttaggtcaggaataataaaccaatgagttagctcagggccggtggacatgttcactggtggaccagttggcattgacctaaacggacagagaaatgcacatggaggagaactacgttgaaatcaagatcctatgtctgttgtattttctctttgcctggagtaaatagcattataagtcattccacccttattagataaccaaagcatattggtctcaatagctttctcctgaaaaatgtgattgaatcttacctgtagcagttcactcttaaggttgaaagaactgtcaatatagataaaatccattccttattattattgattggtgtgacatttgaaaatgtgtctaaacaatatttgtaagtaaaagaaccagtcataagcctcaaatgtgttcagtgtgtaccaagctggaatgggagactggcccctcttggctttaaagtagcatgttgtctttttctagcagcttcttcctagtagacattccagggatgggaggggccagggatcatgtcttactcatttctgtatcgccagcccctggcatagtgtctggcttatgttatgtgaataaatgaatgcttgccaagatctcttcttccctcaagtttctggaaaacctgagggttcgtgatacctgttcccactcctcatcagcgggttggcaagaaagcaaataaggggaaacatttttaacattccaagcaagagaaggaagaacgactattgggaggaggtacaccagagattgctcagtgtgcagcctgctacctcacttttggctctggattgcctggtggtagaagggaagagtattatgtagttagcaccttacatatttgatgctcaggaagaaagtgcaagaagatccctaatagaacattaaagattcttaaaagtttttgaagtaggctgcttggggtgaccagccccacccttacatctccatagttggtacagttagcttgtagcagctgaagctgatgcctggagatcactgtctgttggtctgatctcagtatcatactgagacacctcccctgagccttacctacttaaattggtaaccgtcctaccaaaatttgtcaattttaatcaagtgaggcaagttgcaagggagccagagatacgtgaaaaaagaaaagcagaaatactgatactttctaagaaagaagttgtaataatttctttggcacattgacttactgatatcttttgaaatgcatagatgactcttgtgaaccaaagagagcagtagtggttattccccggcgcaataaaaatgcctttgtgtatcacttgcgattgccagtcatttctgtgccagttgctttcattccagagaatggcctcattctccaaaaaaagatgatgattttagaagtaggatttcctaacaaattatgtggtggggagggacggcggggattttattcatcccgtctgagctcttcatacagtattaccattaggttttaagaacaaagatgggggaggagggagtagaaagctgagagtacgtagaacagctacaagacattagtgggtattcagattttgagctgtgtaaatatcaaacatcggcttccagccttaagagttatttgagcagagagttaaggaggaatgggagattttgtgaataaaatgttttgccaaactgaa

SEQ ID NO: 183829 - DNA, 1379 bp, Homo sapiens
  Payload ID: 16219
  Gene Symbol: SLC35B4
  Gene Name: solute carrier family 35 (UDP-xylose/UDP-N-acetylglucosamine transporter), member B4
  ENST ID: ENST00000416907
  CDS Start-End: 153-551
agaaggggagaccgcggcggcccccagtgagagcggctttccaggacggtgcgatgtgctgcgcagcgaagaggcaggaggccggcttcctggggtagcggtacaggcgggcgcttactctgtgcgcttgcttccccaaccctgcaccggccatgcgcccggccttggcggtgggcctggtgttcgcaggctgctgcagtaacgtgatcttcctagagctcctggcccggaagcatccaggatgtgggaacattgtgacatttgcacaatttttatttattgctgtggaaggcttcctctttgaagctgatttgggaaggaagccaccagctatcccaataaggtactatgccataatggtgaccatgttcttcaccgtgagcgtggtgaacaactatgccctgaatctcaacattgccatgcccctgcatatgatatttagatccatacagtatattcaaatatacctccattgccctggtgtctgtggggatatttatttgcacttttatgtcagcaaagcaggtgacttcccagtccagcttgagtgagaatgatggattccaggcatttgtgtggtggttactaggtattggggcattgacttttgctcttctgatgtcagcaaggatggggatattccaagagactctctacaaacgatttgggaaacactccaaggaggctttgttttataatcacgcccttccacttccgggtttcgtcttcttggcttctgatatttatgaccatgcagttctattcaataagtctgagttatatgaaattcccgtcatcggagtgaccctgcccatcatgtggttctacctcctcatgaacatcatcactcagtacgtgtgcatccggggtgtgtttatcctcaccacagaatgcgcctccctcaccgtcacgctcgtcgtgaccctacgcaaatttgtgagcctcatcttttccatcttgtacttccagaaccccttcaccctgtggcactggctgggcaccttgtttgtcttcattgggaccttaatgtacacagaggtgtggaacaacctagggaccacaaaaagtgagcctcagaaggacagcaagaagaactgaggcctgtctggagtacgtagaccagtgtcgtcgtgagggtgggaccctgtgaaggtctgaccaccgtttcgcttttgttaatgccgagctacccgcagtgctgagccagccgtgcaaaaggaaatcttcaggaggggacttctcacgttgctcagactgacacatgtagactaaatagaaacccctcagccctaaaatagaaaaaagaacagttctggactattgaacagcccattcatttatttctgttttgtttaccgacatattcagtattattcttg

SEQ ID NO: 183830 - DNA, 1033 bp, Homo sapiens
  Payload ID: 16219
  Gene Symbol: SLC35B4
  Gene Name: solute carrier family 35 (UDP-xylose/UDP-N-acetylglucosamine transporter), member B4
  Uniprot ID: Q969S0
  ENST ID: ENST00000470969
  CDS Start-End: 147-842
ggagaccgcggcggcccccagtgagagcggctttccaggacggtgcgatgtgctgcgcagcgaagaggcaggaggccggcttcctggggtagcggtacaggcgggcgcttactctgtgcgcttgcttccccaaccctgcaccggccatgcgcccggccttggcggtgggcctggtgttcgcaggctgctgcagtaacgtgatcttcctagagctcctggcccggaagcatccaggatgtgggaacattgtgacatttgcacaatttttatttattgctgtggaaggcttcctctttgaagctgatttgggaaggaagccaccagctatcccaataaggtactatgccataatggtgaccatgttcttcaccgtgagcgtggtgaacaactatgccctgaatctcaacattgccatgcccctgcatatgatatttagatccggttctctaattgccaacatgattctaggaattatcattttgaagaaaagatacagtatattcaaatatacctccattgccctggtgtctgtggggatatttatttgcacttttatgtcagcaaagcaggtgacttcccagtccagcttgagtgagaatgatggattccaggcatttgtgtggtggttactaggtattggggcattgacttttgctcttctgatgtcagcaaggatggggatattccaagagactctctacaaacgatttgggaaacactccaaggaggctttgttttataatcacgcccttccacttccgggtttcgtcttcttggcttctgatatttatgaccatgcagttctattcaataagtctggtgagtttggggttagacagtagaattacctgacagtttctgaggcagagtctcagttttactcttgacttgacctcggcctttttcataatcctattcaaatcatgtgttcctttcgaaaatgtctccattccactttccagtcattgcagcagcaaaagcttttacaggggtttctcaattatttacaaatgaagtaaaagaatatcttcga

SEQ ID NO: 183831 - DNA, 3041 bp, Homo sapiens
  Payload ID: 16220
  Gene Symbol: SLC35A4
  Gene Name: solute carrier family 35, member A4
  Uniprot ID: Q96G79
  ENST ID: ENST00000323146
  CDS Start-End: 1108-2082
gtaaacgggcgtctggatccccgaatggttgcgtgtttccgtgtgtgggtccgggggaggcccacgaacgccagcgaaaccgctgacaccaccgcccaactatgaactcatcaggcgcctgaagaccgacacgccgaacatgcgccgcgcgcactcgcgcacgagtgagatcatcgcgccccggtcgtgagtgcgctcacacgcagcctgagactcgacgggagggggtcacgtggaagtatctgagagaggcgtacttggccactaggaaagcacctccccctttccaaaaatgctccggaagtgccttcgccctccgtaaagatggccggggcagtcggcacgagggaggcggggatgcgcctgcgcaacaagttcggcggggaagatggcggatgacaaggattctctgcctaagcttaaggacctggcatttctcaagaaccagctggaaagcctgcagcggcgtgtagaagacgaagtcaacagtggagtgggccaggatggctcgctgttgtcctccccgttcctcaagggattcctggctggctatgtggtggccaaactgagggcatcagcagtattgggctttgctgtgggcacctgcactggcatctatgcggctcaggcatatgctgtgcccaacgtggagaagacattaagggactatttgcagttgctacgcaaggggcccgactagctctaggtgccatggaagaggcaggatgagcagctcagccttcaggtggagacactttatctggattccccagctgtcatccatttgctatctccaactttcctgccaccttcatccttgcctcccttcctgcagattgtggacagtagttcctcagcctgcaccctggattccttcttccccttcctagctccatgggactcgccccaagactgtggcttcaaggaccaccagccccttactcttcaagccctgactgtggagttggtagatgcctctgatcctcagtattctctctggcaatgttccacggcttctccttcctgggagctggctccataacttgattttccccaaacgtgttgcaatccctgctgccccttagccacccagggtcttgtgtgggtatgagtgtagaggatgggggtatgccaggcctgggccgtcccaggcaggcccgctggaccctgatgctactcctatccactgccatgtacggtgcccatgccccattgctggcactgtgccatgtggacggccgagtgcccttccggccctcctcagccgtgctgctgactgagctgaccaagctactgttatgcgccttctcccttctggtaggctggcaagcatggccccaggggcccccaccctggcgccaggctgctcccttcgcactatcagccctgctctatggcgctaacaacaacctggtgatctatcttcagcgttacatggaccccagcacctaccaggtgctgagtaatctcaagattggaagcacagctgtgctctactgcctctgcctccggcaccgcctctctgtgcgtcaggggttagcgctgctgctgctgatggctgcgggagcctgctatgcagcagggggccttcaagttcccgggaacacccttcccagtccccctccagcagctgctgccagccccatgcccctgcatatcactccgctaggcctgctgctcctcattctgtactgcctcatctcaggcttgtcgtcagtgtacacagagctgctcatgaagcgacagcggctgcccctggcacttcagaacctcttcctctacacttttggtgtgcttctgaatctaggtctgcatgctggcggcggctctggcccaggcctcctggaaggtttctcaggatgggcagcactcgtggtgctgagccaggcactaaatggactgctcatgtctgctgtcatgaagcatggcagcagcatcacacgcctctttgtggtgtcctgctcgctggtggtcaacgccgtgctctcagcagtcctgctacggctgcagctcacagccgccttcttcctggccacattgctcattggcctggccatgcgcctgtactatggcagccgctagtccctgacaacttccaccctgattccggaccctgtagattgggcgccaccaccagatccccctcccaggccttcctccctctcccatcagcagccctgtaacaagtgccttgtgagaaaagctggagaagtgagggcagccaggttattctctggaggttggtggatgaaggggtacccctaggagatgtgaagtgtgggtttggttaaggaaatgcttaccatcccccacccccaaccaagttcttccagactaaagaattaaggtaacatcaatacctaggcctgagaaataaccccatccttgttgggcagctccctgctttgtcctgcatgaacagagttgatgaaagtggggtgtgggcaacaagtggctttccttgcctactttagtcacccagcagagccactggagctggctagtccagcccagccatggtgcatgactcttccataagggatcctcacccttccactttcatgcaagaaggcccagttgccacagattatacaaccattacccaaaccactctgacagtctcctccagttccagcaatgcctagagacatgctccctgccctctccacagtgctgctccccacacctagcctttgttctggaaaccccagagagggctgggcttgactcatctcagggaatgtagcccctgggccctggcttaagccgacactcctgacctctctgttcaccctgagggctgtcttgaagcccgctacccactctgaggctcctaggaggtaccatgcttcccactctggggcctgcccctgcctagcagtctcccagctcccaacagcctggggaagctctgcacagagtgacctgagaccaggtacaggaaacctgtagctcaatcagtgtctctttaactgcataagcaataagatcttaataaagtcttctaggctgtagggtggttcctacaaccacagccatga

SEQ ID NO: 183832 - DNA, 3617 bp, Homo sapiens
  Payload ID: 16220
  Gene Symbol: SLC35A4
  Gene Name: solute carrier family 35, member A4
  Uniprot ID: Q96G79
  ENST ID: ENST00000514199
  CDS Start-End: 1687-2661
cgtggtcttcactctccttgacctttttagttccggggagaagcgactctggagcggctcaggagtgaggatgtcccttgtttcttctgcggctcctgtcaactgcctcaacagtgtggagtggtgtggggagagcattcggcgaggcgggaggagccgtggatcccccagatgtcccctcctgggaaccatcacgaacccgttactagcacagactcaaaaacattcacccttaaacactcctcactttaccccattccctagctcccgaaattttcttcccagtgacacgatgtttccaatcacacggacactcacaccaccctcattcaaacactcctttgcatacattctgaatttcatacttatatgcgatcaaaatcactcagtccatttacttacacacttgccgacagtcttttttgtcattctcagtcacatccagtcactcacattcagtttgggatgtccttgggaagaaagaggtaaagcccatccaggaaccaagacaataaaattgtccaggaaactgcctcggtccattactcaccattggtctagaagctcagcattacccacacatttactaaatgtcaggcactagaacatagtagccaagacagactggtcacgactttcaaggagctcataatggagtcagtagtggtttcctgatggacctaattaaaggtccctagctgtccctcctgcctttcctacatactgcttgctatataaaattcttgtcaaggttgatgtaagttactggttcagatcccatctgtcagtcccttcctggccctcatttgaattctgtgcttttcaatgcttgtctttctttgccactgccatctcaggaagcttttataggaaaaggtctttctggctcaccccatcccctcccaattcccagcttctgatggaattgagcaaggggtggggcttagtcagactgctggagccagcctctcgcttgtcctaggattctctgcctaagcttaaggacctggcatttctcaagaaccagctggaaagcctgcagcggcgtgtagaagacgaagtcaacagtggagtgggccaggatggctcgctgttgtcctccccgttcctcaagggattcctggctggctatgtggtggccaaactgagggcatcagcagtattgggctttgctgtgggcacctgcactggcatctatgcggctcaggcatatgctgtgcccaacgtggagaagacattaagggactatttgcagttgctacgcaaggggcccgactagctctaggtgccatggaagaggcaggatgagcagctcagccttcaggtggagacactttatctggattccccagctgtcatccatttgctatctccaactttcctgccaccttcatccttgcctcccttcctgcagattgtggacagtagttcctcagcctgcaccctggattccttcttccccttcctagctccatgggactcgccccaagactgtggcttcaaggaccaccagccccttactcttcaagccctgactgtggagttggtagatgcctctgatcctcagtattctctctggcaatgttccacggcttctccttcctgggagctggctccataacttgattttccccaaacgtgttgcaatccctgctgccccttagccacccagggtcttgtgtgggtatgagtgtagaggatgggggtatgccaggcctgggccgtcccaggcaggcccgctggaccctgatgctactcctatccactgccatgtacggtgcccatgccccattgctggcactgtgccatgtggacggccgagtgcccttccggccctcctcagccgtgctgctgactgagctgaccaagctactgttatgcgccttctcccttctggtaggctggcaagcatggccccaggggcccccaccctggcgccaggctgctcccttcgcactatcagccctgctctatggcgctaacaacaacctggtgatctatcttcagcgttacatggaccccagcacctaccaggtgctgagtaatctcaagattggaagcacagctgtgctctactgcctctgcctccggcaccgcctctctgtgcgtcaggggttagcgctgctgctgctgatggctgcgggagcctgctatgcagcagggggccttcaagttcccgggaacacccttcccagtccccctccagcagctgctgccagccccatgcccctgcatatcactccgctaggcctgctgctcctcattctgtactgcctcatctcaggcttgtcgtcagtgtacacagagctgctcatgaagcgacagcggctgcccctggcacttcagaacctcttcctctacacttttggtgtgcttctgaatctaggtctgcatgctggcggcggctctggcccaggcctcctggaaggtttctcaggatgggcagcactcgtggtgctgagccaggcactaaatggactgctcatgtctgctgtcatgaagcatggcagcagcatcacacgcctctttgtggtgtcctgctcgctggtggtcaacgccgtgctctcagcagtcctgctacggctgcagctcacagccgccttcttcctggccacattgctcattggcctggccatgcgcctgtactatggcagccgctagtccctgacaacttccaccctgattccggaccctgtagattgggcgccaccaccagatccccctcccaggccttcctccctctcccatcagcagccctgtaacaagtgccttgtgagaaaagctggagaagtgagggcagccaggttattctctggaggttggtggatgaaggggtacccctaggagatgtgaagtgtgggtttggttaaggaaatgcttaccatcccccacccccaaccaagttcttccagactaaagaattaaggtaacatcaatacctaggcctgagaaataaccccatccttgttgggcagctccctgctttgtcctgcatgaacagagttgatgaaagtggggtgtgggcaacaagtggctttccttgcctactttagtcacccagcagagccactggagctggctagtccagcccagccatggtgcatgactcttccataagggatcctcacccttccactttcatgcaagaaggcccagttgccacagattatacaaccattacccaaaccactctgacagtctcctccagttccagcaatgcctagagacatgctccctgccctctccacagtgctgctccccacacctagcctttgttctggaaaccccagagagggctgggcttgactcatctcagggaatgtagcccctgggccctggcttaagccgacactcctgacctctctgttcaccctgagggctgtcttgaagcccgctacccactctgaggctcctaggaggtaccatgcttcccactctggggcctgcccctgcctagcagtctcccagctcccaacagcctggggaagctctgcacagagtgacctgagaccaggtacaggaaacctgtagctcaatcagtgtctctttaactgcataagcaataagatcttaataaagtcttctaggctgtagggtggttcctacaaccacagcca

SEQ ID NO: 183833 - DNA, 2657 bp, Homo sapiens
  Payload ID: 16220
  Gene Symbol: SLC35A4
  Gene Name: solute carrier family 35, member A4
  Uniprot ID: Q96G79
  ENST ID: ENST00000612662
  CDS Start-End: 729-1703
gcggggaagatggcggatgacaaggattctctgcctaagcttaaggacctggcatttctcaagaaccagctggaaagcctgcagcggcgtgtagaagacgaagtcaacagtggagtgggccaggatggctcgctgttgtcctccccgttcctcaagggattcctggctggctatgtggtggccaaactgagggcatcagcagtattgggctttgctgtgggcacctgcactggcatctatgcggctcaggcatatgctgtgcccaacgtggagaagacattaagggactatttgcagttgctacgcaaggggcccgactagctctaggtgccatggaagaggcaggatgagcagctcagccttcaggtggagacactttatctggattccccagctgtcatccatttgctatctccaactttcctgccaccttcatccttgcctcccttcctgcagattgtggacagtagttcctcagcctgcaccctggattccttcttccccttcctagctccatgggactcgccccaagactgtggcttcaaggaccaccagccccttactcttcaagccctgactgtggagttggtagatgcctctgatcctcagtattctctctggcaatgttccacggcttctccttcctgggagctggctccataacttgattttccccaaacgtgttgcaatccctgctgccccttagccacccagggtcttgtgtgggtatgagtgtagaggatgggggtatgccaggcctgggccgtcccaggcaggcccgctggaccctgatgctactcctatccactgccatgtacggtgcccatgccccattgctggcactgtgccatgtggacggccgagtgcccttccggccctcctcagccgtgctgctgactgagctgaccaagctactgttatgcgccttctcccttctggtaggctggcaagcatggccccaggggcccccaccctggcgccaggctgctcccttcgcactatcagccctgctctatggcgctaacaacaacctggtgatctatcttcagcgttacatggaccccagcacctaccaggtgctgagtaatctcaagattggaagcacagctgtgctctactgcctctgcctccggcaccgcctctctgtgcgtcaggggttagcgctgctgctgctgatggctgcgggagcctgctatgcagcagggggccttcaagttcccgggaacacccttcccagtccccctccagcagctgctgccagccccatgcccctgcatatcactccgctaggcctgctgctcctcattctgtactgcctcatctcaggcttgtcgtcagtgtacacagagctgctcatgaagcgacagcggctgcccctggcacttcagaacctcttcctctacacttttggtgtgcttctgaatctaggtctgcatgctggcggcggctctggcccaggcctcctggaaggtttctcaggatgggcagcactcgtggtgctgagccaggcactaaatggactgctcatgtctgctgtcatgaagcatggcagcagcatcacacgcctctttgtggtgtcctgctcgctggtggtcaacgccgtgctctcagcagtcctgctacggctgcagctcacagccgccttcttcctggccacattgctcattggcctggccatgcgcctgtactatggcagccgctagtccctgacaacttccaccctgattccggaccctgtagattgggcgccaccaccagatccccctcccaggccttcctccctctcccatcagcagccctgtaacaagtgccttgtgagaaaagctggagaagtgagggcagccaggttattctctggaggttggtggatgaaggggtacccctaggagatgtgaagtgtgggtttggttaaggaaatgcttaccatcccccacccccaaccaagttcttccagactaaagaattaaggtaacatcaatacctaggcctgagaaataaccccatccttgttgggcagctccctgctttgtcctgcatgaacagagttgatgaaagtggggtgtgggcaacaagtggctttccttgcctactttagtcacccagcagagccactggagctggctagtccagcccagccatggtgcatgactcttccataagggatcctcacccttccactttcatgcaagaaggcccagttgccacagattatacaaccattacccaaaccactctgacagtctcctccagttccagcaatgcctagagacatgctccctgccctctccacagtgctgctccccacacctagcctttgttctggaaaccccagagagggctgggcttgactcatctcagggaatgtagcccctgggccctggcttaagccgacactcctgacctctctgttcaccctgagggctgtcttgaagcccgctacccactctgaggctcctaggaggtaccatgcttcccactctggggcctgcccctgcctagcagtctcccagctcccaacagcctggggaagctctgcacagagtgacctgagaccaggtacaggaaacctgtagctcaatcagtgtctctttaactgcataagcaataagatcttaataaagtcttctaggctgtagggtggttcctacaaccacagc

SEQ ID NO: 183834 - DNA, 683 bp, Homo sapiens
  Payload ID: 16220
  Gene Symbol: SLC35A4
  Gene Name: solute carrier family 35, member A4
  ENST ID: ENST00000623481
  CDS Start-End: 17-328
aagttcggcggggaagatggcggatgacaaggattctctgcctaagcttaaggacctggcatttctcaagaaccagctggaaagcctgcagcggcgtgtagaagacgaagtcaacagtggagtgggccaggatggctcgctgttgtcctccccgttcctcaagggattcctggctggctatgtggtggccaaactgagggcatcagcagtattgggctttgctgtgggcacctgcactggcatctatgcggctcaggcatatgctgtgcccaacgtggagaagacattaagggactatttgcagttgctacgcaaggggcccgactagctctaggtgccatggaagaggcaggatgagcagctcagccttcaggtggagacactttatctggattccccagctgtcatccatttgctatctccaactttcctgccaccttcatccttgcctcccttcctgcagattgtggacagtagttcctcagcctgcaccctggattccttcttccccttcctagctccatgggactcgccccaagactgtggcttcaaggaccaccagccccttactcttcaagccctgactgtggagttggtagatgcctctgatcctcagtattctctctggcaatgttccacggcttctccttcctgggagctggctccataacttgattttcccc

SEQ ID NO: 183835 - DNA, 2444 bp, Homo sapiens
  Payload ID: 16221
  Gene Symbol: SLC35A5
  Gene Name: solute carrier family 35, member A5
  ENST ID: ENST00000261034
  CDS Start-End: 222-929
gggtccgctttttcccaatccggacgtaatcgtggtttttgttctgcaataggcggcttagagggaggggctttttcgcctatacctactgtagcttctccacgtatggaccctaaaggctactgctgctactacggggctagacagttactgtctcagctctaggatgtgcgttcttccactagaagctcttctgagggaggtaattaaaaaacagtggaatggaaaaacagtgctgtagtcatcctgtaatatgctccttgtcaacaatgtatacattcctgctaggtgccatattcattgctttaagctcaagtcgcatcttactagtgaagtattctgccaatgaagaaaacaagtatgattatcttccaactactgtgaatgtgtgctcagaactggtgaagctagttttctgtgtgcttgtgtcattctgtgttataaagaaagatcatcaaagtagaaatttgaaatatgcttcctggaaggaattctctgatttcatgaagtggtccattcctgcctttctttatttcctggataacttgattgtcttctatgtcctgtcctatcttcaaccagccatggctgttatcttctcaaattttagcattataacaacagctcttctattcaggatagtgctgaagaggcgtctaaactggatccagtgggcttccctcctgactttatttttgtctattgtggccttgactgccgggactaaaactttacagcacaacttggcaggacgtggatttcatcacgatgcctttttcagcccttccaattcctgccttcttttcagaagccctccctggaatttttcttggaagccccatcagtccttctctctatatttatttataatgccagcaagcctcaagttccggaatacgcacctaggcaagaaaggatccgagatctaagtggcaatctttgggagcgttccagtggggatggagaagaactagaaagacttaccaaacccaagagtgatgagtcagatgaagatactttctaactggtacccacatagtttgcagctctcttgaaccttattttcacattttcagtgtttgtaatatttatcttttcactttgataaaccagaaatgtttctaaatcctaatattctttgcatatatctagctactccctaaatggttccatccaaggcttagagtacccaaaggctaagaaattctaaagaactgatacaggagtaacaatatgaagaattcattaatatctcagtacttgataaatcagaaagttatatgtgcagattattttccttggccttcaagcttccaaaaaacttgtaataatcatgttagctatagcttgtatatacacatagagatcaatttgccaaatattcacaatcatgtagttctagtttacatgccaaagtcttccctttttaacattataaaagctaggttgtctcttgaattttgaggccctagagatagtcattttgcaagtaaagagcaacgggaccctttctaaaaacgttggttgaaggacctaaatacctggccataccatagatttgggatgatgtagtctgtgctaaatattttgctgaagaagcagtttctcagacacaacatctcagaattttaatttttagaaattcatgggaaattggatttttgtaataatcttttgatgttttaaacattggttccctagtcaccatagttaccacttgtattttaagtcatttaaacaagccacggtggggcttttttctcctcagtttgaggagaaaaatcttgatgtcattactcctgaattattacattttggagaataagagggcattttattttattagttactaattcaagctgtgactattgtatatctttccaagagttgaaatgctggcttcagaatcataccagattgtcagtgaagctgatgcctaggaacttttaaagggatcctttcaaaaggatcacttagcaaacacatgttgacttttaactgatgtatgaatattaatactctaaaaatagaaagaccagtaatatataagtcactttacagtgctacttcacacttaaaagtgcatggtatttttcatggtattttgcatgcagccagttaactctcgtagatagagaagtcaggtgatagatgatattaaaaattagcaaacaaaagtgacttgctcagggtcatgcagctgggtgatgatagaagagtgggctttaactggcaggcctgtatgtttacagactaccatactgtaaatatgagctttatggtgtcattctcagaaacttacacatttctgctctcctttctcctaagtttcatgcagatgaatataaggtaatatactattatataattcatttgtgatatccacaataatatgactggcaagaattggtggaaatttgtaattaaaataattattaaaccta

SEQ ID NO: 183836 - DNA, 4399 bp, Homo sapiens
  Payload ID: 16221
  Gene Symbol: SLC35A5
  Gene Name: solute carrier family 35, member A5
  Uniprot ID: Q9BS91
  ENST ID: ENST00000492406
  CDS Start-End: 284-1558
ataagccgcttctcccctccttccggaagcgtaacactgaacgtgcctgcgcaatgggtgtcgggtccgctttttcccaatccggacgtaatcgtggtttttgttctgcaataggcggcttagagggaggggctttttcgcctatacctactgtagcttctccacgtatggaccctaaaggctactgctgctactacggggctagacagttactgtctcagctctaggatgtgcgttcttccactagaagctcttctgagggaggtaattaaaaaacagtggaatggaaaaacagtgctgtagtcatcctgtaatatgctccttgtcaacaatgtatacattcctgctaggtgccatattcattgctttaagctcaagtcgcatcttactagtgaagtattctgccaatgaagaaaacaagtatgattatcttccaactactgtgaatgtgtgctcagaactggtgaagctagttttctgtgtgcttgtgtcattctgtgttataaagaaagatcatcaaagtagaaatttgaaatatgcttcctggaaggaattctctgatttcatgaagtggtccattcctgcctttctttatttcctggataacttgattgtcttctatgtcctgtcctatcttcaaccagccatggctgttatcttctcaaattttagcattataacaacagctcttctattcaggatagtgctgaagaggcgtctaaactggatccagtgggcttccctcctgactttatttttgtctattgtggccttgactgccgggactaaaactttacagcacaacttggcaggacgtggatttcatcacgatgcctttttcagcccttccaattcctgccttcttttcagaagtgagtgtcccagaaaagacaattgtacagcaaaggaatggacttttcctgaagctaaatggaacaccacagccagagttttcagtcacatccgtcttggcatgggccatgttcttattatagtccagtgttttatttcttcaatggctaatatctataatgaaaagatactgaaggaagggaaccagctcactgaaagcatcttcatacagaacagcaaactctatttctttggcattctgtttaatgggctgactctgggccttcagaggagtaaccgtgatcagattaagaactgtggatttttttatggccacagtgcattttcagtagcccttatttttgtaactgcattccagggcctttcagtggctttcattctgaagttcctggataacatgttccatgtcttgatggcccaggttaccactgtcattatcacaacagtgtctgtcctggtctttgacttcaggccctccctggaatttttcttggaagccccatcagtccttctctctatatttatttataatgccagcaagcctcaagttccggaatacgcacctaggcaagaaaggatccgagatctaagtggcaatctttgggagcgttccagtggggatggagaagaactagaaagacttaccaaacccaagagtgatgagtcagatgaagatactttctaactggtacccacatagtttgcagctctcttgaaccttattttcacattttcagtgtttgtaatatttatcttttcactttgataaaccagaaatgtttctaaatcctaatattctttgcatatatctagctactccctaaatggttccatccaaggcttagagtacccaaaggctaagaaattctaaagaactgatacaggagtaacaatatgaagaattcattaatatctcagtacttgataaatcagaaagttatatgtgcagattattttccttggccttcaagcttccaaaaaacttgtaataatcatgttagctatagcttgtatatacacatagagatcaatttgccaaatattcacaatcatgtagttctagtttacatgccaaagtcttccctttttaacattataaaagctaggttgtctcttgaattttgaggccctagagatagtcattttgcaagtaaagagcaacgggaccctttctaaaaacgttggttgaaggacctaaatacctggccataccatagatttgggatgatgtagtctgtgctaaatattttgctgaagaagcagtttctcagacacaacatctcagaattttaatttttagaaattcatgggaaattggatttttgtaataatcttttgatgttttaaacattggttccctagtcaccatagttaccacttgtattttaagtcatttaaacaagccacggtggggcttttttctcctcagtttgaggagaaaaatcttgatgtcattactcctgaattattacattttggagaataagagggcattttattttattagttactaattcaagctgtgactattgtatatctttccaagagttgaaatgctggcttcagaatcataccagattgtcagtgaagctgatgcctaggaacttttaaagggatcctttcaaaaggatcacttagcaaacacatgttgacttttaactgatgtatgaatattaatactctaaaaatagaaagaccagtaatatataagtcactttacagtgctacttcacacttaaaagtgcatggtatttttcatggtattttgcatgcagccagttaactctcgtagatagagaagtcaggtgatagatgatattaaaaattagcaaacaaaagtgacttgctcagggtcatgcagctgggtgatgatagaagagtgggctttaactggcaggcctgtatgtttacagactaccatactgtaaatatgagctttatggtgtcattctcagaaacttacacatttctgctctcctttctcctaagtttcatgcagatgaatataaggtaatatactattatataattcatttgtgatatccacaataatatgactggcaagaattggtggaaatttgtaattaaaataattattaaacctatgtcttgtgttgccactctgtcatttagggtgggatgtagagtacttttaatcttaaaaaatagagtgagacaaaaacctacacaacttttaaaactttctctttaagtagatctttacttctaacaataacaaaggcattttcatcagttatgtgaaatacgaagattatatctattatggcgatttattttaaaggtaagggaaatgaggtacagcaggacctttctaggaaatgtggcatacaaaacatttttatctcataaaacataaaaattacaaaaatattcttacaaaggtatcacatacagaatacattaaatagcagatttcagtagtgcatggagattgattttcttatttacgattactttttttcctcaccttcctctttggaaagcattttttgcacaaagttaagtttacttatgttaacttgccacttaatgagagaggaagagaaagagtgagagcacaagatcatgtgctggaactaaaaatgttctattcaacccagcaatccctctactgggtacctacccaaaggaaaataaatcgttttatcaaaaagacacttgcagtggtatgtttatcacagcagtattcacagtaacaaaatcatggactcaacctaagtgtccatcagtggtgcctggaataagaaaatgtggtacatatacaccatggaatactttgcagccataaaaaataatgaaaccatgtgctttaaagccacatggatgcagctggaagccattatcctaactgaaataattcagaaacagaaaatcaaataccacatgttctcacttataagtgggagctaaacagtgggtacatgtggacacaggattccaaagtgagaagggtggtgtattagtccattctcatgctgctacaaagaaatacccgagactgggtaatctataaagaaaaggggtttaaatgactcgcagttctgcatggctggggaggaggcctcaggaaactcacaagcatggctgaaggcgaaacagaagcaagcaccttcttcacaaggcagcaggagagagagtgccaacaggggaaatggcagatgcttataaaaccatcagatctcatgagaacttactatcatgagaacagcatgggggaaactgcccccatgattcaattacccccacctggttccttcctcaacacctggggattatggggattacaattcaagatgagatttgggcggggacagaaagcctaatcatatcagatgggaaggacatgagggttgacaaaatatgtattgggtacaatgttcactgtttgagtgatgggtccactagaagcccaaacttcaccattatgcaatgtaccatatatacgcaatgtaacaaacctgtacatgtaccccttcaatctgaaataaaagttgttttttttttt

SEQ ID NO: 183837 - DNA, 486 bp, Homo sapiens
  Payload ID: 16221
  Gene Symbol: SLC35A5
  Gene Name: solute carrier family 35, member A5
  ENST ID: ENST00000468642
  CDS Start-End: 223-486
agcgtaacactgaacgtgcctgcgcaatgggtgtcgggtccgctttttcccaatccggacgtaatcgtggtttttgttctgcaataggcggcttagagggaggggctttttcgcctatacctactgtagcttctccacgtatggaccctaaaggctactgctgctactacggggctagacagttactgtctcagctctaggatgtaattaaaaaacagtggaatggaaaaacagtgctgtagtcatcctgtaatatgctccttgtcaacaatgtatacattcctgctaggtgccatattcattgctttaagctcaagtcgcatcttactagtgaagtattctgccaatgaagaaaacaagtatgattatcttccaactactgtgaatgtgtgctcagaactggtgaagctagttttctgtgtgcttgtgtcattctgtgttataaagaaagatcatcaaagtagaaatttgaaatatgcttcctgg

SEQ ID NO: 183838 - DNA, 575 bp, Homo sapiens
  Payload ID: 16221
  Gene Symbol: SLC35A5
  Gene Name: solute carrier family 35, member A5
  ENST ID: ENST00000484995
  CDS Start-End: 134-575
acagcgcgcgaagacggggtgcgcgatcctcgcaccccaggcagcccgcgacggaccggacccagctgtcacccagccgcgagggagggcagcggggccgaagggagacctgaggtaattaaaaaacagtggaatggaaaaacagtgctgtagtcatcctgtaatatgctccttgtcaacaatgtatacattcctgctaggtgccatattcattgctttaagctcaagtcgcatcttactagtgaagtattctgccaatgaagaaaacaagtatgattatcttccaactactgtgaatgtgtgctcagaactggtgaagctagttttctgtgtgcttgtgtcattctgtgttataaagaaagatcatcaaagtagaaatttgaaatatgcttcctggaaggaattctctgatttcatgaagtggtccattcctgcctttctttatttcctggataacttgattgtcttctatgtcctgtcctatcttcaaccagccatggctgttatcttctcaaattttagcattataacaacagctcttctattcaggatagtgctgaagaggcgtctaaact

SEQ ID NO: 183839 - DNA, 840 bp, Homo sapiens
  Payload ID: 16221
  Gene Symbol: SLC35A5
  Gene Name: solute carrier family 35, member A5
  ENST ID: ENST00000494706
  CDS Start-End: 392-751
ggaacgagagacttggaaaagaaagggacatagacaaagtatagagaaagaaaaaagggggcccaggggaccggcgctcagcacacggaggatctctgccagcctctgagttccattagtatttattgatcattattgggtgtttctcggagagtgggatgtggcaggatcataggatagtagtggagagagggtcaacaggtaaacacgtgaacaaaggtctctgcatcataaacaagaaaacaagtatgattatcttccaactactgtgaatgtgtgctcagaactggtgaagctagttttctgtgtgcttgtgtcattctgtgttataaagaaagatcatcaaagtagaaatttgaaatatgcttcctggaaggaattctctgatttcatgaagtggtccattcctgcctttctttatttcctggataacttgattgtcttctatgtcctgtcctatcttcaaccagccatggctgttatcttctcaaattttagcattataacaacagctcttctattcaggatagtgctgaagaggcgtctaaactggatccagtgggcttccctcctgactttatttttgtctattgtggccttgactgccgggactaaaactttacagcacaacttggcaggacgtggatttcatcacgatgcctttttcagcccttccaattcctgccttcttttcagaacaagcctcaagttccggaatacgcacctaggcaagaaaggatccgagatctaagtggcaatctttgggagcgttccagtggggatggagaagaactagaaagacttaccaaacccaagagtgatgagtcagatgaagatact

SEQ ID NO: 183840 - DNA, 1850 bp, Homo sapiens
  Payload ID: 16222
  Gene Symbol: SLC35B1
  Gene Name: solute carrier family 35, member B1
  Uniprot ID: P78383
  ENST ID: ENST00000240333
  CDS Start-End: 256-1335
ctaggacaccctgtggtgctctgggtcgcagttgtcctcagagttgcctgattggaaaaatctccagggcgagggatcagtctcgaggctgccggttcccctggccctcagggatggagccaaggtcccagggcgggttttctttcctaggaagtggttgctgggttctgaggagtttcccccttggcagccatgagccggcagttctggtagtgactgctgggccctgctggacagcggtcgcatgcagctcctatgaggcccctgccgccggtcggcgatgtccggctggagctgtcgcctccgccgccgctgctgccggtgccggttgtgagcgggtctccagtcggctcctctgggcgtctcatggcctctagcagctccctggtgcccgaccggctgcgcctgccgctctgcttcctgggtgtctttgtctgctatttttactatgggatcctgcaggaaaagataacaagaggaaagtatggggaaggagccaagcaggagacgttcacctttgccttaactttggtcttcattcaatgtgtgatcaatgctgtgtttgccaagatcttgatccagttttttgacactgccagggtggatcgtacccggagctggctctatgctgcctgttctatctcctatctgggtgccatggtctccagcaattcagcactacagtttgtcaactacccaactcaggtccttggtaaatcctgcaagccaatcccagtcatgctccttggggtgaccctcttgaagaagaagtacccgttggccaagtacctgtgtgtgctgttaattgtggctggagtggcccttttcatgtacaaacccaagaaagttgttgggatagaagaacacacagtcggctatggagagctactcttgctattatcgctgaccctggatggactgactggtgtttcccaggaccacatgcgggctcattaccaaacaggctccaaccacatgatgctgaacatcaacctttggtcgacattgctgctgggaatgggaatcctgttcactggggagctctgggagttcttgagctttgctgaaaggtaccctgccatcatctataacatcctgctctttgggctgaccagtgccctgggtcagagcttcatctttatgacggttgtgtattttggtcccctgacctgctccatcatcactacaactcgaaagttcttcacaattttggcctctgtgatcctcttcgccaatcccatcagccccatgcagtgggtgggcactgtgcttgtgttcctgggtcttggtcttgatgccaagtttgggaaaggagctaagaagacatcccactaggaagagagagactacctccacatcaagaatatttaagttattatctcaaacagtgacatctcttgggaaaatggacttaataggaatatgggactgagttccagtcttttttaataaaataaaatcaagcaaaatcacatattctaaaaaatgcacttggattttaacaagacagagtggtggtttttgttcttcatgccctggagcagtctatggtaaataaaagagggagggaagaggcagagctggatgttcattacccaggctgctcctctcacgggtgtggttagcatggttgagtgggcgattcctccaagaacctgaggattatagggaggaactctgtgagatcgcagaattgtgctaatggcttctgttccgatgggtgaggcttgtcccgttagagctggtcccattagaggacgggtggctgtccattagagccagagaatgtaaaagtcacttcctctcctaaagctcctgtgggcaaatatttcattaaaaaaacaaagttg

SEQ ID NO: 183841 - DNA, 581 bp, Homo sapiens
  Payload ID: 16222
  Gene Symbol: SLC35B1
  Gene Name: solute carrier family 35, member B1
  ENST ID: ENST00000511763
  CDS Start-End: 1-581
ggcccctgccgccggtcggcgatgtccggctggagctgtcgcctccgccgccgctgctgccggtgccggttgtgagcgggtctccagtcggctcctctgggcgtctcatggcctctagcagctccctggtgcccgaccggctgcgcctgccgctctgcttcctgggtgtctttgtctgctatttttactatgggatcctgcaggaaaagatggtggatcgtacccggagctggctctatgctgcctgttctatctcctatctgggtgccatggtctccagcaattcagcactacagtttgtcaactacccaactcaggtccttggtaaatcctgcaagccaatcccagtcatgctccttggggtgaccctcttgaagaagaagtacccgttggccaagtacctgtgtgtgctgttaattgtggctggagtggcccttttcatgtacaaacccaagaaagttgttgggatagaagaacacacagtcggctatggagagctactcttgctattatcgctgaccctggatggactgactggtgtttcccaggaccacatgcgggctcattaccaaacaggctcc

SEQ ID NO: 183842 - DNA, 943 bp, Homo sapiens
  Payload ID: 16222
  Gene Symbol: SLC35B1
  Gene Name: solute carrier family 35, member B1
  ENST ID: ENST00000503334
  CDS Start-End: 263-943
ctcagagttgcctgattggaaaaatctccagggcgagggatcagtctcgaggctgccggttcccctggccctcagggatggagccaaggacccgagtcggcccccttttggtactcccagatgcttgcaaacaacctattcgtcctcggccttggtgccatagccgaaataccgtctcctcctgcctgggaacaagaggaaagtatggggaaggagccaagcaggagacgttcacctttgccttaactttggtcttcattcaatgtgtgatcaatgctgtgtttgccaagatctggtggatcgtacccggagctggctctatgctgcctgttctatctcctatctgggtgccatggtctccagcaattcagcactacagtttgtcaactacccaactcaggtccttggtaaatcctgcaagccaatcccagtcatgctccttggggtgaccctcttgaagaagaagtacccgttggccaagtacctgtgtgtgctgttaattgtggctggagtggcccttttcatgtacaaacccaagaaagttgttgggatagaagaacacacagtcggctatggagagctactcttgctattatcgctgaccctggatggactgactggtgtttcccaggaccacatgcgggctcattaccaaacaggctccaaccacatgatgctgaacatcaacctttggtcgacattgctgctgggaatgggaatcctgttcactggggagctctgggagttcttgagctttgctgaaaggtaccctgccatcatctataacatcctgctctttgggctgaccagtgccctgggtcagagcttcatctttatgacggttgtgtattttggtcccctgacctgctccatcatcactacaactcgaaagttcttcacaattttggcctctgtgatcctcttcgccaatcccatcagcccc

SEQ ID NO: 183843 - DNA, 845 bp, Homo sapiens
  Payload ID: 16222
  Gene Symbol: SLC35B1
  Gene Name: solute carrier family 35, member B1
  ENST ID: ENST00000508520
  CDS Start-End: 84-845
gttgtcctcagagttgcctgattggaaaaatctccagggcgagggatcagtctcgaggctgccggttcccctggccctcagggatggagccaaggacccgagtcggcccccttttggtactcccagatgcttgcaaacaacctattcgtcctcggccttggtgccatagccgaaataccgtctcctcctgcctgggaacaagaggaaagtatggggaaggagccaagcaggagacgttcacctttgccttaactttggtcttcattcaatgtgtgatcaatgctgtgtttgccaagatcttgatccagttttttgacactgccagggtggatcgtacccggagctggctctatgctgcctgttctatctcctatctgggtgccatggtctccagcaattcagcactacagtttgtcaactacccaactcaggtccttggtaaatcctgcaagccaatcccagtcatgctccttggggtgaccctcttgaagaagaagtacccgttggccaagtacctgtgtgtgctgttaattgtggctggagtggcccttttcatgtacaaacccaagaaagttgttgggatagaagaacacacagtcggctatggagagctactcttgctattatcgctgaccctggatggactgactggtgtttcccaggaccacatgcgggctcattaccaaacaggctccaaccacatgatgctgaacatcaacctttggtcgacattgctgctgggaatgggaatcctgttcactggggagctctgggagttcttgagctttgctgaaaggtaccctgccatcatctataacatcctgctctttgggctgaccagtgcc

SEQ ID NO: 183844 - DNA, 481 bp, Homo sapiens
  Payload ID: 16222
  Gene Symbol: SLC35B1
  Gene Name: solute carrier family 35, member B1
  ENST ID: ENST00000502268
  CDS Start-End: 1-114
acaagaggaaagtatggggaaggagccaagcaggagacgttcacctttgccttaactttggtcttcattcaatgtgtgatcaatgctgtgtttgccaagatctgtccttggtaaatcctgcaagccaatcccagtcatgctccttggggtgaccctcttgaagaagaagtacccgttggccaagtacctgtgtgtgctgttaattgtggctggagtggcccttttcatgtacaaacccaagaaagttgttgggatagaagaacacacagtcggctatggagagctactcttgctattatcgctgaccctggatggactgactggtgtttcccaggaccacatgcgggctcattaccaaacaggctccaaccacatgatgctgaacatcaacctttggtcgacattgctgctgggaatgggaatcctgttcactggggagctctgggagttcttgagctttgctgaaaggtaccctgccatc

SEQ ID NO: 183845 - DNA, 1320 bp, Homo sapiens
  Payload ID: 16222
  Gene Symbol: SLC35B1
  Gene Name: solute carrier family 35, member B1
  ENST ID: ENST00000507773
  CDS Start-End: 147-620
agggatggagccaaggtcccagggcgggttttctttcctaggaagtggttgctgggttctgaggagtttcccccttggcagccatgagccggcagttctggtagtgactgctgggccctgctggacagcggtcgcatgcagctcctatgaggcccctgccgccggtcggcgatgtccggctggagctgtcgcctccgccgccgctgctgccggtgccggttgtgagcgggtctccagtcggctcctctgggcgtctcatggcctctagcagctccctggtgcccgaccggctgcgcctgccgctctgcttcctgggtgtctttgtctgctatttttactatgggatcctgcaggaaaagataacaagaggaaagtatggggaaggagccaagcaggagacgttcacctttgccttaactttggtcttcattcaatgtgtgatcaatgctgtgtttgccaagatctggtggatcgtacccggagctggctctatgctgcctgttctatctcctatctgggtgccatggtctccagcaattcagcactacagtttgtcaactacccaactcaggtccttggtaaatcctgcaagccaatcccagtcatgctccttggggtgaccctcttgaagaagaagtacccgttggccaagtacctgtgtgtgctgttaattgtggctggagtggcccttttcatgtacaaacccaagaaagttgttgggatagaagaacacacagtcggctatggagagctactcttgctattatcgctgaccctggatggactgactggtgtttcccaggaccacatgcgggctcattaccaaacaggctccaaccacatgatgctgaacatcaacctttggtcgacattgctgctgggaatgggaatcctgttcactggggagctctgggagttcttgagctttgctgaaaggtaccctgccatcatctataacatcctgctctttgggctgaccagtgccctgggtcagagcttcatctttatgacggttgtgtattttggtcccctgacctgctccatcatcactacaactcgaaagttcttcacaattttggcctctgtgatcctcttcgccaatcccatcagccccatgcagtgggtgggcactgtgcttgtgttcctgggtcttggtcttgatgccaagtttgggaaaggagctaagaagacatcccactaggaagagagagactacctccacatcaagaatatttaagttattatctcaaacagtgacatctcttgggaaaatggacttaataggaatatgggactgagttccagtcttttttaataaaa

SEQ ID NO: 183846 - DNA, 548 bp, Homo sapiens
  Payload ID: 16222
  Gene Symbol: SLC35B1
  Gene Name: solute carrier family 35, member B1
  ENST ID: ENST00000511657
  CDS Start-End: 320-548
aaaagagcaggctgctagaagaggagcctcgacctagagagcagcccagagtccaccaggtggccggagatttgggccaattaagtagggggttggaggtagtagtaggaagacctgaggtcagtcttgccctggcaattcgtgccagcaagtgaagacccaacacttgcatgaggaagggatccaacgaggagctcattaatgggaaatattcaggagcgcggccgaagggtttgcgccattgttgaacaagaggaaagtatggggaaggagccaagcaggagacgttcacctttgccttaactttggtcttcattcaatgtgtgatcaatgctgtgtttgccaagatctggtggatcgtacccggagctggctctatgctgcctgttctatctcctatctgggtgccatggtctccagcaattcagcactacagtttgtcaactacccaactcaggtccttggtaaatcctgcaagccaatcccagtcatgctccttggggtgaccctcttgaagaagaagtacccgttggccaagtacctgtgtg

SEQ ID NO: 183847 - DNA, 633 bp, Homo sapiens
  Payload ID: 16222
  Gene Symbol: SLC35B1
  Gene Name: solute carrier family 35, member B1
  ENST ID: ENST00000514907
  CDS Start-End: 72-633
gttgcctgattggaaaaatctccagggcgagggatcagtctcgaggctgccggttcccctggccctcagggatggagccaagaacaagaggaaagtatggggaaggagccaagcaggagacgttcacctttgccttaactttggtcttcattcaatgtgtgatcaatgctgtgtttgccaagatcttgatccagttttttgacactgccagggtggatcgtacccggagctggctctatgctgcctgttctatctcctatctgggtgccatggtctccagcaattcagcactacagtttgtcaactacccaactcaggtccttggtaaatcctgcaagccaatcccagtcatgctccttggggtgaccctcttgaagaagaagtacccgttggccaagtacctgtgtgtgctgttaattgtggctggagtggcccttttcatgtacaaacccaagaaagttgttgggatagaagaacacacagtcggctatggagagctactcttgctattatcgctgaccctggatggactgactggtgtttcccaggaccacatgcgggctcattaccaaacaggctccaaccacatgatgctgaacatcaacctttggtcgacattgctgctgggaatgg

SEQ ID NO: 183848 - DNA, 862 bp, Homo sapiens
  Payload ID: 16222
  Gene Symbol: SLC35B1
  Gene Name: solute carrier family 35, member B1
  ENST ID: ENST00000515850
  CDS Start-End: 6-862
ctcctatgaggcccctgccgccggtcggcgatgtccggctggagctgtcgcctccgccgccgctgctgccggtgccggttgtgagcgggtctccagtcggctcctctgggcgtctcatggcctctagcagctccctggtgcccgaccggctgcgcctgccgctctgcttcctgggtgtctttgtctgctatttttactatgggatcctgcaggaaaagatgacccgagtcggcccccttttggtactcccagatgcttgcaaacaacctattcgtcctcggccttggtgccatagccgaaataccgtctcctcctgcctgggaacaagaggaaagtatggggaaggagccaagcaggagacgttcacctttgccttaactttggtcttcattcaatgtgtgatcaatgctgtgtttgccaagatcttgatccagttttttgacactgccagggtggatcgtacccggagctggctctatgctgcctgttctatctcctatctgggtgccatggtctccagcaattcagcactacagtttgtcaactacccaactcaggtccttggtaaatcctgcaagccaatcccagtcatgctccttggggtgaccctcttgaagaagaagtacccgttggccaagtacctgtgtgtgctgttaattgtggctggagtggcccttttcatgtacaaacccaagaaagttgttgggatagaagaacacacagtcggctatggagagctactcttgctattatcgctgaccctggatggactgactggtgtttcccaggaccacatgcgggctcattaccaaacaggctccaaccacatgatgctgaacatcaacctttggtcgacattgct

SEQ ID NO: 183849 - DNA, 2359 bp, Homo sapiens
  Payload ID: 16223
  Gene Symbol: SLC35D3
  Gene Name: solute carrier family 35, member D3
  Uniprot ID: Q5M8T2
  ENST ID: ENST00000331858
  CDS Start-End: 166-1416
cgcaagaacgcctggccggagctgccctctgcagccgagccggcgccccctgcccttcgccgccgcgctgggcgggcgcccccgccgccctcactccgctgctcccggctcctcgcgcgcaggtcgcggagctccgccaccgctgggtgcggcgaggccggcgcgatgcggcagctgtgccggggccgcgtgctgggcatctcggtggccatcgcgcacggggtcttctcgggctccctcaacatcttgctcaagttcctcatcagccgctaccagttctccttcctgaccctggtgcagtgcctgaccagctccaccgcggcgctgagcctggagctgctgcggcgcctcgggctcatcgccgtgccccccttcggtctgagcctggcgcgctccttcgcgggggtcgcggtgctctccacgctgcagtccagcctcacgctctggtccctgcgcggcctcagcctgcccatgtacgtggtcttcaagcgctgcctgcccctggtcaccatgctcatcggcgtcctggtgctcaagaacggcgcgccctcgccaggggtgctggcggcggtgctcatcaccacctgcggcgccgccctggcaggagccggcgacctgacgggcgaccccatcgggtacgtcacgggagtgctggcggtgctggtgcacgctgcctacctggtgctcatccagaaggccagcgcagacaccgagcacgggccgctcaccgcgcagtacgtcatcgccgtctctgccaccccgctgctggtcatctgctccttcgccagcaccgactccatccacgcctggaccttcccgggctggaaggacccggccatggtctgcatcttcgtggcctgcatcctgatcggctgcgccatgaacttcaccacgctgcactgcacctacatcaattcggccgtgaccaccagcttcgtgggtgtggtgaagagcatcgccaccatcacggtgggcatggtggccttcagcgacgtggagcccacctctctgttcattgccggcgtggtggtgaacaccctgggctctatcatttactgtgtggccaagttcatggagaccagaaagcaaagcaactacgaggacctggaggcccagcctcggggagaggaggcgcagctaagtggagaccagctgccgttcgtgatggaggagctgcccggggagggaggaaatggccggtcagaaggtggggaggcagcaggtggccccgctcaggagagcaggcaagaggtcaggggcagcccccgaggagtcccgctggtggctgggagctctgaagaagggagcaggaggtcgttaaaagatgcttacctcgaggtatggaggttggttaggggaaccaggtatatgaagaaggattatttgatagaaaacgaggagttacccagtccttgagaaggaggtgcatgtacgtacctatgtgcatacacttattttatatgttagaaatgacgtgttttaatgagaggcctccccgttttattctttgaggagtggggaagggaagaaaagaaagaagctgaaaggtactgacacagagcaacaaaattagcacctgtgtgaattatttagtgtgacttcacctgaggcatcacagagacaaaagaatgtgaagctacttaacaaagtaaggcaacgtttctgcttcagactcctggcacatttactttttgtcattataaccataactaaatatctgcatgtaccaagagtccctaagccaccccctccaaagatggagtgtagaaatgatgacagcacttagtaagttcaaagatgacattcagggatgcattttttgatgatagaactacagtttttatcgccagctgggcaaagagtatattgctgaaatgatatataaatatattgaattgatgtttactgtttatagtcatctgaaatatcatatttactctgattctactcacttgttttttaaaaataagtgtcctattattgtattatatattgatagaaactgttaaagctattttgaaaatatgagttcttagctttaatcatgaagtctgaagtttgctttcagtaattattttaaaagttgttttggttcattgctttataatatttattattgaatgccaaacctgttcttttttttactgtgtccaatattctttcaagcaaatgcaatggctggaatataattcagaattaactgaaacccagccagaagagggaccacctgtaaagcaagtcctttcaagtttcactgcacatcccaaaccatgttacaaaaagagcaactgctatattcacattatgatatttttctatcttaaatttgtcaaaataaagtatgagtctaactattaaa

SEQ ID NO: 183850 - DNA, 3691 bp, Homo sapiens
  Payload ID: 16224
  Gene Symbol: SLC35E1
  Gene Name: solute carrier family 35, member E1
  ENST ID: ENST00000409648
  CDS Start-End: 1-316
tatgaaggagaagcagagcaccaaggtatacttgtcactcatccccatcatcagcggtgtcctgctggccaccgtcaccgagttgtcttttgacatgtggggactcgtcagcgccctcgccgccacgctgtgcttctcgcttcagaacattttctccaaaaaggtcttgcgagattcacggatccaccatctccggctgctcaacatcctgggctgccacgccgtcttctttatgatccccacctgggttctggtggacctctcggctttcctggtcagcagcgacttgggtctgccttcagagaatgtgttataaatgaatgcaagtgcctgcggtgaggaggaggccagtgcgattcttccagactcgagttagaaaggaaaaacctacgtctaccagtggccctggacgctcctgctcctggctgtcagcggcttctgtaactttgcccagaatgttatcgccttcagcatcctcaacctcgttagccccctgagctactcggtcgccaatgccaccaaaagaatcatggtcatcacggtgtccctgatcatgctgcgcaacccagtcaccagcaccaacgtcctgggcatgatgaccgccatcctgggggtcttcctctataacaagaccaagtacgatgcaaaccagcaagccaggaagcacctcctccccgtcaccacagcagacctgagcagcaaggagcgtcaccggagcccactggagaagccccacaacggcctcctcttcccccagcacggggactatcagtacggccgcaacaacatcttaacagaccacttccaatacagccggcagagctacccaaactcgtacagtttgaaccgctatgatgtgtagagtccaaaggacaggaccagactgttggtgactccttccccggcccccacagcagtatcagaaacttctgacaatcagtgaatgtacaacccagccgaggggacggtgcataactctccatcagaagccctggggttcctggccccccgtgagccgcaggaggatgcgttgcctgcagtgcagacggccgtgagctctgggcaaacctaaacagagaccagtgtctcatgctctttcttcctggagtctgtcatctgagggccgtgtccctgcggagatcttggccacgttgtacctttccatgtggaattattccccaagcagtgtagctcagagcacttgtgtctgcattccagataacattcaggacctgtgtgaaaagctggggtcactgtggctgtagaccatgaactggcagtgggggtgtccagggcggtgcttgagaacgtcagactggctagtttaattccctggcgcagatacgcataggaccaacagggtcaccaagcagacagggagcccgcgagaatcattcaaaacatccccagccacagagatggatccagtttcctggtcatccccttagcagttcacaagttcctggcaaatgttccaaagcaaaaagcgattgcaattagcatccagttcctgcagcctggtgctctgccctgcacgtcagggttggcatccacccagatccagatggaagggaaacttctctcttctcctttgcctcctcttccctcaccagagcagggcgcttctcttggggtggtgagaaggatcttcgagaaatcgtgttcagtatttcaagctctatttctgtggcacatgtcttttgagaggcatcttcacctcttctgtgatgacttggtatgttgtttggtagagagatcttgattttcggaggatcttgcatttttctagggaatattttgtagttgtgtgtgtgtgtttttgccttggtccccattatgggatgcattaggactggcctatgcatcgaaaatctttttgtttgtaaacgtttaaaaacaaagttccccggccaggcacagtggctcacacctgtaatcccagcactttgggaggccaagatgggcggatcacgaggtcaggagttcgagaccagcctggccaacatagtgaaaccccatctctactaaaaatacagaaattagccgggcatggtgtcgcgtgcctgtagtcccagctcctcaggctgctgaggcaggcgaattgcttgaacctgggaggcagaagttgtggtgagccgagattgtgcactccagcctgggtaacagagcgagactccatctcaaaaaaaaaaacaaaacaaaaccaagttcccactggtgatgcctgtctgacacgttttggtatttagtaggaaatgaagtgtttcgaagcttcgagagaagcttcaaaattgtcacaattgctgaaaacagaatgaatcgtgaacattatctcaatattttgtataatagacaagaccacagtgttttggttccctgacctgtttttgtgtttatgttaggatctgaatcatgttctgggtaaggggacgaggagcgaacactgcactaagatttggtttgccaaatcagattctttggtcaagagtcagtttggggccaggcgtggtggctcatgcctgtaatctcagcactttgggaggctgaggtgggtggatcactggagtttgagaccaccctggccaacatggtgaaaccccatctctactaaaacaaaaattagccaggcatggtggcacctgcctgtaatcccagctacttgggaggctgaggcaggagaatcacttgagcccaggaggtggaggtttcagcgagctgagatcacaccactgcactccagccttggtgacagagtgagactctgtctcaaaaaaaaaaaaaaaaaaaaggaatcagtttgggtcttggcagaaatcaacataaggaatatgacaagaccccagtaggtaaccctgagtgctcaggtccgagctgtggtctcttttacggcttcatgaaaggaccgtgccctcacggaggggaccacggcttggcttgtggggtcttaggtgatggctgccttctttcttcatcaccacacccagcttcttgctggcacttaggggaagagagcagcaaatgagagatttaccttttatctcccagcgagcgagatgtttccctgttcagagaggaagtaacatcacttatgcttgactggtgtttcttttgttgttgtttgtttttctttcaattggaattctgtatttaagatgttatgtcagctgacacatgggacactcctgaagaggtgactggccccccaccctgtttggcggtgagtttccgcaccaccggcctcagaagtgtccctcttgcttcgtctcttgttcgcttgctttgtaaatactttggtcccaagctgagacaattgctgtgtaaaacgtgaagagtcaatcccaaagggtgttatttgtcagaagaacttgccgtgtgccttcaccgaaggcagtcaagtctgcagttggatttttctcactggtgaatgacaagaaacagggataattttgcactgcggagatattacgggagttgtctatatgattatatatagtacctgattctttgaacatattattgaactccaaaatgaattcgacctccattcaggcttcctgaaatctctgaagttgctgaaatttgtatattattttccttttccaatgcaagatctgctggtgacgggaaatgactgtctggttttattatggtttataaattaataaatgggctatttaattctgtatataaa

SEQ ID NO: 183851 - DNA, 552 bp, Homo sapiens
  Payload ID: 16224
  Gene Symbol: SLC35E1
  Gene Name: solute carrier family 35, member E1
  ENST ID: ENST00000421082
  CDS Start-End: 205-552
ttaaaccagattggttgggttcccttcccagaagatagatatctatgcaagcaggaagaaaatagcatggaaatcctaaccgatcaccttagggagcgacccctgggagaacaggctggcccaacatgaaggcatcctggtgggctcatatatattacaggggctattcctccagtgaggttccccgcagaagctgcagggtgtatggcacagacctacgtctaccagtggccctggacgctcctgctcctggctgtcagcggcttctgtaactttgcccagaatgttatcgccttcagcatcctcaacctcgttagccccctgagctactcggtcgccaatgccaccaaaagaatcatggtcatcacggtgtccctgatcatgctgcgcaacccagtcaccagcaccaacgtcctgggcatgatgaccgccatcctgggggtcttcctctataacaagaccaagtacgatgcaaaccagcaagccaggaagcacctcctccccgtcaccacagcagacctgagcagcaaggagcgtcaccggagcccactg

SEQ ID NO: 183852 - DNA, 1343 bp, Homo sapiens
  Payload ID: 16224
  Gene Symbol: SLC35E1
  Gene Name: solute carrier family 35, member E1
  ENST ID: ENST00000436553
  CDS Start-End: 1-1035
agtggtggggcgcgcgagggcgcgcgggtggcggcgctgtgcctgctgtggtacgcgctgagcgcgggcggcaacgtggtcaacaaggtgatcctgagcgccttcccgttcccggtgaccgtgtcgctgtgccacatcctggctctgtgcgctgggctcccgccgctgctgcgcgcctggcgcgtgccccccgcgccgcccgtctcgggccccggacccagtccgcatccgtcgtccggcccgctgctgccgccgcgcttctacccgcgctacgtgctaccgctcgccttcggcaagtacttcgcgtccgtgtcagcgcacgtcagcatctggaaggtgcccgtgtcctatgcacacaccgtcaaggccaccatgcccatctgggtggtcctcctgtcccggatcattatgaaggagaagcagagcaccaaggtcttgcgagattcacggatccaccatctccggctgctcaacatcctgggctgccacgccgtcttctttatgatccccacctgggttctggtggacctctcggctttcctggtcagcagcgacttgacctacgtctaccagtggccctggacgctcctgctcctggctgtcagcggcttctgtaactttgcccagaatgttatcgccttcagcatcctcaacctcgttagccccctgagctactcggtcgccaatgccaccaaaagaatcatggtcatcacggtgtccctgatcatgctgcgcaacccagtcaccagcaccaacgtcctgggcatgatgaccgccatcctgggggtcttcctctataacaagaccaagtacgatgcaaaccagcaagccaggaagcacctcctccccgtcaccacagcagacctgagcagcaaggagcgtcaccggagcccactggagaagccccacaacggcctcctcttcccccagcacggggactatcagtacggccgcaacaacatcttaacagaccacttccaatacagccggcagagctacccaaactcgtacagtttgaaccgctatgatgtgtagagtccaaaggacaggaccagactgttggtgactccttccccggcccccacagcagtatcagaaacttctgacaatcagtgaatgtacaacccagccgaggggacggtgcataactctccatcagaagccctggggttcctggccccccgtgagccgcaggaggatgcgttgcctgcagtgcagacggccgtgagctctgggcaaacctaaacagagaccagtgtctcatgctctttcttcctggagtctgtcatctgagggccgtgtccctgcggagatcttggccacgttgtacctttccatgtgga

SEQ ID NO: 183853 - DNA, 5099 bp, Homo sapiens
  Payload ID: 16224
  Gene Symbol: SLC35E1
  Gene Name: solute carrier family 35, member E1
  Uniprot ID: Q96K37
  ENST ID: ENST00000595753
  CDS Start-End: 19-1251
ggcggccgctcgggcaggatggcggcggccgcggtgggcgcgggccacggcgcggggggcccgggcgcagcgagcagcagtggtggggcgcgcgagggcgcgcgggtggcggcgctgtgcctgctgtggtacgcgctgagcgcgggcggcaacgtggtcaacaaggtgatcctgagcgccttcccgttcccggtgaccgtgtcgctgtgccacatcctggctctgtgcgctgggctcccgccgctgctgcgcgcctggcgcgtgccccccgcgccgcccgtctcgggccccggacccagtccgcatccgtcgtccggcccgctgctgccgccgcgcttctacccgcgctacgtgctaccgctcgccttcggcaagtacttcgcgtccgtgtcagcgcacgtcagcatctggaaggtgcccgtgtcctatgcacacaccgtcaaggccaccatgcccatctgggtggtcctcctgtcccggatcattatgaaggagaagcagagcaccaaggtatacttgtcactcatccccatcatcagcggtgtcctgctggccaccgtcaccgagttgtcttttgacatgtggggactcgtcagcgccctcgccgccacgctgtgcttctcgcttcagaacattttctccaaaaaggtcttgcgagattcacggatccaccatctccggctgctcaacatcctgggctgccacgccgtcttctttatgatccccacctgggttctggtggacctctcggctttcctggtcagcagcgacttgacctacgtctaccagtggccctggacgctcctgctcctggctgtcagcggcttctgtaactttgcccagaatgttatcgccttcagcatcctcaacctcgttagccccctgagctactcggtcgccaatgccaccaaaagaatcatggtcatcacggtgtccctgatcatgctgcgcaacccagtcaccagcaccaacgtcctgggcatgatgaccgccatcctgggggtcttcctctataacaagaccaagtacgatgcaaaccagcaagccaggaagcacctcctccccgtcaccacagcagacctgagcagcaaggagcgtcaccggagcccactggagaagccccacaacggcctcctcttcccccagcacggggactatcagtacggccgcaacaacatcttaacagaccacttccaatacagccggcagagctacccaaactcgtacagtttgaaccgctatgatgtgtagagtccaaaggacaggaccagactgttggtgactccttccccggcccccacagcagtatcagaaacttctgacaatcagtgaatgtacaacccagccgaggggacggtgcataactctccatcagaagccctggggttcctggccccccgtgagccgcaggaggatgcgttgcctgcagtgcagacggccgtgagctctgggcaaacctaaacagagaccagtgtctcatgctctttcttcctggagtctgtcatctgagggccgtgtccctgcggagatcttggccacgttgtacctttccatgtggaattattccccaagcagtgtagctcagagcacttgtgtctgcattccagataacattcaggacctgtgtgaaaagctggggtcactgtggctgtagaccatgaactggcagtgggggtgtccagggcggtgcttgagaacgtcagactggctagtttaattccctggcgcagatacgcataggaccaacagggtcaccaagcagacagggagcccgcgagaatcattcaaaacatccccagccacagagatggatccagtttcctggtcatccccttagcagttcacaagttcctggcaaatgttccaaagcaaaaagcgattgcaattagcatccagttcctgcagcctggtgctctgccctgcacgtcagggttggcatccacccagatccagatggaagggaaacttctctcttctcctttgcctcctcttccctcaccagagcagggcgcttctcttggggtggtgagaaggatcttcgagaaatcgtgttcagtatttcaagctctatttctgtggcacatgtcttttgagaggcatcttcacctcttctgtgatgacttggtatgttgtttggtagagagatcttgattttcggaggatcttgcatttttctagggaatattttgtagttgtgtgtgtgtgtttttgccttggtccccattatgggatgcattaggactggcctatgcatcgaaaatctttttgtttgtaaacgtttaaaaacaaagttccccggccaggcacagtggctcacacctgtaatcccagcactttgggaggccaagatgggcggatcacgaggtcaggagttcgagaccagcctggccaacatagtgaaaccccatctctactaaaaatacagaaattagccgggcatggtgtcgcgtgcctgtagtcccagctcctcaggctgctgaggcaggcgaattgcttgaacctgggaggcagaagttgtggtgagccgagattgtgcactccagcctgggtaacagagcgagactccatctcaaaaaaaaaaacaaaacaaaaccaagttcccactggtgatgcctgtctgacacgttttggtatttagtaggaaatgaagtgtttcgaagcttcgagagaagcttcaaaattgtcacaattgctgaaaacagaatgaatcgtgaacattatctcaatattttgtataatagacaagaccacagtgttttggttccctgacctgtttttgtgtttatgttaggatctgaatcatgttctgggtaaggggacgaggagcgaacactgcactaagatttggtttgccaaatcagattctttggtcaagagtcagtttggggccaggcgtggtggctcatgcctgtaatctcagcactttgggaggctgaggtgggtggatcactggagtttgagaccaccctggccaacatggtgaaaccccatctctactaaaacaaaaattagccaggcatggtggcacctgcctgtaatcccagctacttgggaggctgaggcaggagaatcacttgagcccaggaggtggaggtttcagcgagctgagatcacaccactgcactccagccttggtgacagagtgagactctgtctcaaaaaaaaaaaaaaaaaaaaggaatcagtttgggtcttggcagaaatcaacataaggaatatgacaagaccccagtaggtaaccctgagtgctcaggtccgagctgtggtctcttttacggcttcatgaaaggaccgtgccctcacggaggggaccacggcttggcttgtggggtcttaggtgatggctgccttctttcttcatcaccacacccagcttcttgctggcacttaggggaagagagcagcaaatgagagatttaccttttatctcccagcgagcgagatgtttccctgttcagagaggaagtaacatcacttatgcttgactggtgtttcttttgttgttgtttgtttttctttcaattggaattctgtatttaagatgttatgtcagctgacacatgggacactcctgaagaggtgactggccccccaccctgtttggcggtgagtttccgcaccaccggcctcagaagtgtccctcttgcttcgtctcttgttcgcttgctttgtaaatactttggtcccaagctgagacaattgctgtgtaaaacgtgaagagtcaatcccaaagggtgttatttgtcagaagaacttgccgtgtgccttcaccgaaggcagtcaagtctgcagttggatttttctcactggtgaatgacaagaaacagggataattttgcactgcggagatattacgggagttgtctatatgattatatatagtacctgattctttgaacatattattgaactccaaaatgaattcgacctccattcaggcttcctgaaatctctgaagttgctgaaatttgtatattattttccttttccaatgcaagatctgctggtgacgggaaatgactgtctggttttattatggtttataaattaataaatgggctatttaattctgtatataaatttacagcaagtacgtacactggaatgaatgaggcaatcacgttacaccaaatcagcagatcaaaagacaaacacatatttctgagacttgaaggtccacatccccccgccccctgccaagatggagtcttgctttgttgctcaggctggagtgcagtggcgcagtctcagctcactacaacctccatcccccgggttcaggtgattctcgtgcctcagcctcccgagtagctgggattacaggcatgcaccaccacggctggctaattttttgtgtttttagtagagacagggtttcaccatgttggccaggctggtctcgaactcctggcctcaaatgatccgcccaccttggcctcccaaagtgctaggatgacaggcatgagccaccgtgcccagcctgattgacaatggcctcttgaaggctgggttttcccagccggacagtgcccgccccacatgctccactcccacgctttcatctgcaggcctgccttcctctcagccacctcactgctgagctctgtggtagagaatttcctttacccatcagggtatggtctggctggtaatactgactccaacccagctccttcattttatagaaggaggcatttctgaatcatgtttgttcaccatggcgagactcactgcagaatttttaaccaccttattttaagtcattcattctaggaacagtcaagcccctaccacaaaggggccagatccgttcaagtgaggaagcacttgcagtttctgaattttgctgtatatttgtcctatgtcacccaacaggccctttgctatagctgggacattaccagaccccaataccttagggtctcacagcctgaaggacacagagcattgaattattaaaagacctgaaaatattataatgtttttcaattgtcacctgttttcaagacttaaatgctatagacttttctgcaggaatgacgtgtatattcctcactggcatttaccaaaaataaatgatggtttccagggaatcaaaa

SEQ ID NO: 183854 - DNA, 2455 bp, Homo sapiens
  Payload ID: 16224
  Gene Symbol: SLC35E1
  Gene Name: solute carrier family 35, member E1
  ENST ID: ENST00000611092
  CDS Start-End: 219-542
ctgccaggtggatacagggaggcagggtcaccgctgcccactgaagtgctgtctttaccttccggtctctgcagacctacgtctaccagtggccctggacgctcctgctcctggctgtcagcggcttctgtaactttgcccagaatgttatcgccttcagcatcctcaacctcgttagccccctgagctactcggtcgccaatgccaccaaaagaatcatggtcatcacggtgtccctgatcatgctgcgcaacccagtcaccagcaccaacgtcctgggcatgatgaccgccatcctgggggtcttcctctataacaagaccaagtacgatgcaaaccagcaagccaggaagcacctcctccccgtcaccacagcagacctgagcagcaaggagcgtcaccggagcccactggagaagccccacaacggctcctcttcccccagcacggggactatcagtacggcccaacaacatcttaacagaccacttccaatacagccggcagagctacccaaactcgtacagtttgaaccgctatgatgtgtagagtccaaaggacaggaccagactgttggtgactccttccccggcccccacagcagtatcagaaacttctgacaatcagtgaatgtacaacccagccgaggggacggtgcataactctccatcagaagccctggggttcctggccccccgtgagccgcaggaggatgcgttgcctgcagtgcagacggccgtgagctctgggcaaacctaaacagagaccagtgtctcatgctctttcttcctggagtctgtcatctgagggccgtgtccctgcggagatcttggccacgttgtacctttccatgtggaattattccccaagcagtgtagctcagagcacttgtgtctgcattccagataacattcaggacctgtgtgaaaagctggggtcactgtggctgtagaccatgaactggcagtgggggtgtccagggcggtgcttgagaacgtcagactggctagtttaattccctggcgcagatacgcataggaccaacagggtcaccaagcagacagggagcccgcgagaatcattcaaaacatccccagccacagagatggatccagtttcctggtcatccccttagcagttcacaagttcctggcaaatgttccaaagcaaaaagcgattgcaattagcatccagttcctgcagcctggtgctctgccctgcacgtcagggttggcatccacccagatccagatggaagggaaacttctctcttctcctttgcctcctcttccctcaccagagcagggcgcttctcttggggtggtgagaaggatcttcgagaaatcgtgttcagtatttcaagctctatttctgtggcacatgtcttttgagaggcatcttcacctcttctgtgatgacttggtatgttgtttggtagagagatcttgattttcggaggatcttgcatttttctagggaatattttgtagttgtgtgtgtgtgtttttgccttggtccccattatgggatgcattaggactggcctatgcatcgaaaatctttttgtttgtaaacgtttaaaaacaaagttccccggccaggcacagtggctcacacctgtaatcccagcactttgggaggccaagatgggcggatcacgaggtcaggagttcgagaccagcctggccaacatagtgaaaccccatctctactaaaaatacagaaattagccgggcatggtgtcgcgtgcctgtagtcccagctcctcaggctgctgaggcaggcgaattgcttgaacctgggaggcagaagttgtggtgagccgagattgtgcactccagcctgggtaacagagcgagactccatctcaaaaaaaaaaacaaaacaaaaccaagttcccactggtgatgcctgtctgacacgttttggtatttagtaggaaatgaagtgtttcgaagcttcgagagaagcttcaaaattgtcacaattgctgaaaacagaatgaatcgtgaacattatctcaatattttgtataatagacaagaccacagtgttttggttccctgacctgtttttgtgtttatgttaggatctgaatcatgttctgggtaaggggacgaggagcgaacactgcactaagatttggtttgccaaatcagattctttggtcaagagtcagtttggggccaggcgtggtggctcatgcctgtaatctcagcactttgggaggctgaggtgggtggatcactggagtttgagaccaccctggccaacatggtgaaaccccatctctactaaaacaaaaattagccaggcatggtggcacctgcctgtaatcccagctacttgggaggctgaggcaggagaatcacttgagcccaggaggtggaggtttcagcgagctgagatcacaccactgcactccagccttggtgacagagtgagactctgtctc

SEQ ID NO: 183855 - DNA, 1430 bp, Homo sapiens
  Payload ID: 16225
  Gene Symbol: SLC35E2
  Gene Name: solute carrier family 35, member E2
  Uniprot ID: P0CK97
  ENST ID: ENST00000246421
  CDS Start-End: 417-1217
ggggcactgaggagcggcgcccgcggggcagcgaggagcccgatgcagggttctgcgcgtcatttccggtcccgcgggcgccccgtgaagcccacctggatccgccagcgctgtgccactccccagtgccgagctccgagctgtctccgcggcctcgcgcccggcccctccaccgcgcacctcttaggccccgcccgccagcgtccctttgttgtgaaggcgccggggcctagcgctatgcctgcggcggagactgcatcaggctctcgcgtctgcttctacgctttgcctgggagaggccctggtggcctcgttcctggcgcccggagtccctgctgcggccccacccccgggcggtcacggtgacccatgctgcccagcctggaggtaaaatcgttcgtggctgtggcttcagcatgtcgtcctcggtgaaaaccccagcactggaagagctggttcctggctccgaagagaagccgaaaggcaggtcgcctctcagctggggctctctgtttggtcaccgaagtgagaagattgtttttgccaagagcgacggcggcacagatgagaacgtactgaccgtcaccatcacggagaccacggtcatcgagtcagacttgggtgtgtggagctcgcgggcgctgctctacctcacgctgtggttcttcttcagcttctgcacgctcttcctcaacaagtacatcctgtccctgctgggaggcgagcccagcatgctaggtgcggtgcagatgctgtccaccacggttatcgggtgtgtgaaaaccctcgttccttgctgtttatatcagcacaaggcccggctttcctacccacccaacttccttatgacgatgctgtttgtgggtctgatgaggtttgcaactgtggttttgggtttggtcagcctgaaaaatgtggcggtttcgtttgctgagacggtgaagagctccgcccccatcttcacggtgatcatgtctcggatgattctgggggagtacacaggacgtcccagtgatcgggaggagcgggaagagcttcagctacaaccaggacgtggtgctgctgcttctgacagacggagtcctgttccaccttcagagcgtcacggcgtacgccctcatggggaaaatctccccggtgactttcaggtcccgcaggccctgcaccgagtcgccttgtccatggcgctgccctgccccatgcttcctgcgtcctgagtaggaggtatctccgagacaggaaaagtggccgctctctctcactttttctggaactcatggtggtctcctgggcttggtcactgtctctcaccagcatgtttctttgtgcggtcaggaattatttccaaatgctcctgaagcctagtgttttagtgaacattagtgattgttagcagtggttcaaaaaaaaaaaacttttttttttttttt

SEQ ID NO: 183856 - DNA, 2078 bp, Homo sapiens
  Payload ID: 16225
  Gene Symbol: SLC35E2
  Gene Name: solute carrier family 35, member E2
  Uniprot ID: P0CK97
  ENST ID: ENST00000355439
  CDS Start-End: 762-1502
gcgggcgccccgtgaagcccacctggatccgccagcgctgtgccactccccagtgccgagctccgagctgtctccgcggcctcgcgcccggcccctccaccgcgcacctcttaggccccgcccgccagcgtccctttgttgtgaaggcgccggggcctagcgctatgcctgcggcggagactgcatcaggctctcgtcctcgggctccacccggggagctgtgcccagacagcagaagggaaggatgtcacttctgagatgaggttcagaaaggcctgggctcctgtcctggctgctctctcccactccctgatgagcttgctggatgaaagctcctgtcaggctgtggggcgtcctgtggagaagctggcaagaaactggtgggggccctttccacctatagccagcaaggaactgaacccagccagcgtccacctgagtgagctcagaggtgggcctcagccccagttgagccttcggatgaggtcacagccctggtccatggtgtgactgcagcttcaggagggaccttaagccagaggtgcctggctaagcttcccgcagattgctgccccacaggagccaacatcaaaagcatttgttgttttgaggtgcgtctgcttctacgctttgcctgggagaggccctggtggcctcgttcctggcgcccggagtccctgctgcggccccacccccgggcggtcacggtgacccatgctgcccagcctggaggtaaaatcgttcgtggctgtggcttcagcatgtcgtcctcggtgaaaaccccagcactggaagagctggttcctggctccgaagagaagccgaaaggcaggtcgcctctcagctggggctctctgtttggtcaccgaagtgagaagattgtttttgccaagagcgacggcggcacagatgagaacgtactgaccgtcaccatcacggagaccacggtcatcgagtcagacttgggtgtgtggagctcgcgggcgctgctctacctcacgctgtggttcttcttcagcttctgcacgctcttcctcaacaagtacatcctgtccctgctgggaggcgagcccagcatgctaggtgcggtgcagatgctgtccaccacggttatcgggtgtgtgaaaaccctcgttccttgctgtttatatcagcacaaggcccggctttcctacccacccaacttccttatgacgatgctgtttgtgggtctgatgaggtttgcaactgtggttttgggtttggtcagcctgaaaaatgtggcggtttcgtttgctgagacggtgaagagctccgcccccatcttcacggtgatcatgtctcggatgattctgggggagtacacaggacgtcccagtgatcgggaggagcgggaagagcttcagctacaaccaggacgtggtgctgctgcttctgacagacggagtcctgttccaccttcagagcgtcacggcgtacgccctcatggggaaaatctccccggtgactttcaggcccagtaaatgcggatgtttatcttccattgtttgtttcctgagattcagatgtctaaagcatttttctgtgacttttcaaggcaagaggaaaacctgacatatggaaagggaattaattgctcgttttatcctcttctcctgcaatgctctgaatccatgggtttggagtggggccctgggagttgggggaagcaccatacccagtgagtctgcactttgaggacccactgccagtgtcagcttcaaaatcacattgtaaaaggcccggcgcggtggctcacgcctgtaatcccagcactttaggaggacgaagcaggcggatcacttgaggtcaggagttcgagaccagcctggccaatatggcgaaacctcgtctctaccaaaaatataaaaattagccgggcgtggtggcgcgggcctgtggttccagctactcgggaggctgaggcaggaaaattccttgaacccgggaggaggctgcagtgagccaagaccacgccactgcactccaacctgggcggcagagcaaggctccgactcaaaagtaaatacatgaataaataaaataaaatcacatcgtaa

SEQ ID NO: 183857 - DNA, 2156 bp, Homo sapiens
  Payload ID: 16226
  Gene Symbol: SLC35E2B
  Gene Name: solute carrier family 35, member E2B
  ENST ID: ENST00000614300
  CDS Start-End: 842-1582
tggctctggggcactgaggagcggcgcccgcggggcagcgaggagcccgatgcagggttctgcgcgtcatttccggtcccgcgggcgccccgtgaagcccacctggatccgccagcgctgtgccactccccagtgccgagctccgagctgtctccgcggcctcgcgcccggcccctccaccgcgcgcctctcaggccccgcccgccagcgtccctttgttgtgaaggcgccggggcctagcgctatgcctgcggcggagactgcatcaggctctcgtcctcgggctccacccggggagctgtgcccagacagcagaagggaaggatgtcacttctgagatgaggttcagaaaggtctgggctcctgtcctggctgctctctcccactccctgatgagcttgctggatgaaagctcctgtcaggctgtggggcgtcctgtggagaagctggcaagaaactggtgggggccctttccacctatagccagcaaggaactgaacccagccagcgtccacctgagtgagctcagaggtgggcctcagccccagttgagccttcggatgaggtcacagccctggtccatggtgtgactgcagcttcaggagggaccttaagccagaggtgcctggctaagcttcccgcagattgctgccccacaggagccaacatcaaaagcatttgttgttttgaggtgcgtctgcttctgcgctttgcctgggagaggccctggtggcctcgttcctggcgcccggagtccctgctgcggccccacccccgggcggtcacggtgacccatgctgcccagcctggaggtaaaatcgttcgtggctgtggcttcagcatgtcgtcctcggtgaaaaccccagcactggaagagctggttcctggctccgaagagaagccgaaaggcaggtcgcctctcagctggggctctctgtttggtcaccgaagtgagaagattgtttttgccaagagcgacggcggcacagatgagaacgtactgaccgtcaccatcacggagaccacggtcatcgagtcagacttgggtgtgtggagctcgcgggcgctgctctacctcacgctgtggttcttcttcagcttctgcacgctcttcctcaacaagtacatcctgtccctgctgggaggcgagcccagcatgctaggtgcggtgcagatgctgtccaccacggttatcgggtgtgtgaaaaccctcgttccttgctgtttgtatcagcacaaggcccggctttcctacccacccaacttccttatgacgatgctgtttgtgggtctgatgaggtttgcaactgtggttttgggtttggtcagcctgaaaaatgtggcggtttcgtttgctgagacggtgaagagctccgcccccatcttcacggtgatcatgtctcggatgattctgggggagtacacaggacgtcccagtgatcgggaggagtgggaagagcttcagctacaaccaggacgtggtgctgctgcttctgacagacggagtcctgttccaccttcagagcgtcacggcgtacgccctcatggggaaaatctccccggtgactttcaggcccagtaaatgcggatgtttatcttccattgtttgtttcctgagattcagatgtctaaagcatttttctgtgacttttcaagtcaagaggaaaacctgacatatggaaagggaattaattgctcgttttatcctcttctcctgcaatgctctgaatccatgggtttggagtggggccctgggagttgggggaagcaccatacccagtgagtctgcactttgaggacccactgccagtgtcagcttcaaaatcacattgtaaaaggccgggcgcggtggctcacgcctgtaatcccagcactttaggaggacgaagcgggcggatcacttgaggtcaggagttcgagaccagcctggccaatatggcgaaacctcgtctctaccaaaaatataaaaattagccgggcgtggtggcgcgggcctgtggttccagctactcgggaggctgaggcaggaaaattccttgaacccgggaggaggctgcagtgagccaagaccacgccactgcactccaacctgggcggcagagcaaggctccgactcaaaagtaaatacatgaataaataaaataaaatcacatcgt

SEQ ID NO: 183858 - DNA, 6283 bp, Homo sapiens
  Payload ID: 16226
  Gene Symbol: SLC35E2B
  Gene Name: solute carrier family 35, member E2B
  Uniprot ID: P0CK96
  ENST ID: ENST00000617444
  CDS Start-End: 762-1979
gcgggcgccccgtgaagcccacctggatccgccagcgctgtgccactccccagtgccgagctccgagctgtctccgcggcctcgcgcccggcccctccaccgcgcgcctctcaggccccgcccgccagcgtccctttgttgtgaaggcgccggggcctagcgctatgcctgcggcggagactgcatcaggctctcgtcctcgggctccacccggggagctgtgcccagacagcagaagggaaggatgtcacttctgagatgaggttcagaaaggtctgggctcctgtcctggctgctctctcccactccctgatgagcttgctggatgaaagctcctgtcaggctgtggggcgtcctgtggagaagctggcaagaaactggtgggggccctttccacctatagccagcaaggaactgaacccagccagcgtccacctgagtgagctcagaggtgggcctcagccccagttgagccttcggatgaggtcacagccctggtccatggtgtgactgcagcttcaggagggaccttaagccagaggtgcctggctaagcttcccgcagattgctgccccacaggagccaacatcaaaagcatttgttgttttgaggtgcgtctgcttctgcgctttgcctgggagaggccctggtggcctcgttcctggcgcccggagtccctgctgcggccccacccccgggcggtcacggtgacccatgctgcccagcctggaggtaaaatcgttcgtggctgtggcttcagcatgtcgtcctcggtgaaaaccccagcactggaagagctggttcctggctccgaagagaagccgaaaggcaggtcgcctctcagctggggctctctgtttggtcaccgaagtgagaagattgtttttgccaagagcgacggcggcacagatgagaacgtactgaccgtcaccatcacggagaccacggtcatcgagtcagacttgggtgtgtggagctcgcgggcgctgctctacctcacgctgtggttcttcttcagcttctgcacgctcttcctcaacaagtacatcctgtccctgctgggaggcgagcccagcatgctaggtgcggtgcagatgctgtccaccacggttatcgggtgtgtgaaaaccctcgttccttgctgtttgtatcagcacaaggcccggctttcctacccacccaacttccttatgacgatgctgtttgtgggtctgatgaggtttgcaactgtggttttgggtttggtcagcctgaaaaatgtggcggtttcgtttgctgagacggtgaagagctccgcccccatcttcacggtgatcatgtctcggatgattctgggggagtacacagggctgctggtcaacctctccctcatcccagtcatgggcgggctggcgctgtgcacggccactgagatcagcttcaatgtcctggggttctcggccgcactgtccaccaacatcatggactgtttgcaaaatgttttttcaaaaaagctgctcagcggggacaaatacaggttctcggccccggagctgcagttctacaccagcgccgctgcggtggccatgctcgtcccggcccgggttttctttacggacgtcccagtgatcgggaggagtgggaagagcttcagctacaaccaggacgtggtgctgctgcttctgacagacggagtcctgttccaccttcagagcgtcacggcgtacgccctcatggggaaaatctccccggtgactttcagcgtcgccagcaccgtgaaacatgccttgtccatctggctcagcgtaatcgttttcggcaacaagatcaccagcttgtcggccgttggcacagccctggtgaccgttggggtcctgctctacaacaaagccaggcaacaccagcaggaggcgctgcagagcctggctgcagccactggccgggccccagacgacacagtggagccgctgcttccacaggaccccaggcagcatccctgagagcaggaagctgccagctgctgctgtcctcgtgacactgcatcccccagaaatgggcagggacgccctcctccatggccctgctggggtgcaggacatggggagctaagttggccattgcctgcggctttctcggtttgtcggtgaagaccagcagaaactcaaactggggattccaggtatcagcttcctggagtagagaccagaccagtagctgactgtgtccgccgagcccatccccgtgtaatgtgaaaacagcctctgaggctcccatgctgggggtgcccacttcctctctgggcgacaccccagggtccaccgggagccagaggtgggtccagtgccaacgagagccgctccctgccacagccaagagagccctcggcttcccacaccagccatcgaaggccctgaggccctggaccggcggcagactggccctgggcatgaggccacagagcagggccgaagggaggggacagagggccctggaaggaagggtctcctgctgccacggtgggcactcagaacttctccccacctgacccagggctgtgggcatcctcagactatcccagaggcatcgcaagcctcaagctgcagcattgcacggcactcaagggctatgaccacggaggccgttcagtcgcttctgtttagaggaaggccccctacctcttccacaccctgccctcctatcccttccacaccctgggctgcgtgagctccccgcaaccccagggcaccctgccctcctacctgtgggggtttccagccctgaggttgaggacaaacctctcgtgtttaacttgggaggagatgtgtacgttccttttcttttttggactctgagtatgaggcaggctgttctgaggtccccgtggggtgagcctgtctgtcctccctcagagcccactgttcctatcatcatctagcacctgtccggttccccacgtgagccttgggcaggacgctgcagtgttgatggtttgggttacgtggcgtttacctgggcgccgtccttactgaaaaaggaaacgtccacactgaatgtttctggggcgcgtggtgtgtgtcaggcgcccaccctgtcccactctccccaagggacagtagtacggcacactggggccaccagccagctcaactcatcctcctgtgtcacgcacccccgagggcgcaggaggcctgaggagtggctactggagccgtgtgttaggcagaggcttctgaccatgtctgagctctttacccccaatctcgcagctggcggattcccatgcccggtgcagcctgttgccagccagcctttgagacccagagctccagggcttgtcagaggcagcatggggctccagtggtcccgagtctcatttccctgcctgctctttaggcctttggcacccatggtcacttcactggctttccatttggcttctcacctgggaaatacaaaaatagcccctcctgaagataaaatcattcagaaacagagcaataattctgactcattaacttctacctactcaaaaaagtctgccatgatgatggaccgaagtgaggctttttaacccacaagtaacctttttatttttttgagacagtcttgctctgtctgtcacccaggctggagtacagtggcatgatcttggctcactgcagcctcgacttcctgggctcaaatgatcctcccacctcagcctcccatgtggctggaaccacaggcacgtgccaccatgcctggctatttttttgttgagctgggctctcgctttgttgcccaggctggtcttgaactcctcggctcaagcaatccttcccactcagcctcctgtagtgtcgagaatataggcgtgggctactacacctgcttcagccgcttctataaaaccgctgacctgtgtgtggaggacaggccaggtgtgtgctcactgcgctgcgaagatgttttgtcacgtgactttccccggatttccatttctttttttctgctttcctcaaaaactaatagaagactgggtgcggtggctcacgcctctaatcgcagcactttgggaggcagcagctggcggatcacaaggccaggagttcgagaccagcctggccaacatgatgaaaccctgtctctaccaaaaatacaaaaattagctgggtgcgatggtgggtgcctgtaatcccagatactcaggaggctgaggcaggagaattgtttgaaccccggagatggaggttgcagtgagccaagatcgtgccattgcactccagcctgggcaacagggcaagattccgtctcaaaaacaaacactattagaaaatgccctggaggtggcggggagttgttgatttgtgaggacagattgaaagcaactcccagggtggccttgtccacctccccgtcgagaatgtggctgccggcctctttgaagattgtggtctggcataaggagaggtgcaggcgcctggttctgagcaccttggaatttccagccgcacagcatctggtgccctcccctccaccctcacaaggagctgccatcctgtttggattttctgtttgtggaccagaaacaaacgtttttccaaaggattagcaaatagggtaatttcctgtgtaacgctgctctggggcctcttcctcatcctggcagaaggagcctggagcccatgaggcagccagcactgtgcccttgctcagtcgtgctgtcccctccctctccctcagtctcctctccatgcccaagtcagtttccagccgctggtcttcatggcattcccagcacagccgggcaccaagaggcaaaacccaaggcctggcttggccgtgttaacgattgtacagacattttttaaaataactttgtgtaatacttttctggaatagtaagttcttgttgaactgtcacaggtgagcttctaggaacacaccaggtgtggttacttccactgggtgtgtccatggtcgtggtctgtgcttttgtaaacgaacagaacacttgaaccacctcccgaattgggtcatcggcttctttacgttgatacttaagagatttgcagctctctttcaaggaaacttcccctactgaaaggcataaaaaggttaaaaaagaaaatccgagagtcccaattccctgtataacagcattaaaataatctgcctgcctggaaagatgagaacactgttgcacaacccaaaatgtgtctttaatttgtgaaaaattaccatggtgagtcagacagtcattttaaacagctgaacagagactatcatcagcaaatagagctcagctttgtagctgcctttaaaatccttgtcccaaatccggtgagctctgcttgctgccgccgcgctcctgggtgatcactcagacgggtcagtgggaataacaggccaacaagacagctttttacatgtgtccaaaggatggcctttcgaaggcctggaagtatttcactgttggaagaagtaaacaagaatgacattccagatggaaatagaattctctctcttgcctttgaccaacatggtactaaggggtttcttctttcccaatgtatgtacgtgccctgctgggggccttactttatagaatgagagcatccgagcttccctaatgaatctggctagttctgtgtctggctgaggatacaggagtgggacatccactctcggatccctcagagcacagaaaccttcagctttgctgtctctgaagtatttcctccagtttccctgcgggcccctatgtttgagtttgatggctgctggatcctcactcaacgaaaactcggttggaaactgttccgcctggcagtccttttttgttgttttccatctcatttcccttccatctgaaagtggcattcagctgacttgctcatttagactgttcacggagtctgaatctgccaacgtggtgttggaggctccaccttgaaaagggccacagtcagggcaactttccccatacaggaaaacttgaaaattacatcaacagtctacgtcacagccaaattatatttcctttataccaaacaaaactatggagaactaaaagtacatcacacaaaacgtttatagtgttttgcatgtgacctatttcagtatttatataactagattagtgctttctagcaaacggttctgttaattagcgagtcactgttgattctgctgtggtggtaagttgataccgtgtaactaatcccgtggatgcctcctcgttatttttgtccaaacgaagcagccgtggtagtagctgtctatgattcttgctcagcaaagtaaaataaatgttaaatatgga

SEQ ID NO: 183859 - DNA, 5948 bp, Homo sapiens
  Payload ID: 16226
  Gene Symbol: SLC35E2B
  Gene Name: solute carrier family 35, member E2B
  Uniprot ID: P0CK96
  ENST ID: ENST00000611123
  CDS Start-End: 428-1645
tccgtggctctggggcactgaggagcggcgcccgcggggcagcgaggagcccgatgcagggttctgcgcgtcatttccggtcccgcgggcgccccgtgaagcccacctggatccgccagcgctgtgccactccccagtgccgagctccgagctgtctccgcggcctcgcgcccggcccctccaccgcgcgcctctcaggccccgcccgccagcgtccctttgttgtgaaggcgccggggcctagcgctatgcctgcggcggagactgcatcaggctctcgcgtctgcttctgcgctttgcctgggagaggccctggtggcctcgttcctggcgcccggagtccctgctgcggccccacccccgggcggtcacggtgacccatgctgcccagcctggaggtaaaatcgttcgtggctgtggcttcagcatgtcgtcctcggtgaaaaccccagcactggaagagctggttcctggctccgaagagaagccgaaaggcaggtcgcctctcagctggggctctctgtttggtcaccgaagtgagaagattgtttttgccaagagcgacggcggcacagatgagaacgtactgaccgtcaccatcacggagaccacggtcatcgagtcagacttgggtgtgtggagctcgcgggcgctgctctacctcacgctgtggttcttcttcagcttctgcacgctcttcctcaacaagtacatcctgtccctgctgggaggcgagcccagcatgctaggtgcggtgcagatgctgtccaccacggttatcgggtgtgtgaaaaccctcgttccttgctgtttgtatcagcacaaggcccggctttcctacccacccaacttccttatgacgatgctgtttgtgggtctgatgaggtttgcaactgtggttttgggtttggtcagcctgaaaaatgtggcggtttcgtttgctgagacggtgaagagctccgcccccatcttcacggtgatcatgtctcggatgattctgggggagtacacagggctgctggtcaacctctccctcatcccagtcatgggcgggctggcgctgtgcacggccactgagatcagcttcaatgtcctggggttctcggccgcactgtccaccaacatcatggactgtttgcaaaatgttttttcaaaaaagctgctcagcggggacaaatacaggttctcggccccggagctgcagttctacaccagcgccgctgcggtggccatgctcgtcccggcccgggttttctttacggacgtcccagtgatcgggaggagtgggaagagcttcagctacaaccaggacgtggtgctgctgcttctgacagacggagtcctgttccaccttcagagcgtcacggcgtacgccctcatggggaaaatctccccggtgactttcagcgtcgccagcaccgtgaaacatgccttgtccatctggctcagcgtaatcgttttcggcaacaagatcaccagcttgtcggccgttggcacagccctggtgaccgttggggtcctgctctacaacaaagccaggcaacaccagcaggaggcgctgcagagcctggctgcagccactggccgggccccagacgacacagtggagccgctgcttccacaggaccccaggcagcatccctgagagcaggaagctgccagctgctgctgtcctcgtgacactgcatcccccagaaatgggcagggacgccctcctccatggccctgctggggtgcaggacatggggagctaagttggccattgcctgcggctttctcggtttgtcggtgaagaccagcagaaactcaaactggggattccaggtatcagcttcctggagtagagaccagaccagtagctgactgtgtccgccgagcccatccccgtgtaatgtgaaaacagcctctgaggctcccatgctgggggtgcccacttcctctctgggcgacaccccagggtccaccgggagccagaggtgggtccagtgccaacgagagccgctccctgccacagccaagagagccctcggcttcccacaccagccatcgaaggccctgaggccctggaccggcggcagactggccctgggcatgaggccacagagcagggccgaagggaggggacagagggccctggaaggaagggtctcctgctgccacggtgggcactcagaacttctccccacctgacccagggctgtgggcatcctcagactatcccagaggcatcgcaagcctcaagctgcagcattgcacggcactcaagggctatgaccacggaggccgttcagtcgcttctgtttagaggaaggccccctacctcttccacaccctgccctcctatcccttccacaccctgggctgcgtgagctccccgcaaccccagggcaccctgccctcctacctgtgggggtttccagccctgaggttgaggacaaacctctcgtgtttaacttgggaggagatgtgtacgttccttttcttttttggactctgagtatgaggcaggctgttctgaggtccccgtggggtgagcctgtctgtcctccctcagagcccactgttcctatcatcatctagcacctgtccggttccccacgtgagccttgggcaggacgctgcagtgttgatggtttgggttacgtggcgtttacctgggcgccgtccttactgaaaaaggaaacgtccacactgaatgtttctggggcgcgtggtgtgtgtcaggcgcccaccctgtcccactctccccaagggacagtagtacggcacactggggccaccagccagctcaactcatcctcctgtgtcacgcacccccgagggcgcaggaggcctgaggagtggctactggagccgtgtgttaggcagaggcttctgaccatgtctgagctctttacccccaatctcgcagctggcggattcccatgcccggtgcagcctgttgccagccagcctttgagacccagagctccagggcttgtcagaggcagcatggggctccagtggtcccgagtctcatttccctgcctgctctttaggcctttggcacccatggtcacttcactggctttccatttggcttctcacctgggaaatacaaaaatagcccctcctgaagataaaatcattcagaaacagagcaataattctgactcattaacttctacctactcaaaaaagtctgccatgatgatggaccgaagtgaggctttttaacccacaagtaacctttttatttttttgagacagtcttgctctgtctgtcacccaggctggagtacagtggcatgatcttggctcactgcagcctcgacttcctgggctcaaatgatcctcccacctcagcctcccatgtggctggaaccacaggcacgtgccaccatgcctggctatttttttgttgagctgggctctcgctttgttgcccaggctggtcttgaactcctcggctcaagcaatccttcccactcagcctcctgtagtgtcgagaatataggcgtgggctactacacctgcttcagccgcttctataaaaccgctgacctgtgtgtggaggacaggccaggtgtgtgctcactgcgctgcgaagatgttttgtcacgtgactttccccggatttccatttctttttttctgctttcctcaaaaactaatagaagactgggtgcggtggctcacgcctctaatcgcagcactttgggaggcagcagctggcggatcacaaggccaggagttcgagaccagcctggccaacatgatgaaaccctgtctctaccaaaaatacaaaaattagctgggtgcgatggtgggtgcctgtaatcccagatactcaggaggctgaggcaggagaattgtttgaaccccggagatggaggttgcagtgagccaagatcgtgccattgcactccagcctgggcaacagggcaagattccgtctcaaaaacaaacactattagaaaatgccctggaggtggcggggagttgttgatttgtgaggacagattgaaagcaactcccagggtggccttgtccacctccccgtcgagaatgtggctgccggcctctttgaagattgtggtctggcataaggagaggtgcaggcgcctggttctgagcaccttggaatttccagccgcacagcatctggtgccctcccctccaccctcacaaggagctgccatcctgtttggattttctgtttgtggaccagaaacaaacgtttttccaaaggattagcaaatagggtaatttcctgtgtaacgctgctctggggcctcttcctcatcctggcagaaggagcctggagcccatgaggcagccagcactgtgcccttgctcagtcgtgctgtcccctccctctccctcagtctcctctccatgcccaagtcagtttccagccgctggtcttcatggcattcccagcacagccgggcaccaagaggcaaaacccaaggcctggcttggccgtgttaacgattgtacagacattttttaaaataactttgtgtaatacttttctggaatagtaagttcttgttgaactgtcacaggtgagcttctaggaacacaccaggtgtggttacttccactgggtgtgtccatggtcgtggtctgtgcttttgtaaacgaacagaacacttgaaccacctcccgaattgggtcatcggcttctttacgttgatacttaagagatttgcagctctctttcaaggaaacttcccctactgaaaggcataaaaaggttaaaaaagaaaatccgagagtcccaattccctgtataacagcattaaaataatctgcctgcctggaaagatgagaacactgttgcacaacccaaaatgtgtctttaatttgtgaaaaattaccatggtgagtcagacagtcattttaaacagctgaacagagactatcatcagcaaatagagctcagctttgtagctgcctttaaaatccttgtcccaaatccggtgagctctgcttgctgccgccgcgctcctgggtgatcactcagacgggtcagtgggaataacaggccaacaagacagctttttacatgtgtccaaaggatggcctttcgaaggcctggaagtatttcactgttggaagaagtaaacaagaatgacattccagatggaaatagaattctctctcttgcctttgaccaacatggtactaaggggtttcttctttcccaatgtatgtacgtgccctgctgggggccttactttatagaatgagagcatccgagcttccctaatgaatctggctagttctgtgtctggctgaggatacaggagtgggacatccactctcggatccctcagagcacagaaaccttcagctttgctgtctctgaagtatttcctccagtttccctgcgggcccctatgtttgagtttgatggctgctggatcctcactcaacgaaaactcggttggaaactgttccgcctggcagtccttttttgttgttttccatctcatttcccttccatctgaaagtggcattcagctgacttgctcatttagactgttcacggagtctgaatctgccaacgtggtgttggaggctccaccttgaaaagggccacagtcagggcaactttccccatacaggaaaacttgaaaattacatcaacagtctacgtcacagccaaattatatttcctttataccaaacaaaactatggagaactaaaagtacatcacacaaaacgtttatagtgttttgcatgtgacctatttcagtatttatataactagattagtgctttctagcaaacggttctgttaattagcgagtcactgttgattctgctgtggtggtaagttgataccgtgtaactaatcccgtggatgcctcctcgttatttttgtccaaacgaagcagccgtggtagtagctgtctatgattcttgctcagcaaagtaaaataaatgttaaatatgg

SEQ ID NO: 183860 - DNA, 17791 bp, Homo sapiens
  Payload ID: 16227
  Gene Symbol: SLC35E3
  Gene Name: solute carrier family 35, member E3
  Uniprot ID: Q7Z769
  ENST ID: ENST00000398004
  CDS Start-End: 273-1214
gcggaagcactggagccccgagtcacgtggctgcgggcggagatgagcggggcgtgggacgtgctgcggcgtcctagctggcttacagggcggcggcggggtgtgtgtcctctgttaagagtgctactcgcccggggttgatctgtgcatgccactcctgggtcagacggtgaggtcggcgtctgcgaggacgcggcggtggagtagaagggcagccggagacaggcccggcgccccttccgaggctagacggccccagcttcgcggggatcatggcattgctggtggaccgagtgcggggccactggcgaatcgccgccgggctcctgttcaacctgctggtgtccatctgcattgtgttcctcaacaaatggatttatgtgtaccacggcttccccaacatgagcctgaccctggtgcacttcgtggtcacctggctgggcttgtatatctgccagaagctggacatctttgcccccaaaagtctgccgccctccaggctcctcctcctggccctcagcttctgtggctttgtggtcttcactaacctttctctgcagaacaacaccataggcacctatcagctggccaaggccatgaccacgccggtgatcatagccatccagaccttctgctaccagaaaaccttctccaccagaatccagctcacgctgattcctataactttaggtgtaatcctaaattcttattacgatgtgaagtttaatttccttggaatggtgtttgctgctcttggtgttttagttacatccctttatcaagtgtgggtaggagccaaacagcatgaattacaagtgaactcaatgcagctgctgtactaccaggctccgatgtcatctgccatgttgctggttgctgtgcccttctttgagccagtgtttggagaaggaggaatatttggtccctggtcagtttctgctttgcttatggtgctgctatctggagtaatagctttcatggtgaacttatcaatttattggatcattgggaacacttcacctgtcacctataacatgttcggacacttcaagttctgcattactttattcggaggatatgttttatttaaggatccactgtccattaatcaggcccttggcattttatgtacattatttggcattctcgcctatacccactttaagctcagtgaacaggaaggaagtaggagtaaactggcacaacgtccttaattgggtttttgtggagaaaagaatgttgtcccaagaagataaaaaatattgttaagtgtgcaagttattaaaaaaaaaaaattgggccaggcacggtggctcacgcctgtaatcccagcactttgggaggccaaggccagcggatcacttgaggtcaggagttcgagaccagcctgaccaacatggagaaaccctgtctcaactaataatacaaaattagccaggcgtggtggcgcatgcctgtaatcccagctactcgggaggctgaggcaggagaatcacttgaacccgggaggcggcggttgcagtgagccgagatcgtaccattgcactccagcctgggcaacaagagcgaaactccatttcaaaaaaaaaaaattggtgacagactcaatgatggaatgatttgtcggaattaacacaaagcagattttattcatataatgacttttttttaagagtctcttttttaaaaaaacttaattctctaaaaccgaaatggttcatgcttctttttaaaaatgattgtataaaatgtatggaatggttagcctggtgtggtggtgcacacctgtaatcccagctacttgggagactgagacatgagaatcgcttgagcctgggaggcggaggttgcaatgagccaagatcgtaccactgcactccagcctgggcgacagagcaagacactgtctctctctctctctccatatatatatgtgtgtgtgtgtatatatatatatatgtgtgtgtgtgtgtgtgtatacatatatacacatatatacacacacacatacatatacatgtgtatatatataccatcccatatatatgtgggatatatatatatatatatatggatatggttatatatatgggatggtttggttggtcccagcaaagtatatgaaaattaaagttctgtgataatgacaaaggaattgctgttactgtactgcaaatatgctgtgggttctcggtgttcaaactcttctaaggaaggacacacagtagctctctgcttgctgatagatggtttcccagtgtgagatttgttattttgatcagagtattcaaatcagaatttaaatctagtgtttctattttagtttagcttcctgatttatataaatgaaatctcatttataaagtataataaagatgactgtaagacaaaatccaattctaaaagtatgatttttttctagtagaaaattgatgtaagaaatcatacattattcatacatttataggtcatctctttgagttttcagtgaactatagaaactatatggagttaaaaaacaaaacggcagccaatctcagtggctcacacctgtaatcccagcactttggaaggttgaggcaggcagatcacctgaggttgggagttcaagaccagtctgaccaacatggaggaatcccgtctctactaaaaatacaaaattagccaggcatggtggcacatgcctgtaatcccagctgctcgggaggctgaggcaggagaatcgcttgaacccaggaggcagaggttgtggtgagccgagatcatgccattgctctccagcctgggcaacaagagtgaaactccatctcaaaaaaaaaaaaaaaaaatagccctatgtttaaatggctcaaagaaaagactataaatggaattgaacatgtttgttagctgtttgagcattttatattggtaaattttttattttcttattttttgtcttacagtcgaccaggctggaatgcagtggcacaatcatggctcactgcagcctcagcctcctgggctcaagcaatcctcctgcctcaacctccccagtagctgggactacaggtgcacaccaacatacctggctgatttttatattttttgtagagacagagttttgccatgttgctcaggctgatctcaaactcttgagctcaagccatctgtctgcctcagcctctcgaagtgctgggattacaggcctgagccaccacacctggccagtaatttcttaatcctacctccctgcttctattgcctagcccgtacatttgaggcttccatggagctttctgtggtactgaaacacttggagtgaactgcaaacttggagtgaactacatccaacctttctaaggtggctggggaaaattcttgtacagcaagttgggacaaaatagccatatagaaacagccatataagatcccaatatagaaaaattgggatattagaggaaatacatgatttccatttatggagtgctacatgtttgcaaaatgtatttctgcttttcatcttcttgacatctgaatattaaaagcagttgttgataatttcatataataaattgagacatatcattactcttgtaataattcattttctaaatgttatttatcaactttcatggagaaaacaactcttaggagaacaaagaccagcccgggcaacatggcaaaaccctgtctgcaaaaaatacaaaaattagccgggcctagtggcacgtgcctgtagctccatctactcaggaggctgaggtgggaggattgcttgagcccagaagatgcaggttgcagtgagccgagatcatgccactgcacttcagcctgggcgacagactggactctgtctcgggaaaaaaaaaaaaaaaaaaagggaagagcgacaaaatataccttttgataagacagtaaattttatgttttgtgttttttaacacaataaaaatatatatacacacatataatatacctttggggtttttaggatttttttttcctggactctgaaatgagaagcctcgctgaaaatctgttttggagaattccagtttgtcagtcagtctcttgtgtaattagtacgtgtggcttccttctttgttttaaatattctttggttcttctcattttacaaagatatatattttttgtgctaaggacagagcaattagtttttaccagataagcctcgggtattatgtttgtctaagaaacattctctgtgtatgtttaaattgtaattatttcccaaaagctgaggaaaatgtttcagcacagtgaggatttgacgtctgcactgagaacagctgagtttatttgtgccatttagaaattcgtaactgtaggctgggcgcagtggcttacgcctataatcccagcactttgagaggccaaggcgggtggatcacctgaggtcaggagtttgagaccagcctggccaacatggcgaaacactgtctctactaaaaatacaaaaattagctgggcatggtggcgggcgcctgtaattccagctactcgggaggctgagacaggagaatcacttgaaccagggagtcggaggttgcagtgagccgagactgcgccattgcacaccagcctgggtgacgagagtgaaactctgtctcaaaaaaagaaaaaaaaaaagaaatttttaaccgtaaatagaacttggggagggtgttatataatatatgtgtcagtaggaaggcagtaagaagattggagtaagacaggatggggttacatgtatataaatgaataaaataagtactgctaaaacttgagtctgataaacttttttgccccgaagataatcatcccactgaaaagaaaactctggggaaaatatgccagatactaggaccaagcacggagacaaaccagatacagtgctttcaaagaaaacatgcttgctgtcctttgttaccagtgtaattgtaattattgtttattctgtgttaagtgactgaatttcaatttttaccttttaaaaataaagagaacctctttttacttctgtattgcatatgagagctgatggaagaaggatggcatctgtgtaacatatgcatggtaacgctgacgtgttcagctgttcatatttggcctgtccaaataagcagaaatgaatgaaacaaaattccatctccttttagaaataacataaaggagaaatctatctctgtgaaatgaagtaagcattcttctgtttcactttttaaaatacttttaaaatcttgctgttttcaacctattaatgactttttgaaattgtatttcaaagcagaaacattaggttgggtatggtggctcacgcctgtaatcccagcactttgggaagctgaggtgggcagatcacctgaggtcaggagttcaagaccagcctggccaatatggtgaaaccttgtctctactaaaaatacaaaaattagccaggtgtggtgttgcatgcctgtagtcccagctacttgggaggctgaggcaggagaatggcttgaacccgggaggcggaggttgcagtgagccgagatcacgccactgcactccagcctgggcaacagagcaagactccatctcaataataataataataataacaaagcagcaacattaatcaagcactctgtattcactccgtcagtaaatactgtcgggtgaatgactgcagaatggccaaaggtgagagtttgattaaaagaaaggagaccttggccgggcacggtggctcacgcctgtaatcccaacactttgggaggctgaggtgggtggatcacctgaggtcaggagttcgagaccagcctggccaacatggtgaaaccccatctctactaaaaatacaaaaaaattagctgggcgtggtggtggatgcctgtaatcccagctacttgggaggctgaggctggagaatcccttgaacttgggaggcggaggtttcagtgagccaagatcatgccattgcactgcagcctgggcaacaagagcaaaactgtctcaaataaataaataataaaagaaaggagaccggatttattagatgtggtccgttttgtctttctgttcccaaacttaaactggattatacctgctaatatcaggaatataatgataattgcattcattcaacaaaaatttattgagcatatactgtgtgccaggtactgtcctaggcattatggatataaaacagtttttatgtagagacagtcctatatttcctgtgatcttaaggaacatttgtctagtattagagataggactaattaaacaaaaacaagacaagaataattaaacagcaaactcaatgaatgctaaagggaacatcgttctgtgagcacataacaaaagaatctggcccaggcttggcacttgtggagggagtccatgaggaaagtttgagctgcagtcatagatacatagaagttagctagctaggcagagggagggtattgcattctggaaagagggaatagcacatacaaatgcctagtggttggaggaattgtgatgcttttaaagaactgtaaaaaggatggagtctggagactaaatttgggagtggggagacatggtgtgtcctgcacctggaaatgtagatagacctcaggccatacaatacctggaggctatggtaagcatctttagtaagagcaagggggagtgttgtgagcactgtcacagtaaatttctttttttgaaattagtggaggagaaccagagagatgccaggagaccagttagttgggagatgactgtagttagagatggtggtagcttcaaaggtagtggaatgagataagtggaaataattgagtagctggagtcaactggactggagatggattggaaatggagggcatgagaaggggtgaagttaaggatcacacttcagctgggcacagtggctcatgcctgtaatcccagcactttgggaggctgaggtgggtggattgcttgagtccaggagttcgagaccagcctgggcaaacatgatgaaaccccatctctacaaagaatacaaaattagctgggcatggtggtgtgggcctgtggtcccagctactcaggaggctgaggcgggaggatctcctgagcccaggagtttgaggcttcagtgcgccatgatcacgccactgcactctagcctgggtgacagagtgagtccctgtctcaacaacaacaaaaaatcacacatgtctgatttgcgcagcttgatagagaatggtgccattctctgaactaggaaacacaagaagaggactgaggagagggatgaggcagaggaatattatgggccttcttgatactgagatatccaattaaagatgttggccaggcatggtggctcaggcttgtaatcccagcactttgggaagctgaggcagtcagatcacttcagatcaggagtttgagaccagcctgaccaacatggtgaaaccccgtctctactaaaagtacaaaaattagctgtgtgcggtggtgcatgcctataatcccagctacttaggaggctgaggcaggagaatcgcttgaatctgggaggcagaagctgcagtgatctgagattgcaccactgcactccagcctgggtgacagagagagactctatctcagaaaaaaaaaaaaaagatgttaatcaaataattagtttatagaggcccagaactcaggaaaatgtttagttgaggtggagataaaacaggagtttctggggtatgcctgataaggaggaaaacagaccaagatgagcttgctgaagaagatagcataaagcaagaacagactataactgaagttgaggaactctggtatacaatgatagaacataatgctgcaaaagaaacagagaaggaacaaagaggtgggaggaaaatgggccgggcactgtggcttatgcctgtaatcccaacatttttgagaggccaagctgggtggatctcttgagctcaggagttcaagaccagcctgggcatcatggcaaaaccctgtctctacaaaaaatacaataattaatagtttcgaaagaaagaaacctgccaagcaaaagtccggtctcagcccgggagctagtagcatgcagtggaacaggtctcacctggacggcagcactgggacttccagtccagactctgccattcactggtatagcctttggcaaagcctttgggcagcttgctcaaatcttacttctcagtttcttcacctataaaatgagggctttgatccaaataatttccaggggactgtccagctccaaaatcccctgattctgctttttcagattaaaattataatttctcatttgcttataataaaagtagattgaataaattaatcagaagggtttggtttgtttgaccttttttttaattttaatttttattttttattttttgagacagagtttcctctgtctcccaggcttggttgttgtggctcaatctcagttcactgcaacctccgcctcccgggttcaagcgattctcccgcctctgcctcccgagtagctgagattacaggcacccaccatcatgcccagctaattttttgtatttttgtagagacagggtatcaccatgttggccaggctggtcttgaactcctgacctcaggtactccgcccacctcagcctcccaaagtgctgggattacaggtgtgagccaccacgcctggcctgtttgacctttataagatcaatttttttgttcacaagcatttctttactcatagataccatttttataacttatatgagacgcatttaatgtaatcatattactttcttatattagaagataggatttcttctgatgtatcgaagttactttatacttcatatgaagtcattaggaggtgaattattgccaattcaatgaattatttatgagtattaggggaatgtttttgttatgctgcttttaatttggaaagcagcatatcactcaaactatagtaattcacatttttccatttaactaaaaatgtctcgtaactactatgccacaagaacaagcatggatacttatttaaccagccaagactatgcatttctaaatatttatttttttcggttatccgtagacttttccttttgaaatccaacgatctgtatcaaccacgtcttcattttccttttcctgtttgtcttactctccccccaaaaagagtcagtttcctgttttctcaatttctcagtttaaaattagagccctatggcaggtgccatgtacagctgcaaaggtggcaagaagccctgagaaagctcaagaagcaggtcaagggggtgggtaaggaagatgggacgttcaagcagaaacaaaaagaggagctaaaagtgaaagccaccccgccaccagccctcaccagtcacaggtggaattaaagaaatctggcaaaaaataaattttgttatccgtgcttggggcggtgacccttgaccccattcctatttaaacatctggattctctgccataacatcttttgccacctatagctacaataaagtgtcgtcttggagtctgttgtacatttaagaataaacttttgtaaggaagtaaaaaagagtctacagttcagtgcaggatagggatgggtgggccttaattcaggaggtgggaggctcaaaatcaattactctgttgaggagatggaatctcctggaatctcaaaaaggatttcctttaggaatcatcagactcatccgactcgtcaagtctttctctgcttggagttttgttttgtttttattttgttttgttttggagataggttctccctctgtcacccaggctggagtgcagtggtgcaatcacagctcactgcagcctcgaattcctaggctcaagtgatcctcccacctcagcctcctgagtagctgggactacaggtgtgcaccaacaggcccagataattttattttttgtagagacggggtcttgctatgttgccaggctggtctccaactcctggcctcaagtgatcctcttgctctgcctcccgaagtgctaaaattacagctgtgaaacaccgcgcctggagtttaaaagcaagattaacctttttggactggagttcttagagaattatggtgtgactcattgaccatatttgttaggatcagcatttttatatgatttaacacaaaatgttacagaaaaaagtgcaaaaatgttgtaaggcacagttggtttcctaagcaaatgcccattcctattctttgttcatctccactctagaggctagaaatactaaattctctttttacctcgttgccttgtagagggatgatcatatgacatttcaccaatggcacataattcaaagtctgctgaggatttctagggtatcctgattaaaagggacagatgtggctggtagtgtctattaccacctccttcctgccttaaatgtagctgcggatgtctagaattgtgctaatcagcttatgactataaaagagaggtgaagagagccagatctgaaagtggtgagccgaccaggcacagtggcacacctgtaaccccagcactttgggaggccgagggaggaggatcatttgagcccaggagtttgagaccagcctgggcaacattgcaaaacctgttctctgtgaataacttaaaaattagtcaggtggccaggcgtagtggttcacacctgcaatctcagcactttggaaggctgaggtgggtggatcacctgaggtcaggagttcgagaccagcctgaccaacatggagaaaccctgtctctactaaaaatacaaaattagctgggcgtagtggcttatgcctgtaaccccagctactcggcaggctgagacaggagaatcgcttgaaccagggaggcagaggttgcagtgagctgagaccacgccattgcactccagcctgggcaacaagagtgaaactccatctcaaaaaaaaaaaaattaggtatattggtgtgcacctgtggtctcagctactcaggaagctgaagcaggaggattgcctgatcctgggaggttgaggctgcagtgagccatgatcatgccactgcactatatgctgggcaacagagggagaccctgtctcaaaaacaaacaaaacaaacaaaaataagcaaaaaaaaaaaagtgttgagcagctaaaacaatgccgttagatgccctatctcttaaaaaaaaaaaaaaaaagataaaataaaagaaattgggtcttgtggccaggtgcggtggctcacgcataatcccaacactttgggaggctgaggtgggtggatcacttgagcccagtagtttgagaccagcctggccaacacgtcttcttgttctagatgaaaagtaaacccctatttggcttactcacttaaaaaaataataataattagagacagggtgttgctatgttgccctggctggtctcactcctgggttcaagtgatcctcctgcctcagcctcccaaagtgctgatattacaggcgtgagcaaccatgccagcctggcttagccacttttaattattactcgtagctgcaagaatgccaatgagcatttggggtaaaaaggggcaagaatggaggacctgctctgtctgtcggactttggaactcaggaagcaacaactaagcgtactcgttgtcttagtccattttgtgttgcatagaacagaatacctgaaactgggtcatttataaagaaaaggaatttatttcttacaatagtggagactgagaagtccaaggtacagggtccacatctggtgagagacttcttgttcctgggaactctctgcagagacccaaggtggcagagggcctcacgtggtgagggacttgagcatggtagctcaggtctctcttcctcttcttataaaggcaccagtctcactgggcagagccttcatgacccagtcaccttttaaaggcgccatctctcaatattgccacattggggatgtttccagatgagttttggaggagacaaatattcaaactacagcactggttaaaaataaaaatagggcctggcgtggtggctcacgcctgtcatcccagcagtttgggaggctgaggcagatggatcacctgaggtcaggagttcgagaccagcctggccaacatggtgaaaccccgtctctactaaaaatataaaaattagccaggcatgctggcgtgtgcctgtaatcccagctgctcaggaggctgaggcaggagaatggcttgaacccgagaggcagaggttgcagtaagctggaatcacactattacactccagcctgggtgacaagagcgaaactctgtctcaaaaaaaaaaaaaaaaaaaaaaaaaaaaaaaggccagacttggtagctaacacctgtaatcccagcactttgggaggccaaggcaggaggatcacttgaggtcaggagttggagaccagcctggccaacatggtgaaaccccgtttctaccaaaaatacaaaaattagccgggcatggtgacgtgtgcctggcagaggtttcagtgagccgagatcatgccattacactccagcctgggtgacaagagcaaaactctgtctcacaaaaaaaaaaaaaaggccaggcatgatgactcacgcctgtaatcccagcgatttgggaggccgaggcaggtggatcacttgaggtcaggagttggagaccagcctggccaacatggtgaaacccaatctctactaaaaatacaaaaattagctggacgtggtggcaggcgcctgtaatcccagctactcactcaggaggctgaggcaggaaactcacatgaaccctggagacgtaggttgcagtgagctgagatcacatcactgcactccagcctgggagacagagtgagactccgtctcaaaaaaaaaaaaagaaaagaaaaattagtcagctgtgatggtgtgcacctgtagtcccagctactctgaaagctaaggcacgagaatcgcttgaacctgggaggcggaggttgcagtgagctgagatcatgccactgcactccagcctggatgacagaatgaaactgtgtctcaaaaagaaaaaaaaaaacaaaaactagtagctagccccacccccgccatttttccagactccagagagtggggtgtgtggaagacagggactggtctggtggcatgtagattcataaatggcgtccaaacctggagctgttgctggcttggaatgaatgaaccagttccagccaggaacagactttcccaccaagtgggaggtggtctacctgcccttcaccatcatctttgtgctctctgacactggtcatcctcagttacccaatatacccctcgccccagccccatccctagtcacccctcattcctagtagtacccccagttctgcttcaatttgattcagcagatcaagaaagcactatcaccaatggtcgcaaggtcatgcttaagtcttggaactggccatcagtgtgaaagttcaacaggtattcagtaagcagatctaggaaaaactcactctaataacgttccaggaatttcctaagaccatagtgggagacagctgcatcagaggcctcccagtgccataggaccatggacattggtgagcaactgtgtgctgggaggaaatggctgcttattggcatggagttattgaatgcagaacttttcagccaagcacagtgctattcttctgaaatcataacatcatgaggacatccactgcttgtactcaaatagcattcctcacaggaatgtcacacctgtgactctctcatacctccaaaatctcactgctgttctgaaacgcaagagattttgccaaggaaatgctgacattccttctgtccactcctctccccacactgcactgtgtggccccagagaggaaagacaagggctgttaccatggagttcttgaatttcattatttatctcccaacacaactttggcctcaccctcttccccagcgtgaagacgcacaacccaagtgggacagtctgaatttccccaccctcaggtgtcagagaatcagaggaagtcatgctgcttatctagaatctgctagaaatggagttcacccaaagaatgaccatcacagaatttatgaactactcctagatcatgcaattaataagtcctctagcccagtaccactcaaggtagggtctgggccccagtaccagtccataaacagtttgctgccggctgggtgtggtggctcatgcctataatcccagcactttgggaggccaaggtgggcggatcacttgagatcaggagtttaagaccagcctggccaacatggtgaatccccgtctctataaaaagtacaaaaattagccaggtatggtggtatgtgcctgtgatcccagctactcgggaggctgaggtgggaggatcacccaagcccagggaggtcgaggctgcaatgagccaccgtgatggtgaactgcactccagcttgagtgacagagtgagatcctgtctcaaaaaaaagggcggggtgcggggattttgggtagtaatatcaatagcagacaaaatagaatttgaggcaaaaagtgttaataggatcaagatttttttttttaaagaacaatccaccacaaacatagcaatcatgaacaacccagaaaacagcatgaaaattaaaaggaaaattgagattttaaatacttctaatagaggtgatagagcaggcagcagggaagttagtaaccttgtctaataggttatctgtactcaacaagcctagaacacacactcctttcaagtacctgaggaatgtttataacagtaaagatgaacagagatcatattataaatagttggaagatttattttttattttgttttttagaaacagggtcttgccggccaggcgtggtgactcatgcctgtaatctcagcactttgcaaggccgaagcgggtggatcacctgaggtcaggagtttgagaccagcctagccaacatggcgaaacctcgtctctactaaaaatacaaaaattagctgggcgtagtagtgggtgcctataatcccagctacttgggaggctgaggcaggagaattgcttgaaccgggagggtagaggttgcagtgaaccatggtcgcaccacttcactccagcctggacaaaagagcaaaactccatctccaaaaaaaaaaaagaaaagaaactgagtcttatggctggatgcagtggctcacgcctgtaatcccagcactttgggaggccaaggtaggtgaatcacttgagcccaggagtttgagaccaacctggccaacatggcgaaactccatctctactaaaaatacaaaagttagttgggcgtggtggtgtgcccctgtaatcccagctactcaggaggctgaggcaggagaattgcttgaacccaggaggtggaggttgcaatgagccactgcactccagactgcattccagcctgggcgacagaacaagactctgtctcaaaaacaaaaacaaaaacaaaaaactaggtctttctctgtggccgacgctggagtgcagtgcctttttgcaggcacaatcatagtgcactgcagccctgaactccttggctcaagtaatcctcctgcctcagcctcctgagtaactgggactataggtatgccctaccatgtgtggctatatttggtaggttttaaatgaaaagatttttgttttctgtacatttatttaaatttaaaaagtatttaagccatctttaagaaacttaatgttgagaatgttctagaatagtgagtcattagatttcaaaatattggtattgaaccagatggtcttgtggcttcaaagaagtctctgaagtcactccaggtgatattaaaagtacagtgctaggactgtctgacccaaaatatgtggctggaaccagaaaggatataagcatggtttgagaaggaaaaaaagcttaacaagggggaattgaggaagccatttgcaaaacttcacaggaaagttaaatgaatgaatgaataaaatgtgattaataaatatgggggccaggtacagtggcctgcatctgtaatcccagtgttttgggaggccaaggcaggaggtgcacttgaggccaggagttcaagacctgagcaacacagcaagacccccgtctctataaaaaattttataaaattagccgggcatggtggtagacacctgtagtcccagctacttgggaagatgaggcagaggattgcctgagcccaggagtttgaggttatagtgagccatgactgtgccactgcactccagcctgggcaacaaagtgagaccctgactctaaaagtaaaattaaattaaattaaaaataagtggataaatatgggttatgctgtgaagcatagagggagggatgaagagggacattttaagccacttctctggccccagtttctaacattatttctaaaatgcaggatatctggttatcccaaaccagttatatttttatttaaatttgctcaaaatttttatttttaaatcttaacaatttctaaaatcacactttttaatttattttgtatttttttgagacagggtcttactttgtcacccaggctggagtgcaggggcacaaacatggctcactgcagcctcgacctcccagcctcaagtgatactcccgcctcagcctcccaagtagctgggactacaggcatgcaccaccacacctggctaatttttttatattttgtttgtagagatggggtttcaccatgttgccctgtctagtcttgaaaccttgagctcaagagatctgcccaccttggcctctcaaagtgctgggattacaggcgtgagccgtcctgcctggcctagtcacacttttttttttttttttttttttggagacagagtttcactcttgttgcccaggctggagtgcaatggcatgatctggactcaccgcaacctccgcctcctgggttcaagcgattctcctgcctcagccacccaagtagctgggattataggcatgcaccactatgcccggctaattttgtatttttagtagagacagggcttctccatgatggtcaggctggtctcgaactcctgacctcaggtgatctgcccgcctcggcctcccagtgttgggattataggcatgagccaccgcgcccagctagtcacgctttttagtcaagatttttaaaaatgtctgcatgcttttctgagagccttacctctcttgtgatttgaagcattttctccaccaggcctaaggctgaaggaatgtagtttgctgcccttcagtctatgacaaggaggtctgtttcctccaacgcctgccttttagacagagtgttgattcacagggaacagaggcagacctggggctgacactgaatgaatgctactcacagcagtaaggggaaaagtgggaaagtcttgtttatgctgtggctgatgtggatgtctttggggaagaaaaattcaggatgagtttattgagagcattatttttgaaagtataagatttgtgattgtaatataaacttaaatcactttgggaatgaatttaaaaaatctatgtgacacaaattaatcatcattctcattgtaaatttggcaaagtatttgtaattaggaatatctgtcatactggcactgggcaaattattctgaatgttcccatgctgaagattctctcaaaaagggaaaaaacaagatcctttgtttgtataagtacaatcagtttgctgaataaaacctttatagctacaattataacaggattgtttctacattttagcttggagatcccatgactactctgttttgctaataataaaccaatacagtgctac

SEQ ID NO: 183861 - DNA, 726 bp, Homo sapiens
  Payload ID: 16227
  Gene Symbol: SLC35E3
  Gene Name: solute carrier family 35, member E3
  ENST ID: ENST00000431174
  CDS Start-End: 1-378
caggctccgatgtcatctgccatgttgctggttgctgtgcccttctttgagccagtgtttggagaaggaggaatatttggtccctggtcagtttctgctttgtcgaccaggctggaatgcagtggcacaatcatggctcactgcagcctcagcctcctgggctcaagcaatcctcctgcctcaacctccccagtagctgggactacaggtgcacaccaacatacctggctgatttttatattttttgtagagacagagttttgccatgttgctcaggctgatctcaaactcttgagctcaagccatctgtctgcctcagcctctcgaagtgctgggattacaggcctgagccaccacacctggccagtaatttcttaatcctacctccctgcttctattgcctagcccgtacatttgaggcttccatggagctttctgtggtactgaaacacttggagtgaactgcaaacttggagtgaactacatccaacctttctaaggtggctggggaaaattcttgtacagcaagttgggacaaaatagccatatagaaacagccatataagatcccaatatagaaaaattgggatattagaggaaatacatgatttccatttatggagtgctacatgtttgcaaaatgtatttctgcttttcatcttcttgacatctgaatattaaaagcagttgttgataatttcatataataaattgagacatatcatt

SEQ ID NO: 183862 - DNA, 2714 bp, Homo sapiens
  Payload ID: 16228
  Gene Symbol: SLC35E4
  Gene Name: solute carrier family 35, member E4
  Uniprot ID: Q6ICL7
  ENST ID: ENST00000343605
  CDS Start-End: 800-1852
gggcttggctggggtgctcagcccaattttccgtgtagggagcgggcggcggcgggggaggcagaggcggaggcggagtcaagagcgcaccgccgcgcccgccgtgccgggcctgagctggagccgggcgtgagtcgcagcaggagccgcagccggagtcacagccgcagccagagccgcagccaaagcctcagagagcaggagttggagcgcaggccctgctggatccgcgcctagctcgccgccaggcaccggccggaggacgggccgtggtgtcagctcactgcccgggcgctgtgggaggcagcgagcccgcgaccccccgggccgggcaccgccaggcgcggagcccagatcgcccccctgccaggcctggtcacggccagagcacgcaggagttcccagggtctggatctgcgcgcaccctaatgacctggggactgaagagaaaaaaggaacgaggatttcatctaaaagcataacgtgggcactaggcgaggaggaaagtggagaccacctggcacggggcagaggtgcctggagcccacgcttgagcatcggagaccctggcatcctagcagccgcgaccttggctctgccctgtctgagctggaaacacagcttagcttctagacatcgctggcacaggcctggcacaagtaagcagtgtcctcacctgtctgaaacgggacacggggtcggaggaaccaggatctagcctggccccaagcggaactctctggtggcccagaggtcgtcactggggagcccgcctcctgccctagcctcactggtgcggatgtgccgctgcccgccggagcaccatgatggcaggatgacctcagccgaagtaggagcagcagctggtggtgctcaggcggctgggccccccgagtggccccctggcagccctcaggccctccggcagcctggccgggcccgagtggccatggcagcactggtgtggctgctggcgggagccagcatgtcaagcctcaacaagtggatcttcacagtgcacggctttgggcggcccctgctgctgtcggccctgcacatgctggtggcagccctggcatgccaccggggggcacggcgccccatgccaggcggcactcgctgccgagtcctactgctcagtctcacctttggcacgtccatggcctgcggcaacgtgggcctaagggctgtgcccctggacctggcacaactggttactaccaccacacctctgttcaccctggccctgtcggcgctgctgctgggccgccgccaccacccacttcagttggccgccatgggtccgctctgcctgggggccgcctgcagcctggctggagagttccggacaccccctaccggctgtggcttcctgctcgcagccacctgcctccgcggactcaagtcggttcagcaaagtgccctgctgcaggaggagaggctggacgcggtgaccctgctttacgccacctcgctgcccagcttctgcctgctggcgggtgcagccctggtgctggaggctggcgttgccccaccgcccactgctggcgactctcgcctctgggcctgcatcctgctcagctgcctcctgtctgttctctataacctggccagcttctccctgctggccctcacctctgccctcaccgtccacgtcctgggcaacctcaccgtggtgggcaacctcatcctgtcccggctgttgtttggcagccgcctcagtgccctcagctacgtgggcatcgcactcactctttcaggaatgttcctttaccacaactgcgagttcgtggcctcctgggctgcccgtcgggggctgtggcggagggaccagcccagcaagggtctttgagacctgggggatctcaggagccacctgggatggccctggcctgaatccagcctccgctgtggccatagaaggaatggagaacagggctgggcatggtggctcacgcctataatcccagcacttccagagtccgaggtgggtggatcacctgaggccaggagttcgagaccagcctggctaacatggcaaaacctcatctctactaaaaatagaaaaattagctgggcatggtggcgcgtgcctatagtcccagctacatgggaggctaaggtgggaggatcacttgagccctggagatcgaggctgcagtaagccaagatcgcatgctactgcactccagcctgggagacagagcgagacgctgtctcaattaaaaaaaaaaaaaagtggagaactggcagtgacctctactgggggccatggcagggaggggagccttctggaagggctgccttggagattggaatggggactcccagggagacctgcgttccatccctgcctgcctcacccctgccacagactctgcacaccactggatggtgggtccaagcctggcacagtccctgtgcttgtcagagtcattattatgattaatatcaattacgatgccaaaaattgctgggcaaactttgaagacctcaacttgttacaatgacgatgatgatgattcttggcggttacacaatccttcctcctgggggggaggcagctaggaggcccagcaggggggcttctatgctgctgggctcccctagggagttggggtagtctgtgccaactccaggcagctgctgtggcctcacccctgggccccccaattttgggtcatccatcctcaaatacactatttttgcttgta

SEQ ID NO: 183863 - DNA, 2081 bp, Homo sapiens
  Payload ID: 16228
  Gene Symbol: SLC35E4
  Gene Name: solute carrier family 35, member E4
  Uniprot ID: Q6ICL7
  ENST ID: ENST00000406566
  CDS Start-End: 129-833
ctcacctgtctgaaacgggacacggggtcggaggaaccaggatctagcctggccccaagcggaactctctggtggcccagaggtcgtcactggggagcccgcctcctgccctagcctcactggtgcggatgtgccgctgcccgccggagcaccatgatggcaggatgacctcagccgaagtaggagcagcagctggtggtgctcaggcggctgggccccccgagtggccccctggcagccctcaggccctccggcagcctggccgggcccgagtggccatggcagcactggtgtggctgctggcgggagccagcatgtcaagcctcaacaagtggatcttcacagtgcacggctttgggcggcccctgctgctgtcggccctgcacatgctggtggcagccctggcatgccaccggggggcacggcgccccatgccaggcggcactcgctgccgagtcctactgctcagtctcacctttggcacgtccatggcctgcggcaacgtgggcctaagggctgtgcccctggacctggcacaactggttactaccaccacacctctgttcaccctggccctgtcggcgctgctgctgggccgccgccaccacccacttcagttggccgccatgggtccgctctgcctgggggccgcctgcagcctggctggagagttccggacaccccctaccggctgtggcttcctgctcgcagccacctgcctccgcggactcaagtcggttcagcaaagcctcagcttccagatctgcaaaatggaactgatgatccctatggagagggttcgaatgaggagcgctgggcagggccaggagtgaggaaggagggtaactttttggaagagtactttgtaacaataaagtgctgtgcacagaaaggagaaatgccattatggggatgtgtgtgccgacctgggaccagcagggtgaaagagtctatcattcatgatgagagctgccatttgcgctaagcacacaccatgtgccaggcactatgccaagaaattgttgaatcttcacaataactctgtgagaaaagggctgtcattggacagatgaggacactgatgctcccaggggtccacatcacatgaagaggaggtgacagggctgggccttggtccgaagctccagccttccaagccaaggcctgtgagaggaaccgctgagacctgatgttaggcctgtttttctcatgtgccctggagaaggggactaacaccatcttttgccaaagtttggtgagggatggccaagagctctttgaaactttgccatgtacaatagcactcacaattttttttaaattttttatacagtggtatcggggtacagtggctcatcaacactttgggaggctgaggcgtgaggattgcttgaggccaggagtttgagaccagtctgggcgacatagtaaaatctcatctctataaaaaaagaaaaaaaatgaggcgggcatggtggcaaacatctgtagtcccagccacgcaggaggctaaggtaagaggatcacttgagcctgagaggttgtggctacagtgagccatgatcacactactgcactctaggatgggtgacagagcaggacagtttcaaaaaaagacaaaaaaaaatttacacagtggaatgctttctttaaaaactatcttatgcataagtacaatctagaaaaccagaactgggccacttatagtgaaggtggaagcagaggtggcctgggaccccccaggattcctggagcactgcctgaaggccatttatctagtagattggcactcactgtaagaagcgcaagaggtaccatgatgcttaaggctctggctctgggtgtgaaagaatgaggtggaattgtagcagattcattcctgggtcaatctgtttttggggagggctgcaggattccaggcctgccatgtgcaatgggtgctgccctctttcttctgggcaccatctgcctcaacctatcccctggccagtgtcactcacagggcagaaaatttatcttcaccatctcacaattagtttaatcttaaaaaaaatggattataaagttaaaagctacagcaa

SEQ ID NO: 183864 - DNA, 2030 bp, Homo sapiens
  Payload ID: 16228
  Gene Symbol: SLC35E4
  Gene Name: solute carrier family 35, member E4
  ENST ID: ENST00000451479
  CDS Start-End: 1-612
gctcaggcggctgggccccccgagtggccccctggcagccctcaggccctccggcagcctggccgggcccgagtggccatggcagcactggtgtggctgctggcgggagccagcatgtcaagcctcaacaagtggatcttcacagtgcacggctttgggcggcccctgctgctgtcggccctgcacatgctggtggcagccctggcatgccaccggggggcacggcgccccatgccaggcggcactcgctgccgagtcctactgctcagtctcacctttggcacgtccatggcctgcggcaacgtgggcctaagggctgtgcccctggacctggcacaactggttactaccaccacacctctgttcaccctggccctgtcggcgctgctgctgggccgccgccaccacccacttcagttggccgccatgggtccgctctgcctgggggccgcctgcagcctggctggagagttccggacaccccctaccggctgtggcttcctgctcgcagccacctgcctccgcggactcaagtcggttcagcaaaatcctgatctggtccattcagcagaggactgcagaagtctgaggagccttaagatatcaacttaaagcaatgggctcgtcgcagaaaggaatagcctgtgccgggtcttcagagaaatcctggcctcggctccacgcccctgagcagccccaccctggctcaacctgttacccgccctgccggcaagccggggtcactgcagtccccgtggcgaagcagggtcagctcagctcaccgcaccccactccatccagccctgcccatctctacggcaacgggccgggtcgcaccagggctgcagccgagagacagtctcaccgcttccgtagccgcccgggctctgtgcgcatgtgcgacactccctccccggccccgcccccttatgcgtctcccaggcaacgcgccgcgcggggctccaggttccgcccagggactaactccaggtctgcgcgcgtccaacgagcacggctctcaaccggcctcctggcgcccaacgaccatggcttccaaccggcctccgtgcgcccaacgaccatgactcccaaccggcctccagtttccaactgtttctcgaacagggaagccgccatgacacagctgactacgcccttggtcacaggggacctgagatcctccacgatttacgggaccggcgccacctcgggctcgaaccaccctctcgatagggccgccgctaagtaatcggcgtaggggttcagccgcacatctccttcccgcgccgcggaccgagcagtcgttggtgctcttcaggtgcggcctgggtgcccagagccttcgttagactctcggacccgcaagggagcccgaactctttcagactcgctctccctcagccggacctcggccctttttcacaccccaggggagtctggatttctcatagtcctgggcaccagccccttcccagtctagctcttgggactccctgaagccggaactccctcgcctggactcccgggagaacctggaatccccatctccagtccacattttctcagaatctgtcctagcccttcagtctcccaggcatgacatcgtgtggtcccagcgccctaggtggtgagctgtgactctccttagagcctggcgaggccgaggtcctccccagctcgaacccatcccacactccccttctcagcctctgtgttccccagtggtcctggaaaagcccccagttccctctgcctggccccaatcctcacaaacccaattacccacgctcctttccattccataacccccatcactgcatcctccaggctcccatccatggaggacttgaggtggaaagcaatttggttcaaaataaccattatttattacttgaaagggaatatttccagtcgttgccagcctcctccccttctagtattggtaaattttttgcaccactgagtgggtgaagagttttatgcgtctttaaatgttttaaggatttttttaaaaaaacaaaaaactctca

SEQ ID NO: 183865 - DNA, 4852 bp, Homo sapiens
  Payload ID: 16229
  Gene Symbol: SLC35F1
  Gene Name: solute carrier family 35, member F1
  Uniprot ID: Q5T1Q4
  ENST ID: ENST00000360388
  CDS Start-End: 202-1428
gggactggagaggagtgagtggcgggctgggcggcggcggccgtagccgcgggtgcctccccgcctcaccgcttcgcaggcagcaccgcctcccgggccgcggccgcccggccgggtcctctgcgcgttcccgggcccggaaccggcacacgatgcacccggctgcgttctgatcgccgccgcgcctcagcctctgccgcgatgatcccccctgagcagccgcagcagcagctgcagccgccgtcgccagccccgccgaaccatgtggtgaccaccatcgagaacctgccggccgagggcagcggcggcggcgggagcctgtccgcctcctcccgggctggcgtgcgccagaggatccgcaaagtgctgaacagggagatgttaatctctgtggccctaggccaggtgttatccctccttatttgtggaattggcttgactagcaagtatctgtcagaagatttccacgccaacacaccagtcttccagagtttcctcaattacattcttctcttcttggtctataccaccacactagccgtcagacaaggagaagaaaacctcctggcaattttacgacgaagatggtggaagtacatgattttgggactcatagacctggaagcaaattatctggtggtcaaggcttaccaatacacaactctgaccagtatccagctcctggactgttttgtgatcccagtcgtgattttgctctcctggttcttcctgctgatccggtacaaggctgtgcatttcatcggcatcgttgtctgcatcctgggaatgggctgcatggtgggagcagatgtgcttgtgggaagacatcagggagcaggggaaaataagctggtaggggaccttctggtcttaggaggagccacactctatggtatttctaacgtctgggaagaatacatcatccgaactctgagccgagtggaattcctgggaatgattggtctctttggagcatttttcagtggaattcaattagctataatggagcataaggaactgttgaaggtgccctgggactggcaaataggactgctctacgttggctttagtgcctgcatgtttggtctctacagctttatgccagtcgtcataaagaaaaccagtgccacttcagtcaacctctccttgctcacagcagacttgtacagcctgttctgtggattgtttctcttccactacaagttttcaggactttatctcctgtctttcttcaccatcctcattgggctggtgctctactcctccacctccacctacatagcccaggacccccgagtgtataagcagttccgcaatccttcaggacctgttgtggacttaccgaccacagctcaggtggaaccctcagtcacctacaccagcctgggccaggagaccgaagaggagcctcatgttcgtgtggcctagggtgaggcccgccctgccaactgaggccaactcattggccatgtttttgcccatcatctctgtattgtacatagagaaaggtatttactaggtgcagtttacacaggtggactgcaaggtagcaaatcctccaaaagcttgtgaaaggaacaagctcaacatcactggagacacaggctctaatccacctgacttggaaggatgcctagctaacgtgtatcctgatcacaactcccctgcattcattactgtgaaaatttttgaatcaaaagcaagtattattgttattatgatttgtattattattattgctgttactgttattacaccaactttcaggaggatgttttgtactcctgatggaaactattgccagacccacatgtagtcaacataaaccccacttttctatggcaattcactttttaagagtcatactttatttttttgcacagactatatgagtgatgcatgccacaggagctccacccctgagaagtttccttttcctagggacctggtggttaatggtttcctctgttacctgttggattgcctgctcaataagtattttgtgctgtgacctttgtggggaggggcaactgaccatatacttctctattctaggaatagatataaaagaaacattttagcctttttatatttcgatctctgattactccaggccattgcctttctgttgtgccacgtgattctgctaatcaagtccctgtaataacaggataaggactgttccattactgtggcttttgggagcccccagaaataatatcatttgtgtttaggacaatatataattataaaatctttctgctcctccctgtagcctctcttcaaaaactatcttttattttttttccagatttccttagtgataatatggaaattaatcaaggcactggaaaaagccatggtcctctgcccttttaattctgtgacacctttttaaaaatacaccagcatggaaattacctttattgtggaaaatcattggttgtgccacctcctaacaaagtcaaggtgctgatgtggagcagtctttgaaaatggcttaattgatttggccactttgcagtggtaacaatgtcatcattgaaaaagtctggcattttggtcatatttggcatccattcaataacagatatattgacacgacattcttttttttttttttttttttttttgagacggagtctcactctgtcgcccaggctggagtgcggtggcacgatctcagctcactgcaacctccgcctccgggattcacaccattctcctgcctcagcctcccgagtagctgggactacaggcacctgccacgacgcccagctaattttttgtatttttagtagagatggggtttcaccgtgttagccaggatggtctcgatctcctgacctcgtgatccgcccaccttggcctcccgaagtgctgggattacaggcgtgagccactgcgcccggccgacacgacattcttatggacccagagaatactgcaggatcctgataagaccttgagtgatatgtcactagtctaatctgttgcccttaaaatagcccttttttcaaacacaggaaattaagaaacaccacagacctctattatttagaatagattctatgtgtcagtatgtgatgtactcttttagtttgactgacttcaataccattcaaaaagatcctcaatggagttacagggtttataggggaaaaatacatgtttatgagacattgggcaattcaaatcaacatgtgttacataagcaagcaaagcaaaacaccagtggggtctctggaaagtaaaaggacagactacagtagaaggactgatcccagagtgcctgtacaaggcctaaatctggcaggcaaaagcatcccacactgtctgtcagcacccacatggcctttttgcctgccttctataacgggtaagtggacctacccttggagatagagaagaaaaattatcttctctgatattcggatgtaatggtcatctcagttcagccccctaggaaacatgttttattttccatggggaaaatatcagcgttaaagctctatcaaatcaaaacaactttgccaacatcttctctctgctaccttttaaaccaattaaatacctttctctgaatattttgtccattcagatccgaagacctttaaagactgtggttttatttttgtgtttacattcctttggtttgaataatttgcttgatttattgcatttttagtatttattttaagccagatgttttcatctttgattcatttttatgacattaatttgtagacacttagtaaagtcttatgagaagcaagtggatgaaattatctccaagtccactcagtagactggagttttttaaaaatataaatttccaaaaagtttgcaatcaacagatggctaaaggttgccatctgaattattttataggatattttaattgactccattgtatggaaaccaagtgtgaatgttaagatgaatttgccgtataccctttatcattcggtgtccttgtactcagactttcatgtccctgggtgacctcaatgtgttggtttgtctccatttagaaaggttgataatatattgaattgttcaagatcaggagttccagactgaccctccaggaaaaaaaaaatcgcaaagaacaaattctttttctgtgtaaaaaacactgatcctttgggaatggggcgggaaatgggagtaggacaacattaactttagctgttttagtttctgagatttcataacctcagtagacaccagcaaaattttcagtttctaactccaccaccaatctctcctcaatgaataagactttagcaatttatatagaatttgatcaggtaagagcgaaccacaattctcctgaaccctgctagagattaagtggtggttctcacttcctcaatgaaaacttgcactggggacagcgcttgccttggtcagaccttcccacatctacatactctcaaatacatgaccaggtgatcaagcaatggaaaaatttgcaccaccgtgtcccatgaaattgtttcaatgtttagtttagatattgctaacttgtgctattaaccttttgacaagcgtgtagtattgtttgttttgggtttctttttgatttataactatttagtagtccccagctagctaccagtacagattttaccccatgggtaggattctattgttaagccacataacaaagcacactaattctgacaacactgcaaatggaaaatacgaaccaaaaaaaagttacaccgataagttcaacaaactgtccatttttgatatttgcatgctcccctatggactggctgtggcaatgtaatgcctgtataatgttttcaaataaaaataaatgctttatgaaagcaccgaa

SEQ ID NO: 183866 - DNA, 4481 bp, Homo sapiens
  Payload ID: 16229
  Gene Symbol: SLC35F1
  Gene Name: solute carrier family 35, member F1
  Uniprot ID: Q5T1Q4
  ENST ID: ENST00000621341
  CDS Start-End: 8-1057
cagggagatgttaatctctgtggccctaggccaggtgttatccctccttatttgtggaattggcttgactagcaagtatctgtcagaagatttccacgccaacacaccagtcttccagagtttcctcaattacattcttctcttcttggtctataccaccacactagccgtcagacaaggagaagaaaacctcctggcaattttacgacgaagatggtggaagtacatgattttgggactcatagacctggaagcaaattatctggtggtcaaggcttaccaatacacaactctgaccagtatccagctcctggactgttttgtgatcccagtcgtgattttgctctcctggttcttcctgctgatccggtacaaggctgtgcatttcatcggcatcgttgtctgcatcctgggaatgggctgcatggtgggagcagatgtgcttgtgggaagacatcagggagcaggggaaaataagctggtaggggaccttctggtcttaggaggagccacactctatggtatttctaacgtctgggaagaatacatcatccgaactctgagccgagtggaattcctgggaatgattggtctctttggagcatttttcagtggaattcaattagctataatggagcataaggaactgttgaaggtgccctgggactggcaaataggactgctctacgttggctttagtgcctgcatgtttggtctctacagctttatgccagtcgtcataaagaaaaccagtgccacttcagtcaacctctccttgctcacagcagacttgtacagcctgttctgtggattgtttctcttccactacaagttttcaggactttatctcctgtctttcttcaccatcctcattgggctggtgctctactcctccacctccacctacatagcccaggacccccgagtgtataagcagttccgcaatccttcaggacctgttgtggacttaccgaccacagctcaggtggaaccctcagtcacctacaccagcctgggccaggagaccgaagaggagcctcatgttcgtgtggcctagggtgaggcccgccctgccaactgaggccaactcattggccatgtttttgcccatcatctctgtattgtacatagagaaaggtatttactaggtgcagtttacacaggtggactgcaaggtagcaaatcctccaaaagcttgtgaaaggaacaagctcaacatcactggagacacaggctctaatccacctgacttggaaggatgcctagctaacgtgtatcctgatcacaactcccctgcattcattactgtgaaaatttttgaatcaaaagcaagtattattgttattatgatttgtattattattattgctgttactgttattacaccaactttcaggaggatgttttgtactcctgatggaaactattgccagacccacatgtagtcaacataaaccccacttttctatggcaattcactttttaagagtcatactttatttttttgcacagactatatgagtgatgcatgccacaggagctccacccctgagaagtttccttttcctagggacctggtggttaatggtttcctctgttacctgttggattgcctgctcaataagtattttgtgctgtgacctttgtggggaggggcaactgaccatatacttctctattctaggaatagatataaaagaaacattttagcctttttatatttcgatctctgattactccaggccattgcctttctgttgtgccacgtgattctgctaatcaagtccctgtaataacaggataaggactgttccattactgtggcttttgggagcccccagaaataatatcatttgtgtttaggacaatatataattataaaatctttctgctcctccctgtagcctctcttcaaaaactatcttttattttttttccagatttccttagtgataatatggaaattaatcaaggcactggaaaaagccatggtcctctgcccttttaattctgtgacacctttttaaaaatacaccagcatggaaattacctttattgtggaaaatcattggttgtgccacctcctaacaaagtcaaggtgctgatgtggagcagtctttgaaaatggcttaattgatttggccactttgcagtggtaacaatgtcatcattgaaaaagtctggcattttggtcatatttggcatccattcaataacagatatattgacacgacattcttttttttttttttttttttttttgagacggagtctcactctgtcgcccaggctggagtgcggtggcacgatctcagctcactgcaacctccgcctccgggattcacaccattctcctgcctcagcctcccgagtagctgggactacaggcacctgccacgacgcccagctaattttttgtatttttagtagagatggggtttcaccgtgttagccaggatggtctcgatctcctgacctcgtgatccgcccaccttggcctcccgaagtgctgggattacaggcgtgagccactgcgcccggccgacacgacattcttatggacccagagaatactgcaggatcctgataagaccttgagtgatatgtcactagtctaatctgttgcccttaaaatagcccttttttcaaacacaggaaattaagaaacaccacagacctctattatttagaatagattctatgtgtcagtatgtgatgtactcttttagtttgactgacttcaataccattcaaaaagatcctcaatggagttacagggtttataggggaaaaatacatgtttatgagacattgggcaattcaaatcaacatgtgttacataagcaagcaaagcaaaacaccagtggggtctctggaaagtaaaaggacagactacagtagaaggactgatcccagagtgcctgtacaaggcctaaatctggcaggcaaaagcatcccacactgtctgtcagcacccacatggcctttttgcctgccttctataacgggtaagtggacctacccttggagatagagaagaaaaattatcttctctgatattcggatgtaatggtcatctcagttcagccccctaggaaacatgttttattttccatggggaaaatatcagcgttaaagctctatcaaatcaaaacaactttgccaacatcttctctctgctaccttttaaaccaattaaatacctttctctgaatattttgtccattcagatccgaagacctttaaagactgtggttttatttttgtgtttacattcctttggtttgaataatttgcttgatttattgcatttttagtatttattttaagccagatgttttcatctttgattcatttttatgacattaatttgtagacacttagtaaagtcttatgagaagcaagtggatgaaattatctccaagtccactcagtagactggagttttttaaaaatataaatttccaaaaagtttgcaatcaacagatggctaaaggttgccatctgaattattttataggatattttaattgactccattgtatggaaaccaagtgtgaatgttaagatgaatttgccgtataccctttatcattcggtgtccttgtactcagactttcatgtccctgggtgacctcaatgtgttggtttgtctccatttagaaaggttgataatatattgaattgttcaagatcaggagttccagactgaccctccaggaaaaaaaaaatcgcaaagaacaaattctttttctgtgtaaaaaacactgatcctttgggaatggggcgggaaatgggagtaggacaacattaactttagctgttttagtttctgagatttcataacctcagtagacaccagcaaaattttcagtttctaactccaccaccaatctctcctcaatgaataagactttagcaatttatatagaatttgatcaggtaagagcgaaccacaattctcctgaaccctgctagagattaagtggtggttctcacttcctcaatgaaaacttgcactggggacagcgcttgccttggtcagaccttcccacatctacatactctcaaatacatgaccaggtgatcaagcaatggaaaaatttgcaccaccgtgtcccatgaaattgtttcaatgtttagtttagatattgctaacttgtgctattaaccttttgacaagcgtgtagtattgtttgttttgggtttctttttgatttataactatttagtagtccccagctagctaccagtacagattttaccccatgggtaggattctattgttaagccacataacaaagcacactaattctgacaacactgcaaatggaaaatacgaaccaaaaaaaagttacaccgataagttcaacaaactgtccatttttgatatttgcatgctcccctatggactggctgtggcaatgtaatgcctgtataatgttttcaaataaaaataaatgctttatgaaagcaccgaa

SEQ ID NO: 183867 - DNA, 1076 bp, Homo sapiens
  Payload ID: 16230
  Gene Symbol: SLC35F2
  Gene Name: solute carrier family 35, member F2
  Uniprot ID: Q8IXU6
  ENST ID: ENST00000375682
  CDS Start-End: 93-1076
agcagggaggcagaggtggcggccgcacggacttcggttcggggctcaacacgcacaccaggaatattttgaaaacaattgccctgggtcagatgttgtccttgtgtatatgtgggacagccatcaccagccagtatttggcagaaagatacaaagtgaacacccccatgcttcagagctttatcaattattgcttgctgttcctaatttatacagtgatgctggcatttcgatcaggcagtgataaccttttagtaatcttgaaaagaaaatggtggaagtacatcctgctgggactagcagatgtggaagctaattatgtgatcgtcagagcctaccagtacacaactctaaccagtgtccagcttttggattgctttgggattcctgtgttgatggctctgtcatggtttattcttcatgcaagatacagagtgatccacttcatcgccgtggctgtctgtctgttgggtgtaggaaccatggttggtgcagacatactagcagggagggaagacaattcagggagtgatgtattgattggtgacatcttggtccttcttggggcttccctctatgccatttcaaatgtttgtgaggaatacatcgtgaagaagctgagcagacaggagtttttaggaatggtgggcctgtttggaacaattatcagtggtatacagctattgattgtggaatataaggatattgccagcattcattgggactggaaaattgccctgctgttcgtggcatttgccctgtgtatgttttgcctgtacagcttcatgccattggtgattaaagtcactagtgccacttccgtcaacctgggcatcctgacagcggacctctacagcctttttgttggactctttctgtttggctataagttttcaggactctacatcctgtccttcactgtcatcatggtggggtttatcctgtactgctccacccctactcgcacggccgagccggctgaaagcagcgtgcctccagtcaccagcattgggattgacaacctggggctgaagctggaggagaacctccaggagacccactctgctgtcttgtag

SEQ ID NO: 183868 - DNA, 562 bp, Homo sapiens
  Payload ID: 16230
  Gene Symbol: SLC35F2
  Gene Name: solute carrier family 35, member F2
  ENST ID: ENST00000524991
  CDS Start-End: 33-143
gttttgggcgccggagacgcgcaagggcgccgatggaggcagactcgccagcgggccccggcgccccagagcccctcgcggagggagcggcggccgagttctccagcctgctgcgcaggataaaaggcaaactcttcacctgaatcatggagggttacgctgccaaaccacagagagaccagagaagcagcaggagccaggagtccaaaccacagcaggattctgtgaatattttgaaaacaattgccctgggtcagatgttgtccttgtgtatatgtgggacagccatcaccagccagtatttggcagaaagatacaaagtgaacacccccatgcttcagagctttatcaattattgcttgctgttcctaatttatacagtgatgctggcatttcgatcaggcagtgataaccttttagtaatcttgaaaagaaaatggtggaagtacatcctgctgggactagcagatgtggaagctaattatgtgatcgtcagagcctaccagtacacaactctaaccagtgtccagcttttggattgctttgggattcctgtgttgat

SEQ ID NO: 183869 - DNA, 1028 bp, Homo sapiens
  Payload ID: 16230
  Gene Symbol: SLC35F2
  Gene Name: solute carrier family 35, member F2
  ENST ID: ENST00000532513
  CDS Start-End: 1-798
atggaggcagactcgccagcgggccccggcgccccagagcccctcgcggagggagcggcggccgagttctccagcctgctgcgcaggataaaaggcaaactcttcacctggaatattttgaaaacaattgccctgggtcagatgttgtccttgtgtatatgtgggacagccatcaccagccagtatttggcagaaagatacaaagtgaacacccccatgcttcagagctttatcaattattgcttgctgttcctaatttatacagtgatgctggcatttcgatcaggcagtgataaccttttagtaatcttgaaaagaaaatggtggaagtacatcctgctgggactagcagatgtggaagctaattatgtgatcgtcagagcctaccagtacacaactctaaccagtgtccagcttttggattgctttgggattcctgtgttgatggctctgtcatggtttattcttcatgcaagatacagagtgatccacttcatcgccgtggctgtctgtctgttgggtgtaggaaccatggttggtgcagacatactagcagggagggaagacaattcagggagtgatgtattgattggtgacatcttggtccttcttggggcttccctctatgccatttcaaatgtttgtgaggaatacatcgtgaagaagctgagcagacaggagtttttaggaatggtgggcctgtttggaacaattatcagtggtatacagctccctgctgttcgtggcatttgccctgtgtatgttttgcctgtacagcttcatgccattggtgattaaagtcactagtgccacttccgtcaacctgggcatcctgacagcggacctctacagcctttttgttggactctttctgtttggctataagttttcaggactctacatcctgtccttcactgtcatcatggtggggtttatcctgtactgctccacccctactcgcacggccgagccggctgaaagcagcgtgcctccagtcaccagcattgggattgacaacctggggctga

SEQ ID NO: 183870 - DNA, 1007 bp, Homo sapiens
  Payload ID: 16230
  Gene Symbol: SLC35F2
  Gene Name: solute carrier family 35, member F2
  ENST ID: ENST00000533664
  CDS Start-End: 42-158
acttcgggggttttgggcgccggagacgcgcaagggcgccgatggaggcagactcgccagcgggccccggcgccccagagcccctcgcggagggagcggcggccgagttctccagcctgctgcgcaggataaaaggcaaactcttcacctggcagtgataaccttttagtaatcttgaaaagaaaatggtggaagtacatcctgctgggactagcagatgtggaagctaattatgtgatcgtcagagcctaccagtacacaactctaaccagtgtccagcttttggattgctttgggattcctgtgttgatggctctgtcatggtttattcttcatgcaagatacagagtgatccacttcatcgccgtggctgtctgtctgttgggtgtaggaaccatggttggtgcagacatactagcagggagggaagacaattcagggagtgatgtattgattggtgacatcttggtccttcttggggcttccctctatgccatttcaaatgtttgtgaggaatacatcgtgaagaagctgagcagacaggagtttttaggaatggtgggcctgtttggaacaattatcagtggtatacagctattgattgtggaatataaggatattgccagcattcattgggactggaaaattgccctgctgttcgtggcatttgccctgtgtatgttttgcctgtacagcttcatgccattggtgattaaagtcactagtgccacttccgtcaacctgggcatcctgacagcggacctctacagcctttttgttggactctttctgtttggctataagttttcaggactctacatcctgtccttcactgtcatcatggtggggtttatcctgtactgctccacccctactcgcacggccgagccggctgaaagcagcgtgcctccagtcaccagcattgggattgacaacctggggctgaagctggaggagaacctccaggagacccactctgctgtcttgtagctggagaagatggcgca

SEQ ID NO: 183871 - DNA, 3331 bp, Homo sapiens
  Payload ID: 16230
  Gene Symbol: SLC35F2
  Gene Name: solute carrier family 35, member F2
  Uniprot ID: Q8IXU6
  ENST ID: ENST00000525071
  CDS Start-End: 590-1663
aaatcactctccctcaacgctcactgggcgccggcaggaaagtgggcgtggcgggaagacgtgacagcagcaacaaccaaggaaaatgaagcaaggtctcaactccgggagggtcagccaatgaaaactcactgataaccttgttgagccggtcgtaatcctcctcgatgcccacgctgtccaagatcttcttgatgtccttggcgctgggggaggagttacccccgagggcagccagcagcccgtggaagcctcggaaggcgtggccagggcagggcatccaagccgagcgccgggggttggcaccgtctctctccctggcacggcggagacaactgaatactgaaagacaaaaccaacacaccgcgaggaatgagccacgcctccatccacgccacaaagggcttgacagttaatgattggtcgctgaaggagccgagcggaggagcgagagggacgcgagcaagcgagcgagggagggagcgcagggccagagcggagccccagccggccgcacaggcaccgcctcccgtcttccgggacccggcacttcgggggttttgggcgccggagacgcgcaagggcgccgatggaggcagactcgccagcgggccccggcgccccagagcccctcgcggagggagcggcggccgagttctccagcctgctgcgcaggataaaaggcaaactcttcacctggaatattttgaaaacaattgccctgggtcagatgttgtccttgtgtatatgtgggacagccatcaccagccagtatttggcagaaagatacaaagtgaacacccccatgcttcagagctttatcaattattgcttgctgttcctaatttatacagtgatgctggcatttcgatcaggcagtgataaccttttagtaatcttgaaaagaaaatggtggaagtacatcctgctgggactagcagatgtggaagctaattatgtgatcgtcagagcctaccagtacacaactctaaccagtgtccagcttttggattgctttgggattcctgtgttgatggctctgtcatggtttattcttcatgcaagatacagagtgatccacttcatcgccgtggctgtctgtctgttgggtgtaggaaccatggttggtgcagacatactagcagggagggaagacaattcagggagtgatgtattgattggtgacatcttggtccttcttggggcttccctctatgccatttcaaatgtttgtgaggaatacatcgtgaagaagctgagcagacaggagtttttaggaatggtgggcctgtttggaacaattatcagtggtatacagctattgattgtggaatataaggatattgccagcattcattgggactggaaaattgccctgctgttcgtggcatttgccctgtgtatgttttgcctgtacagcttcatgccattggtgattaaagtcactagtgccacttccgtcaacctgggcatcctgacagcggacctctacagcctttttgttggactctttctgtttggctataaggactctacatcctgtccttcactgtcatcatggtggggtttatcctgtactgctccacccctactcgcacggccgagccggctgaaagcagcgtgcctccagtcaccagcattgggattgacaacctggggctgaagctggaggagaacctccaggagacccactctgctgtcttgtagctggagaagatggcgcacccatcccccaccaggataaagcagagcctgctgcctgctgaggggacacttggggaaatagcagactcagaatggacactctacaaccctgggttggatccagtggttaggttttagaaaggaacactgaacaaagttcaaaagtagaaataccaaaatagagcagaaaccaagctaagagtgtgtttctgtgtttgaggaccaatatctgttcgtgttgaggagatgaggtgcagactccacactggggtcttagaggcaccagtgggaaagcaggactggggagagatccaggactgagccagcctcaggccagggcgggaaagcaggctgtccaggctgggcttggtggtcaggaacaggggcagctcacggtggctctggagtacgtttcctctgtcagatgcttcaaggtttttttttttttttttttttgctgaggcagttattgtccacaggcctttgggtacagatgaggccttggggctgactgcatgtggcagaaaacgggtgggtcagcccttgaaaagtcttgagatataagtgtgagtactatacaagcattaaactggagtgcagtaaacctaggaaccttcccacaattgtttttttgtttgtttgagatgcagagtctagagtgcagtggtgcaagctcagcttactgtaacctctgcctcctggattcaagtgttagtagctgggattacaaaagcatgtggccccacgcccagctaagttttgtatttttagtagacatggggtttcaccatgttgcccaggctggtcttgacctcccgacctcaagtgatctgcctgccccgacctcccaaagtgctgggattacaggcttgagccaccgtgccaggcctgttttgtttgtttttgtagagagatggggtttcgccatgttgcccaggctaatctcaaattcctgagctaaagcgatctgcccacctcggcctccgaaagtgctaggattacagatgtgaaccactgtgcctggcctgtttgtttgtttgtttaaaacatttctccatcactcattccaggtcccagagcaaactctctctgctctcggagcctgtgacactggctatgtgctccacagtttcagtcccaggtcatactctccaacagttttcagagctccatatatatgtagatgccatcctttctaaaaacttctcacgacctcctggaatattcctattgatctcattttatttagcatcagctcaagaaactaagtcttagtgcacagtatcacaacaaagaaaaagctttgtttttataactggtaaaaacaagaaaagattctcatcaaaatgaaaatataaaattaatcatttctcaccaaagagtatgcctgggagcctccagctgttaaaagacaatgctattactacttcttatcaaaaatctgtaatgccctgtgatttttatgatacttcttcaatacaaagtgttaatatgtgtcatcagtataataacaaccaacaaaatgccactttcagaaaactgtatgtaaattttttgtaacaatgtaaaaaagaaatggggagtaagtgttcacatcattaaaaggctttgaattcatggaaataca

SEQ ID NO: 183872 - DNA, 3170 bp, Homo sapiens
  Payload ID: 16230
  Gene Symbol: SLC35F2
  Gene Name: solute carrier family 35, member F2
  Uniprot ID: Q8IXU6
  ENST ID: ENST00000525815
  CDS Start-End: 422-1546
actgcttctaactcactgctcactcaccgcttcttagcttaggaatcacctacaataacctcgtgtcactgtatcttgtgatttcaaacaaggaaccctaaaaacctgaaggcacactgggtgccgctcaacaataaggctcggctgccaagacgaaaaaaaaattgccctttctcctcctgccaccctggaggtgccaggttgtaatctgcaaatgtattgtctggcccttagggcttgacagttaatgattggtcgctgaaggagccgagcggaggagcgagagggacgcgagcaagcgagcgagggagggagcgcagggccagagcggagccccagccggccgcacaggcaccgcctcccgtcttccgggacccggcacttcgggggttttgggcgccggagacgcgcaagggcgccgatggaggcagactcgccagcgggccccggcgccccagagcccctcgcggagggagcggcggccgagttctccagcctgctgcgcaggataaaaggcaaactcttcacctggaatattttgaaaacaattgccctgggtcagatgttgtccttgtgtatatgtgggacagccatcaccagccagtatttggcagaaagatacaaagtgaacacccccatgcttcagagctttatcaattattgcttgctgttcctaatttatacagtgatgctggcatttcgatcaggcagtgataaccttttagtaatcttgaaaagaaaatggtggaagtacatcctgctgggactagcagatgtggaagctaattatgtgatcgtcagagcctaccagtacacaactctaaccagtgtccagcttttggattgctttgggattcctgtgttgatggctctgtcatggtttattcttcatgcaagatacagagtgatccacttcatcgccgtggctgtctgtctgttgggtgtaggaaccatggttggtgcagacatactagcagggagggaagacaattcagggagtgatgtattgattggtgacatcttggtccttcttggggcttccctctatgccatttcaaatgtttgtgaggaatacatcgtgaagaagctgagcagacaggagtttttaggaatggtgggcctgtttggaacaattatcagtggtatacagctattgattgtggaatataaggatattgccagcattcattgggactggaaaattgccctgctgttcgtggcatttgccctgtgtatgttttgcctgtacagcttcatgccattggtgattaaagtcactagtgccacttccgtcaacctgggcatcctgacagcggacctctacagcctttttgttggactctttctgtttggctataagttttcaggactctacatcctgtccttcactgtcatcatggtggggtttatcctgtactgctccacccctactcgcacggccgagccggctgaaagcagcgtgcctccagtcaccagcattgggattgacaacctggggctgaagctggaggagaacctccaggagacccactctgctgtcttgtagctggagaagatggcgcacccatcccccaccaggataaagcagagcctgctgcctgctgaggggacacttggggaaatagcagactcagaatggacactctacaaccctgggttggatccagtggttaggttttagaaaggaacactgaacaaagttcaaaagtagaaataccaaaatagagcagaaaccaagctaagagtgtgtttctgtgtttgaggaccaatatctgttcgtgttgaggagatgaggtgcagactccacactggggtcttagaggcaccagtgggaaagcaggactggggagagatccaggactgagccagcctcaggccagggcgggaaagcaggctgtccaggctgggcttggtggtcaggaacaggggcagctcacggtggctctggagtacgtttcctctgtcagatgcttcaaggtttttttttttttttttttttgctgaggcagttattgtccacaggcctttgggtacagatgaggccttggggctgactgcatgtggcagaaaacgggtgggtcagcccttgaaaagtcttgagatataagtgtgagtactatacaagcattaaactggagtgcagtaaacctaggaaccttcccacaattgtttttttgtttgtttgagatgcagagtctagagtgcagtggtgcaagctcagcttactgtaacctctgcctcctggattcaagtgttagtagctgggattacaaaagcatgtggccccacgcccagctaagttttgtatttttagtagacatggggtttcaccatgttgcccaggctggtcttgacctcccgacctcaagtgatctgcctgccccgacctcccaaagtgctgggattacaggcttgagccaccgtgccaggcctgttttgtttgtttttgtagagagatggggtttcgccatgttgcccaggctaatctcaaattcctgagctaaagcgatctgcccacctcggcctccgaaagtgctaggattacagatgtgaaccactgtgcctggcctgtttgtttgtttgtttaaaacatttctccatcactcattccaggtcccagagcaaactctctctgctctcggagcctgtgacactggctatgtgctccacagtttcagtcccaggtcatactctccaacagttttcagagctccatatatatgtagatgccatcctttctaaaaacttctcacgacctcctggaatattcctattgatctcattttatttagcatcagctcaagaaactaagtcttagtgcacagtatcacaacaaagaaaaagctttgtttttataactggtaaaaacaagaaaagattctcatcaaaatgaaaatataaaattaatcatttctcaccaaagagtatgcctgggagcctccagctgttaaaagacaatgctattactacttcttatcaaaaatctgtaatgccctgtgatttttatgatacttcttcaatacaaagtgttaatatgtgtcatcagtataataacaaccaacaaaatgccactttcagaaaactgtatgtaaattttttgtaacaatgtaaaaaagaaatggggagtaagtgttcacatcattaaaaggctttgaattcatggaaataca

SEQ ID NO: 183873 - DNA, 2762 bp, Homo sapiens
  Payload ID: 16231
  Gene Symbol: SLC35F3
  Gene Name: solute carrier family 35, member F3
  Uniprot ID: Q8IY50
  ENST ID: ENST00000366617
  CDS Start-End: 229-1494
ggctgcgcggccggggaggatgtgcgctgcagggcggccgccgcagtgagcaacgcggcaaccggagcccggcgggcagccggggaggccgggactgagaggggcgagccgctggtgctccccggcggcagagggccgcgtcggccacgggcccgggagagacgcgctccagccggccccaggatgtaggcgatcggcggcagcgctcctgcaggcggccggctcatcatgaagaagcactcggcccgggtggccccgctcagcgcctgcaacagtccggtcctgacccttaccaaagtggaaggggaggagcgcccccgggactccccgggcccggcggaggcccaggcaccggccggggtggaggccggcgggagagcgagtcgccgctgctggacgtgctcccgggcgcaactcaagaagatcttctggggcgtggcggtcgtgctgtgcgtgtgctcctcgtgggcgggctccacgcagctcgccaagctgaccttcaggaagttcgacgcgcccttcaccctcacgtggtttgccaccaactggaactttttattcttcccgttgtactacgtggggcacgtctgcaagtccacagagaagcagtctgtgaagcagcgatacagggaatgctgtcgattttttggagacaatggcttgactttgaaggtgttttttaccaaggcagcaccctttggtgttctttggacactcacaaactacctgtacttacatgcaataaagaaaataaacactacggatgtctccgtgttgttctgctgcaacaaagcttttgtgttcttgctctcatggatcgttctcagggacagattcatgggagtgaggattgtggccgccatcctcgccatcgctggcattgtgatgatgacctacgctgatggcttccacagccactccgtcatcggcatcgcactggtggtggcctcagcatcgatgtctgccctctacaaggttttgttcaagctcctcctgggcagtgctaagtttggagaagccgccttatttttgtccatcttgggtgtgtttaacatcctcttcatcacctgcattcctattatcctctactttaccaaagtggaatactggagctcttttgatgacattccatggggaaacctttgtggattttcagttcttttattgacattcaatattgtattaaattttggaattgccgttacatatcccactctgatgtctcttggaatcgtcctcagcatacctgtgaatgcagtgattgatcactacaccagtcagatcgtcttcaatggggtccgggtcatcgccatcatcatcatcggcctgggttttctcctcctgctcctgccagaggagtgggatgtctggttgatcaagctgctcacccgactcaaagtgaggaagaaggaggagcctgcagagggcgctgccgacctgagctcaggacctcagagcaagaacagaagagcccgcccttccttcgcccgctaacaccactcctctagaactcggtggtaatgactgggaggtctattcctgccgggaggaacctcagttgggtaaggtgtacatacctgtacagttttggtcatctgcggtaagttctatggtatttattggcatgtccaatttgcttgcacttttccacatcagaccttccacttaagggtaccaattcaatacaaaagagaaaagaagaacctctcagtgcttttccaacgaatgtaaagtgggtttaaaagttccctgcgtagatcgttttggatggctgacgttcttgacaagccagccatcagggcaagtgttttgaatcttagcaagtgttttgaatcttagcaactgaacatgacattgcacactgtgattatttttcagctatggtaggtcatattttgttttataccagagctgtactcttaattttaaggaatttcaatgaaccaaaagataactgtcaatttatttggatggatggatggagggatggaaggagggagggaaggatgtctgggatgtgaagaggcaaggcagaaatggatgatgaacatcaaaaactgtcagaggacaggtctgtgccaggtaccaggaaggacaagataagtccaagccccggctggcctgctctcacgtgtctgtgtaagatcatgcaagagaaatcacagtgccttctacagaattttcgtctttacctatgtgaagcgaggtgacgtgatacgtcactggcgccgtcttataatttagatgtaaaaatctttagaaacaaataaaactctctatatatgtgtatgtctgtgtacaaaaaaatgacagagctgatggccagtgtatacagagcgtggcccgcggtgtacaatacccatataaggtacattgtgcaggaggggaattgctggctgcttttacttcctgaccaagactgaaaaattatttactgaaatctgtaaacctttttatgaaacttttaagcaccaggctgtttacttacacaatttaggtctgccagaaaattctatctgtgatagatctgtaaagagggtcaggggttagagtttactatttttgaagtttacattgttacatatgaaatggaaacattattttgaaacgttgtcataacccaatggtgcattctgtaaccatggagtcttctgtttcctgggggaaaggggcattcatgacctgaactttttagcaaattattattctcagtttccattacctgtttggccaaacagattaataaaatatttgaaaaagaa

SEQ ID NO: 183874 - DNA, 2891 bp, Homo sapiens
  Payload ID: 16231
  Gene Symbol: SLC35F3
  Gene Name: solute carrier family 35, member F3
  Uniprot ID: Q8IY50
  ENST ID: ENST00000366618
  CDS Start-End: 146-1618
aaagcggcccggggcggccggcgcggcgcagaccctcggtgggcagcgcactccagtcttcccaggctagcggctgcagggagctccggcccgcggcccctccgcctcaagtctgggagctgccggtcccactctgtctttgcctatggggattcgagagtttcccagcggcgcacccaggggcaagagcattgccgttggcatgaggaggtcaccggacgtcagcccccggagactgtccgacatcagcccccagctccggcagctcaagtacttggtggtggacgaggcgattaaggaggatctgaaatggtcgcgctccgtggaggatctcaccagcgggccggtggggctcacgtccatcgaggagcggatcctgcgcatcactggctactatggctaccagccctgggcagcgagctgcaaaagggaggagcgcccccgggactccccgggcccggcggaggcccaggcaccggccggggtggaggccggcgggagagcgagtcgccgctgctggacgtgctcccgggcgcaactcaagaagatcttctggggcgtggcggtcgtgctgtgcgtgtgctcctcgtgggcgggctccacgcagctcgccaagctgaccttcaggaagttcgacgcgcccttcaccctcacgtggtttgccaccaactggaactttttattcttcccgttgtactacgtggggcacgtctgcaagtccacagagaagcagtctgtgaagcagcgatacagggaatgctgtcgattttttggagacaatggcttgactttgaaggtgttttttaccaaggcagcaccctttggtgttctttggacactcacaaactacctgtacttacatgcaataaagaaaataaacactacggatgtctccgtgttgttctgctgcaacaaagcttttgtgttcttgctctcatggatcgttctcagggacagattcatgggagtgaggattgtggccgccatcctcgccatcgctggcattgtgatgatgacctacgctgatggcttccacagccactccgtcatcggcatcgcactggtggtggcctcagcatcgatgtctgccctctacaaggttttgttcaagctcctcctgggcagtgctaagtttggagaagccgccttatttttgtccatcttgggtgtgtttaacatcctcttcatcacctgcattcctattatcctctactttaccaaagtggaatactggagctcttttgatgacattccatggggaaacctttgtggattttcagttcttttattgacattcaatattgtattaaattttggaattgccgttacatatcccactctgatgtctcttggaatcgtcctcagcatacctgtgaatgcagtgattgatcactacaccagtcagatcgtcttcaatggggtccgggtcatcgccatcatcatcatcggcctgggttttctcctcctgctcctgccagaggagtgggatgtctggttgatcaagctgctcacccgactcaaagtgaggaagaaggaggagcctgcagagggcgctgccgacctgagctcaggacctcagagcaagaacagaagagcccgcccttccttcgcccgctaacaccactcctctagaactcggtggtaatgactgggaggtctattcctgccgggaggaacctcagttgggtaaggtgtacatacctgtacagttttggtcatctgcggtaagttctatggtatttattggcatgtccaatttgcttgcacttttccacatcagaccttccacttaagggtaccaattcaatacaaaagagaaaagaagaacctctcagtgcttttccaacgaatgtaaagtgggtttaaaagttccctgcgtagatcgttttggatggctgacgttcttgacaagccagccatcagggcaagtgttttgaatcttagcaagtgttttgaatcttagcaactgaacatgacattgcacactgtgattatttttcagctatggtaggtcatattttgttttataccagagctgtactcttaattttaaggaatttcaatgaaccaaaagataactgtcaatttatttggatggatggatggagggatggaaggagggagggaaggatgtctgggatgtgaagaggcaaggcagaaatggatgatgaacatcaaaaactgtcagaggacaggtctgtgccaggtaccaggaaggacaagataagtccaagccccggctggcctgctctcacgtgtctgtgtaagatcatgcaagagaaatcacagtgccttctacagaattttcgtctttacctatgtgaagcgaggtgacgtgatacgtcactggcgccgtcttataatttagatgtaaaaatctttagaaacaaataaaactctctatatatgtgtatgtctgtgtacaaaaaaatgacagagctgatggccagtgtatacagagcgtggcccgcggtgtacaatacccatataaggtacattgtgcaggaggggaattgctggctgcttttacttcctgaccaagactgaaaaattatttactgaaatctgtaaacctttttatgaaacttttaagcaccaggctgtttacttacacaatttaggtctgccagaaaattctatctgtgatagatctgtaaagagggtcaggggttagagtttactatttttgaagtttacattgttacatatgaaatggaaacattattttgaaacgttgtcataacccaatggtgcattctgtaaccatggagtcttctgtttcctgggggaaaggggcattcatgacctgaactttttagcaaattattattctcagtttccattacctgtttggccaaacagattaataaaatatttgaaaaagaagcgtt

SEQ ID NO: 183875 - DNA, 1779 bp, Homo sapiens
  Payload ID: 16232
  Gene Symbol: SLC35F4
  Gene Name: solute carrier family 35, member F4
  Uniprot ID: A4IF30
  ENST ID: ENST00000339762
  CDS Start-End: 1-1566
atggatgaactactcttggatctcttccacaaactgaccagtgggaggcagctggcagcaggcaatgggctttgcggtatatcacataaggaacaggaggtatggaagccaggacataatattttagtgaaaatgagaaaggaagataaatcactggtgtggcttatacattcaacacttgctcgctacacacaagttaccaactttttaggtacctccagatcatcagtcactagatgtaaaccaggagccaactgccccagttcacacagtggcatcagtagacaactgtccccactgtctgtcaccgaagattcctctgctcctattcttgaacttcaaaaccaaggatcctcaggagtttgtggacacagagttgagagacagaacagatcagcagacgatgggacacagactcattctgagaacagcagccaagaaaacagaatcaaggctcgctgcctgtcctgcacgtccatggttctgaagggcatctggggactcttgatcatcttgtcagtatcatcatcttgggttggaactacacagattgtaaaaattacttataagaacttctattgcccatttttcatgacttggttttcaacaaactggaacattatgtttttcccagtctattattctggtcatctagccactgctcaagaaaagcaatctccaatgaaaaaattcagggaatgcagtcggatttttggtgaagatggtctgacgctgaaactctttcttaaaagaactgctcccttttctattctatggactttgactaattacctttatttactggctttaaagaagctgacggccacggatgtctccgctctgttctgttgtaacaaagcctttgtcttcttgctgtcatggattgtgctgaaagacaggttcatgggagtgaggatagttgctgcaataatggcaattaccggcattgtcatgatggcatatgcagataatttccacgctgattccatcataggagtggcatttgcggtgggctcagcctctacatctgcattatataaggtcttgtttaaaatgtttcttggaagtgccaactttggggaagctgcacactttgtctccaccttgggtttcttcaatttgatcttcatctccttcaccccagtcatcttgtatttcaccaaggtggagcactggtcctcttttgctgctctgccatggggctgtctctgtgggatggcagggctgtggctggccttcaacatcctggtgaatgttggggtggtgctgacatacccaatcctaatctccattgggacagtgctcagcgttcctggaaatgcagctgtggatctcctaaagcaggaggtgatattcaatgttgtccgcctggctgctaccatcatcatctgcattgggtttctgctgatgctgttgcctgaggaatgggatgaaatcaccctgaggttcatcaacagcctgaaggaaaagaagagtgaggagcatgtggatgatgtgactgatcccagcatacacctgcggggcagaggcagagccaatgggacagtgtctataccactggcttagagagggacatattttgaatgcacgtgtatgtatattctgtgaatataacaaaattttctcactacctgtacactcaaacgacagtattaactctgaatttggataaatcatatgtgaaataatgccaacaataaaagtttacatttatatgcttatcaaggaattggtgtaaataatcataatggatttttttattaaaacacatttgtcctt

SEQ ID NO: 183876 - DNA, 2700 bp, Homo sapiens
  Payload ID: 16232
  Gene Symbol: SLC35F4
  Gene Name: solute carrier family 35, member F4
  ENST ID: ENST00000557254
  CDS Start-End: 1430-1885
atggatgaactactcttggatctcttccacaaactgaccagtgggaggcagctggcagcaggcaatgggctttgcggtatatcacataaggaacaggaggtatggaagccaggacataatattttagtgaaaatgagaaaggaagataaatcactggtgtggcttatacattcaacacttgctcgctacacacaagttaccaactttttaggtaactatggacaatatttgatctcaatcccatcccaacttgctacccagcctatttctagactttctccttttgatgtataattgccaagggattggaaatggaatattgggaaaatgaaacccaatattaccctgagaaaagaggagaaggcataccttataaaaataaatttcaaaagataaattttaaaagactcttggagtatctgagcatcagccactcttgaagaacaggaataattgtgagttcactgaatttcagacagtccgtttttatcgaacttgaattgtccaattagaaacatagctgtacaaggtataataaacattctgaatatgtaaaataagaaccctgggtatttttgatgctcttataataacaatagtaacatagcattaatttaagtgtagcagtcagtatataatgcttctgttaactttctgagtaactgtaaatttttaattttctaaatccaagattacatagtacattttattttatttgtatgggtgcatagtaggtatatatatttacaggtacaggagatatttttatacagacataccatgtgtaacatgtcatctatcacctcaagcatttatcatttctttgtgttacaaacatttcaattatgatcttagttattttacaatctacaatcaattattgttgactgtagtcaccctcttgtgctttcaaatattagatcttactcattctaactatatgtttgtactcattaactgtccccactccctccaccctcaacccactatccatcctaggttctggcaaccatcattccaaagaaatagaagaaatagaaatgcttggagaagtgattaatttcaggagtggggcagggaaactataagacaagcccagggcatcttgcagtgccagaaagtaaggaagagctcaaacgcaaaagaatggggacaaatcaaaggtacctccagatcatcagtcactagatgtaaaccaggagccaactgccccagttcacacagtggcatcagtagacaactgtccccactgtctgtcaccgaagattcctctgctcctattcttgaacttcaaaaccaaggatcctcaggagtttgtggacacagagttgagagacagaacagatcagcagacgatgggacacagactcattctgagaacagcagccaagaaaacagaatcaaggctcgctgcctgtcctgcacgtccatggttctgaagggcatctggggactcttgatcatcttgtcagtatcatcatcttgggttggaactacacagattgtaaaaattacttataagaacttctattgcccatttttcatgacttggttttcaacaaactggaacattatgtttttcccagtctattattctggtcatctagccactgctcaagaaaagcaatctccaatgaaaaaattcagggaatgcagtcggatttttggtgaagatggtctgacgctgaaactctttcttaaaagaactgctcccttttctattctatggactttgactaattacctttatttactggctttaaagaagctgacggccacggatgtctccgctctgttctgttgtaacaaagcctttgtcttcttgctgtcatggattgtgctgaaagacaggttcatgggagtgaggattgctgggaagccctgaagatttaaggagccagatctcattcatataatccggcatgccactatgatgaacatattgagacaacacttctttagaaggagatataccagcaataaaatccgttgtattaaagcaaatgagcacatttaactcatggacctcactgatgcaagaggttacgtccaaaaagttgctgcaataatggcaattaccggcattgtcatgatggcatatgcagataatttccacgctgattccatcataggagtggcatttgcggtgggctcagcctctacatctgcattatataaggtcttgtttaaaatgtttcttggaagtgccaactttggggaagctgcacactttgtctccaccttgggtttcttcaatttgatcttcatctccttcaccccagtcatcttgtatttcaccaaggtggagcactggtcctcttttgctgctctgccatggggctgtctctgtgggatggcagggctgtggctggccttcaacatcctggtgaatgttggggtggtgctgacatacccaatcctaatctccattgggacagtgctcagcgttcctggaaatgcagctgtggatctcctaaagcaggaggtgatattcaatgttgtccgcctggctgctaccatcatcatctgcattgggtttctgctgatgctgttgcctgaggaatgggatgaaatcaccctgaggttcatcaacagcctgaaggaaaagaagagtgaggagcatgtggatgatgtgactgatcccagcatacacctgcggggcagaggcagagccaatgggacagtgtctataccactggc

SEQ ID NO: 183877 - DNA, 1608 bp, Homo sapiens
  Payload ID: 16232
  Gene Symbol: SLC35F4
  Gene Name: solute carrier family 35, member F4
  Uniprot ID: A4IF30
  ENST ID: ENST00000554729
  CDS Start-End: 363-1451
atggatgaactactcttggatctcttccacaaactgaccagtgggaggcagctggcagcaggcaatgggctttgcggtatatcacataaggaacaggaggtacctccagatcatcagtcactagatgtaaaccaggagccaactgccccagttcacacagtggcatcagtagacaactgtccccactgtctgtcaccgaagattcctctgctcctattcttgaacttcaaaaccaaggatcctcaggagtttgtggacacagagttgagagacagaacagatcagacgatgggacacagactcattctgagaacagcagccaagaaaacagaatcaaggctcgctgcctgtcctgcacgtccatggttctgaagggcatctggggactcttgatcatcttgtcagtatcatcatcttgggttggaactacacagattgtaaaaattacttataagaacttctattgcccatttttcatgacttggttttcaacaaactggaacattatgtttttcccagtctattattctggtcatctagccactgctcaagaaaagcaatctccaatgaaaaaattcagggaatgcagtcggatttttggtgaagatggtctgacgctgaaactctttcttaaaagaactgctcccttttctattctatggactttgactaattacctttatttactggctttaaagaagctgacggccacggatgtctccgctctgttctgttgtaacaaagcctttgtcttcttgctgtcatggattgtgctgaaagacaggttcatgggagtgaggatagttgctgcaataatggcaattaccggcattgtcatgatggcatatgcagataatttccacgctgattccatcataggagtggcatttgcggtgggctcagcctctacatctgcattatataaggtcttgtttaaaatgtttcttggaagtgccaactttggggaagctgcacactttgtctccaccttgggtttcttcaatttgatcttcatctccttcaccccagtcatcttgtatttcaccaaggtggagcactggtcctcttttgctgctctgccatggggctgtctctgtgggatggcagggctgtggctggccttcaacatcctggtgaatgttggggtggtgctgacatacccaatcctaatctccattgggacagtgctcagcgttcctggaaatgcagctgtggatctcctaaagcaggaggtgatattcaatgttgtccgcctggctgctaccatcatcatctgcattgggtttctgctgatgctgttgcctgaggaatgggatgaaatcaccctgaggttcatcaacagcctgaaggaaaagaagagtgaggagcatgtggatgatgtgactgatcccagcatacacctgcggggcagaggcagagccaatgggacagtgtctataccactggcttagagagggacatattttgaatgcacgtgtatgtatattctgtgaatataacaaaattttctcactacctgtacactcaaacgacagtattaactctgaatttggataaatcatatgtgaaataatgccaacaataaaagtttacatttatatgcttatc

SEQ ID NO: 183878 - DNA, 1908 bp, Homo sapiens
  Payload ID: 16232
  Gene Symbol: SLC35F4
  Gene Name: solute carrier family 35, member F4
  ENST ID: ENST00000556826
  CDS Start-End: 238-1695
gggagagctgccaggctgacggagaggccggcccgagtgggggccgctccgccgccgccgccgccgccgccgctgtgatgcggagccggtgctgcgccgggcggtggagtcagagcccgggcgcgggagcaggagctgcaagatcagcaccagcggctccggcacctgcaccagctcccgggccccgcgctgcgctctccgccccgccgcactcggggccgtcgccccgcgctctctatggatgtcaaggcggcccccaacggggtggccactatcgaggaccggatcctgcggatcaccggctactatggctattatccaggttactccagccagaaaagtacctccagatcatcagtcactagatgtaaaccaggagccaactgccccagttcacacagtggcatcagtagacaactgtccccactgtctgtcaccgaagattcctctgctcctattcttgaacttcaaaaccaaggatcctcaggagtttgtggacacagagttgagagacagaacagatcagcagacgatgggacacagactcattctgagaacagcagccaagaaaacagaatcaaggctcgctgcctgtcctgcacgtccatggttctgaagggcatctggggactcttgatcatcttgtcagtatcatcatcttgggttggaactacacagattgtaaaaattacttataagaacttctattgcccatttttcatgacttggttttcaacaaactggaacattatgtttttcccagtctattattctggtcatctagccactgctcaagaaaagcaatctccaatgaaaaaattcagggaatgcagtcggatttttggtgaagatggtctgacgctgaaactctttcttaaaagaactgctcccttttctattctatggactttgactaattacctttatttactggctttaaagaagctgacggccacggatgtctccgctctgttctgttgtaacaaagcctttgtcttcttgctgtcatggattgtgctgaaagacaggttcatgggagtgaggatagttgctgcaataatggcaattaccggcattgtcatgatggcatatgcagataatttccacgctgattccatcataggagtggcatttgcggtgggctcagcctctacatctgcattatataaggtcttgtttaaaatgtttcttggaagtgccaactttggggaagctgcacactttgtctccaccttgggtttcttcaatttgatcttcatctccttcaccccagtcatcttgtatttcaccaaggtggagcactggtcctcttttgctgctctgccatggggctgtctctgtgggatggcagggctgtggctggccttcaacatcctggtgaatgttggggtggtgctgacatacccaatcctaatctccattgggacagtgctcagcgttcctggaaatgcagctgtggatctcctaaagcaggaggtgatattcaatgttgtccgcctggctgctaccatcatcatctgcattgggtttctgctgatgctgttgcctgaggaatgggatgaaatcaccctgaggttcatcaacagcctgaaggaaaagaagagtgaggagcatgtggatgatgtgactgatcccagcatacacctgcggggcagaggcagagccaatgggacagtgtctataccactggcttagagagggacatattttgaatgcacgtgtatgtatattctgtgaatataacaaaattttctcactacctgtacactcaaacgacagtattaactctgaatttggataaatcatatgtgaaataatgccaacaataaaagtttacatttatatgcttatcaaggaattggtgtaaataatcataatggatttttttattaaaacacatttgtcctt

SEQ ID NO: 183879 - DNA, 467 bp, Homo sapiens
  Payload ID: 16232
  Gene Symbol: SLC35F4
  Gene Name: solute carrier family 35, member F4
  ENST ID: ENST00000556306
  CDS Start-End: 1-140
tttatttactggctttaaagaagctgacggccacggatgtctccgctctgttctgttgtaacaaagcctttgtcttcttgctgtcatggattgtgctgaaagacaggttcatgggagtgaggattgctgggaagccctgaagatttaaggagccagatctcattcatataatccggcatgccactatgatgaacatattgagacaacacttctttagaaggagatagttgctgcaataatggcaattaccggcattgtcatgatggcatatgcagataatttccacgctgattccatcataggagtggcatttgcggtgggctcagcctctacatctgcattatataaggtcttgtttaaaatgtttcttggaagtgccaactttggggaagctgcacactttgtctccaccttgggtttcttcaatttgatcttcatctccttcaccccagtcatcttgtatttca

SEQ ID NO: 183880 - DNA, 4412 bp, Homo sapiens
  Payload ID: 16233
  Gene Symbol: SLC35F5
  Gene Name: solute carrier family 35, member F5
  Uniprot ID: Q8WV83
  ENST ID: ENST00000245680
  CDS Start-End: 415-1986
cgctcggcgaccagagcctcgcattacttcccctagctccgccaagcctcgctgcatacgcgaccgcgcgcagtccgccgtcgcgcccctatgacgtcacccgcgcgccaccgcttccgggctggggactgggggcggggccgcgcggagggcaagccgggggcggggccggggccagagcagatctccgggcctccgcggccatagctgactgtgccgtcccttcccctcacccgctccacgccctcctgggccgagtggagttgggtggtgtcgggagcctctccctgaggggcaccgcgtcttcaggagctgggcctccagtgcggcgcgatgtcaggcgcggtgacagctctgtgagtccgaggccgcggccgtggcgctgggcggctgcggggcctgaccggtccgctcatggtgccgccacgacgccatcgcggggcaggaaggccaggggtgctgagttcttcacctccttttagactgagatctgccaagttttccggcattgctcttgaggatctcagaagggctcttaagacaagactgcaaatggtgtgtgtatttgtcatgaaccgaatgaattcccagaacagtggtttcactcagcgcaggcgaatggctcttgggattgttattcttctgcttgttgatgtgatatgggttgcttcctctgaacttacttcgtatgtttttacccagtacaacaaaccattcttcagcacctttgcaaaaacatctatgtttgttttgtaccttttgggctttattatttggaagccatggagacaacagtgtacaagaggacttcgcggaaagcatgctgctttttttgcagatgctgaaggttactttgctgcttgcacaacagatacaactatgaatagttctttgagtgaacctctgtatgtgcctgtgaaattccatgatcttccaagtgaaaaacctgagagcacaaacattgatactgaaaaaacccccaaaaagtctcgtgtgaggttcagtaatatcatggagattcgacagcttccgtcaagtcatgcattggaagcaaagttgtctcgcatgtcatatcctgtgaaagaacaagaatccatactgaaaactgtggggaaacttactgcaactcaagtagcgaaaattagcttttttttttgctttgtgtggtttttggcaaatttgtcatatcaagaagcactttcagacacacaagttgctatagttaatattttatcttcaacttccggactttttaccttaatccttgctgcagtatttccaagtaacagtggagatagatttaccctttctaaactattagctgtaattttaagcattggaggcgttgtactggtaaacctggcagggtctgaaaaacctgctggaagagacacagtaggttccatttggtctcttgctggagccatgctctatgctgtctatattgttatgattaagagaaaagtagatagagaagacaagttggatattccaatgttctttggttttgtaggtttgtttaatctgctgctcttatggccaggtttctttttacttcattatactggatttgaggacttcgagtttcccaataaagtagtattaatgtgcattatcattaatggccttattggaacagtactctcagagttcctgtggttgtggggctgctttcttacctcatcattgataggcacacttgcactaagccttacaatacctctgtccataatagctgacatgtgtatgcaaaaggtgcagttttcttggttattttttgcaggagctatccctgtatttttttcattttttattgtaactctcctatgccattataataattgggatcctgtgatggtgggaatcagaagaatatttgcttttatatgcagaaaacatcgaattcagagagttccagaagacagcgaacagtgtgagagtctcatttctatgcacagtgtttctcaggaggatggagctagttagctgtctgttgtctgtagcccagcttgataatggaactatacagcgaagagacaatctctggcaagtttttgtagaaaaaatgtttcagtgcctagtctgaaaaataacagtttgagttctttgaaactctaaaatatatttttctcatacctgttttcttcattttcataatgaagcactttgctatgtagctgtgtacatatcactacagttataggaagtttcagtctacagtccatccaaaggaccaacctgccttacacatctcaaggaattcagctgttgaaatcatttgaactaatcaaggaataaatcctaatgttctgggactttattttcacatgttaaatgctggaatatattatgaaaatgttttcaagaaatcacttaagtgttcatagaccagtatttctgacaggtaaaatgctaaaataagctacctgtaataagtgtggattatatttttgggttttgtagaatattgcaaattaaccacacaaaaaatgtttaatttatgcaacaagcatgtttgtgcaaatttcatgggactttaaaaagaataagtatttgagaaaatatctggttcacttacactacatttactgtattattcttttatagcattaggtgccttgtattttaaatctgtgacaaaccatggcaaatttttaaaggggaagtattattataaaatgaagaaatatgtatttctaaaggctatattgctgtaaacttaattgataaagctctgtttaatttagagttttgaagaaatagtctcccttcaattaagaaattttcataatggaatgatttaaattgaagtgacaaagagtattattaaaatacaatgtttatacgtctatttgtgtattgtagatgtatcaagtgatttctaatttttttcacatatgaatgtgccagattactctagaactagatgtctcttctttaaataattttagttttcctgaataaatttgtaatggttaaagtaccaagtaagtaaggcgagaagggattctgtttttaaaatcacatcagaacttttcctctactaagattataaattaaatgtaaaatactcctaattgcaattcttaaacttaggccttacatgtacttattatgcaactgctcctggactctattcaccatagatatcagtaaacgtatgtcccaggattcacaggcttttgattaatcaatattcttttcaagtttgctgtgaagagtttagttctcttcaaaatttcttaactaatctgatttttaagaattctctttgcagtgtttagcttcctattcacattcttaaaattgctttggtgttaccatgagtctaaaatgaagtttagccttccttttgtttcattctgagaacttctatattatattacctttaaaaattgtttatgatattaaatttaaaatacaaacagctctctttttttttttttttttttttaatcatccagcccaaagtggcaaaaacagctcttttctcatttggcaccaccaataacgcaagttaaaaataatgttgagtttattatacttttgacctgtttagctcaacagggtgaaggcatgtaaagaatgtggacttctgaggaattttcttttaaaaagaacataatgaagtaacattttaattactcaaggactacttttggttgaagtttataatctagatacctctactttttgtttttgctgttcgacagttcacaaagaccttcagcaatttacagggtaaaatcgttgaagtagtggaggtgaaactgaaatttaaaattattctgtaaatactatagggaaagaggctgagcttagaatcttttggttgttcatgtgttctgtgctcttatcatcacacaggtcatgtgttgttactcaggattctggaagtactaagccgtagttaacaggctggatagatcttcagccaatcttctttcattatactgctgcttttctgtttcttaaaaaacaaaaatcaatgaacaacttcttcagaaggaagcaccactgttcaattggttaactgaaagtatgaatcactgccgctttgcttgcccacctgtttgctttttctcacaggttttatttatctgaatgattgttgcatttgaatactgtagccatggtgagtgagcagttgaagacttcctttctgcaccttcatagttaagggttcatcttctcaagaaataaagttgtgctgggttgtttcaattctgtagatcacctagaaactaggtaacaaggcccttggatcacaatgagcacattgcaggtctttggaaatgctgggaaggggttacattcaagtaactgctgacgtccttcctctctgtcagacccatgttggcctgtaattatatttttctgaatctaaaaacaaatagaaatttctgatatct

SEQ ID NO: 183881 - DNA, 3120 bp, Homo sapiens
  Payload ID: 16233
  Gene Symbol: SLC35F5
  Gene Name: solute carrier family 35, member F5
  ENST ID: ENST00000409106
  CDS Start-End: 818-2371
gggggcggggccgcgcggagggcaagccgggggcggggccggggccagagcagatctccgggcctccgcggccatagctgactgtgccgtcccttcccctcacccgctccacgccctcctgggccgagtggagttgggtggtgtcgggagcctctccctgaggggcaccgcgtcttcaggagctgggcctccagtgcggcgcgatgtcaggcgcggtgacagctctgtgagtccgaggccgcggccgtggcgctgggcggctgcggggcctgaccggtccgctcatggtgccgccacgacgccatcgcggggcaggaaggccaggtaggcaggcagggaagggccccgacatcaccggagcccaaaccgggacggagtgcccaccagcagcaccacctcctgccctcggtggcagcaggagcgccttgaccgaaaccgtgaaggtctctaggggcggagggagcgggagctgacaggggcgccggagccctgcgcccaccgctggcaattgaggaagccgtgcgtgcgccctcgcctcggctccccggggaggcgtcgctgccttaactgtcttccccgctccaaaacagaaggatgatttcttttcccagctgtttcttttaaaatgactggatgttttgatagaggtgggtggaggagcatggagaatccttttcttttaccacttgaagagattggaaaggtgccttcaagacccacagcaaatcacttactctccgataaccaaattccactccagcagatcagggacagaaaagacacttttagaaacagtgtctagacgctgtccccagggatggattcctctggatggagaggggtgctgagttcttcacctccttttagactgagatctgccaagttttccggcattgctcttgaggatctcagaagggctcttaagacaagactgcaaatggtgtgtgtatttgtcatgaaccgaatgaattcccagaacagtggtttcactcagcgcaggcgaatggctcttgggattgttattcttctgcttgttgatgtgatatgggttgcttcctctgaacttacttcgtatgtttttacccagtacaacaaaccattcttcagcacctttgcaaaaacatctatgtttgttttgtaccttttgggctttattatttggaagccatggagacaacagtgtacaagaggacttcgcggaaagcatgctgctttttttgcagatgctgaaggttactttgctgcttgcacaacagatacaactatgaatagttctttgagtgaacctctgtatgtgcctgtgaaattccatgatcttccaagtgaaaaacctgagagcacaaacattgatactgaaaaaacccccaaaaagtctcgtgtgaggttcagtaatatcatggagattcgacagcttccgtcaagtcatgcattggaagcaaagttgtctcgcatgtcatatcctgtgaaagaacaagaatccatactgaaaactgtggggaaacttactgcaactcaagtagcgaaaattagcttttttttttgctttgtgtggtttttggcaaatttgtcatatcaagaagcactttcagacacacaagttgctatagttaatattttatcttcaacttccggactttttaccttaatccttgctgcagtatttccaagtaacagtggagatagatttaccctttctaaactattagctgtaattttaagcattggaggcgttgtactggtaaacctggcagggtctgaaaaacctgctggaagagacacagtaggttccatttggtctcttgctggagccatgctctatgctgtctatattgttatgattaagagaaaagtagatagagaagacaagttggatattccaatgttctttggttttgtaggtttgtttaatctgctgctcttatggccaggtttctttttacttcattatactggatttgaggacttcgagtttcccaataaagtagtattaatgtgcattatcattaatggccttattggaacagtactctcagagttcctgtggttgtggggctgctttcttacctcatcattgataggcacacttgcactaagccttacaatacctctgtccataatagctgacatgtgtatgcaaaaggtgcagttttcttggttattttttgcaggagctatccctgtatttttttcattttttattgtaactctcctatgccattataataattgggatcctgtgatggtgggaatcagaagaatatttgcttttatatgcagaaaacatcgaattcagagagttccagaagacagcgaacagtgtgagagtctcatttctatgcacagtgtttctcaggaggatggagctagttagctgtctgttgtctgtagcccagcttgataatggaactatacagcgaagagacaatctctgcactttgctatgtagctgtgtacatatcactacagttataggaagtttcagtctacagtccatccaaaggaccaacctgccttacacatctcaaggaattcagctgttgaaatcatttgaactaatcaaggaataaatcctaatgttctgggactttattttcacatgttaaatgctggaatatattatgaaaatgttttcaagaaatcacttaagtgttcatagaccagtatttctgacaggtaaaatgctaaaataagctacctgtaataagtgtggattatatttttgggttttgtagaatattgcaaattaaccacacaaaaaatgtttaatttatgcaacaagcatgtttgtgcaaatttcatgggactttaaaaagaataagtatttgagaaaatatctggttcacttacactacatttactgtattattcttttatagcattaggtgccttgtattttaaatctgtgacaaaccatggcaaatttttaaaggggaagtattattataaaatgaagaaatatgtatttctaaaggctatattgctgtaaacttaattgataaagctctgtttaatttagagttttgaagaaatagtctcccttcaattaagaaattttcataatggaatgatttaaattgaagtgacaaagagtattattaaaatacaatgtttatacgtcta

SEQ ID NO: 183882 - DNA, 2284 bp, Homo sapiens
  Payload ID: 16233
  Gene Symbol: SLC35F5
  Gene Name: solute carrier family 35, member F5
  ENST ID: ENST00000409342
  CDS Start-End: 745-1491
atagctgactgtgccgtcccttcccctcacccgctccacgccctcctgggccgagtggagttgggtggtgtcgggagcctctccctgaggggcaccgcgtcttcaggagctgggcctccagtgcggcgcgatgtcaggcgcggtgacagctctgtgagtccgaggccgcggccgtggcgctgggcggctgcggggcctgaccggtccgctcatggtgccgccacgacgccatcgcggggcaggaaggccaggtaggcaggcagggaagggccccgacatcaccggagcccaaaccgggacggagtgcccaccagcagcaccacctcctgccctcggtggcagcaggagcgccttgaccgaaaccgtgaaggtctctaggggcggagggagcgggagctgacaggggcgccggagccctgcgcccaccgctggcaattgaggaagccgtgcgtgcgccctcgcctcggctccccggggaggcgtcgctgccttaactgtcttccccgctccaaaacagaaggatgatttcttttcccagctgtttcttttaaaatgactggatgttttgatagaggtgggtggaggagcatggagaatccttttcttttaccacttgaagagattggaaaggtgccttcaagacccacagcaaatcacttactctccgataaccaaattccactccagcagatcagggacagaaaagacacttttagaaacagtgtctagacgctgtccccagggatggattcctctggatggagaggggtgctgagttcttcacctccttttagactgagatctgccaagttttccggcattgctcttgaggatctcagaagggctcttaagacaagactgcaaatggtgtgtgtatttgtcatgaaccgaatgaattcccagaacagtggtttcactcagcgcaggcgaatggctcttgggattgttattcttctgcttgttgatgtgatatgggttgcttcctctgaacttacttcgtatgtttttacccagtacaacaaaccattcttcagcacctttgcaaaaacatctatgtttgttttgtaccttttgggctttattatttggaagccatggagacaacagtgtacaagaggacttcgcggaaagcatgctgctttttttgcagatgctgaaggttactttgctgcttgcacaacagatacaactatgaatagttctttgagtgaacctctgtatgtgcctgtgaaattccatgatcttccaagtgaaaaacctgagagcacaaacattgatactgaaaaaacccccaaaaagtctcgtgtgaggttcagtaatatcatggagattcgacagcttccgtcaagtcatgcattggaagcaaagttgtctcgcatgtcatatcctgtgaaagaacaagaatccatactgaaaactgtggggaaacttactgcaactcaagtagcgaaaattagcttttttttttgctttgtggtaggtcttttatgatatgtttgcatatgatgtttgaaacttgaattttaagactgtatacataccaacaatataggattgaagtgtgagacaattaggttgtttaatcatgactttaaactctgctatttgataccggtaggaagttagggtatcaaaattaataaatgcttgatatacctcaaagagttagaattcattaagtcctataacacttcagctatttacatatatacacaaacttacaaacacacacaggttgggaagttcttcagaatttagcattgcctcatgctcaaaattatgaatagagttattttacactgtgatatatgtatatacaaaggctagtaaatatccagataagagtttactgtatgcattgatttttttcaaataagtgttttgcagttttatattcatataaatgaggttaagtattattttgtcaagtactcagtatatttctacagaatttctggttgtattatttatagtttctttttaaagatagaaactgaaaactgtgcttaagatttcacatagaataatgatggagtaaataaagtattgttattttgggctaagctgggattagagacttgtctgagttagaactctaacatgtagaatttaaaaaatgaatttctgtgatattttatgtgtacatcattggaagtagcctaatccaaggttttttaaatatgagcctttaagattcaaatttgtactgagcatcttaaacccctaaacaatgaaatgctaatgtcaatgttattagcctgattataaaatttttttaatgtca

SEQ ID NO: 183883 - DNA, 725 bp, Homo sapiens
  Payload ID: 16233
  Gene Symbol: SLC35F5
  Gene Name: solute carrier family 35, member F5
  ENST ID: ENST00000447673
  CDS Start-End: 1-725
gtttttggcaaatttgtcatatcaagaagcactttcagacacacaagttgctatagttaatattttatcttcaacttccggactttttaccttaatccttgctgcagtatttccaagtaacagtggagatagatttaccctttctaaactattagctgtaattttaagacttgataaagaaggaaatggatataaaatattgaacttcattggaggcgttgtactggtaaacctggcagggtctgaaaaacctgctggaagagacacagtaggttccatttggtctcttgctggagccatgctctatgctgtctatattgttatgattaagagaaaagtagatagagaagacaagttggatattccaatgttctttggttttgtaggtttgtttaatctgctgctcttatggccaggtttctttttacttcattatactggatttgaggacttcgagtttcccaataaagtagtattaatgtgcattatcattaatggccttattggaacagtactctcagagttcctgtggttgtggggctgctttcttacctcatcattgataggcacacttgcactaagccttacaatacctctgtccataatagctgacatgtgtatgcaaaaggtgcagttttcttggttattttttgcaggagctatccctgtatttttttcattttttattgtaactctcctatgccattataataattgggatcctg

SEQ ID NO: 183884 - DNA, 736 bp, Homo sapiens
  Payload ID: 16233
  Gene Symbol: SLC35F5
  Gene Name: solute carrier family 35, member F5
  ENST ID: ENST00000420066
  CDS Start-End: 1-116
ctctcctatgccattataataattgggatcctgtgatggtgggaatcagaagaatatttgcttttatatgcagaaaacatcgaattcagagttccagaagacagcgaacagtgtgagagtctcatttctatgcacagtgtttctcaggaggatggagctagttagctgtctgttgtctgtagcccagcttgataatggaactatacagcgaagagacaatctctggcaagtttttgtagaaaaaatgtttcagtgcctagtctgaaaaataacagtttgagttctttgaaactctaaaatatatttttctcatacctgttttcttcattttcataatgaagcactttgctatgtagctgtgtacatatcactacagttataggaagtttcagtctacagtccatccaaaggaccaacctgccttacacatctcaaggaattcagctgttgaaatcatttgaactaatcaaggaataaatcctaatgttctgggactttattttcacatgttaaatgctggaatatattatgaaaatgttttcaagaaatcacttaagtgttcatagaccagtatttctgacaggtaaaatgctaaaataagctacctgtaataagtgtggattatatttttgggttttgtagaatattgcaaattaaccacacaaaaaatgtttaatttatgcaacaagcatgtttgtgcaaatttcatgggactttaaaaagaataagtatttga

SEQ ID NO: 183885 - DNA, 3898 bp, Homo sapiens
  Payload ID: 16234
  Gene Symbol: SLC35F6
  Gene Name: solute carrier family 35, member F6
  Uniprot ID: Q8N357
  ENST ID: ENST00000344420
  CDS Start-End: 63-1178
aggagaccccgggtgacggggcccggcgccgctaactggagcgaaccccagcgtccgccgacatggcctggaccaagtaccagctgttcctggccgggctcatgcttgttaccggctccatcaacacgctctcggcaaaatgggcggacaatttcatggccgagggctgtggagggagcaaggagcacagcttccagcatcccttcctccaggcagtgggcatgttcctgggagaattctcctgcctggctgccttctacctcctccgatgcagagctgcagggcaatcagactccagcgtagacccccagcagcccttcaaccctcttcttttcctgcccccagcgctctgtgacatgacagggaccagcctcatgtatgtggctctgaacatgaccagtgcctccagcttccagatgctgcggggtgcagtgatcatattcactggcctgttctcggtggccttcctgggccggaggctggtgctgagccagtggctgggcatcctagccaccatcgcggggctggtggtcgtgggcctggctgacctcctgagcaagcacgacagtcagcacaagctcagcgaagtgatcacaggggacctgttgatcatcatggcccagatcatcgttgccatccagatggtgctagaggagaagttcgtctacaaacacaatgtgcacccactgcgggcagttggcactgagggcctctttggctttgtgatcctctccctgctgctggtgcccatgtactacatccccgccggctccttcagcggaaaccctcgtgggacactggaggatgcattggacgccttctgccaggtgggccagcagccgctcattgccgtggcactgctgggcaacatcagcagcattgccttcttcaacttcgcaggcatcagcgtcaccaaggaactgagcgccaccacccgcatggtgttggacagcttgcgcaccgttgtcatctgggcactgagcctggcactgggctgggaggccttccatgcactgcagatccttggcttcctcatactccttataggcactgccctctacaatgggctacaccgtccgctgctgggccgcctgtccaggggccggcccctggcagaggagagcgagcaggagagactgctgggtggcacccgcactcccatcaatgatgccagctgaggttccctggaggcttctactgccacccgggtgctccttctccctgagactgaggccacacaggctggtgggccccgaatgccctatccccaaggcctcaccctgtcccctccctgcagaacccccagggcagctgctgccacagaagataacaacacccaagtcctctttttctcactaccacctgcagggtggtgttacccagcccccacaagcctgagtgcagtggcagacctcagctctctggacccctcctacagcactagagctaaatcatgaagttgaattgtaggaatttaccaccgtagtgtatctgaatcataaactagattatcatagttatctagtttatgagtcataagctagatttgattcttcaaagaagaaaagtcagtgagcaaatttaaaccagaactaagcattatattttctttttttttttttgagacagagtctcgctctgtcgcccaggctggagtgcagtggcacgatctcggcggctcactacaacctctgcctcccaggttcaaatgattctcctgcctcagcctcccgagtagctgggattacaggtgcataacacacctgggtaacttttatagagatggggtttcaccatgttggccaggctggtctcaaactcctgacctcaggtgatctgcctgcctcggcctcccaaagtgctgggattacaggcgtgagacaccacacccagccataactaagcattatgttttctaaaacttctaagatcctccctaaacccgtctggagacatgggttttagcccagactctgcctcaaactcattgtagctcccagcacattacccagttgctctgggccttggtgttatgctctgggaagtagatgttgatgctgtggccttagtgccttctggccccagcattccatgggcctgtgatcttgaccaacctgagaaaacagtaacagcccatccactggaaatacccctctgcccacagcaccacccttctgtgctgttttttttgttgtttgtttgtttcttctttttgagacagagtcttgctctgttgccacgctggagtgcagtggtgtgatctcggctcactgcaacctcccgctcccaggttcaagcaagtcccctgagtagctgggactacaggcgtgtgccaccacatccggctaattttttgcattctttaatagagacggggttttgccatgttggccaggatggtctcaatctcctgacctcatgatccacctgcctcagcctcccaaagtgctggggttacaggcatgagccaccacgcccagccttttttttttttttttttttttcttgagagacagggtcttgctctgtcacccaggcacagcttactgcagccttgaactcctgggatcaatcagtcctcctgcctcagcctcccgagtagctaagactaacaggtatgtaccaccatgcctggtttattgttttatttttttggcagagatgggtctcactgtgttgcccaggctgatctcaaactcctggcctcaagcgatcctcccatctcagcctcccaaagtgctgggattacagacctgagccaccacacctgggcaacagagtgaaacctgtccctgttttcctgctcttactctcacctctgaggcctcctctgcctggaagagattacagggaaattccaggcagcccttgtcaattgtttttatgaattctttacctgttccttttaaagacaaggaaactgaggcccaaagttctaagttgtttggcaaatggagtctcctaccctcagctcctgcaaggacctgggggacccccaggtccagcagccacatgattctgcagcagacagggacctagagcacatctggatctcagccccacccctggcaacctgcctgcctagagaactcccaagatgacagactaagtaggattctgccatttagaataattctggtatcctgggcgttgcgttaagttgcttaactttcattctgtcttacgatagtcttcagaggtgggaacagatgaagaaaccatgccccagagaaggttaagtgacttcctctttatggagccagtgttccaacctaggtttgcctgataccagacctgtggccccacctcccatgcaggtctctgtggggtctttgggatggatctcctagggctgggctggaagcctcatgtactgttgtcttctaggtaaccaccctgaagagaaggggtggcatcaggaaccgcagggaaccaagcagcctttggtccagtgctgctccttggaacagttgagtgtggcctcaaaccattctcctgggtagctcagtcataaaacaccgaatgcctgcctcaaaatagcctctgagggaagggagctgttgacaagtgaagccctcaggttgtgtgggattccagcaggttattacagcttgtggggggagggagggtccattccaccagctttgaatcccagggtcccctcagcttcactgggccacagtgtctgtcccaggaagaagcaaatggacagtgaggatgatggagagactacagctgccttgtctaaaacctgggatcttaaaagtgttattttggcttttattttttaaaaaaagaaaaggaaaattggcaattgtattaatccattctcgaattgctgtaaagaaatacctgagactgggtaatttaatttataaagaaaagaggtttaattggc

SEQ ID NO: 183886 - DNA, 3605 bp, Homo sapiens
  Payload ID: 16234
  Gene Symbol: SLC35F6
  Gene Name: solute carrier family 35, member F6
  ENST ID: ENST00000414029
  CDS Start-End: 26-181
ggagcgaaccccagcgtccgccgacatggcctggaccaagtaccagctgttcctggccgggctcatgcttgttaccggctccatcaacacgctctcggcaaaatgggcggacaatttcatggccgagggctgtggagggagcaaggagcacagcttccagcatcccttcctccagctctgaacatgaccagtgcctccagcttccagatgctgcggggtgcagtgatcatattcactggcctgttctcggtggccttcctgggccggaggctggtgctgagccagtggctgggcatcctagccaccatcgcggggctggtggtcgtgggcctggctgacctcctgagcaagcacgacagtcagcacaagctcagcgaagtgatcacaggggacctgttgatcatcatggcccagatcatcgttgccatccagatggtgctagaggagaagttcgtctacaaacacaatgtgcacccactgcgggcagttggcactgagggcctctttggctttgtgatcctctccctgctgctggtgcccatgtactacatccccgccggctccttcagcggaaaccctcgtgggacactggaggatgcattggacgccttctgccaggtgggccagcagccgctcattgccgtggcactgctgggcaacatcagcagcattgccttcttcaacttcgcaggcatcagcgtcaccaaggaactgagcgccaccacccgcatggtgttggacagcttgcgcaccgttgtcatctgggcactgagcctggcactgggctgggaggccttccatgcactgcagatccttggcttcctcatactccttataggcactgccctctacaatgggctacaccgtccgctgctgggccgcctgtccaggggccggcccctggcagaggagagcgagcaggagagactgctgggtggcacccgcactcccatcaatgatgccagctgaggttccctggaggcttctactgccacccgggtgctccttctccctgagactgaggccacacaggctggtgggccccgaatgccctatccccaaggcctcaccctgtcccctccctgcagaacccccagggcagctgctgccacagaagataacaacacccaagtcctctttttctcactaccacctgcagggtggtgttacccagcccccacaagcctgagtgcagtggcagacctcagctctctggacccctcctacagcactagagctaaatcatgaagttgaattgtaggaatttaccaccgtagtgtatctgaatcataaactagattatcatagttatctagtttatgagtcataagctagatttgattcttcaaagaagaaaagtcagtgagcaaatttaaaccagaactaagcattatattttctttttttttttttgagacagagtctcgctctgtcgcccaggctggagtgcagtggcacgatctcggcggctcactacaacctctgcctcccaggttcaaatgattctcctgcctcagcctcccgagtagctgggattacaggtgcataacacacctgggtaacttttatagagatggggtttcaccatgttggccaggctggtctcaaactcctgacctcaggtgatctgcctgcctcggcctcccaaagtgctgggattacaggcgtgagacaccacacccagccataactaagcattatgttttctaaaacttctaagatcctccctaaacccgtctggagacatgggttttagcccagactctgcctcaaactcattgtagctcccagcacattacccagttgctctgggccttggtgttatgctctgggaagtagatgttgatgctgtggccttagtgccttctggccccagcattccatgggcctgtgatcttgaccaacctgagaaaacagtaacagcccatccactggaaatacccctctgcccacagcaccacccttctgtgctgttttttttgttgtttgtttgtttcttctttttgagacagagtcttgctctgttgccacgctggagtgcagtggtgtgatctcggctcactgcaacctcccgctcccaggttcaagcaagtcccctgagtagctgggactacaggcgtgtgccaccacatccggctaattttttgcattctttaatagagacggggttttgccatgttggccaggatggtctcaatctcctgacctcatgatccacctgcctcagcctcccaaagtgctggggttacaggcatgagccaccacgcccagccttttttttttttttttttttttcttgagagacagggtcttgctctgtcacccaggcacagcttactgcagccttgaactcctgggatcaatcagtcctcctgcctcagcctcccgagtagctaagactaacaggtatgtaccaccatgcctggtttattgttttatttttttggcagagatgggtctcactgtgttgcccaggctgatctcaaactcctggcctcaagcgatcctcccatctcagcctcccaaagtgctgggattacagacctgagccaccacacctgggcaacagagtgaaacctgtccctgttttcctgctcttactctcacctctgaggcctcctctgcctggaagagattacagggaaattccaggcagcccttgtcaattgtttttatgaattctttacctgttccttttaaagacaaggaaactgaggcccaaagttctaagttgtttggcaaatggagtctcctaccctcagctcctgcaaggacctgggggacccccaggtccagcagccacatgattctgcagcagacagggacctagagcacatctggatctcagccccacccctggcaacctgcctgcctagagaactcccaagatgacagactaagtaggattctgccatttagaataattctggtatcctgggcgttgcgttaagttgcttaactttcattctgtcttacgatagtcttcagaggtgggaacagatgaagaaaccatgccccagagaaggttaagtgacttcctctttatggagccagtgttccaacctaggtttgcctgataccagacctgtggccccacctcccatgcaggtctctgtggggtctttgggatggatctcctagggctgggctggaagcctcatgtactgttgtcttctaggtaaccaccctgaagagaaggggtggcatcaggaaccgcagggaaccaagcagcctttggtccagtgctgctccttggaacagttgagtgtggcctcaaaccattctcctgggtagctcagtcataaaacaccgaatgcctgcctcaaaatagcctctgagggaagggagctgttgacaagtgaagccctcaggttgtgtgggattccagcaggttattacagcttgtggggggagggagggtccattccaccagctttgaatcccagggtcccctcagcttcactgggccacagtgtctgtcccaggaagaagcaaatggacagtgaggatgatggagagactacagctgccttgtctaaaacctgggatcttaaaagtgttattttggcttttattttttaaaaaaagaaaaggaaaattggcaa

SEQ ID NO: 183887 - DNA, 3738 bp, Homo sapiens
  Payload ID: 16234
  Gene Symbol: SLC35F6
  Gene Name: solute carrier family 35, member F6
  ENST ID: ENST00000429494
  CDS Start-End: 67-234
gcgcaggagaccccgggtgacggggcccggcgccgctaactggagcgaaccccagcgtccgccgacatggcctggaccaagtaccagctgttcctggccgggctcatgcttgttaccggctccatcaacacgctctcggcaaagcagtgggcatgttcctgggagaattctcctgcctggctgccttctacctcctccgatgcagagctgcagggcaatcagactccagcgtagacccccagcagcccttcaaccctcttcttttcctgcccccagcgctctgtgacatgacagggaccagcctcatgtatgtggctctgaacatgaccagtgcctccagcttccagatgctgcggggtgcagtgatcatattcactggcctgttctcggtggccttcctgggccggaggctggtgctgagccagtggctgggcatcctagccaccatcgcggggctggtggtcgtgggcctggctgacctcctgagcaagcacgacagtcagcacaagctcagcgaagtgatcacaggggacctgttgatcatcatggcccagatcatcgttgccatccagatggtgctagaggagaagttcgtctacaaacacaatgtgcacccactgcgggcagttggcactgagggcctctttggctttgtgatcctctccctgctgctggtgcccatgtactacatccccgccggctccttcagcggaaaccctcgtgggacactggaggatgcattggacgccttctgccaggtgggccagcagccgctcattgccgtggcactgctgggcaacatcagcagcattgccttcttcaacttcgcaggcatcagcgtcaccaaggaactgagcgccaccacccgcatggtgttggacagcttgcgcaccgttgtcatctgggcactgagcctggcactgggctgggaggccttccatgcactgcagatccttggcttcctcatactccttataggcactgccctctacaatgggctacaccgtccgctgctgggccgcctgtccaggggccggcccctggcagaggagagcgagcaggagagactgctgggtggcacccgcactcccatcaatgatgccagctgaggttccctggaggcttctactgccacccgggtgctccttctccctgagactgaggccacacaggctggtgggccccgaatgccctatccccaaggcctcaccctgtcccctccctgcagaacccccagggcagctgctgccacagaagataacaacacccaagtcctctttttctcactaccacctgcagggtggtgttacccagcccccacaagcctgagtgcagtggcagacctcagctctctggacccctcctacagcactagagctaaatcatgaagttgaattgtaggaatttaccaccgtagtgtatctgaatcataaactagattatcatagttatctagtttatgagtcataagctagatttgattcttcaaagaagaaaagtcagtgagcaaatttaaaccagaactaagcattatattttctttttttttttttgagacagagtctcgctctgtcgcccaggctggagtgcagtggcacgatctcggcggctcactacaacctctgcctcccaggttcaaatgattctcctgcctcagcctcccgagtagctgggattacaggtgcataacacacctgggtaacttttatagagatggggtttcaccatgttggccaggctggtctcaaactcctgacctcaggtgatctgcctgcctcggcctcccaaagtgctgggattacaggcgtgagacaccacacccagccataactaagcattatgttttctaaaacttctaagatcctccctaaacccgtctggagacatgggttttagcccagactctgcctcaaactcattgtagctcccagcacattacccagttgctctgggccttggtgttatgctctgggaagtagatgttgatgctgtggccttagtgccttctggccccagcattccatgggcctgtgatcttgaccaacctgagaaaacagtaacagcccatccactggaaatacccctctgcccacagcaccacccttctgtgctgttttttttgttgtttgtttgtttcttctttttgagacagagtcttgctctgttgccacgctggagtgcagtggtgtgatctcggctcactgcaacctcccgctcccaggttcaagcaagtcccctgagtagctgggactacaggcgtgtgccaccacatccggctaattttttgcattctttaatagagacggggttttgccatgttggccaggatggtctcaatctcctgacctcatgatccacctgcctcagcctcccaaagtgctggggttacaggcatgagccaccacgcccagccttttttttttttttttttttttcttgagagacagggtcttgctctgtcacccaggcacagcttactgcagccttgaactcctgggatcaatcagtcctcctgcctcagcctcccgagtagctaagactaacaggtatgtaccaccatgcctggtttattgttttatttttttggcagagatgggtctcactgtgttgcccaggctgatctcaaactcctggcctcaagcgatcctcccatctcagcctcccaaagtgctgggattacagacctgagccaccacacctgggcaacagagtgaaacctgtccctgttttcctgctcttactctcacctctgaggcctcctctgcctggaagagattacagggaaattccaggcagcccttgtcaattgtttttatgaattctttacctgttccttttaaagacaaggaaactgaggcccaaagttctaagttgtttggcaaatggagtctcctaccctcagctcctgcaaggacctgggggacccccaggtccagcagccacatgattctgcagcagacagggacctagagcacatctggatctcagccccacccctggcaacctgcctgcctagagaactcccaagatgacagactaagtaggattctgccatttagaataattctggtatcctgggcgttgcgttaagttgcttaactttcattctgtcttacgatagtcttcagaggtgggaacagatgaagaaaccatgccccagagaaggttaagtgacttcctctttatggagccagtgttccaacctaggtttgcctgataccagacctgtggccccacctcccatgcaggtctctgtggggtctttgggatggatctcctagggctgggctggaagcctcatgtactgttgtcttctaggtaaccaccctgaagagaaggggtggcatcaggaaccgcagggaaccaagcagcctttggtccagtgctgctccttggaacagttgagtgtggcctcaaaccattctcctgggtagctcagtcataaaacaccgaatgcctgcctcaaaatagcctctgagggaagggagctgttgacaagtgaagccctcaggttgtgtgggattccagcaggttattacagcttgtggggggagggagggtccattccaccagctttgaatcccagggtcccctcagcttcactgggccacagtgtctgtcccaggaagaagcaaatggacagtgaggatgatggagagactacagctgccttgtctaaaacctgggatcttaaaagtgttattttggcttttattttttaaaaaaagaaaaggaaaa

SEQ ID NO: 183888 - DNA, 3490 bp, Homo sapiens
  Payload ID: 16235
  Gene Symbol: SLC35G1
  Gene Name: solute carrier family 35, member G1
  Uniprot ID: Q2M3R5
  ENST ID: ENST00000371408
  CDS Start-End: 62-1156
agcccaggcgctgctgctggcgccagacggcaccggccgctggtagagcgcgtgccgcgagatgcggcctcaggacagcaccggggtcgcggagctccaggagcccgggctgccgctaacggacgatgcacccccgggcgccactgaggagccggcggccgccgaggcagctggggcgccagaccgcggtaggtgctggctctgcctttcctcgccgtgttgctcccgcaccgagccggccaagaagaaagcaccctgtcctggacttggcttgttttacacattattgtctgccttccttttctcagtgggctctttatttgttaaaaaagtgcaagacgtccatgctgtagagattagtgcgtttcgatgtgtgttccaaatgctagttgttatcccttgcttaatatacagaaaaactgggtttataggcccaaaaggtcaacgaattttcctcattctcagaggagtccttggttctaccgccatgatgcttatatactatgcttaccagacaatgtccctcgctgatgccacagttatcacgtttagcagtccagtgtttacgtccatatttgcttggatatgtctcaaggaaaaatatagcccttgggatgctcttttcaccgtgttcacaatcactggagtgatccttatcgtgagaccaccatttttgtttggttccgacacttcggggatggaagaaagctattcaggccaccttaagggaacattcgcagcaattggaagtgccgtatttgctgcatcgactctagttatcctaagaaaaatgggaaaatctgtggactactttctgagcatttggtattatgtagtacttggcctcgttgaaagtgtcatcatcctctctgtattaggagagtggagtctgccttactgtgggttggacaggctatttctcatattcattgggctctttggtttggggggtcagatatttatcacaaaagcacttcaaatagaaaaagcagggccagtagcaataatgaagacaatggatgtggtctttgcttttatctttcagattattttctttaataatgtgccaacgtggtggacagtgggtggtgctctctgcgtagtagccagtaatgttggagcggccattcgtaaatggtaccaaagttccaaatgaagcatcattgctgaaatacatatttttttcaagtacaccatcacctaattcacatacagcatacgcacacatctggaaaatctgcattttcttcattggttgtatttaataaattgcctaaagtaccatttttgaatatagtatgtctttagttaagaatagctagtctgtttggtgtaacaattttttggtagctttggttttggttttggttttttttgttgttgttgttggggtcaagttggtgagaggagagctcattgtttgaagaaaaaccaaaacattttatggctagtaatatttatgtaatttttaaaatgtatttttggtactgatgggatatgggtggggaggctattttagatattcttttagcagtgtagagcctaagaaacttggttctactaccatgatctttataaactatgccttccagacaattgataatgctgctataattagtattatgttgataattcatttgcaaccttattctatttaggaggatgaagttgaagcttagaataggtgcctgcttaatggtgttaataatacaaatgaattggccttattttcaaggattttataaatgattatcatacttgtaactcatatttgtgccttttcattttaatgctggaatttttattatgtcacctctaaaacacttaaattgccaaatttggctagtagttttgtttcagtggcattagcaactgcagctagcatactataattttaattgtcctcacttttttttgaaactgcactaaatttttcttaacattccaagatttcagatctctaaatcacaaagagaaatcttggcatgaccagtgtgcacgtttccatcctgaagtgttttctcttcactagaaatgtgattttctataaattccccttgaatttatagtgtgatgccaaataaaattttctcaggatcttattaggttgaaccatatgtaattgccaagattttactattttaacttagaaaaaccatcgtttcatatgattcaccctaatagatacctccattattctctaaatgaaatagaagactttggagtatatgtttttaaagtaattttttaaaatatggtaatgtattaaacttatttttatagttatgaaattatgtgtaataatgctttatgttatacattaaatgtaaagacttgtgaatccatgtttgattgactttcatagtttcctgcattgaaataaaatcactatgaattctagtttatcagcatgatgttaaatgtcagtgccataccatgatgcagcaccatgacactaacgccatgaattcaaacagcacgttttacacctggaacttcatcagaccaatactttgcagttagagagaatttaatatctagaaaagcttgggaggttagtcaggacttagggagtatacataaatggttacttgttgtaatgagccctttattggtgaggttgcaatagcttccagctcttactgtgtcagatgaagcatctgtcattatcttaagcctgcagagttgaaaggttataggctctttcctaccctctcatcataatttttccaaagcaaagaggaacttggcttctggggttcgtgccttagtgagaaagaatcttttccaatagttccaatgggggaatttttggcttgctgattttatcaattgccttgacacctgacaaaccctaaatgaagtctatgtaggtgagtcatctctgttccacctgatttacagtattggaatttagacttgcaaaaacatcattctgcaaatatcttagataattacagaatcaggagcatttgagaactctagaggtctcagaaatcatcacataggggccatgcttcgtagatagggatgatagagaggagacctgcccaagttgaatttccatggccttcctcccttccttagttccatgataaagtatggacagtaaaccactacttgagctacctaaggtgaattaactctcagggaaccctcttccagttctttaccttgcacagtgaaagaatcagtggcacctagaaagttaaatccctttaggcccatacactagagacatgttttgtttgaacaatgtagtttaagtacttgaatgtcacactatataactgaggttagagaaaatgtttcttctagcccttacagggtgtgattcttaaacacaatgtccaaggtgtatacaaggatatgtattgtaacaactatgggtatgtatattttgcagagcgtagtttctatatcttgaaaaggaaaatattttcataaattgtttttataagtactaataaaataatatgaaagaaagcta

SEQ ID NO: 183889 - DNA, 2402 bp, Homo sapiens
  Payload ID: 16235
  Gene Symbol: SLC35G1
  Gene Name: solute carrier family 35, member G1
  Uniprot ID: Q2M3R5
  ENST ID: ENST00000427197
  CDS Start-End: 62-1159
agcccaggcgctgctgctggcgccagacggcaccggccgctggtagagcgcgtgccgcgagatgcggcctcaggacagcaccggggtcgcggagctccaggagcccgggctgccgctaacggacgatgcacccccgggcgccactgaggagccggcggccgccgaggcagctggggcgccagaccgcggtaggtgctggctctgcctttcctcgccgtgttgctcccgcaccgagccggaagccaagaagaaagcaccctgtcctggacttggcttgttttacacattattgtctgccttccttttctcagtgggctctttatttgttaaaaaagtgcaagacgtccatgctgtagagattagtgcgtttcgatgtgtgttccaaatgctagttgttatcccttgcttaatatacagaaaaactgggtttataggcccaaaaggtcaacgaattttcctcattctcagaggagtccttggttctaccgccatgatgcttatatactatgcttaccagacaatgtccctcgctgatgccacagttatcacgtttagcagtccagtgtttacgtccatatttgcttggatatgtctcaaggaaaaatatagcccttgggatgctcttttcaccgtgttcacaatcactggagtgatccttatcgtgagaccaccatttttgtttggttccgacacttcggggatggaagaaagctattcaggccaccttaagggaacattcgcagcaattggaagtgccgtatttgctgcatcgactctagttatcctaagaaaaatgggaaaatctgtggactactttctgagcatttggtattatgtagtacttggcctcgttgaaagtgtcatcatcctctctgtattaggagagtggagtctgccttactgtgggttggacaggctatttctcatattcattgggctctttggtttggggggtcagatatttatcacaaaagcacttcaaatagaaaaagcagggccagtagcaataatgaagacaatggatgtggtctttgcttttatctttcagattattttctttaataatgtgccaacgtggtggacagtgggtggtgctctctgcgtagtagccagtaatgttggagcggccattcgtaaatggtaccaaagttccaaatgaagcatcattgctgaaatacatatttttttcaagtacaccatcacctaattcacatacagcatacgcacacatctggaaaatctgcattttcttcattggttgtatttaataaattgcctaaagtaccatttttgaatatagtatgtctttagttaagaatagctagtctgtttggtgtaacaattttttggtagctttggttttggttttggttttttttgttgttgttgttggggtcaagttggtgagaggagagctcattgtttgaagaaaaaccaaaacattttatggctagtaatatttatgtaatttttaaaatgtatttttggtactgatgggatatgggtggggaggctattttagatattcttttagcagtgtagagcctaagaaacttggttctactaccatgatctttataaactatgccttccagacaattgataatgctgctataattagtattatgttgataattcatttgcaaccttattctatttaggaggatgaagttgaagcttagaataggtgcctgcttaatggtgttaataatacaaatgaattggccttattttcaaggattttataaatgattatcatacttgtaactcatatttgtgccttttcattttaatgctggaatttttattatgtcacctctaaaacacttaaattgccaaatttggctagtagttttgtttcagtggcattagcaactgcagctagcatactataattttaattgtcctcacttttttttgaaactgcactaaatttttcttaacattccaagatttcagatctctaaatcacaaagagaaatcttggcatgaccagtgtgcacgtttccatcctgaagtgttttctcttcactagaaatgtgattttctataaattccccttgaatttatagtgtgatgccaaataaaattttctcaggatcttattaggttgaaccatatgtaattgccaagattttactattttaacttagaaaaaccatcgtttcatatgattcaccctaatagatacctccattattctctaaatgaaatagaagactttggagtatatgtttttaaagtaattttttaaaatatggtaatgtattaaacttatttttatagttatgaaattatgtgtaataatgctttatgttatacattaaatgtaaagacttgtgaatccatgtttgattgactttcatagtttcctgcattgaaataaaatcactatgaattct

SEQ ID NO: 183890 - DNA, 3036 bp, Homo sapiens
  Payload ID: 16235
  Gene Symbol: SLC35G1
  Gene Name: solute carrier family 35, member G1
  ENST ID: ENST00000483386
  CDS Start-End: 44-184
ggcgccagacggcaccggccgctggtagagcgcgtgccgcgagatgcggcctcaggacagcaccggggtcgcggagctccaggagcccgggctgccgctaacggacgatgcacccccgggcgccactgaggagccggcggccgccgaggcagctggggcgccagaccgcgccacattgctgtgaggaagcctgggctacatggagaagcccacatgaagaggcccatgtggagaggaactgaggccctgacacttggccccatctgcactaccagctgatagccagcatgagcctgccagccaggccagcacagtggctcacacctgtaatcccagcatttcgggaggccaaggtggccagatcacttgagtccaggagtttaaggctgcaatgagctacgatcgcgccactgcactccagcctgggtgacagtacgagatacaacagatgaacacacttcctgtttatgtgctttagttcctttgtatgtgcattttagaaaagtcagaagtctttggtactttgcagcatgtgtgcattggtacaacttctaggaagggcaatttggcaccatctatcagatttacttatgtgcaaaatgatatgtacaagtttattccagcctgatttgtaatagcaagaagaaatggaactagcctgaatgtccctcaatagagtactggttaagtaagtcatggtatatacccaaaataaaatgtaatgcaattaaaaataaatttaagaagagcaaggaagctttccatatatgggtgtggaataatgtccaaaattgttaagtgaaaaagcaaaattcatatcatggttgagtatgtgctcatttgtataaaaagagggtaaacagaatattccaggaggatatgcaagaaactgttaacattggttgcctttggcagctgaagggcgaggtgagaggagactttccactgaatccccttttacaccttttgaattttgaaccaggtgggtaaataacttagtcaaaataaaataaaataaaataaaataaaataaaattggtggaacaaaaataaaaaggtgacttgatggaaaagaaaggagaaagaaaaggagtaaaagacatagggagctacatatatacattatgtcatacatacatacatgcatagagagatgtttactgctttaatctgggctgtcaccctgactcaccttacggacttccttttgctccctcctcttttgcctcatagagtctgcagaccatacttaaattcccacatctccatgattgaagggaatataaagatgaaactgaagttcacctttttaataggactatatcctccaagatcctagaaagcgttgtgtggccctgattcagatgtctgctttcctatggcaccaaaacaatttttacttggaaaggacactaacatttattgaataaacctcatcccagccaagagcttcttaatctttgtctcattccctcaccaaccttgggagatagactgattgggaactgaagttcaaagaggttgaatggggttacctacctgctaaattctagtcccctcactagtaaatgatgaggttgggccatgaggtctgcctgactccaaagaccttgccctttccaatacttcatgctgcctccataattgagggtggtagaatgcagaacagggagtcatttgtcactgtggtggagaaagagttggtttttgactttgggatttagggatacatatgtcctccttcctccttcccctcctagagcaagagctagaagcgaaagaatagaaggtgatgacaacactgcatatatttcagttttatttcttccgatctactaattaacatttgttgggcagtagccataaacaatcctagccaatgcaaggaaacaccaaatattgtcaagccctcacattggtcataactggaagcaaacatgacatatatggactatataatcagtttgcgtgggctacagcaagatgttgcccaagagcctaggcatgagctggcttcctacggcctccaagcaggaaagaatggagctatacacagtcatctgaatatacagaagtgaaccctgggccagccacattcagccgtaacttccccagactgtttctacaggtgcagtgtgccaatcagaagaaaggtggccaggctcaggagaaaggacaggagagtgactctggcaggcttgctccattgtagagatgagatacaccaagatagtgacttcccagcttttctccccaaagcacccctaatagctgagaagaatctggaggcatagctaccatcacagctacactaaccaccatactttactgtatccttcaggtgtctgtcctagctagttttgtggtctggctccttcagtccctgcaacaagcctgtttattttcattatattgatgaggttatagagcttggacaagttacatgacttttcgaagatcacatagctaataagtgtcaagagtcttattctcaaaaccctggtctgtccaactacaagcctgtgctcctgactccactattctgcttaccctaagcctaaagctgcccacttcaagctcaaatcctcttggaggcttcatgctttaaaaaaaaaaaatccatgcaattttttgcatcctaattaataatatatctgtgtgttttagtgtaaatttttttttttaaattaccaattcagttatttagctttttattccccaaatctttggtaccctaggcagatgtgtcatatttatcctgggctttatgtacctctggtttgagggactcttgaacttcattttaagaaacatggcccaatgagtacacagtcaagtcttcatgtccctgaacactgcattacaaaatcagcactccttgttctttgtatatttgtgttatcaaataactatgtgattataatctggcttctcatataccataagtgcagaagagaatcaaaagattgagtacctgattccctaaactgtcaaatttcccgttgtatattaataaaatttgtatcgtttcacaaa

SEQ ID NO: 183891 - DNA, 2122 bp, Homo sapiens
  Payload ID: 16235
  Gene Symbol: SLC35G1
  Gene Name: solute carrier family 35, member G1
  ENST ID: ENST00000603665
  CDS Start-End: 13-204
gcgtgccgcgagatgcggcctcaggacagcaccggggtcgcggagctccaggagcccgggctgccgctaacggacgatgcacccccgggcgccactgaggagccggcggccgccgaggcagctggggcgccagaccgcggtaggtgctggctctgcctttcctcgccgtgttgctcccgcaccgagccggccacattgctgtgaggaagcctgggctacatggagaagcccacatgaagaggcccatgtggagaggaactgaggccctgacacttggccccatctgcactaccagctgatagccagcatgagcctgccagccagagtctgcagaccatacttaaattcccacatctccatgattgaagggaatataaagatgaaactgaagttcacctttttaataggactatatcctccaagatcctagaaagcgttgtgtggccctgattcagatgtctgctttcctatggcaccaaaacaatttttacttggaaaggacactaacatttattgaataaacctcatcccagccaagagcttcttaatctttgtctcattccctcaccaaccttgggagatagactgattgggaactgaagttcaaagaggttgaatggggttacctacctgctaaattctagtcccctcactagtaaatgatgaggttgggccatgaggtctgcctgactccaaagaccttgccctttccaatacttcatgctgcctccataattgagggtggtagaatgcagaacagggagtcatttgtcactgtggtggagaaagagttggtttttgactttgggatttagggatacatatgtcctccttcctccttcccctcctagagcaagagctagaagcgaaagaatagaaggtgatgacaacactgcatatatttcagttttatttcttccgatctactaattaacatttgttgggcagtagccataaacaatcctagccaatgcaaggaaacaccaaatattgtcaagccctcacattggtcataactggaagcaaacatgacatatatggactatataatcagtttgcgtgggctacagcaagatgttgcccaagagcctaggcatgagctggcttcctacggcctccaagcaggaaagaatggagctatacacagtcatctgaatatacagaagtgaaccctgggccagccacattcagccgtaacttccccagactgtttctacaggtgcagtgtgccaatcagaagaaaggtggccaggctcaggagaaaggacaggagagtgactctggcaggcttgctccattgtagagatgagatacaccaagatagtgacttcccagcttttctccccaaagcacccctaatagctgagaagaatctggaggcatagctaccatcacagctacactaaccaccatactttactgtatccttcaggtgtctgtcctagctagttttgtggtctggctccttcagtccctgcaacaagcctgtttattttcattatattgatgaggttatagagcttggacaagttacatgacttttcgaagatcacatagctaataagtgtcaagagtcttattctcaaaaccctggtctgtccaactacaagcctgtgctcctgactccactattctgcttaccctaagcctaaagctgcccacttcaagctcaaatcctcttggaggcttcatgctttaaaaaaaaaaaatccatgcaattttttgcatcctaattaataatatatctgtgtgttttagtgtaaatttttttttttaaattaccaattcagttatttagctttttattccccaaatctttggtaccctaggcagatgtgtcatatttatcctgggctttatgtacctctggtttgagggactcttgaacttcattttaagaaacatggcccaatgagtacacagtcaagtcttcatgtccctgaacactgcattacaaaatcagcactccttgttctttgtatatttgtgttatcaaataactatgtgattataatctggcttctcatataccataagtgcagaagagaatcaaaagattgagtacctgattccctaaactgtcaaatttcccgttgtatattaataaaatttgtatcgtttc

SEQ ID NO: 183892 - DNA, 726 bp, Homo sapiens
  Payload ID: 16235
  Gene Symbol: SLC35G1
  Gene Name: solute carrier family 35, member G1
  ENST ID: ENST00000494992
  CDS Start-End: 33-224
gcaccggccgctggtagagcgcgtgccgcgagatgcggcctcaggacagcaccggggtcgcggagctccaggagcccgggctgccgctaacggacgatgcacccccgggcgccactgaggagccggcggccgccgaggcagctggggcgccagaccgcggtaggtgctggctctgcctttcctcgccgtgttgctcccgcaccgagccggccacattgctgtgaggaagcctgggctacatggagaagcccacatgaagaggcccatgtggagaggaactgaggccctgacacttggccccatctgcactaccagctgatagccagcatgagcctgccagccaggtaagaggacatgaattgccttggagttttaccctaaaggttgtggatcaggaaaggtcctaaacaaagcacaggggaatggcactaatctcaccagtaaggtgtgtagccaaaccagctgttccctgttaagaactgtaaaatagcctcaggcaggtccttcaggaggtatggacaagaaggcattgctatcacaggagacgacagctccatgcatgttcctgtccctgaaggccttccagtcagtcaagatgtggaggcggaagacagtgatataaatgatcctgaccctggtgcagtgactacatgtatgaaataagcctgcatgagtgttatatcaagataaaagggtcatatatgtgccataattggtcatcgaatg

SEQ ID NO: 183893 - DNA, 726 bp, Homo sapiens
  Payload ID: 16235
  Gene Symbol: SLC35G1
  Gene Name: solute carrier family 35, member G1
  ENST ID: ENST00000605679
  CDS Start-End: 34-225
ggcaccggccgctggtagagcgcgtgccgcgagatgcggcctcaggacagcaccggggtcgcggagctccaggagcccgggctgccgctaacggacgatgcacccccgggcgccactgaggagccggcggccgccgaggcagctggggcgccagaccgcggtaggtgctggctctgcctttcctcgccgtgttgctcccgcaccgagccggccacattgctgtgaggaagcctgggctacatggagaagcccacatgaagaggcccatgtggagaggaactgaggccctgacacttggccccatctgcactaccagctgatagccagcatgagcctgccagccaggtaagaggacatgaattgccttggagttttaccctaaaggttgtggatcaggaaaggtcctaaacaaagcacaggggaatggcactaatctcaccagtaaggtgtgtagccaaaccagctgttccctgttaagaactgtaaaatagcctcaggcaggtccttcaggaggtatggacaagaaggcattgctatcacaggagacgacagctccatgcatgttcctgtccctgaaggccttccagtcagtcaagatgtggaggcggaagacagtgatataaatgatcctgaccctggtaggctaatgtgtgtatttgtgtcttagtttttaagaaaaaagtttaaaaggtaaataaaataaaaaatattaaaaatagaaaaaaa

SEQ ID NO: 183894 - DNA, 1577 bp, Homo sapiens
  Payload ID: 16236
  Gene Symbol: SLC35G2
  Gene Name: solute carrier family 35, member G2
  Uniprot ID: Q8TBE7
  ENST ID: ENST00000393079
  CDS Start-End: 150-1388
aggcgcagagtccgcgcggcggcgcccctctccctccgcagtactccgggcagcgcccgcctcgattttcccaggcgagggcacgcccgcgtcagtcgcctccggggcaccttcctcgccacgacacgcagaattgattatctgaagaaatggatacttctccctccagaaaatatccagttaaaaaacgggtgaaaatacatcccaacacagtgatggtgaaatatacttctcattatccccagcctggcgatgatggatatgaagaaatcaatgaaggctatggaaattttatggaggaaaatccaaagaaaggtctgctgagtgaaatgaaaaaaaaagggagagctttctttggaaccatggataccctacctccaccaacagaagacccaatgatcaatgagattggacaattccagagctttgcagaaaaaaacatttttcaatcccgaaaaatgtggatagtgctgtttggatctgctttggctcatggatgtgtagctcttatcactaggcttgtttctgatcggtctaaagttccatctctagaactgatttttatccgttctgtttttcaggtcttatctgtgttagttgtgtgttactatcaggaggccccctttggacccagtggatacagattacgactcttcttttatggtgtatgcaatgtcatttctatcacttgtgcttatacatcattttcaatagttcctcccagcaatgggaccactatgtggagagccacaactacagtcttcagtgccattttggcttttttactcgtagatgagaaaatggcttatgttgacatggctacagttgtttgcagcatcttaggtgtttgtcttgtcatgatcccaaacattgttgatgaagacaattctttgttaaatgcctggaaagaagcctttgggtacaccatgactgtgatggctggactgaccactgctctctcaatgatagtatacagatccatcaaggagaagatcagcatgtggactgcactgtttacttttggttggactgggacaatttggggaatatctactatgtttattcttcaagaacccatcatcccattagatggagaaacctggagttatctcattgctatatgtgtctgttctactgcagcattcttaggagtttattatgccttggacaaattccatccagctttggttagcacagtacaacatttggagattgtggtagctatggtcttgcagcttctcgtgctgcacatatttcctagcatctatgatgtttttggaggggtaatcattatgattagtgtttttgtccttgctggctataaactttactggaggaatttaagaaagcaggactaccaggaaatactagactctcccattaaatgaatacctgattattattgtctcattaatgttcagttattatgtatactgccattttaatgtttacctatgaatgtcttttgtgttatataactgacagagtgctataaaatatataatatatacaaatgcagaaaatttattctagtctaatatattcaaatacaaatattaaatatatgaaatacgtta

SEQ ID NO: 183895 - DNA, 2060 bp, Homo sapiens
  Payload ID: 16236
  Gene Symbol: SLC35G2
  Gene Name: solute carrier family 35, member G2
  Uniprot ID: Q8TBE7
  ENST ID: ENST00000446465
  CDS Start-End: 629-1867
cccgcagtctccaactccggcgccagtcaggttgtggggtgggggcggcggagggcggagagcgcaggcgcagagtccgcgcggcggcgcccctctccctccgcagtactccgggcagcgcccgcctcgattttcccaggcgagggcacgcccgcgtcagtcgcctccggggcaccttcctcgccacgacacgcaggtaaccgggccccgggagccggtcggcggcggcggactgggaccttgatcctgcctgcccggccgcccgacaagggaatgagagcggaccccgaactccacacacccgcgtttagccgccacacctaaggggcacaacagtctttttgggtaagggccgggctgggggcgacgcgccccgcccgctttgcagacttcggggtgctctgcacgacgcctgaaaggccgcggggcccgcatttctctgtgctgccctcctggagaaccgggacacggggacgggagggccagcatcggctacggcccggtttcccgtttctttccgctgtcgcgtgtctgggccctcctgcagcgtccatgatgaaggccaggggctgttgctttcctctcgcccagtagccaacccaagcaagggaattgattatctgaagaaatggatacttctccctccagaaaatatccagttaaaaaacgggtgaaaatacatcccaacacagtgatggtgaaatatacttctcattatccccagcctggcgatgatggatatgaagaaatcaatgaaggctatggaaattttatggaggaaaatccaaagaaaggtctgctgagtgaaatgaaaaaaaaagggagagctttctttggaaccatggataccctacctccaccaacagaagacccaatgatcaatgagattggacaattccagagctttgcagaaaaaaacatttttcaatcccgaaaaatgtggatagtgctgtttggatctgctttggctcatggatgtgtagctcttatcactaggcttgtttctgatcggtctaaagttccatctctagaactgatttttatccgttctgtttttcaggtcttatctgtgttagttgtgtgttactatcaggaggccccctttggacccagtggatacagattacgactcttcttttatggtgtatgcaatgtcatttctatcacttgtgcttatacatcattttcaatagttcctcccagcaatgggaccactatgtggagagccacaactacagtcttcagtgccattttggcttttttactcgtagatgagaaaatggcttatgttgacatggctacagttgtttgcagcatcttaggtgtttgtcttgtcatgatcccaaacattgttgatgaagacaattctttgttaaatgcctggaaagaagcctttgggtacaccatgactgtgatggctggactgaccactgctctctcaatgatagtatacagatccatcaaggagaagatcagcatgtggactgcactgtttacttttggttggactgggacaatttggggaatatctactatgtttattcttcaagaacccatcatcccattagatggagaaacctggagttatctcattgctatatgtgtctgttctactgcagcattcttaggagtttattatgccttggacaaattccatccagctttggttagcacagtacaacatttggagattgtggtagctatggtcttgcagcttctcgtgctgcacatatttcctagcatctatgatgtttttggaggggtaatcattatgattagtgtttttgtccttgctggctataaactttactggaggaatttaagaaagcaggactaccaggaaatactagactctcccattaaatgaatacctgattattattgtctcattaatgttcagttattatgtatactgccattttaatgtttacctatgaatgtcttttgtgttatataactgacagagtgctataaaatatataatatatacaaatgcagaaaatttattctagtctaatatattcaaatacaaatattaaatatatgaaatacgttatgaa

SEQ ID NO: 183896 - DNA, 2004 bp, Homo sapiens
  Payload ID: 16237
  Gene Symbol: SLC35G3
  Gene Name: solute carrier family 35, member G3
  Uniprot ID: Q8N808
  ENST ID: ENST00000297307
  CDS Start-End: 217-1233
gcgagaaacacccaagaatgatcaataaaaaaaaacaaaaaacaaaaaaagaaagaaaagaagcagagttggactcagtgggaaaataggcgtgctaccacctcaggagagttccagggaagaatcccacccccactccaatgaggtcacaatggctggagctctgaggggcccaggctccctgagccaggaggagaggagaaagtccaaggaaagatggctggcagtcacccctatttcaaccagcctgactccacacacccatcgccgccctccgctccacccagcctccgctggtaccagcgctgccagccctctgatgccaccagtggcctgctggtggccctgctgggtgggggcctgcctgctggcttcgtgggccccctttctcgtatggcttaccaggcttccaacctgccctcgctggagctgctcatctggcgatgcctcttccacctccctattgccctgctacttaaactgcgtggcgacccccttctgggaactcctgacatccgaagccgggccttcttctgtgccctgctcaacatcctcagcattggatgtgcctacagtgcggttcaggtggtgcccgctggcaacgctgccactgttcgcaaaggttcttccaccgtctgctccgccgtcctcactctctgccttgagagccagggtctcagtggctacgactggtgtggactgttgggctgcatcctaggactaatcatcattgtgggacctggactctggacactacaggaggggaccacgggtgtctacaccgccctgggctatgtggaggctttcctgggaggcctggcgctgtccctgaggcttctggtctatcgttctctgcactttcccccctgcctcccaacagtggccttcctatctggcttggtggggctgctgggctctgtgccaggcctctttgtgctgcaggcccccgtgttgcccagtgacctcctgagttggagttgtgtgggggcagtggggatcctcgccttggtctccttcacatgtgtgggctatgcggtcaccaaggcccaccctgccctggtgtgcgctgtcctacattccgaggtggttgtggcccttatactgcagtattatatgctccatgagactgtggcaccttctgacatcgtggcggcaggggttgtgctgggcagcattgccatcattacagcccagaacctcagctgtgagaggacagggagggtggaggagtgagatagaacttgggagcccgggggttgggagggacagggataaataaaggcaaagactgaagacaaacatgggaggagaagtgactggaaaagaactggtgtgggagagggatacctctcagagtcaagggtgacttggggacttggtggagagggactacgtggaagacctggggccagcctgggaccaagggatgtggagtccaggctgggtcctagaatcagggcataactaaggggtaaagtctgaggagcagatccaaagggctgaggcagggaggccgtgggccatggggaggacttcactcagcagcaaagagaagagcattggggctggagtgttccggcaaagacagagccagcagctgcgctgggggagggaagcgtgcctccccacccctcccctcacggggaaggtttcctttcctcgtgcttgtgccccccgcttggggtggtgacgtgacattgacatcaaacaaggattacagtgaatgtgaaaaaaaaaaaaaaagatacctgaatagacatttctatgacattttaaaagccatgaatttattttggcacaaatattttatcatatgcagtcacttctttgtaaatgattttttgtaaagtcattggatataaaagagtgattttcctcacctgagtacatgaaaagaaaatgctgaaatcaatgtataaatcaaatcatctgtactagcactgttaatctagaagaaagtggttgcatagagaagagtaagaatgtagaccagcttattgaagt

SEQ ID NO: 183897 - DNA, 1321 bp, Homo sapiens
  Payload ID: 16238
  Gene Symbol: SLC35G5
  Gene Name: solute carrier family 35, member G5
  Uniprot ID: Q96KT7
  ENST ID: ENST00000382435
  CDS Start-End: 220-1236
gcgagaaacacccaagaatgatcaattaaaaaaaaaaaaaagaaagaaagaaagaaagaaaagaagcagagttggactcagcgggaaaataggcgtgctaccacctcaggagagttccagggaagaaccccacccgcactccaatgaggtcacaatggctggagctctgaggggcccaggctccctgagccaggaggagaggagaaagtccaaggaaagatggctggcagtcacccctacttcaacctgcctgactccacacacccatcgccgccctccgctccacccagcctccgctggcaccagcgctgccagccctctggtgccaccaatggcctgctggtggccctgctgggtgggggcctgcctgctggcttcgtgggccccctttctcgtatggcttaccagggttccaacctgccctcgctggagctgctcatctgtcgatgcctcttccacctccctattgccctgctacttaaactgcgtggcgacccccttctgggacctcctgacatccgaggctgggcctgcttctgtgccctgctcaacgtcctcagcattggatgtgcctacagtgcagttcaggtggtgcccgctggcaacgctgccactgttcgcaaaggttcttccaccgtatgctccgctgtcctcaccctctgccttgagagccagggtctcggtggctacgagtggtgtggactgttgggcagcatcctaggactaatcatcattctgggacctggactctggacactacaggaggggaccacaggtgtctacaccaccctgggctatgtgcaggctttcctgggaggcctggcgctgtccctggggcttctggtctatcgttctctgcactttccctcctgcctcccaacagtggccttcctatctggcttggtggggctgctgggctgtgtgccaggcctctttgtgctgcagacccccgtgttgcccagtgacctcctgagttggagttgtgtgggggcagaggggatcctcgccttggtctccttcacatgtgtgggctatgcggtcaccaaggcccaccctgccctggtgtgcgctgtcctgcattccgaggtggttgtggcccttatactgcagtattatatgctccatgagactgtggcactttctgacatcatgggggcaggggttgtgctgggcagcattgccatcattacagcccggaacctcagctgtgagaggacagggaaggtggaggagtgagatagaacttgggagcccgggggttgggagggacagggataaataaagacaaagactgaagacaaaaaaaaaataaaagaaaaaa

SEQ ID NO: 183898 - DNA, 1697 bp, Homo sapiens
  Payload ID: 16239
  Gene Symbol: SLC35G6
  Gene Name: solute carrier family 35, member G6
  Uniprot ID: P0C7Q6
  ENST ID: ENST00000412468
  CDS Start-End: 186-1202
aaacaaaaaaagaaagaaagaaagaaaagaagcagagttggactcagcgggaaaataggcgtgctaccacctcaggagagttccagggaagaaccccacccccactccaaccatgtcacaatggctggagctctgaggggcccaggctccctgagccaggaggagaggagaaagtccaaggaaagatggctggcagtcacccctacttgaacccgcctgactccacacacccatcgccgccctccgctccacccagcctccgctggcaccagtgctgccagccctctgatgccaccaatggcctgctggtggccctgctgggtgggggcctgcctgctggcttcgtgggccccctttctcatatggcttaccaggcttccaacctgccctcgctggagctgctcatctgtcgatgcctcttccacctccctattgccctgctacttaaactgcgtggcgacccccttctgggacctcctgacatccgaggccgggcctacttctatgccctgctcaacgtcctcagcattggatgtgcctacagtgcggttcaggtggtgcccgctggcaacgctgccactgttcgcaaaggttcttccaccgtctgctccgccgtcctcaccctctgccttgagagccagggtctcagtggctacgactggtgtggactgttgggcagcatcctaggactaatcatcattgtgggacctggactctggacactacaggaggggatcacgggtgtctacaccgccctgggctatgggcaggctttcgtgggaggactggcgctgtccctggggcttctggtctatcgttctctgcactttccctcctgcctcccaacagtggccttcctatctggcttggtggggctgctgggctctgtgccaggcctctttgtgctgcagccccccgtgttgcccagtgatctcccgagttggagttgtgtgggggcagtggggatcctcgccttggtctccttcacatgtgtgagctatgcggtcaccaaggcccaccctgccctggtgtgcgctgtcctgcattccgaggtggtggtggcccttatactgcagtattatatgctccatgagactgtggcaccttctgacatcgtgggggcaggggttgtgctgggcagcattgccatcatcacagcctggaacctcagctgtgagagggaagggaaggtggaggagtgagatagaacttgggagcccgggggttgggagggacagggataaatagaggcaaagactgaagacaaacatgggaggagaagtgactggaaaagaactggtgtgggagagggatacctctcagagtcaagggtgacttggggacttggtggagagggactacctggaagacctggggccagcctgggaccaagggatgtggagaccaggctgggtcctggaatcagggcataactaaggggtaaagtctgaggagcagatccaaacggctgaggcagggaggccgtgggccacggggaggacttcactcagcagcaaagagaagagcattggggctggagtgttccggcaaagacagagccagcagctgcggtgggggaggggagcgtgcctccccacccctcccctcacggcaaaggtttcctttcctcgtgcttgtgccccccccttggggtggtgacgtgacattgacatcaaacaaggattactctgaatgtg

SEQ ID NO: 183899 - DNA, 5781 bp, Homo sapiens
  Payload ID: 16240
  Gene Symbol: SLC36A1
  Gene Name: solute carrier family 36 (proton/amino acid symporter), member 1
  Uniprot ID: Q7Z2H8
  ENST ID: ENST00000243389
  CDS Start-End: 224-1654
acgtgatgaggtccggaagcggctgccgggcagcaaaggaggatggcgaggggctgatactgaacccgggaagggtgggctgtgctgaagccagagccggagccggagctggggccagaacccgagcagtgagttcctccactggctgccggctggcggcgctcgccgccttgggcaggacccacctcgccttcctcccggcgtggcagatgctccagctgccatgtccacgcagagacttcggaatgaagactaccacgactacagctccacggacgtgagccctgaggagagcccgtcggaaggcctcaacaacctctcctccccgggctcctaccagcgctttggtcaaagcaatagcacaacatggttccagaccttgatccacctgttaaaaggcaacattggcacaggactcctgggactccctctggcggtgaaaaatgcaggcatcgtgatgggtcccatcagcctgctgatcataggcatcgtggccgtgcactgcatgggtatcctggtgaaatgtgctcaccacttctgccgcaggctgaataaatcctttgtggattatggtgatactgtgatgtatggactagaatccagcccctgctcctggctccggaaccacgcacactggggaagacgtgttgtggacttcttcctgattgtcacccagctgggattctgctgtgtctattttgtgtttctggctgacaactttaaacaggtgatagaagcggccaatgggaccaccaataactgccacaacaatgagacggtgattctgacgcctaccatggactcgcgactctacatgctctccttcctgcccttcctggtgctgctggttttcatcaggaacctccgagccctgtccatcttctccctgttggccaacatcaccatgctggtcagcttggtcatgatctaccagttcattgttcagaggatcccagaccccagccacctccccttggtggccccttggaagacctaccctctcttctttggcacagcgattttttcatttgaaggcattggaatggttctgcccctggaaaacaaaatgaaggatcctcggaagttcccactcatcctgtacctgggcatggtcatcgtcaccatcctctacatcagcctggggtgtctggggtacctgcaatttggagctaatatccaaggcagcataaccctcaacctgcccaactgctggttgtaccagtcagttaagctgctgtactccatcgggatctttttcacctacgcactccagttctacgtcccggctgagatcatcatccccttctttgtgtcccgagcgcccgagcactgtgagttagtggtggacctgtttgtgcgcacagtgctggtctgcctgacatgcatcttggccatcctcatcccccgcctggacctggtcatctccctggtgggctccgtgagcagcagcgccctggccctcatcatcccaccgctcctggaggtcaccaccttctactcagagggcatgagccccctcaccatctttaaggacgccctgatcagcatcctgggcttcgtgggctttgtggtggggacctatgaggctctctatgagctgatccagccaagcaatgctcccatcttcatcaattccacctgtgccttcatatagggatctgggttcgtctctgcagctgcctacccctgccccatgtgtcccccgttacctgtcctcagagcctcaggtatggtccaggctctgaggaaagtcagggttgctgtgtgggaacccctctgcctggcacctggataccctgggccaggtaacctgagggcaggggagaggtggggtggcagacacgcagaagtgctactagtgacagggctgccatcgctcacctgtacctatttacacccagaactttccagctccccctcatcatgcctcctccttcctacctgcctcccctctgctggtgcacctcgcccaactcattcttactgcacagttcactttatttaacaattttcatgtcccccacctcatgttttcaccttttctgggccaggcatagattaagtaactgggaacgccccctctttataaagctgggcttctttctcatctctctcccaaatgttgtatctcagtattcttcctattcgagtctccagggggtggctggacctacctggtcatttgaaacaggcccccaagctggagtttttaatctggactctctggcttgctgtgacccctaaggcaatgcttctcttccctggattccttagtgtgggtcacagtactgtgttcttagttgctttagctcttaaaacatacgaagtgttgcctaaactgaaaatatttatcttttatttaaaatcagatttttgtttttagactgtcttagatctggggctattacgaatcacttcttcttcagtaaactttgactcaacttctcctgctgaaaagaagctcgctccagatgtctgcatgggtcctcggcactcttggctgaggactcaaaggttttaatcaggatcgtctaaaaatgtacctcggtgaggaggcacagattttgcctcctgttgaccagcctggtttcataccgaaaagacattgaaggactgcagaaatgtatgggtgcaccgggccgagggaagggtggctgagtgagaggcgtataaaatggggctgtgtgcatgcaggcccatgtttcagcctcagcccacgccaggtgaaaggatcagcaatgctctgttgccatcgtgctgggacgacaccagctctattgccaccgatgagtagctgaggtcagtgtgcacagagtttgaaattaagttaatagactttacagcagctggtctgacactacgcgcagtgctcggttgtttacaatcagtggggaaaagggcagaaccagtgcccggccccacactgcctctgtggcctggactttgaaaggaacccactgaacactaattatgagccctgtctttcccccagaatgcctccctgggtttcacaaacagccttgaggttggccctcctcaaggtcagccttcagatttgggagcaaacttcagagaaggcagaggaagatacattgccttgctgtgggctgcctcttctttcctcttggtgtgcgaagtatttcagaaggccattgatgaattccccctctttagctgtgtatttgtgcacgtgtgtgtgtacgtgcgtgtgtgtgtgtgttcctgtgtaagtaacagaccagactccttttctcttctgtcccgtcaccaggctcttgcttcactgcagatacagttcactctgaaagctggttgaaggagagcagcaaaaatgtatcaggggttttgcttctgtgtttcgccaaagctcataagggctgtgacccacccatatggccccagttttttctgtctcttctgttccaaagccaggagagctgacttccaggtgaagggatgggaaaagtggactctcattgtagtgactcccaacctacctaataatttgttaacttaggaatatgctatcattgttgacttgttcttccttaggagaaggacgattttcacccaccctttctgttctatggtggactcttaacaggtgctatgtgaccaggaatctagccgggagtagcagaggccctgtcttctgaagtctcaggcttagaagttaccaaagtgggctcagaaactgtcatctcctggttccaagttcgggctctggcagcccagccgctatcttagctgtctttcccagcggtgctaagagtggtctcagtgagaaggtagatgccaactggagggccagacctgtgtcctgcccatgtcctccttggtggacgtttctgtttactcagagctgctagagaccatcctgcccatccgagttctgagattgggactgtgatgttgggacctgaggactggatggtagaatactggggtcccccagctcttagcaggatgcaggctattgcttccacacccctggccgtgagaacgtggtatgtaggagagttggctgtagctttaggatttctggaagccaatttggcatggcctatttgatctctggcttgtgctcctgctacactgacagactgattgcgtggctctttcagaagacccaggaagggcagctccagccagaggaccttcctggctatgcaggtgcacagctcttaggcatcaagcaaagggtcagccagtcagtagtagtgggaggaagcccttcctcctcttatgcaagcagctcgcagccagcccagaatctcttatgcagcccaaagggcttcttgaggtagagagccctccccagtgtcttcccaggataagtagaaatatgatcacagagcaacggagcaaaggctttcgggagtgtgaggctgcatctgctggagcaaagggaaaccgtgggcttttccggccagatactcttgagctctgtgaccctgctcctgtcaccccaatttctccaagccagaggtagctttctcagagccccttggtggttctgtcctccaaatgctgctgttgggagcgggcttccagctctcagtgggcagtgcacctcctcctaaatgcaggcacttgctaggaagagtgtgagctggcgtcttctgttcaccctgcctagcagttgtcaccattcacaagtggcattatttatgttgtgctgctgtccagctgctaagatcccttcatctgcacaagccctggctagatatgtgtgaatgtgtggcatcatttcacttcagccgcccaattccatctctcctctgcagccagattcactggctgatgctcactgctcactgtctatccccacgaaatttagttttatcagtagtcttaaagtgttgatctcaaacaagtacattagaaaaatcatgtttcttctctctcatcttactttttcttctcagatttctcccttcctagaacattctctctgtttagcactaatgttcacctcgtattttttggaagtgcaaaaatctcaatttgtgtctgtttacagctctctctcctcactgctcacagcaaggggttctgtatcagtggatttcattttgtagctgctgagatgttaaggcaagcctcagcatctgcccctgctgggtgcacaatgctgcttcctcgaagagaagacacagagtccaagtggcaggacttgaggttggcttccactctgccttagaagttaattttccaaagtacattacaaatctctgaggccattaggggaaaaggaaggggtgtggtttgtctttgaaattacggttaatacttttagacagtaagtccggctggttgcagggctatttgccccgacagcatcagcctgtaacatttcttctctttcctttgtgccactgagtcgttccctggccagaggacataaatggtgctggtaggaggttatcagagtaaggaaggtagcagatataggtgcagggtgcctgtcattcactgtgttatttggtttaaatcaaagtgattctgggggaagctatgctctttcagtggataataaaattggtaactctattgtaaaacatgtcaatggtgtgtgaagaaaaatcaaccaatctgtaggtgttgataactagacagtactgtgtatgttacgtgcctgtgtggatgtgcacttccagcatggtatgtgtagcgatgtggatcatgccagagttcgtagatcctgttttggggtttgcacatggatcgtatgttaagctttttcttttcaataaatgaattttatttttatttttgaga

SEQ ID NO: 183900 - DNA, 977 bp, Homo sapiens
  Payload ID: 16240
  Gene Symbol: SLC36A1
  Gene Name: solute carrier family 36 (proton/amino acid symporter), member 1
  Uniprot ID: Q7Z2H8
  ENST ID: ENST00000429484
  CDS Start-End: 100-831
ctttcaatggtgtcttttcttgccttgtttcagaaggatctactagttggccctatcttgtgccaagactgacagcaaggaagctgctggctgactgccatgtccacgcagagacttcggaatgaagactaccacgactacagctccacggacgtgagccctgaggagagcccgtcggaaggcctcaacaacctctcctccccgggctcctaccagcgctttggtcaaagcaatagcacaacatggttccagaccttgatccacctgttaaaaggcaacattggcacaggactcctgggactccctctggcggtgaaaaatgcaggcatcgtgatgggtcccatcagcctgctgatcataggcatcgtggccgtgcactgcatgggtatcctggtgaaatgtgctcaccacttctgccgcaggctgaataaatcctttgtggattatggtgatactgtgatgtatggactagaatccagcccctgctcctggctccggaaccacgcacactggggaagacgtgttgtggacttcttcctgattgtcacccagctgggattctgctgtgtctattttgtgtttctggctgacaactttaaacaggtgatagaagcggccaatgggaccaccaataactgccacaacaatgagacggtgattctgacgcctaccatggactcgcgactctacatgctctccttcctgcccttcctggtgctgctggttttcatcaggaacctccgagccctgtccatcttctccctgttggccaacatcaccatgctggtcagcttggtcatgatctaccagttcattgttcagatcctgtgaatggatttacagcccatgtagcagaccaaggtcttccacagagagcaggttcctctctgtcttcagcatgtggagtctcaaatggaacagttctgggcagagtgctttgcacagagggtgctcccaataaatgttttatcactgca

SEQ ID NO: 183901 - DNA, 552 bp, Homo sapiens
  Payload ID: 16240
  Gene Symbol: SLC36A1
  Gene Name: solute carrier family 36 (proton/amino acid symporter), member 1
  ENST ID: ENST00000517945
  CDS Start-End: 342-552
agcaaaggaggatggcgaggggctgatactgaacccgggaagggtgggctgtgctgaagccagagccggagccggagctggggccagaacccgagcagtgagttcctccactggctgccggctggcggcgctcgccgccttgggcaggacccacctcgccttcctcccggcgtggcagatgctccagaattccatcgacagagaggagaaaatacatctggggaatttgccgctgctctgagttccaaagtccaaaccaatgtaattgtttcagaataacggatgacacttttagcttgcaaacaaggggcgccaatgcgtgaattctggtaggagctgccatgtccacgcagagacttcggaatgaagactaccacgactacagctccacggacgtgagccctgaggagagcccgtcggaaggcctcaacaacctctcctccccgggctcctaccagcgctttggtcaaagcaatagcacaacatggttccagaccttgatccacctgttaaaaggcaacattggcacaggactcctgggactccctctgg

SEQ ID NO: 183902 - DNA, 2005 bp, Homo sapiens
  Payload ID: 16240
  Gene Symbol: SLC36A1
  Gene Name: solute carrier family 36 (proton/amino acid symporter), member 1
  Uniprot ID: Q7Z2H8
  ENST ID: ENST00000520701
  CDS Start-End: 139-1569
gagctcttcatccgcctgggcccaaccctggaactattcctttcaatggtgtcttttcttgccttgtttcagaaggatctactagttggccctatcttgtgccaagactgacagcaaggaagctgctggctgactgccatgtccacgcagagacttcggaatgaagactaccacgactacagctccacggacgtgagccctgaggagagcccgtcggaaggcctcaacaacctctcctccccgggctcctaccagcgctttggtcaaagcaatagcacaacatggttccagaccttgatccacctgttaaaaggcaacattggcacaggactcctgggactccctctggcggtgaaaaatgcaggcatcgtgatgggtcccatcagcctgctgatcataggcatcgtggccgtgcactgcatgggtatcctggtgaaatgtgctcaccacttctgccgcaggctgaataaatcctttgtggattatggtgatactgtgatgtatggactagaatccagcccctgctcctggctccggaaccacgcacactggggaagacgtgttgtggacttcttcctgattgtcacccagctgggattctgctgtgtctattttgtgtttctggctgacaactttaaacaggtgatagaagcggccaatgggaccaccaataactgccacaacaatgagacggtgattctgacgcctaccatggactcgcgactctacatgctctccttcctgcccttcctggtgctgctggttttcatcaggaacctccgagccctgtccatcttctccctgttggccaacatcaccatgctggtcagcttggtcatgatctaccagttcattgttcagaggatcccagaccccagccacctccccttggtggccccttggaagacctaccctctcttctttggcacagcgattttttcatttgaaggcattggaatggttctgcccctggaaaacaaaatgaaggatcctcggaagttcccactcatcctgtacctgggcatggtcatcgtcaccatcctctacatcagcctggggtgtctggggtacctgcaatttggagctaatatccaaggcagcataaccctcaacctgcccaactgctggttgtaccagtcagttaagctgctgtactccatcgggatctttttcacctacgcactccagttctacgtcccggctgagatcatcatccccttctttgtgtcccgagcgcccgagcactgtgagttagtggtggacctgtttgtgcgcacagtgctggtctgcctgacatgcatcttggccatcctcatcccccgcctggacctggtcatctccctggtgggctccgtgagcagcagcgccctggccctcatcatcccaccgctcctggaggtcaccaccttctactcagagggcatgagccccctcaccatctttaaggacgccctgatcagcatcctgggcttcgtgggctttgtggtggggacctatgaggctctctatgagctgatccagccaagcaatgctcccatcttcatcaattccacctgtgccttcatatagggatctgggttcgtctctgcagctgcctacccctgccccatgtgtcccccgttacctgtcctcagagcctcaggtatggtccaggctctgaggaaagtcagggttgctgtgtgggaacccctctgcctggcacctggataccctgggccaggtaacctgagggcaggggagaggtggggtggcagacacgcagaagtgctactagtgacagggctgccatcgctcacctgtacctatttacacccagaactttccagctccccctcatcatgcctcctccttcctacctgcctcccctctgctggtgcacctcgcccaactcattcttactgcacagttcactttatttaacaattttcatgtcccccacctcatgttttcaccttttctgggccaggcatagattaagtaactgggaacgccccctctttataaa

SEQ ID NO: 183903 - DNA, 488 bp, Homo sapiens
  Payload ID: 16240
  Gene Symbol: SLC36A1
  Gene Name: solute carrier family 36 (proton/amino acid symporter), member 1
  ENST ID: ENST00000519829
  CDS Start-End: 274-488
gccttctcttgtttcccatagaagaagctctcactgagtctgtttacttccacccaggccttggaagaatcctgtacctctctcctttggccaggccttactgtgatgagcacataaagaattccatcgacagagaggagaaaatacatctggggaatttgccgctgctctgagttccaaagtccaaaccaatgtaattgtttcagaataacggatgacacttttagcttgcaaacaaggggcgccaatgcgtgaattctggtaggagctgccatgtccacgcagagacttcggaatgaagactaccacgactacagctccacggacgtgagccctgaggagagcccgtcggaaggcctcaacaacctctcctccccgggctcctaccagcgctttggtcaaagcaatagcacaacatggttccagaccttgatccacctgttaaaaggcaacattggcacaggactcctgggactccctctggcggt

SEQ ID NO: 183904 - DNA, 524 bp, Homo sapiens
  Payload ID: 16240
  Gene Symbol: SLC36A1
  Gene Name: solute carrier family 36 (proton/amino acid symporter), member 1
  ENST ID: ENST00000517628
  CDS Start-End: 1-438
aggatcccagaccccagccacctccccttggtggccccttggaagacctaccctctcttctttggcacagcgattttttcatttgaaggcattggaatggttctgcccctggaaaacaaaatgaaggatcctcggaagttcccactcatcctgtacctgggcatggtcatcgtcaccatcctctacatcagcctggggtgtctggggtacctgcaatttggagctaatatccaaggcagcataaccctcaacctgcccaactgctggttgtaccagtcagttaagctgctgtactccatcgggatctttttcacctacgcactccagttctacgtcccggctgagatcatcatccccttctttgtgtcccgagcgcccgagcactgtgagttagtggtggacctgtttgtgcgcacagtgctggtctgcctgacatgagtgtaagttaaaagacaggatacccttctgtttgctgtggttgaaaactggtgacatttagaaaataaaagtaaattttttttgta

SEQ ID NO: 183905 - DNA, 587 bp, Homo sapiens
  Payload ID: 16240
  Gene Symbol: SLC36A1
  Gene Name: solute carrier family 36 (proton/amino acid symporter), member 1
  ENST ID: ENST00000520111
  CDS Start-End: 289-587
agagctcttcatccgcctgggcccaaccctggaactattcctttcaatggtgtcttttcttgccttgtttcagaaggatctactagttggccctatcttgtgccaagactgacagcaaggaagctgctggctgaaattccatcgacagagaggagaaaatacatctggggaatttgccgctgctctgagttccaaagtccaaaccaatgtaattgtttcagaataacggatgacacttttagcttgcaaacaaggggcgccaatgcgtgaattctggtaggagctgccatgtccacgcagagacttcggaatgaagactaccacgactacagctccacggacgtgagccctgaggagagcccgtcggaaggcctcaacaacctctcctccccgggctcctaccagcgctttggtcaaagcaatagcacaacatggttccagaccttgatccacctgttaaaaggcaacattggcacaggactcctgggactccctctggcggtgaaaaatgcaggcatcgtgatgggtcccatcagcctgctgatcataggcatcgtggccgtgcactgcatgggtatcctggtgaa

SEQ ID NO: 183906 - DNA, 751 bp, Homo sapiens
  Payload ID: 16240
  Gene Symbol: SLC36A1
  Gene Name: solute carrier family 36 (proton/amino acid symporter), member 1
  ENST ID: ENST00000522185
  CDS Start-End: 1-268
ggttctgcccctggaaaacaaaatgaaggatcctcggaagttcccactcatcctgtacctgggcatggtcatcgtcaccatcctctacatcagcctggggtgtctggggtacctgcaatttggagctaatatccaaggcagcataaccctcaacctgcccaactgctgcccacttcactctagcccaccatcccctgccactgccagccctcactggctgccctggactgcattctgtttggggaattcatgtagagccttctgctgaagccattggtgctgatcagccgatgggttgtaccagtcagttaagctgctgtactccatcgggatctttttcacctacgcactccagttctacgtcccggctgagatcatcatccccttctttgtgtcccgagcgcccgagcactgtgagttagtggtggacctgtttgtgcgcacagtgctggtctgcctgacatgcatcttggccatcctcatcccccgcctggacctggtcatctccctggtgggctccgtgagcagcagcgccctggccctcatcatcccaccgctcctggaggtcaccaccttctactcagagggcatgagccccctcaccatctttaaggacgccctgatcagcatcctgggcttcgtgggctttgtggtggggacctatgaggctctctatgagctgatccagccaagcaatgctcccatcttcatcaattccacctgtgccttcatatagggatctgggttcgtc

SEQ ID NO: 183907 - DNA, 1621 bp, Homo sapiens
  Payload ID: 16240
  Gene Symbol: SLC36A1
  Gene Name: solute carrier family 36 (proton/amino acid symporter), member 1
  ENST ID: ENST00000521925
  CDS Start-End: 193-1359
agcaaaggaggatggcgaggggctgatactgaacccgggaagggtgggctgtgctgaagccagagccggagccggagctggggccagaacccgagcagtgagttcctccactggctgccggctggcggcgctcgccgccttgggcaggacccacctcgccttcctcccggcgtggcagatgctccagctgccatgtccacgcagagacttcggaatgaagactaccacgactacagctccacggacgtgagccctgaggagagcccgtcggaaggcctcaacaacctctcctccccgggctcctaccagcgctttggtcaaagcaatagcacaacatggttccagaccttgatccacctgttaaaaggcaacattggcacaggactcctgggactccctctggcggtgaaaaatgcaggcatcgtgatgggtcccatcagcctgctgatcataggcatcgtggccgtgcactgcatgggtatcctggtgaaatgtgctcaccacttctgccgcaggctgaataaatcctttgtggattatggtgatactgtgatgtatggactagaatccagcccctgctcctggctccggaaccacgcacactggggaagacgtgttgtggacttcttcctgattgtcacccagctgggattctgctgtgtctattttgtgtttctggctgacaactttaaacaggtgatagaagcggccaatgggaccaccaataactgccacaacaatgagacggtgattctgacgcctaccatggactcgcgactctacatgctctccttcctgcccttcctggtgctgctggttttcatcaggaacctccgagccctgtccatcttctccctgttggccaacatcaccatgctggtcagcttggtcatgatctaccagttcattgttcagaggatcccagaccccagccacctccccttggtggccccttggaagacctaccctctcttctttggcacagcgattttttcatttgaaggcattggaatggttctgcccctggaaaacaaaatgaaggatcctcggaagttcccactcatcctgtacctgggcatggtcatcgtcaccatcctctacatcagcctggggtgtctggggtacctgcaatttggagctaatatccaaggcagcataaccctcaacctgcccaactgctggttgtaccagtcagttaagctgctgtactccatcgggatctttttcacctacgcactccagttctacgtcccggctgagatcatcatccccttctttgtgtcccgagcgcccgagcactgtgagttagtggtggacctgtttgtgcgcacagtgctggtctgcctgacatgtgagtagaagatgataattgccttgcttgtttttccctaaagggcacccagtctgcaggctttcatgagaaaagacaatgtgtgttgtagtgaagctggctatgtttgtgacagagaacctggcccatggcctcactttcagagttgaggcacctccagatggggaagtgaattaattacatatgtactgtaaagaacatgggaatgaggacagtggtttatgtatagatagggtatgaaatgctgtggaggtggttatcattcagagt

SEQ ID NO: 183908 - DNA, 1389 bp, Homo sapiens
  Payload ID: 16240
  Gene Symbol: SLC36A1
  Gene Name: solute carrier family 36 (proton/amino acid symporter), member 1
  Uniprot ID: Q7Z2H8
  ENST ID: ENST00000616007
  CDS Start-End: 144-1304
gcggctgccgggcagcaaaggaggatggcgaggggctgatactgaacccgggaagggtgggctgtgctgaagccagagccggagccggagctgggcaggacccacctcgccttcctcccggcgtggcagatgctccagctgccatgtccacgcagagacttcggaatgaagactaccacgactacagctccacggacgtgagccctgaggagagcccgtcggaaggcctcaacaacctctcctccccgggctcctaccagcgctttggtcaaagcaatagcacaacatggttccagaccttgatccacctgttaaaaggcaacattggcacaggactcctgggactccctctggcggtgaaaaatgcaggcatcgtgatgggtcccatcagcctgctgatcataggcatcgtggccgtgcactgcatgggtatcctggtgaaatgtgctcaccacttctgccgcaggctgaataaatcctttgtggattatggtgatactgtgatgtatggactagaatccagcccctgctcctggctccggaaccacgcacactggggaagacgtgttgtggacttcttcctgattgtcacccagctgggattctgctgtgtctattttgtgtttctggctgacaactttaaacaggtgatagaagcggccaatgggaccaccaataactgccacaacaatgagacggtgattctgacgcctaccatggactcgcgactctacatgctctccttcctgcccttcctggtgctgctggttttcatcaggaacctccgagccctgtccatcttctccctgttggccaacatcaccatgctggtcagcttggtcatgatctaccagttcattgttcagaggatcccagaccccagccacctccccttggtggccccttggaagacctaccctctcttctttggcacagcgattttttcatttgaaggcattggaatggttctgcccctggaaaacaaaatgaaggatcctcggaagttcccactcatcctgtacctgggcatggtcatcgtcaccatcctctacatcagcctggggtgtctggggtacctgcaatttggagctaatatccaaggcagcataaccctcaacctgcccaactgctggttgtaccagtcagttaagctgctgtactccatcgggatctttttcacctacgcactccagttctacgtcccggctgagatcatcatccccttctttgtgtcccgagcgcccgagcactgtgagttagtggtggacctgtttgtgcgcacagtgctggtctgcctgacatgagtgtaagttaaaagacaggatacccttctgtttgctgtggttgaaaactggtgacatttagaaaataaaagtaaattttttttgt

SEQ ID NO: 183909 - DNA, 3421 bp, Homo sapiens
  Payload ID: 16241
  Gene Symbol: SLC36A2
  Gene Name: solute carrier family 36 (proton/amino acid symporter), member 2
  Uniprot ID: Q495M3
  ENST ID: ENST00000335244
  CDS Start-End: 131-1582
agcttggccagagccagcccgggcacacaccactgtgctggggtgtacatctacactagacaccttcctgcttccctccttccagagcagacctctttgtcaccccgagctccttgtttcttaagcagtcatgtctgtgacaaaaagtactgagggtccccagggagccgttgccatcaaattggaccttatgtcgcctcctgaaagtgccaagaagttggagaacaaggactctacattcttggatgaaagtccttcagagtcagcaggcttgaagaagaccaagggcataacagtgttccaggccttgattcacctggtgaaaggcaacatgggcacagggatcctgggactacccctcgctgtgaagaacgcgggcatcctgatgggcccactcagtctgctggtgatgggcttcattgcctgccactgtatgcacatcctggtcaagtgtgcccagcgcttctgtaagaggcttaacaagccctttatggactatggggacacggtgatgcatggactagaagccaaccccaacgcctggctccagaatcacgctcactggggaaggcatatcgtgagcttcttccttattatcacccaacttggcttctgctgtgtgtacattgtgtttttggctgataatttaaaacaggtagtggaagctgttaatagcacaaccaacaactgctattccaatgagacggtgattctgacccccaccatggactcgcgactctacatgctctccttcctgcccttcctggtgctgctggtcctcatccggaacctcaggatcttgaccatcttctccatgctggccaacatcagcatgctggtcagcttggtcatcatcatacagtacattacccaggaaatcccagaccccagccggttgccactggtagcaagctggaagacctaccctctcttcttcggaacagccattttttcttttgaaagcattggtgtggttctgcctctggaaaacaagatgaagaatgcccgccacttcccagccatcctgtctttgggaatgtccatcgtcacttccctatacattggcatggcggctctgggctacctgcggtttggagatgacatcaaggccagcataagccttaacctgcctaactgctggctgtaccagtctgtcaagcttctctacattgccggcatcctgtgcacctatgccctgcagttctacgtccctgcagaaatcatcatcccctttgccatctcccgggtgtcaacacgctgggcactgcctctggatctgtccattcgcctcgtcatggtctgcctgacatgcctcctggccatcctcatcccccgcctggacctggtcatctccctggtgggctccgtgagtggcaccgccctggccctcatcatcccaccgctcctggaggtcaccacgttctactcagagggcatgagccccctcaccatcttcaaggacgccctgatcagcatcctgggcttcgtgggctttgtggtggggacctaccaggccctggacgagctgctcaagtcagaagactctcaccccttttccaactccaccacttttgttcggtgagcctggcactgctccttgcctaccagcacccgacttttaattatatggatctctttttttttttttttttttttttgagacggagtttctgtcttgttgcccagactggagtacaatgatgcgatctcagctcaccacaacttcggcctcctgggttcaagcgattctcctgcctcagcctcccgagtagttgggattagaggcatagtccagcacgcctggctaattttgtatttttagtagagacggggtttctccatgttggtcaggctggtcttgaactcccgacctcaggtgatccacccaccccggcctcccaaaatgctgggatcacaggcgtgagccacctcgcctggccagatctcttttatatgcattatctttatgtcactgctttgccttttctctgggccaagtcatggtgaaacaagaaagctacaagctctaaatggtaattttttacatttttgttttgtttattacttcttcttttcatacctctggcattccactacattgtgagctttcccttggaaggctctggactctatccaagcttatgataattcacacaatgaatttcatacctagcgtggagctatgcaagaagcagccaccagagggccccaagtggcagcaactggccaaaggagatgcagccagctaagactgtccacactttggcagacaaccggttttcccttttctgggtctgttcaaaaagcaaacattaagggtgggcacataatccacaagccagaaagttgtgcacggctccagtgttgagatgggtagggccaagatgaccagtgtgaaaactctcagatagaaaggagccatgcatattaaatgaggggcaacaaacatttcaaacgattagataacattttctcccaactcaaagatcccaacaatgaataggaggcatggaagtagatgtgccaatggggagggatgaggagtgaacatgaatattatttgaatagactttacctcttaattcttgcaacatgcattcttgattacctactgtgtgccaaacaagattttgtagaatattgcaaaaatgaccataaattcctcgtgataatgtgactttgcacctgctcctatgaaaagatgaagtctgtatctgtatcccttaaatttttttgcttgtttgtcggttttgttttgtgttttgtttttttgagatgaagtctcgctctgttgcccaggctggagtgcaatggcacaatctcggctcactgcaacctccacctcctgggttcaagcgattcttctgcctcagcctcccaagtagctaggattacaagtgcctgccactatgcctggctaatttttgtttttcgtagagatggggttttaccatgttggccaggctggtctcaaactcctgacctcaggtgatccacttgcctcggcctcccaaagtgctgagattacaagtgtgagccaccacgcccagcctctcccctttaaatttgatcttggccttgtaacttgctttggccaatgggacattagtaaatgtgatgcagtcagaggtttggtaataacctatgcatcaggacttacatcacttgctgctctatggagttgagaccaccaagtaaagcatcctgggctagcctaccggaggatcagagaccatgtggaacataaatgaatcatcccagttgagccctgtccgcagatcaaccagcctaccaacttccagacacgagtaaagccatcctagactatatccaaccccagtcaggctgacacagaccataagaattgtacagataatccacagaactgtgataaataataaagatgtttgtaattttaata

SEQ ID NO: 183910 - DNA, 2059 bp, Homo sapiens
  Payload ID: 16241
  Gene Symbol: SLC36A2
  Gene Name: solute carrier family 36 (proton/amino acid symporter), member 2
  ENST ID: ENST00000518280
  CDS Start-End: 69-512
ccttcctgcttccctccttccagagcagacctctttgtcaccccgagctccttgtttcttaagcagtcatgtctgtgacaaaaagtactgagggtccccagggagccgttgccatcaaattggaccttatgtcgcctcctgaaagtgccaagaagttggagaacaaggactctacattcttggatgaaagtccttcagagtcagcaggcttgaagaagaccaagggcataacagtgttccaggccttgattcacctggtgaaaggcaacatgggcacagggatcctgggactacccctcgctgtgaagaacgcgggcatcctgatgggcccactcagtctgctggtgatgggcttcattgcctgccactgtatgcacatcctggtcaagtgtgcccagcgcttctgtaagaggcttaacaagccctttatggactatggggacacggtgatgcatggactagaagccaaccccaacgcctggctccagaatcacgctcactggggaaggtagtggaagctgttaatagcacaaccaacaactgctattccaatgagacggtgattctgacccccaccatggactcgcgactctacatgctctccttcctgcccttcctggtgctgctggtcctcatccggaacctcaggatcttgaccatcttctccatgctggccaacatcagcatgctggtcagcttggtcatcatcatacagtacattacccaggaaatcccagaccccagccggttgccactggtagcaagctggaagacctaccctctcttcttcggaacagccattttttcttttgaaagcattggtgtggttctgcctctggaaaacaagatgaagaatgcccgccacttcccagccatcctgtctttgggaatgtccatcgtcacttccctatacattggcatggcggctctgggctacctgcggtttggagatgacatcaaggccagcataagccttaacctgcctaactgctggctgtaccagtctgtcaagcttctctacattgccggcatcctgtgcacctatgccctgcagttctacgtccctgcagaaatcatcatcccctttgccatctcccgggtgtcaacacgctgggcactgcctctggatctgtccattcgcctcgtcatggtctgcctgacatgcctcctggccatcctcatcccccgcctggacctggtcatctccctggtgggctccgtgagtggcaccgccctggccctcatcatcccaccgctcctggaggtcaccacgttctactcagagggcatgagccccctcaccatcttcaaggacgccctgatcagcatcctgggcttcgtgggctttgtggtggggacctaccaggccctggacgagctgctcaagtcagaagactctcaccccttttccaactccaccacttttgttcggtgagcctggcactgctccttgcctaccagcacccgacttttaattatatggatctctttttttttttttttttttttttgagacggagtttctgtcttgttgcccagactggagtacaatgatgcgatctcagctcaccacaacttcggcctcctgggttcaagcgattctcctgcctcagcctcccgagtagttgggattagaggcatagtccagcacgcctggctaattttgtatttttagtagagacggggtttctccatgttggtcaggctggtcttgaactcccgacctcaggtgatccacccaccccggcctcccaaaatgctgggatcacaggcgtgagccacctcgcctggccagatctcttttatatgcattatctttatgtcactgctttgccttttctctgggccaagtcatggtgaaacaagaaagctacaagctctaaatggtaattttttacatttttgttttgtttattacttcttcttttcatacctctggcattccactacattgtgagctttcccttggaaggctctggactctatccaagcttatgataattcacacaatgaatttcatacctagcgtggagctatgcaagaagcagccaccagaggg

SEQ ID NO: 183911 - DNA, 403 bp, Homo sapiens
  Payload ID: 16241
  Gene Symbol: SLC36A2
  Gene Name: solute carrier family 36 (proton/amino acid symporter), member 2
  ENST ID: ENST00000523044
  CDS Start-End: 1-323
aggaaatcccagaccccagccggttgccactggtagcaagctggaagacctaccctctcttcttcggaacagccattttttcttttgaaagcattggtgtggttctgcctctggaaaacaagatgaagaatgcccgccacttcccagccatcctgtctttgggaatgtccatcgtcacttccctatacattggcatggcggctctgggctacctgcggtttggagatgacatcaaggccagcataagccttaacctgcctaactgctggtatcttcatgggctgtcaggtggtggggactcaggaatgggtggaaacgtataggtcacttcctcctcccttccacagctgggaaactgaggtctagagagcctcccacagaagaagcagaattgtcattggaa

SEQ ID NO: 183912 - DNA, 2156 bp, Homo sapiens
  Payload ID: 16241
  Gene Symbol: SLC36A2
  Gene Name: solute carrier family 36 (proton/amino acid symporter), member 2
  ENST ID: ENST00000518617
  CDS Start-End: 69-512
ccttcctgcttccctccttccagagcagacctctttgtcaccccgagctccttgtttcttaagcagtcatgtctgtgacaaaaagtactgagggtccccagggagccgttgccatcaaattggaccttatgtcgcctcctgaaagtgccaagaagttggagaacaaggactctacattcttggatgaaagtccttcagagtcagcaggcttgaagaagaccaagggcataacagtgttccaggccttgattcacctggtgaaaggcaacatgggcacagggatcctgggactacccctcgctgtgaagaacgcgggcatcctgatgggcccactcagtctgctggtgatgggcttcattgcctgccactgtatgcacatcctggtcaagtgtgcccagcgcttctgtaagaggcttaacaagccctttatggactatggggacacggtgatgcatggactagaagccaaccccaacgcctggctccagaatcacgctcactggggaaggtagtggaagctgttaatagcacaaccaacaactgctattccaatgagacggtgattctgacccccaccatggactcgcgactctacatgctctccttcctgcccttcctggtgctgctggtcctcatccggaacctcaggatcttgaccatcttctccatgctggccaacatcagcatgctggtcagcttggtcatcatcatacagtacattacccaggaaatcccagaccccagccggttgccactggtagcaagctggaagacctaccctctcttcttcggaacagccattttttcttttgaaagcattggtgtgagcgtccactgtctgggcagtaccacagcttatcaacgcacctgtcaaagaacatttgggttgtttctagtttttgacaatcatgaatgatactgccgttctgcctctggaaaacaagatgaagaatgcccgccacttcccagccatcctgtctttgggaatgtccatcgtcacttccctatacattggcatggcggctctgggctacctgcggtttggagatgacatcaaggccagcataagccttaacctgcctaactgctggctgtaccagtctgtcaagcttctctacattgccggcatcctgtgcacctatgccctgcagttctacgtccctgcagaaatcatcatcccctttgccatctcccgggtgtcaacacgctgggcactgcctctggatctgtccattcgcctcgtcatggtctgcctgacatgcctcctggccatcctcatcccccgcctggacctggtcatctccctggtgggctccgtgagtggcaccgccctggccctcatcatcccaccgctcctggaggtcaccacgttctactcagagggcatgagccccctcaccatcttcaaggacgccctgatcagcatcctgggcttcgtgggctttgtggtggggacctaccaggccctggacgagctgctcaagtcagaagactctcaccccttttccaactccaccacttttgttcggtgagcctggcactgctccttgcctaccagcacccgacttttaattatatggatctctttttttttttttttttttttttgagacggagtttctgtcttgttgcccagactggagtacaatgatgcgatctcagctcaccacaacttcggcctcctgggttcaagcgattctcctgcctcagcctcccgagtagttgggattagaggcatagtccagcacgcctggctaattttgtatttttagtagagacggggtttctccatgttggtcaggctggtcttgaactcccgacctcaggtgatccacccaccccggcctcccaaaatgctgggatcacaggcgtgagccacctcgcctggccagatctcttttatatgcattatctttatgtcactgctttgccttttctctgggccaagtcatggtgaaacaagaaagctacaagctctaaatggtaattttttacatttttgttttgtttattacttcttcttttcatacctctggcattccactacattgtgagctttcccttggaaggctctggactctatccaagcttatgataattcacacaatgaatttcatacctagcgtggagctatgcaagaagcagccaccagaggg

SEQ ID NO: 183913 - DNA, 1471 bp, Homo sapiens
  Payload ID: 16241
  Gene Symbol: SLC36A2
  Gene Name: solute carrier family 36 (proton/amino acid symporter), member 2
  ENST ID: ENST00000521967
  CDS Start-End: 131-1318
agcttggccagagccagcccgggcacacaccactgtgctggggtgtacatctacactagacaccttcctgcttccctccttccagagcagacctctttgtcaccccgagctccttgtttcttaagcagtcatgtctgtgacaaaaagtactgagggtccccagggagccgttgccatcaaattggaccttatgtcgcctcctgaaagtgccaagaagttggagaacaaggactctacattcttggatgaaagtccttcagagtcagcaggcttgaagaagaccaagggcataacagtgttccaggccttgattcacctggtgaaaggcaacatgggcacagggatcctgggactacccctcgctgtgaagaacgcgggcatcctgatgggcccactcagtctgctggtgatgggcttcattgcctgccactgtatgcacatcctggtcaagtgtgcccagcgcttctgtaagaggcttaacaagccctttatggactatggggacacggtgatgcatggactagaagccaaccccaacgcctggctccagaatcacgctcactggggaaggcatatcgtgagcttcttccttattatcacccaacttggcttctgctgtgtgtacattgtgtttttggctgataatttaaaacaggtagtggaagctgttaatagcacaaccaacaactgctattccaatgagacggtgattctgacccccaccatggactcgcgactctacatgctctccttcctgcccttcctggtgctgctggtcctcatccggaacctcaggatcttgaccatcttctccatgctggccaacatcagcatgctggtcagcttggtcatcatcatacagtacattacccaggaaatcccagaccccagccggttgccactggtagcaagctggaagacctaccctctcttcttcggaacagccattttttcttttgaaagcattggtgtggttctgcctctggaaaacaagatgaagaatgcccgccacttcccagccatcctgtctttgggaatgtccatcgtcacttccctatacattggcatggcggctctgggctacctgcggtttggagatgacatcaaggccagcataagccttaacctgcctaactgctggctgtaccagtctgtcaagcttctctacattgccggcatcctgtgcacctatgccctgcagttctacgtccctgcagaaatcatcatcccctttgccatctcccgggtgtcaacacgctgggcactgcctctggatctgtccattcgcctcgtcatggtctgcctgacatgtgagtagaaaggagagtgcagtgttcctgctgatcttttctgagggctataaagaatcagccagatgggccggatgcattggcttacacctgtaatcctggcactttgggaggccgaggcgggtggatcacctgaggtcaggagtttcagacaagcctgg

SEQ ID NO: 183914 - DNA, 6012 bp, Homo sapiens
  Payload ID: 16242
  Gene Symbol: SLC36A4
  Gene Name: solute carrier family 36 (proton/amino acid symporter), member 4
  Uniprot ID: Q6YBV0
  ENST ID: ENST00000326402
  CDS Start-End: 132-1646
cgccggggcagggaggcgggcaccaggcgcgggtccctccgggcaggggaggtaggcctgggcctgacgccggccacgcagcggcgggagagtgagcactcgggcggcggcgtcctggagacccgcgagagatggaagcggcggcgacgccggcggctgccggggcggcgaggcgcgaggagctagatatggatgtaatgaggcccttgataaatgagcagaattttgatgggacatcagatgaagaacatgagcaagagcttctgcctgttcagaagcattaccaacttgatgatcaagagggcatttcatttgtacaaactcttatgcaccttcttaaaggaaatattggaactggccttttaggacttccattggcaataaaaaatgcaggcatagtgcttggaccaatcagccttgtgtttataggaattatttctgttcactgtatgcacatattggtacgttgcagtcactttctatgtctgaggtttaaaaagtcaacattaggttatagtgacactgtgagctttgctatggaagtgagtccttggagttgtcttcagaagcaagcagcatgggggcggagtgtggttgacttttttctggtgataacacagctgggattctgtagtgtttatattgtcttcttagctgaaaatgtgaaacaagttcatgaaggattcctggagagtaaagtgtttatttcaaatagtaccaattcatcaaacccttgtgagagaagaagtgttgacctaaggatatatatgctttgctttcttccatttataattcttttggtcttcattcgtgaactaaagaatctatttgtactttcattccttgccaacgtttccatggctgtcagtcttgtgataatttaccagtatgttgtcaggaacatgccagatccccacaaccttccaatagtggctggttggaagaaatacccactcttttttggtactgctgtatttgcttttgaaggcataggagtggtccttccactggaaaaccaaatgaaagaatcaaagcgtttccctcaagcgttgaatattggcatggggattgttacaactttgtatgtaacattagctactttaggatatatgtgtttccatgatgaaatcaaaggcagcataactttaaatcttccccaagatgtatggttatatcaatcagtgaaaattctatattcctttggcatttttgtgacatattcaattcagttctatgttccagcagagatcattatccctgggatcacatccaaatttcatactaaatggaagcaaatctgtgaatttgggataagatccttcttggttagtattacttgtgccggagcaattcttattcctcgtttagacattgtgatttccttcgttggagctgtgagcagcagcacattggccctaatcctgccacctttggttgaaattcttacattttcgaaggaacattataatatatggatggtcctgaaaaatatttctatagcattcactggagttgttggcttcttattaggtacatatataactgttgaagaaattatttatcctactcccaaagttgtagctggcactccacagagtccttttctaaatttgaattcaacatgcttaacatctggtttgaaatagtaaaagcagaatcatgagtcttctatttttgtcccatttctgaaaattatcaagataactagtaaaatacattgctatatacataaaaatggtaacaaactctgttttctttggcacgatattaatattttggaagtaatcataactctttaccagtagtggtaaacctatgaaaaatccttgcttttaagtgttagcaatagttcaaaaaattaagttctgaaaattgaaaaaattaaaatgtaaaaaaattaaagaataaaaatacttctattattcttttatctcagtaagaaataccttaaccaagttatctctcttttatgctactcttttgccactcacttgagaacagaataggatttcaacaataagagaataaaataagaacatgtataacaaaaagctctctccagatcatccctgtgaatgccaaagtaaactttatgtacagtgtaaaaaaaaaaaatctcagttatgtttttattagccaaattctaatgattggctcctggaagtatagaaaactcccattaacataatataagcatcagaaaattgcaaacactagaattaattttacactctaatggtagttgatcttcatagtcaagaggcactgttcaagatcatgacttagtgtttcaatgaaatttgaaaagggactttaaaacttatccagtgcaactcccttgtttttcgtcagaggaaaaggaggcctagaaaggttaagtaacttggtcgagaccactcagccttgagatcaagaaaacctaatcttctgactcccaggccaggatgttttatttctcacatcatgtccaagaaaaagaataaattatgttcagcttaattttagtgttgaatctatttgattatattttaatactttgaaaatgaatgtgtgatttttaatagtatatgtgacctgagcagaaaatcagggaactccaagaagcctacactgtggccatataaacctcagcaagagaaagaagctatgttcttttaaaacagaatagagaccgcttgctggtgaaactcctggctagtaagatgtgtgtctagctatactatttgtggcttgagcttttttaattattaccttcctttcctgagttttgtaggcaccacattcctgaatggcagaaaatagacacctcagaaaacggaggatttgtggactctttccagccctgtggcttttcttatcacagccttttatttattatgagcagaataaaagaatcagctaggtgtggtggtctgtgcttataatcccagctactctggaggataagttgggaggatcacttgagaggccaggagcttgagaccagcctgggcagcatagtgagacctcgactctataaaacataaaaatttaaaaaaaaattagcctgatgtggcgtgtacctgtagtcccagctactgaggaggctgaagcaggaggatccctcgagcacaaaagtttcaggctgtggtaagctatgactgtgccactgcacaccagcctgagttacagagggagatcccaactcttaaaaactaaaacaacaataaatatatacaagaatcataacataaagggattcatgcttagaaaaaatccataaactcccttctaaatattgagacactccaggcttctttcagacaaataacttctaattattccatatttttcaagttattaaccaagataaagaatctctcagttagtggggaaaatgaaaattattaagaatagaattgtcttctgactttaaaaacaatttagactttaaaacatgaactgtttactcaggctggtgatactctagtttgttagtataccatacttgaagatatcatcaagatcactatagttgtatatattctctatttttatatgtaaatgttaacttagttcaagtattttttgcttgtatcgttaactgatcatcaaatacaatcctaaagatatatcagaagctttattttggtacaaagtcataagaatcaaaacttttttaaccattcacattaggtatcaacagtaattgtttgagatacttttatatcaattctgttacactgagcctttagtcatactaagagaatgcagaagaagttataggaaaacgaatcttcactgaaactagtattatataatcttgaattagatgtttaaaaaactttatagcttgatataaaatgagttgaaaattattatttaataggaagcagcattagatttttgtcacctgttttcagataatatttctagtctatgtatgttatttaatttttacactttggcccattgtttattttccttaaggaattcatcaaatgcaatgaaatttgaataaaattgatcatagcaataaataatttttaaattcagcacaaactcatcttgagtatattatcaatcaggcttcctttagcaataagaatggtgaatcaacatccagtactaaattcaataaatgatgaatactttaaatacaagaaaaagttgaattgcagaaaagaagaggggctaaaaaggaagaaagttttaattctcaacaagaaacactatttagatggaaagcttaaatgtattcttattaagggtatttgatgatgcattttatttgcaaaaataaccagtgggtaattttttctctgaaaatttagctttaataagtcgtaaaatttcctaaagattttggagacgatatttcgattataccagctcttgcttttattttgggagcctggagaaatgagagtgattgcacctgtcaaattttgtatctcatcacttttggatcatcacactgtgactaaaatgacttcagcattttgttggccaccacagtgaagaactattccctgaaagttaatcagttgcctgagagacttttctgctactgaggggaaagaaaggaaagctttatttacctctaatgagctccgttccaagtcagttaatcactgttcccttacacccaagagtttcatcagtatcagagtcaacttgtcaaaacactggttctcagacgtttttttcagagggacttcttttccccacatggccagatttctttacaattaagaaaataagagctacagcgtattcttggttaaaaaccagtttagatgatgttaccaaatgaaaacaagtctgtattagcaaatgccacattatatttagtcgtattctcactaaattctccgttattaaaatgatttctgcatcttgcctggaaaatgcacttacatatttacaagcgttgtatgtcaatgtgcatgttttgaatttcctaacagtgtctaatcttagtagtttcatagtagttatgtaaaatctctttaactgcaaaatactataaaatattacttgaaatattaaagtattagtgccatttctagctgtggcaaggcacaagtcttactatagcttacttatgtcttctcatagatttcagtacagcatctgagtagtggatctgtttactgacagtatacacaaactaggtcttgacctcacttctttcttcatttaaaaggagaagatttgaaatagagctagtgtaaataataaataaaattatttaaatagcatcagtggctcaataccatctgttgaggaataaaataatttggttaacatacagaacatcgataatatacaataatgactttttaaaaaatgagtctgatctttttggctcacctagcttcccttaataagaaaatttgagaaacttggatctgaaaagtgtagttgtacttcctaacattaaattcctggctgtaatagttaatactttggcagcattatggttagtcttgtttatgccattggcacttactaggctaaactttctgaaactgattggttttgacctatgagataaggaaacatgcctaagaaatggctagaaatgctatttattgccctatgataagtgaaatagcaaatcactcttgattcttaaaatttcatattaaaattagctagttcctacatgcatgcgtgcacaagtatatgcagacacacacacaaatcagtaatctatgtgaactagatactaatactaaattactatttaaattgggtccagaaagatgctgttttgaaaagaacactaaaaatatttcattagcgttttcttgataacaaataggaaaatatatgtttacaccctgaataaattcagctgtgggtggatttttgtttttcaaaatgattttgttagtttgaatgaaacctaaatataacattcaagtcaattcttttaacatttttctttataacagaatatgaaaaacgctgtcttaaagtgttgtaacttttctgaattttcaataaaatattttgcttgcagtt

SEQ ID NO: 183915 - DNA, 888 bp, Homo sapiens
  Payload ID: 16242
  Gene Symbol: SLC36A4
  Gene Name: solute carrier family 36 (proton/amino acid symporter), member 4
  ENST ID: ENST00000534116
  CDS Start-End: 49-888
cttggaccaatcagccttgtgtttataggaattatttctgttcactgtatgcacatattggtacgttgcagtcactttctatgtctgaggtttaaaaagtcaacattaggttatagtgacactgtgagctttgctatggaagtgagtccttggagttgtcttcagaagcaagcagcatgggggcggagtgtggttgacttttttctggtgataacacagctgggattctgtagtgtttatattgtcttcttagctgaaaatgtgaaacaagttcatgaaggattcctggagagtaaagtgtttatttcaaatagtaccaattcatcaaacccttgtgagagaagaagtgttgacctaaggatatatatgctttgctttcttccatttataattcttttggtcttcattcgtgaactaaagaatctatttgtactttcattccttgccaacgtttccatggctgtcagtcttgtgataatttaccagtatgttgtcaggaacatgccagatccccacaaccttccaatagtggctggttggaagaaatacccactcttttttggtactgctgtatttgcttttgaaggcataggagtggtccttccactggaaaaccaaatgaaagaatcaaagcgtttccctcaagcgttgaatattggcatggggattgttacaactttgtatgtaacattagctactttaggatatatgtgtttccatgatgaaatcaaaggcagcataactttaaatcttccccaagatgtatggttatatcaatcagtgaaaattctatattcctttggcatttttgtgacatattcaattcagttctatgttccagcagagatcattatccctgggatcacatccaaatttcatactaaatgg

SEQ ID NO: 183916 - DNA, 711 bp, Homo sapiens
  Payload ID: 16242
  Gene Symbol: SLC36A4
  Gene Name: solute carrier family 36 (proton/amino acid symporter), member 4
  ENST ID: ENST00000524875
  CDS Start-End: 133-468
gcgccggggcagggaggcgggcaccaggcgcgggtccctccgggcaggggaggtaggcctgggcctgacgccggccacgcagcggcgggagagtgagcactcgggcggcggcgtcctggagacccgcgagagatggaagcggcggcgacgccggcggctgccggggcggcgaggcgcgaggagctagatatggatgtaatgaggcccttgataaatgagcagaattttgatgggacatcagatgaagaacatgagcaagagcttctgcctgttcagaagcattaccaacttgatgatcaagagggcatttcatttgtacaaactcttatgcaccttcttaaaggaaatattggaactggccttttaggacttccattggcaataaaaaatgcaggcatagtgcttggaccaatcagccttgtgtttataggaattatttctgttcactgtatgcacatattggtttaaaaagtcaacattaggttatagtgacactgtgagctttgctatggaagtgagtccttggagttgtcttcagaagcaagcagcatgggggcggagtgtggttgacttttttctggtgataacacagctgggattctgtagtgtttatattgtcttcttagctgaaaatgtgaaacaatgttttacattttggtaaacatgtgagatcgtaggaagtcctattagatagccaatctctgtctctag

SEQ ID NO: 183917 - DNA, 1917 bp, Homo sapiens
  Payload ID: 16242
  Gene Symbol: SLC36A4
  Gene Name: solute carrier family 36 (proton/amino acid symporter), member 4
  Uniprot ID: Q6YBV0
  ENST ID: ENST00000529184
  CDS Start-End: 586-1695
ttttttcccaatgatgctttaaggaagttatcattgttctgcttttcaaatgctgcagccccattcggaatctccagatgaatcctcattttactccttgttatcccagagtttcgaacaggtcgtgctgaccagaatgaacaggagatacctgtagcttgctcacttggcaaagtttgtttgttttttgctgctttcctcccatcttgtttcttggcgacagggcgtgtttgtttacggtttcccgctgtccaaaataaaaaaatatggatgtaatgaggcccttgataaatgagcagaattttgatgggacatcagatgaagaacatgagcaagagcttctgcctgttcagaagcattaccaacttgatgatcaagagggcatttcatttgtacaaactcttatgcaccttcttaaaggaaatattggaactggccttttaggacttccattggcaataaaaaatgcaggcatagtgcttggaccaatcagccttgtgtttataggaattatttctgttcactgtatgcacatattggtttaaaaagtcaacattaggttatagtgacactgtgagctttgctatggaagtgagtccttggagttgtcttcagaagcaagcagcatgggggcggagtgtggttgacttttttctggtgataacacagctgggattctgtagtgtttatattgtcttcttagctgaaaatgtgaaacaagttcatgaaggattcctggagagtaaagtgtttatttcaaatagtaccaattcatcaaacccttgtgagagaagaagtgttgacctaaggatatatatgctttgctttcttccatttataattcttttggtcttcattcgtgaactaaagaatctatttgtactttcattccttgccaacgtttccatggctgtcagtcttgtgataatttaccagtatgttgtcaggaacatgccagatccccacaaccttccaatagtggctggttggaagaaatacccactcttttttggtactgctgtatttgcttttgaaggcataggagtggtccttccactggaaaaccaaatgaaagaatcaaagcgtttccctcaagcgttgaatattggcatggggattgttacaactttgtatgtaacattagctactttaggatatatgtgtttccatgatgaaatcaaaggcagcataactttaaatcttccccaagatgtatggttatatcaatcagtgaaaattctatattcctttggcatttttgtgacatattcaattcagttctatgttccagcagagatcattatccctgggatcacatccaaatttcatactaaatggaagcaaatctgtgaatttgggataagatccttcttggttagtattacttgtgccggagcaattcttattcctcgtttagacattgtgatttccttcgttggagctgtgagcagcagcacattggccctaatcctgccacctttggttgaaattcttacattttcgaaggaacattataatatatggatggtcctgaaaaatatttctatagcattcactggagttgttggcttcttattaggtacatatataactgttgaagaaattatttatcctactcccaaagttgtagctggcactccacagagtccttttctaaatttgaattcaacatgcttaacatctggtttgaaatagtaaaagcagaatcatgagtcttctatttttgtcccatttctgaaaattatcaagataactagtaaaatacattgctatatacataaaaatggtaacaaactctgttttctttggcacgatattaatattttggaagtaatcataactctttaccagtagtggtaaacctatgaaaaatccttgcttttaagtgttagcaatagttcaaaaaattaagttctg

SEQ ID NO: 183918 - DNA, 2456 bp, Homo sapiens
  Payload ID: 16243
  Gene Symbol: SLC36A3
  Gene Name: solute carrier family 36, member 3
  Uniprot ID: Q495N2
  ENST ID: ENST00000335230
  CDS Start-End: 413-1825
gagcctggccccacgtccaggcaccaggacctccaatccaatggtgtcttcttcctcccagtcacactgttcactttgccctacagcagcaagggctaaactaggagaggccaaaagcccaggcaagtcctggttgggcaagcaattgcgagtgaaactgaggaccatcctgactgagatgggtctttcataagtcccccaagagccaggtgaggcatcatcaacatcagcctctcctgccaccaccgcttccctgattcatgcacttcaggcttcagccagcagcacgcatccttggggttaggagccagcatctcaggtcagcagccatggtttctctggagaaagacccatcagaggctcattcagagccttaaccctgagcctctgccacctacccaccgtgttgaagatgtcattgcttggaagggactacaacagtgagctgaactccttggacaacggacctcagtcaccctcagagagcagcagtagcattacttcagagaatgtccatcctgctggagaagctggactatcgatgatgcaaactttgatccacttgttgaaatgcaacattggcacagggctcctggggcttcccctggccataaagaatgccggcttgttggtcggtcctgtcagccttctggccatcggggtcctcaccgtgcactgcatggtcatcctgttgaactgtgctcaacacctcagccagagactgcagaagacttttgtgaactatggagaggccacgatgtacggccttgaaacctgcccgaacacctggctgagggcccatgcagtgtggggaaggtacactgtcagcttcttattagtcatcacccagctgggcttctgcagtgtttattttatgtttatggcagacaatttacaacagatggtggaaaaagcccacgtgacctccaacatctgccagcccagggagattctgacgctgacccccatcctggacattcgtttctacatgctgataatcctgcccttcctgatcctgttggtgtttatccagaacctcaaggtgctgtccgtcttctcgacattggccaacatcaccacccttgggagcatggctctgatctttgagtatatcatggaggggattccatatcccagcaacctacccttgatggcaaactggaagaccttcttgctgttctttggtacagccatcttcacatttgaaggcgtcggtatggttctgcctctcaaaaaccagatgaagcatccacagcagttttcttttgttctgtacttggggatgtccattgtcatcatcctctatatcttactggggacactgggctacatgaagtttgggtcagacacccaggccagcatcaccctcaacttgcccaattgctggttgtaccagtcagtcaagctgatgtactctatcggcatcttcttcacctatgccctccagttccacgtcccagctgagatcatcatcccgtttgccatctcccaagtgtcagagagctgggcactgtttgtagacctgtctgtccgctcagccttggtctgtctaacctgtgtctcagccatcctcatcccccgcctggacttggtcatctccctggtaggctccgtgagcagcagcgccctggctctcatcatcccagccctcctggagatcgtcatcttttactctgaggacatgagctgtgtcaccattgccaaggacatcatgattagcatcgtgggccttttagggtgtatatttgggacataccaagccctctatgagttgccccaacccatcagccattccatggccaactccacaggtgtccatgcataattatctgtttttattctaatagctctcccttcctcccatccccagtttgacttccatgtggatgttatataccttcatcaaatcccaacatctctatattaattagtggcgtctttatctttccaagagaaatgcagatgagaaaagttagcactgatgtctctcaggctacacctcttttggttttatattttttggatggccttttgtacctctgaaccaaaattagattcaactattcatattatcagcctcattttatggaaaagggatgccacttaccccaatagcccttgaaacagagaccaagcataaatacaaaagtaactgttttctctacactgcagtagctgcccttaaagcatcagatttagaaaagtgtatgttgggcgaagggagttttctatttagatattctaagtagaagagtcatagacagaacaaaaacagaactcagcagtaattttgtccaaccactggctccgccactgatttcctactggccctcaggcaagttcctccccatctctcagtctatgaagtgaacagttggactaactgattattaaggactctgtcaactctgatattctgaaagtgaataaaagaaattaacttatccaccaaccac

SEQ ID NO: 183919 - DNA, 1720 bp, Homo sapiens
  Payload ID: 16243
  Gene Symbol: SLC36A3
  Gene Name: solute carrier family 36, member 3
  Uniprot ID: Q495N2
  ENST ID: ENST00000377713
  CDS Start-End: 143-1678
ggcttcagccagcagcacgcatccttggggttaggagccagcatctcaggtcagcagccatggtttctctggagaaagacccatcagaggctcattcagagccttaaccctgagcctctgccacctacccaccgtgttgaagatgtcattgcttggaagggactacaacagtgagctgaactccttggacaacggacctcagtcaccctcagagagcagcagtagcattacttcagagaatgtccatcctgctggagaagctggactatcgatgatgcaaactttgatccacttgttgaaatgcaacattggcacagggctcctggggcttcccctggccataaagaatgccggcttgttggtcggtcctgtcagccttctggccatcggggtcctcaccgtgcactgcatggtcatcctgttgaactgtgctcaacacctcagccagagactgcagaagacttttgtgaactatggagaggccacgatgtacggccttgaaacctgcccgaacacctggctgagggcccatgcagtgtggggaagatggaatttggctctgtcacccaggctggagtgcagtggcaagatctcagctcactgcaacccccaccttcagggttcaagcaattctcctgcccaagcctcccgagtagctgggatttacaggtacactgtcagcttcttattagtcatcacccagctgggcttctgcagtgtttattttatgtttatggcagacaatttacaacagatggtggaaaaagcccacgtgacctccaacatctgccagcccagggagattctgacgctgacccccatcctggacattcgtttctacatgctgataatcctgcccttcctgatcctgttggtgtttatccagaacctcaaggtgctgtccgtcttctcgacattggccaacatcaccacccttgggagcatggctctgatctttgagtatatcatggaggggattccatatcccagcaacctacccttgatggcaaactggaagaccttcttgctgttctttggtacagccatcttcacatttgaaggcgtcggtatggttctgcctctcaaaaaccagatgaagcatccacagcagttttcttttgttctgtacttggggatgtccattgtcatcatcctctatatcttactggggacactgggctacatgaagtttgggtcagacacccaggccagcatcaccctcaacttgcccaattgctggttgtaccagtcagtcaagctgatgtactctatcggcatcttcttcacctatgccctccagttccacgtcccagctgagatcatcatcccgtttgccatctcccaagtgtcagagagctgggcactgtttgtagacctgtctgtccgctcagccttggtctgtctaacctgtgtctcagccatcctcatcccccgcctggacttggtcatctccctggtaggctccgtgagcagcagcgccctggctctcatcatcccagccctcctggagatcgtcatcttttactctgaggacatgagctgtgtcaccattgccaaggacatcatgattagcatcgtgggccttttagggtgtatatttgggacataccaagccctctatgagttgccccaacccatcagccattccatggccaactccacaggtgtccatgcataattatctgtttttattctaatagctctcccttcctcccatccc

SEQ ID NO: 183920 - DNA, 3664 bp, Homo sapiens
  Payload ID: 16244
  Gene Symbol: SLC37A1
  Gene Name: solute carrier family 37 (glucose-6-phosphate transporter), member 1
  Uniprot ID: P57057
  ENST ID: ENST00000352133
  CDS Start-End: 983-2584
cggcggcgcaggtgaggcgcggggccggggccggaccgggaggcggggaccccccgcccccccgcccgcacctgcggggcagccggcgctcaggcgccgcagccgctcagcacctgcggcgccctcagggagccgggcgcggggccctgcgcactcggagctcggctcctctccttccttttcttttttttcggggggaggtgggggctggtttggatgttttccgagagccggggacggtctcaagctattttcgcggagggaagtctttgaaatacgacatctagaagagtggccctcggcgacaatgccgggcgttcccggaccggggcaacgctgggattccggggaagtggaggcagagggagcgggcacggggccggcagccgctccacggagtccccggcaggggcgagcttagctgtccagccgggtcccctgcccaccccggcccgggccgcggtgacagctgagggtccagagagccggcaggaggggaccctgcgcattgtctgccgcgatggggacgtgggcgtgcccgcggaattcacctcctccggggaccagccgcccagggaggagccggcacagaacgctggctcggagcgccggcaccctgggcctttgcgttgtttgtcggctgagcagctggttcccggagcccgtgggcctcctggccaatgcgagtgacagcgaccttctgggtttataataaagggcttgacgcgccggaaagtcccctcgccgctggccaccagccttccagcccttacggcccacgccgtaatcctggtgaccgagaagagagcagagccactgccagaaggaaggggacaagacccagcaggacaccttctttccacgctttccagcctgtgggagcggcaggggcaacagagagaggatctggagccaggattaatgactcatttatgaagcatcttattctgcgaccgaggctcagtggtcagtggcgacgtaaatggctcgactccccgctggcattcgcttcatcatctcattctccagggatcagtggtacagagccttcatttttattttgacatttctgctgtatgcaagttttcacttatctcgaaagcctatcagcatagttaagggtgagctccacaagtactgcactgcttgggatgaagctgacgtcaggttcagcagccagaacaggaagtctgggtccgctgccccccaccagctccctgacaatgagaccgactgtggctgggcaccgtttgataagaacaactatcagcagctgcttggggccctggactactccttcctgtgcgcctatgccgtggggatgtacctcagtggcatcattggggagcgcctgccgattaggtattacctaactttcgggatgctcgccagcggagccttcaccgccctgttcggcttagggtatttctacaacatccacagtttcggattctacgtggtaactcaggtcatcaacgggctggtgcagaccaccggctggcccagcgtcgtcacctgcctcggcaactggtttggaaaaggaaggagaggtttgattatgggggtctggaactcccacacctccgtgggcaacatcttggggtcattgatcgctggctactgggtgtccacatgctggggcctgtccttcgtcgtgcctggagccatcgtggcagccatggggatagtgtgctttctcttcctcattgaacatccgaacgacgtcaggtgctcctccaccctggtgacgcactcaaaaggctatgagaatggtacaaacagattgagactccagaagcaaatcttgaagagcgaaaagaacaagcctctggacccagagatgcagtgcctgctgctctcagatgggaagggctccatccacccgaaccacgtcgtcattctccccggggacggtgggagtggcacggccgccatcagcttcacaggggccttgaaaattccaggcgtgatagagttctcactgtgtctgctgtttgccaagctggtcagctatactttcctcttctggctgcccctgtacatcacgaatgtggatcaccttgatgccaaaaaggcgggggagctctccaccctgtttgacgtgggcggaatctttggtgggatcctggcaggtgtgatctcagaccgactggagaaaagggcctccacctgcggcctgatgctgctgctcgcggcccccacgctctacatcttctccaccgtcagcaagatggggcttgaggccaccatcgccatgctgctgctcagcggagccctggtcagtgggccctacacactcatcaccaccgccgtctccgccgacctggggactcataaaagtctgaaaggcaacgcgcacgccctctccaccgtgacggccatcattgacgggacgggctctgtaggagcagccctgggccccctgctggctgggctcctctccccgtccggctggagcaatgtgttttacatgctgatgtttgcagatgcctgtgccttactgttcctgatccgcctcatacacaaggagctgagctgcccagggtcagctacgggggaccaagttccatttaaggaacagtgacaccccaccccagtcccgtggagggggtctgggcccacccttcacaactgcctttcaaggacagttcagacaaagggccctgcatggaaagagtgacctccctttgccttttgcacacgcacctggaaaagacacagaagccaacctgagaacccctggtgctattttaaaggagacatattgctgaacagcagtgagaaaagtctgcaggaactgctgcctgagccaagccagagaaccgaagacccggccggccctggcctcacaggcgtgtgcccatgcagccacccaaatgcacgcgtgacaacaaggccgggagggtggggggggtgcacaggtagccccgaccctctcaggcattccagccacagaacatcaaagtgagcgagtactgcgctggctgtggcttcagagaacctgtatgtgccacatggaaaaacaggacaccagagcccaccagacagtgccggccagcagagaagcagagagccagcgccacacaacatcaagaaggccgacaaccaggttggaaaccaagacggagctcagacccaccacatcgccccagaggcttttccagcacccatgatgtttcggactgacctaaaaactaattgtcgagaagccaagggtgaggaggcaggaagcacctccggttggaggcacccaggcttgccagccacagagcgccccaaagtcaccgtcatcccagcccctggccttcctgctgccctccggggccatggcactgctgttcagctcaggcacaggggcacagcagaggtttgggaagcggtctccccaccggcactgggattggcgggtccaagcccagcaaccggcttcgctccacaacacacaccacacctgggactgtttttaatacatagcaacagactgggttatttatttaagatgtgtattgtgtcatatgaagtttaagagacataaatggcattttgttatttattaagacaaactccaattgttctctggctgtttttttcagttgtgtctagcaaaatacttatctgccctttgaaataaaatgtttttgtttaaaaaatctcagaacactca

SEQ ID NO: 183921 - DNA, 3094 bp, Homo sapiens
  Payload ID: 16244
  Gene Symbol: SLC37A1
  Gene Name: solute carrier family 37 (glucose-6-phosphate transporter), member 1
  Uniprot ID: P57057
  ENST ID: ENST00000398341
  CDS Start-End: 413-2014
tgggaagttcgcgcaagtgcggctctgcagggaggagggagggccgaggggaaggccctcgagagagtggagggcaacagtggccacggttcctctgtacttcgtttcttccctttatagaattgagagattgctgagcctaaatacatgttgctgcattgcctccgagaatggccggacctatccccactctcaccaaaacagagtgtgggactcactgctccctcgcctactagagcagagccactgccagaaggaaggggacaagacccagcaggacaccttctttccacgctttccagcctgtgggagcggcaggggcaacagagagaggatctggagccaggattaatgactcatttatgaagcatcttattctgcgaccgaggctcagtggtcagtggcgacgtaaatggctcgactccccgctggcattcgcttcatcatctcattctccagggatcagtggtacagagccttcatttttattttgacatttctgctgtatgcaagttttcacttatctcgaaagcctatcagcatagttaagggtgagctccacaagtactgcactgcttgggatgaagctgacgtcaggttcagcagccagaacaggaagtctgggtccgctgccccccaccagctccctgacaatgagaccgactgtggctgggcaccgtttgataagaacaactatcagcagctgcttggggccctggactactccttcctgtgcgcctatgccgtggggatgtacctcagtggcatcattggggagcgcctgccgattaggtattacctaactttcgggatgctcgccagcggagccttcaccgccctgttcggcttagggtatttctacaacatccacagtttcggattctacgtggtaactcaggtcatcaacgggctggtgcagaccaccggctggcccagcgtcgtcacctgcctcggcaactggtttggaaaaggaaggagaggtttgattatgggggtctggaactcccacacctccgtgggcaacatcttggggtcattgatcgctggctactgggtgtccacatgctggggcctgtccttcgtcgtgcctggagccatcgtggcagccatggggatagtgtgctttctcttcctcattgaacatccgaacgacgtcaggtgctcctccaccctggtgacgcactcaaaaggctatgagaatggtacaaacagattgagactccagaagcaaatcttgaagagcgaaaagaacaagcctctggacccagagatgcagtgcctgctgctctcagatgggaagggctccatccacccgaaccacgtcgtcattctccccggggacggtgggagtggcacggccgccatcagcttcacaggggccttgaaaattccaggcgtgatagagttctcactgtgtctgctgtttgccaagctggtcagctatactttcctcttctggctgcccctgtacatcacgaatgtggatcaccttgatgccaaaaaggcgggggagctctccaccctgtttgacgtgggcggaatctttggtgggatcctggcaggtgtgatctcagaccgactggagaaaagggcctccacctgcggcctgatgctgctgctcgcggcccccacgctctacatcttctccaccgtcagcaagatggggcttgaggccaccatcgccatgctgctgctcagcggagccctggtcagtgggccctacacactcatcaccaccgccgtctccgccgacctggggactcataaaagtctgaaaggcaacgcgcacgccctctccaccgtgacggccatcattgacgggacgggctctgtaggagcagccctgggccccctgctggctgggctcctctccccgtccggctggagcaatgtgttttacatgctgatgtttgcagatgcctgtgccttactgttcctgatccgcctcatacacaaggagctgagctgcccagggtcagctacgggggaccaagttccatttaaggaacagtgacaccccaccccagtcccgtggagggggtctgggcccacccttcacaactgcctttcaaggacagttcagacaaagggccctgcatggaaagagtgacctccctttgccttttgcacacgcacctggaaaagacacagaagccaacctgagaacccctggtgctattttaaaggagacatattgctgaacagcagtgagaaaagtctgcaggaactgctgcctgagccaagccagagaaccgaagacccggccggccctggcctcacaggcgtgtgcccatgcagccacccaaatgcacgcgtgacaacaaggccgggagggtggggggggtgcacaggtagccccgaccctctcaggcattccagccacagaacatcaaagtgagcgagtactgcgctggctgtggcttcagagaacctgtatgtgccacatggaaaaacaggacaccagagcccaccagacagtgccggccagcagagaagcagagagccagcgccacacaacatcaagaaggccgacaaccaggttggaaaccaagacggagctcagacccaccacatcgccccagaggcttttccagcacccatgatgtttcggactgacctaaaaactaattgtcgagaagccaagggtgaggaggcaggaagcacctccggttggaggcacccaggcttgccagccacagagcgccccaaagtcaccgtcatcccagcccctggccttcctgctgccctccggggccatggcactgctgttcagctcaggcacaggggcacagcagaggtttgggaagcggtctccccaccggcactgggattggcgggtccaagcccagcaaccggcttcgctccacaacacacaccacacctgggactgtttttaatacatagcaacagactgggttatttatttaagatgtgtattgtgtcatatgaagtttaagagacataaatggcattttgttatttattaagacaaactccaattgttctctggctgtttttttcagttgtgtctagcaaaatacttatctgccctttgaaataaaatgtttttgtttaaaaaatctcagaacactca

SEQ ID NO: 183922 - DNA, 494 bp, Homo sapiens
  Payload ID: 16244
  Gene Symbol: SLC37A1
  Gene Name: solute carrier family 37 (glucose-6-phosphate transporter), member 1
  ENST ID: ENST00000398343
  CDS Start-End: 439-494
ggcaccctgggcctttgcgttgtttgtcggctgagcagctggttcccggagcccgtgggcctcctggccaatgcgagtgacagcgaccttctgggtttataataaagggcttgacgcgccggaaagtcccctcgccgctggccaccagccttccagcccttacggcccacgccgtaatcctggtgaccgagaagctctttgcctggaaggtgcctgcctgcctgcctgccggcccttgaacttaaatcgtctgaagttgtagagcagagccactgccagaaggaaggggacaagacccagcaggacaccttctttccacgctttccagcctgtgggagcggcaggggcaacagagagaggatctggagccaggattaatgactcatttatgaagcatcttattctgcgaccgaggctcagtggtcagtggcgacgtaaatggctcgactccccgctggcattcgcttcatcatctcattctccagggatcagtg

SEQ ID NO: 183923 - DNA, 568 bp, Homo sapiens
  Payload ID: 16244
  Gene Symbol: SLC37A1
  Gene Name: solute carrier family 37 (glucose-6-phosphate transporter), member 1
  ENST ID: ENST00000419522
  CDS Start-End: 513-568
ggggagctgtggctcagacctctggtttctgcgcctcctcactctccaaacccaacctcgaggttcccccgccgctgcgcaccctgggaagccctttctcaccaggagctctcaccccaatatcattctctccctcctcctccaactcctccgagcccaggtccgacatggtctcgccccagcctggatcacagccgcagcgcctctagcagctttatagaattgagagattgctgagcctaaatacatgttgctgcattgcctccgagaatggccggacctatccccactctcaccaaaacagagtgtgggactcactgctccctcgcctactagagcagagccactgccagaaggaaggggacaagacccagcaggacaccttctttccacgctttccagcctgtgggagcggcaggggcaacagagagaggatctggagccaggattaatgactcatttatgaagcatcttattctgcgaccgaggctcagtggtcagtggcgacgtaaatggctcgactccccgctggcattcgcttcatcatctcattctccagggatcagtg

SEQ ID NO: 183924 - DNA, 2696 bp, Homo sapiens
  Payload ID: 16245
  Gene Symbol: SLC37A2
  Gene Name: solute carrier family 37 (glucose-6-phosphate transporter), member 2
  Uniprot ID: Q8TED4
  ENST ID: ENST00000308074
  CDS Start-End: 33-1550
gtcgactcagccttaggtaccggtcaggcaaaatgcggtcctccctggctccgggagtctggttcttccgggccttctccagggacagctggttccgaggcctcatcctgctgctgaccttcctaatttacgcctgctatcacatgtccaggaagcctatcagtatcgtcaagagccgtctgcaccagaactgctcggagcagatcaaacccatcaatgatactcacagtctcaatgacaccatgtggtgcagctgggccccatttgacaaggacaactataaggagttactagggggcgtggacaacgccttcctcatcgcctatgccatcggcatgttcatcagtggggtttttggggagcggcttccgctccgttactacctctcagctggaatgctgctcagtggccttttcacctcgctctttggcctgggatatttctggaacatccacgagctctggtactttgtggtcatccaggtctgtaatggactcgtccagaccacaggctggccctctgtggtgacctgtgttggcaactggttcgggaaggggaagcgggggttcatcatgggcatctggaattcccacacatctgtgggcaacatcctgggctccctgatcgccggcatctgggtgaacgggcagtggggcctgtcgttcatcgtgcctggcatcattactgccgtcatgggcgtcatcaccttcctcttcctcatcgaacacccagaagatgtggactgcgcccctcctcagcaccacggtgagccagctgagaaccaggacaaccctgaggaccctgggaacagtccctgctctatcagggagagcggccttgagactgtggccaaatgctccaaggggccatgcgaagagcctgctgccatcagcttctttggggcgctccggatcccaggcgtggtcgagttctctctgtgtctgctgtttgccaagctggtcagttacaccttcctctactggctgcccctctacatcgccaatgtggctcactttagtgccaaggaggctggggacctgtctacactcttcgatgttggtggcatcataggcggcatcgtggcagggctcgtctctgactacaccaatggcagggccaccacttgctgtgtcatgctcatcttggctgcccccatgatgttcctgtacaactacattggccaggacgggattgccagctccatagtgatgctgatcatctgtgggggcctggtcaatggcccatacgcgctcatcaccactgctgtctctgctgatctggggactcacaagagcctgaagggcaacgccaaagccctgtccacggtcacggccatcattgacggcaccggctccataggtgcggctctggggcctctgctggctgggctcatctcccccacgggctggaacaatgtcttctacatgctcatctctgccgacgtcctagcctgcttgctcctttgccggttagtatacaaagagatcttggcctggaaggtgtccctgagcagaggcagcggctctagtatggtcctaacccaccagtgatagtattttcctcaagtcccatgacttttgtataaagaaatatgaggccccaattggaacagcagcatggagggtcccagttgggtccccaacgtgctccccatgggcaagacaatggaaacttccacaagcagggaaggcaaaccctctttattgaacattagccagcccagcccagaccccagggctgcctaaggacacagagattctccatgggaaggggactgccaagcatgaggaaatagaagattcaggggcctgagctctggaagctgcaagcaaaagggatgggactagggctgagttgtgtctccattttgataaggaaaggatatgctcagactcttgcttgttcagattccaagacagaaggcttcacaaggccaacgcctggaaaatgggcatctctccttcccatgttaagctttaacctctgtaatctgcctgtatctataggtgggcatctcactccaccaaaggagcccagcctctctttgtccctctatccatgcaacagtcttctctgtgcatttccccaagctgggccctcttctactctccatttaggcctgttgataactccattacccgcccatcactgctgttcctccagggccagcactcgggcgaggcaggggagctgccttcggtacataatttgaaggggcactccctcttgggcacatgccggccctgagtgcctcccttgcctcactctgatcctggccccataatgtcctcagtggaaggtgatgggggccggtgctgtggggagagtagaaagaggggttggcatgactaaaaataccagtatgtgtattaagtattttgagaatgaaatgccaaggagtgcctactatatgccagctctaggaatggagtagacagtggacacaagaaggacttacgccctgagcacaggtgccaatggtgacaagactggcaagacgtgagggcatgaatggttcattcaggcagctgctgcagatgtggtcacctggtgccatctgctgctcccttttccacttttctatgtcctccttccaccccaagtcccggatcactcgctgttttctggctagctcttggcatctccatctgagcctaaagttgcccactggcaccaatagattctgtttgacctgc

SEQ ID NO: 183925 - DNA, 2910 bp, Homo sapiens
  Payload ID: 16245
  Gene Symbol: SLC37A2
  Gene Name: solute carrier family 37 (glucose-6-phosphate transporter), member 2
  Uniprot ID: Q8TED4
  ENST ID: ENST00000403796
  CDS Start-End: 302-1807
agaaagtgcagggcggaatgaggagccccagcacctcagagctgtcgggcagtggcggggaagcaaagcacaggagcgctgtggtgccagcggccgggctagggacgactggcgggtttgcgctggacccgaccccgagggcgggcgcaagggggcgggcgctgccgtactcaggccgcggggccagggcgggccggccggcggggcatttaaaccccgctgacagccagtccagcccgggacacgcgcccagctctgtagcctcctccgtcgactcagccttaggtaccggtcaggcaaaatgcggtcctccctggctccgggagtctggttcttccgggccttctccagggacagctggttccgaggcctcatcctgctgctgaccttcctaatttacgcctgctatcacatgtccaggaagcctatcagtatcgtcaagagccgtctgcaccagaactgctcggagcagatcaaacccatcaatgatactcacagtctcaatgacaccatgtggtgcagctgggccccatttgacaaggacaactataaggagttactagggggcgtggacaacgccttcctcatcgcctatgccatcggcatgttcatcagtggggtttttggggagcggcttccgctccgttactacctctcagctggaatgctgctcagtggccttttcacctcgctctttggcctgggatatttctggaacatccacgagctctggtactttgtggtcatccaggtctgtaatggactcgtccagaccacaggctggccctctgtggtgacctgtgttggcaactggttcgggaaggggaagcgggggttcatcatgggcatctggaattcccacacatctgtgggcaacatcctgggctccctgatcgccggcatctgggtgaacgggcagtggggcctgtcgttcatcgtgcctggcatcattactgccgtcatgggcgtcatcaccttcctcttcctcatcgaacacccagaagatgtggactgcgcccctcctcagcaccacggtgagccagctgagaaccaggacaaccctgaggaccctgggaacagtccctgctctatcagggagagcggccttgagactgtggccaaatgctccaaggggccatgcgaagagcctgctgccatcagcttctttggggcgctccggatcccaggcgtggtcgagttctctctgtgtctgctgtttgccaagctggtcagttacaccttcctctactggctgcccctctacatcgccaatgtggctcactttagtgccaaggaggctggggacctgtctacactcttcgatgttggtggcatcataggcggcatcgtggcagggctcgtctctgactacaccaatggcagggccaccacttgctgtgtcatgctcatcttggctgcccccatgatgttcctgtacaactacattggccaggacgggattgccagctccatagtgatgctgatcatctgtgggggcctggtcaatggcccatacgcgctcatcaccactgctgtctctgctgatctggggactcacaagagcctgaagggcaacgccaaagccctgtccacggtcacggccatcattgacggcaccggctccataggtgcggctctggggcctctgctggctgggctcatctcccccacgggctggaacaatgtcttctacatgctcatctctgccgacgtcctagcctgcttgctcctttgccggttagtatacaaagagatcttggcctggaaggtgtccctgagcagaggcagcgggtataaagaaatatgaggccccaattggaacagcagcatggagggtcccagttgggtccccaacgtgctccccatgggcaagacaatggaaacttccacaagcagggaaggcaaaccctctttattgaacattagccagcccagcccagaccccagggctgcctaaggacacagagattctccatgggaaggggactgccaagcatgaggaaatagaagattcaggggcctgagctctggaagctgcaagcaaaagggatgggactagggctgagttgtgtctccattttgataaggaaaggatatgctcagactcttgcttgttcagattccaagacagaaggcttcacaaggccaacgcctggaaaatgggcatctctccttcccatgttaagctttaacctctgtaatctgcctgtatctataggtgggcatctcactccaccaaaggagcccagcctctctttgtccctctatccatgcaacagtcttctctgtgcatttccccaagctgggccctcttctactctccatttaggcctgttgataactccattacccgcccatcactgctgttcctccagggccagcactcgggcgaggcaggggagctgccttcggtacataatttgaaggggcactccctcttgggcacatgccggccctgagtgcctcccttgcctcactctgatcctggccccataatgtcctcagtggaaggtgatgggggccggtgctgtggggagagtagaaagaggggttggcatgactaaaaataccagtatgtgtattaagtattttgagaatgaaatgccaaggagtgcctactatatgccagctctaggaatggagtagacagtggacacaagaaggacttacgccctgagcacaggtgccaatggtgacaagactggcaagacgtgagggcatgaatggttcattcaggcagctgctgcagatgtggtcacctggtgccatctgctgctcccttttccacttttctatgtcctccttccaccccaagtcccggatcactcgctgttttctggctagctcttggcatctccatctgagcctaaagttgcccactggcaccaatagattctgtttgacctgctg

SEQ ID NO: 183926 - DNA, 552 bp, Homo sapiens
  Payload ID: 16245
  Gene Symbol: SLC37A2
  Gene Name: solute carrier family 37 (glucose-6-phosphate transporter), member 2
  ENST ID: ENST00000532000
  CDS Start-End: 103-552
cccgggacacgcgcccagctctgtagcctcctccgtcgactcagccttaggttccgaggcctcatcctgctgctgaccttcctaatttacgcctgctatcacatgtccaggaagcctatcagtatcgtcaagagccgtctgcaccagaactgctcggagcagatcaaacccatcaatgatactcacagtctcaatgacaccatgtggtgcagctgggccccatttgacaaggacaactataaggagttactagggggcgtggacaacgccttcctcatcgcctatgccatcggcatgttcatcagtggggtttttggggagcggcttccgctccgttactacctctcagctggaatgctgctcagtggccttttcacctcgctctttggcctgggatatttctggaacatccacgagctctggtactttgtggtcatccaggtctgtaatggactcgtccagaccacaggctggccctctgtggtgacctgtgttggcaactggttcgggaaggggaagcgggggttcatcatgggcatctggaattcccac

SEQ ID NO: 183927 - DNA, 2606 bp, Homo sapiens
  Payload ID: 16246
  Gene Symbol: SLC37A4
  Gene Name: solute carrier family 37 (glucose-6-phosphate transporter), member 4
  ENST ID: ENST00000545985
  CDS Start-End: 758-2047
gcttgcgcagccttcgctagccccgccccgtcctattcgggctcccgcctctgttcagttccagagacaattcatgggtcttggggccaccgaggcgctgtccctgaccaccagcacgagacccctttctatcgcgccagtcctgtggtctccgcacctctccagctcctgcacccccggcccccgtggttcccagccgcacagtagcgtgtcctgggtagcgtgaggacccacggggctgggcaggtgccacgagcccgccgcctcttcgccgcccgccgcctctcctcctctcccgcccgccgcctggccctcccctaccaggctgagcctctgggtgccagaagcgcggggcctccgggagaatacgtgcggtcgcccgctccgcgtgcgcctacgccttctgctccagttgctttcccaattgagcggaaaagccggggcatgttgccggggccctgggcgggacggttgtgccctgcagcccgaagcccgccggggcaccttcccgcccacgagctgcccagtccctctgcttgcggcccctgccaacgtcccacaggacactgggtccccttggagcctccccaggcttaatgattgtccagaaggcggctataaagggagcctgggaggctgggtggaggagggagcagaaaaaacccaactcagcagatctgggaactgtgagagcggcaagcaggaactgtggtcagaggctgtgcgtcttggctggtagggcctgctcttttctaccatggcagcccagggctatggctattatcgcactgtgatcttctcagccatgtttgggggctacagcctgtattacttcaatcgcaagaccttctcctttgtcatgccatcattggtggaagagatccctttggacaaggatgatttggggttcatcaccagcagccagtcggcagcttatgctatcagcaagtttgtcagtggggtgctgtctgaccagatgagtgctcgctggctcttctcttctgggctgctcctggttggcctggtcaacatattctttgcctggagctccacagtacctgtctttgctgccctctggttccttaatggcctggcccaggggctgggctggcccccatgtgggaaggtcctgcggaagtggtttgagccatctcagtttggcacttggtgggccatcctgtcaaccagcatgaacctggctggagggctgggccctatcctggcaaccatccttgcccagagctacagctggcgcagcacgctggccctatctggggcactgtgggtggttgtctccttcctctgtctcctgctcatccacaatgaacctgctgatgttggactccgcaacctggaccccatgccctctgagggcaagaagggctccttgaaggaggagagcaccctgcaggagctgctgctgtccccttacctgtgggtgctctccactggttaccttgtggtgtttggagtaaagacctgctgtactgactggggccagttcttccttatccaggagaaaggacagtcagcccttgtaggtagctcctacatgagtgccctggaagttgggggccttgtaggcagcatcgcagctggctacctgtcagaccgggccatggcaaaggcgggactgtccaactacgggaaccctcgccatggcctgttgctgttcatgatggctggcatgacagtgtccatgtacctcttccgggtaacagtgaccagtgactcccccaagctctggatcctggtattgggagctgtatttggtttctcctcgtatggccccattgccctgtttggagtcatagccaacgagagtgcccctcccaacttgtgtggcacctcccacgccattgtgggactcatggccaatgtgggcggctttctggctgggctgcccttcagcaccattgccaagcactacagttggagcacagccttctgggtggctgaagtgatttgtgcggccagcacggctgccttcttcctcctacgaaacatccgcaccaagatgggccgagtgtccaagaaggctgagtgaagagagtccaggttccggagcaccatcccacggtggccttccccctgcacgctctgcggggagaaaaggaggggcctgcctggctagccctgaacctttcactttccatttctgcgccttttctgtcacccgggtggcgctggaagttatcagtggctagtgaggtcccagctccctgatcctatgctctatttaaaagataacctttggccttagactccgttagctcctatttcctgccttcagacaaacaggaaacttctgcagtcaggaaggctcctgtacccttcttcttttcctaggccctgtcctgcccgcatcctaccccatccccacctgaagtgaggctatccctgcagctgcagggcactaatgacccttgacttctgctgggtcctaagtcctctcagcagtgggtgactgctgttgccaatacctcagactccagggaaagagaggaggccatcattctcactgtaccactaggcgcagttggatataggtgggaagaaaaggtgacttgttatagaagattaaaactagatttgatactgaacac

SEQ ID NO: 183928 - DNA, 2032 bp, Homo sapiens
  Payload ID: 16246
  Gene Symbol: SLC37A4
  Gene Name: solute carrier family 37 (glucose-6-phosphate transporter), member 4
  ENST ID: ENST00000538950
  CDS Start-End: 403-1473
gcttgcgcagccttcgctagccccgccccgtcctattcgggctcccgcctctgttcaggacactgggtccccttggagcctccccaggcttaatgattgtccagaaggcggctataaagggagcctgggaggctgggtggaggagggagcagaaaaaacccaactcagcagatctgggaactgtgagagcggcaagcaggaactgtggtcagaggctgtgcgtcttggctggagggacaaggtccctgactccaatcctgagccctttgccccatgttgggtggtggagcaacagaactgctagaggcccgggactggcatccagagtgagggttcatcaccagcagccagtcggcagcttatgctatcagcaagtttgtcagtggggtgctgtctgaccagatgagtgctcgctggctcttctcttctgggctgctcctggttggcctggtcaacatattctttgcctggagctccacagtacctgtctttgctgccctctggttccttaatggcctggcccaggggctgggctggcccccatgtgggaaggtcctgcggaagtggtttgagccatctcagtttggcacttggtgggccatcctgtcaaccagcatgaacctggctggagggctgggccctatcctggcaaccatccttgcccagagctacagctggcgcagcacgctggccctatctggggcactgtgggtggttgtctccttcctctgtctcctgctcatccacaatgaacctgctgatgttggactccgcaacctggaccccatgccctctgagggcaagaagggctccttgaaggaggagagcaccctgcaggagctgctgctgtccccttacctgtgggtgctctccactggttaccttgtggtgtttggagtaaagacctgctgtactgactggggccagttcttccttatccaggagaaaggacagtcagcccttgtaggtagctcctacatgagtgccctggaagttgggggccttgtaggcagcatcgcagctggctacctgtcagaccgggccatggcaaaggcgggactgtccaactacgggaaccctcgccatggcctgttgctgttcatgatggctggcatgacagtgtccatgtacctcttccgggtaacagtgaccagtgactcccccaagctctggatcctggtattgggagctgtatttggtttctcctcgtatggccccattgccctgtttggagtcatagccaacgagagtgcccctcccaacttgtgtggcacctcccacgccattgtgggactcatggccaatgtgggcggctttctggctgggctgcccttcagcaccattgccaagcactacagttggagcacagccttctgggtggctgaagtgatttgtgcggccagcacggctgccttcttcctcctacgaaacatccgcaccaagatgggccgagtgtccaagaaggctgagtgaagagagtccaggttccggagcaccatcccacggtggccttccccctgcacgctctgcggggagaaaaggaggggcctgcctggctagccctgaacctttcactttccatttctgcgccttttctgtcacccgggtggcgctggaagttatcagtggctagtgaggtcccagctccctgatcctatgctctatttaaaagataacctttggccttagactccgttagctcctatttcctgccttcagacaaacaggaaacttctgcagtcaggaaggctcctgtacccttcttcttttcctaggccctgtcctgcccgcatcctaccccatccccacctgaagtgaggctatccctgcagctgcagggcactaatgacccttgacttctgctgggtcctaagtcctctcagcagtgggtgactgctgttgccaatacctcagactccagggaaagagaggaggccatcattctcactgtaccactaggcgcagttggatataggtgggaagaaaaggtgacttgttatagaagattaaaactagatttgatactgaacac

SEQ ID NO: 183929 - DNA, 2356 bp, Homo sapiens
  Payload ID: 16246
  Gene Symbol: SLC37A4
  Gene Name: solute carrier family 37 (glucose-6-phosphate transporter), member 4
  ENST ID: ENST00000357590
  CDS Start-End: 442-1797
gcttgcgcagccttcgctagccccgccccgtcctattcgggctcccgcctctgttcagttccagagacaattcatgggtcttggggccaccgaggcgctgtccctgaccaccagcacgagacccctttctatcgcgccagtcctgtggtctccgcacctctccagctcctgcacccccggcccccgtggttcccagccgcacagtagcgtgtcctgggtagcgtgaggacccacggggctgggcaggacactgggtccccttggagcctccccaggcttaatgattgtccagaaggcggctataaagggagcctgggaggctgggtggaggagggagcagaaaaaacccaactcagcagatctgggaactgtgagagcggcaagcaggaactgtggtcagaggctgtgcgtcttggctggtagggcctgctcttttctaccatggcagcccagggctatggctattatcgcactgtgatcttctcagccatgtttgggggctacagcctgtattacttcaatcgcaagaccttctcctttgtcatgccatcattggtggaagagatccctttggacaaggatgatttggggttcatcaccagcagccagtcggcagcttatgctatcagcaagtttgtcagtggggtgctgtctgaccagatgagtgctcgctggctcttctcttctgggctgctcctggttggcctggtcaacatattctttgcctggagctccacagtacctgtctttgctgccctctggttccttaatggcctggcccaggggctgggctggcccccatgtgggaaggtcctgcggaagtggtttgagccatctcagtttggcacttggtgggccatcctgtcaaccagcatgaacctggctggagggctgggccctatcctggcaaccatccttgcccagagctacagctggcgcagcacgctggccctatctggggcactgtgggtggttgtctccttcctctgtctcctgctcatccacaatgaacctgctgatgttggactccgcaacctggaccccatgccctctgagggcaagaagggctccttgaaggaggagagcaccctgcaggagctgctgctgtccccttacctgtgggtgctctccactggttaccttgtggtgtttggagtaaagacctgctgtactgactggggccagttcttccttatccaggagaaaggacagtcagcccttgtaggtagctcctacatgagtgccctggaagttgggggccttgtaggcagcatcgcagctggctacctgtcagaccgggccatggcaaaggcgggactgtccaactacgggaaccctcgccatggcctgttgctgttcatgatggctggcatgacagtgtccatgtacctcttccgggtaacagtgaccagtgactcccccaaggatgttgctttctggactctggctcttcaccctctcgcggagctcacaggctttacagagcatgagctctggatcctggtattgggagctgtatttggtttctcctcgtatggccccattgccctgtttggagtcatagccaacgagagtgcccctcccaacttgtgtggcacctcccacgccattgtgggactcatggccaatgtgggcggctttctggctgggctgcccttcagcaccattgccaagcactacagttggagcacagccttctgggtggctgaagtgatttgtgcggccagcacggctgccttcttcctcctacgaaacatccgcaccaagatgggccgagtgtccaagaaggctgagtgaagagagtccaggttccggagcaccatcccacggtggccttccccctgcacgctctgcggggagaaaaggaggggcctgcctggctagccctgaacctttcactttccatttctgcgccttttctgtcacccgggtggcgctggaagttatcagtggctagtgaggtcccagctccctgatcctatgctctatttaaaagataacctttggccttagactccgttagctcctatttcctgccttcagacaaacaggaaacttctgcagtcaggaaggctcctgtacccttcttcttttcctaggccctgtcctgcccgcatcctaccccatccccacctgaagtgaggctatccctgcagctgcagggcactaatgacccttgacttctgctgggtcctaagtcctctcagcagtgggtgactgctgttgccaatacctcagactccagggaaagagaggaggccatcattctcactgtaccactaggcgcagttggatataggtgggaagaaaaggtgacttgttatagaagattaaaactagatttgatactgaacac

SEQ ID NO: 183930 - DNA, 2102 bp, Homo sapiens
  Payload ID: 16246
  Gene Symbol: SLC37A4
  Gene Name: solute carrier family 37 (glucose-6-phosphate transporter), member 4
  ENST ID: ENST00000330775
  CDS Start-End: 254-1543
gcttgcgcagccttcgctagccccgccccgtcctattcgggctcccgcctctgttcaggacactgggtccccttggagcctccccaggcttaatgattgtccagaaggcggctataaagggagcctgggaggctgggtggaggagggagcagaaaaaacccaactcagcagatctgggaactgtgagagcggcaagcaggaactgtggtcagaggctgtgcgtcttggctggtagggcctgctcttttctaccatggcagcccagggctatggctattatcgcactgtgatcttctcagccatgtttgggggctacagcctgtattacttcaatcgcaagaccttctcctttgtcatgccatcattggtggaagagatccctttggacaaggatgatttggggttcatcaccagcagccagtcggcagcttatgctatcagcaagtttgtcagtggggtgctgtctgaccagatgagtgctcgctggctcttctcttctgggctgctcctggttggcctggtcaacatattctttgcctggagctccacagtacctgtctttgctgccctctggttccttaatggcctggcccaggggctgggctggcccccatgtgggaaggtcctgcggaagtggtttgagccatctcagtttggcacttggtgggccatcctgtcaaccagcatgaacctggctggagggctgggccctatcctggcaaccatccttgcccagagctacagctggcgcagcacgctggccctatctggggcactgtgggtggttgtctccttcctctgtctcctgctcatccacaatgaacctgctgatgttggactccgcaacctggaccccatgccctctgagggcaagaagggctccttgaaggaggagagcaccctgcaggagctgctgctgtccccttacctgtgggtgctctccactggttaccttgtggtgtttggagtaaagacctgctgtactgactggggccagttcttccttatccaggagaaaggacagtcagcccttgtaggtagctcctacatgagtgccctggaagttgggggccttgtaggcagcatcgcagctggctacctgtcagaccgggccatggcaaaggcgggactgtccaactacgggaaccctcgccatggcctgttgctgttcatgatggctggcatgacagtgtccatgtacctcttccgggtaacagtgaccagtgactcccccaagctctggatcctggtattgggagctgtatttggtttctcctcgtatggccccattgccctgtttggagtcatagccaacgagagtgcccctcccaacttgtgtggcacctcccacgccattgtgggactcatggccaatgtgggcggctttctggctgggctgcccttcagcaccattgccaagcactacagttggagcacagccttctgggtggctgaagtgatttgtgcggccagcacggctgccttcttcctcctacgaaacatccgcaccaagatgggccgagtgtccaagaaggctgagtgaagagagtccaggttccggagcaccatcccacggtggccttccccctgcacgctctgcggggagaaaaggaggggcctgcctggctagccctgaacctttcactttccatttctgcgccttttctgtcacccgggtggcgctggaagttatcagtggctagtgaggtcccagctccctgatcctatgctctatttaaaagataacctttggccttagactccgttagctcctatttcctgccttcagacaaacaggaaacttctgcagtcaggaaggctcctgtacccttcttcttttcctaggccctgtcctgcccgcatcctaccccatccccacctgaagtgaggctatccctgcagctgcagggcactaatgacccttgacttctgctgggtcctaagtcctctcagcagtgggtgactgctgttgccaatacctcagactccagggaaagagaggaggccatcattctcactgtaccactaggcgcagttggatataggtgggaagaaaaggtgacttgttatagaagattaaaactagatttgatactgaacac

SEQ ID NO: 183931 - DNA, 3349 bp, Homo sapiens
  Payload ID: 16247
  Gene Symbol: SLC37A3
  Gene Name: solute carrier family 37, member 3
  Uniprot ID: Q8NCC5
  ENST ID: ENST00000326232
  CDS Start-End: 205-1689
gggtcacgtgggcgtccggaaaccctggtcgcaccgccaggggtgagctggcggcgggggaggcgggcagcggagccaagctgacccggcgagcggagccggggctggagagcggcgaccactgcggatctcggaaggaagaaatgatgtaaatcactcatccaaaccttaaggtcaaaggtgagaaggaaggtcaggaagaacatggcctggccaaatgtttttcaaagagggtctctgctgtcccagttcagccatcatcatgttgtagtgttcctgctcactttcttcagttattcgttgctccatgcttcacgaaaaacatttagcaatgtcaaagtcagtatctctgagcagtggaccccaagtgcttttaacacgtcagttgagctgcctgtggagatctggagcagcaaccatttgttccccagtgcagagaaagcgactcttttcctcggcacactggataccattttcctcttctcctatgctgtgggcctattcatcagtggcatcgttggggatcggttgaatttgcgatgggttctgtcttttggcatgtgctcttctgcattagtggtgtttgtctttggtgcgctcacagaatggctgcgtttctacaacaaatggctgtactgctgcctgtggattgtgaacggcctgctgcagtccactggttggccctgtgtggttgctgttatgggcaactggtttgggaaagccggacgaggagttgtttttggtctctggagtgcctgtgcttcggtgggcaacattttgggagcgtgcctagcttcttctgttcttcagtatggttatgagtatgcctttctggtgacggcgtctgtgcagtttgctggtgggatcgttatcttctttggactcctggtgtcaccagaagaaattggtctctcgggtattgaggcagaagaaaactttgaagaagactcacacaggccattaattaatggtggtgaaaatgaagacgaatatgagccgaattattcaatccaagatgatagttctgttgcccaagtcaaggcgataagcttctaccaggcatgttgccttcctggagtcataccgtactcactggcctacgcctgcttgaagttagtgaattactccttcttcttctggctccccttttatctgagtaacaacttcggctggaaggaggcggaagccgacaagctgtccatttggtacgacgttggagggatcataggtggaactttgcaaggcttcatctctgatgtactacagaagagagcgccggttcttgccctgagtctgcttctggcagttgggtccctcatcgggtatagtcgttctccaaatgataagtccatcaatgcccttctgatgactgttacaggattttttattggtggaccttctaatatgattagttctgctatttctgcggacttgggtcgccaggagctcatccaaaggagcagtgaagctttggccactgtcacaggaattgtggatggttcggggagcattggagctgcagtgggccagtatttagtgtctctgatccgggacaagctaggatggatgtgggttttctactttttcattctcatgacaagttgtacaattgtgtttatctcgccattaatagtgagggaaatattctctctcgtgctaaggagacaggctcacatattgagggagtgaccggtgcccgcgagacagaaagaacaatgtcagccacatcaggaccgctggggcttcgagtctgccctaatttgggtttgtctaggagctccagcctgatcttggattgtcaggcgtctctcaacactgccagccacctgagatgctgaccagcagtgaaggctgcactagttttctacactacaggaattactgttgatgatttttgctgttgtttcatgaatgtgccgagtgacttctgactctgccagcatctttgacctctgactctgcccgcgtctttgtttggcctattgaggtttagcgttttaaccttaactgttgttttggacttgaactttctctagccttgaaaatggagtgaacaggaggcaaagccacgcgtggtttgtgttggtggtatgttccacaaatggaagagatcattgcattttgctttggtaatgagtttacagagagtgggtcatctttgaagcatcaaatcctgatcaaatgctcaagctggaccgagctgcaagcctgccttggacaaagaatccctctgttcactgtggtgggaaagatcacactacatgcctgttgattggctcagtcactctgtgtctgatctaaacgtcattcagccctagaagcatgaattgcttcaaattattgtcaacttgttctcttccattttcattcaaattaactttgactcctggaagtattgagtcttcctttcaaggaccataaggtacatcagttatcttgaacattctgacgtgtaaaggaccataaggtacatcatttatcttgaacattccgacgtgtaactcacagccgaagcactccatcccagatttgttgtctgggaacttaggatcctctaggaagctaatctgcttagtctatttttagaggattgatctctggcacaagcagcttcctggagttacctcagcagaagactagaattagagaaaagggaaagaccttttcttctagtaagtgtcaagtacagatgctctttgacttatgatggggttatgtcccagtaaacccattggaagtcaaatgcatttaatacccctgactggacaccacagcttagcctcgtccaccctaaatgtactcagaacacttagaattgcccacagttgggcagaatcatctaacacaaactctattttataatcgagtgttgaatatatcatgtaatttattgaatattgtacattatgttgaaattgcaaccatttcacaccattgtaaagtccaaaaatcagaagctgaggactgtctgtacatgacattgaatcacatgaatggattactagggcctgaggggtgtccgttctttagaaaaatgtagagtatatatatcttcagggctgtgaattccatactagttatcaatattttaagatcattctgtatatacatattttaaattatgcaagcaaactaggaggagaatgtgcaattttgagggatacctaatttgcattcggttaggggatatttttcaacctcttgctttatactctgatatggggtgtgtttatgaacttgttaatgttatttaatcatgcagatttccaatcagtgtattgctcatttactgacaaaaagggaaaatacgaaacacagaaagggaaaataaactgacttttataatgaa

SEQ ID NO: 183932 - DNA, 2955 bp, Homo sapiens
  Payload ID: 16247
  Gene Symbol: SLC37A3
  Gene Name: solute carrier family 37, member 3
  Uniprot ID: Q8NCC5
  ENST ID: ENST00000340308
  CDS Start-End: 113-1444
gcggagccggggctggagagcggcgaccactgcggatctcggaaggaagaaatgatgtaaatcactcatccaaaccttaaggtcaaaggtgagaaggaaggtcaggaagaacatggcctggccaaatgtttttcaaagagggtctctgctgtcccagttcagccatcatcatgttgtagtgttcctgctcactttcttcagttattcgttgctccatgcttcacgaaaaacatttagcaatgtcaaagtcagtatctctgagcagtggaccccaagtgcttttaacacgtcagttgagctgcctgtggagatctggagcagcaaccatttgttccccagtgcagagaaagcgactcttttcctcggcacactggataccattttcctcttctcctatgctgtgggcctattcatcagtggcatcgttggggatcggttgaatttgcgatgggttctgtcttttggcatgtgctcttctgcattagtggtgtttgtctttggtgcgctcacagaatggctgcgtttctacaacaaatggctgtactgctgcctgtggattgtgaacggcctgctgcagtccactggttggccctgtgtggttgctgttatgggcaactggtttgggaaagccggacgaggagttgtttttggtctctggagtgcctgtgcttcggtgggcaacattttgggagcgtgcctagcttcttctgttcttcagtatggttatgagtatgcctttctggtgacggcgtctgtgcagtttgctggtgggatcgttatcttctttggactcctggtgtcaccagaagaaattggtctctcgggtattgaggcagaagaaaactttgaagaagactcacacaggccattaattaatggtggtgaaaatgaagacgaatatgagccgaattattcaatccaagatgatagttctgttgcccaagtcaaggcgataagcttctaccaggcatgttgccttcctggagtcataccgtactcactggcctacgcctgcttgaagttagtgaattactccttcttcttctggctccccttttatctgagtaacaacttcggctggaaggaggcggaagccgacaagctgtccatttggtacgacgttggagggatcatagtatttagtgtctctgatccgggacaagctaggatggatgtgggttttctactttttcattctcatgacaagttgtacaattgtgtttatctcgccattaatagtgagggaaatattctctctcgtgctaaggagacaggctcacatattgagggagtgaccggtgcccgcgagacagaaagaacaatgtcagccacatcaggaccgctggggcttcgagtctgccctaatttgggtttgtctaggagctccagcctgatcttggattgtcaggcgtctctcaacactgccagccacctgagatgctgaccagcagtgaaggctgcactagttttctacactacaggaattactgttgatgatttttgctgttgtttcatgaatgtgccgagtgacttctgactctgccagcatctttgacctctgactctgcccgcgtctttgtttggcctattgaggtttagcgttttaaccttaactgttgttttggacttgaactttctctagccttgaaaatggagtgaacaggaggcaaagccacgcgtggtttgtgttggtggtatgttccacaaatggaagagatcattgcattttgctttggtaatgagtttacagagagtgggtcatctttgaagcatcaaatcctgatcaaatgctcaagctggaccgagctgcaagcctgccttggacaaagaatccctctgttcactgtggtgggaaagatcacactacatgcctgttgattggctcagtcactctgtgtctgatctaaacgtcattcagccctagaagcatgaattgcttcaaattattgtcaacttgttctcttccattttcattcaaattaactttgactcctggaagtattgagtcttcctttcaaggaccataaggtacatcagttatcttgaacattctgacgtgtaaaggaccataaggtacatcatttatcttgaacattccgacgtgtaactcacagccgaagcactccatcccagatttgttgtctgggaacttaggatcctctaggaagctaatctgcttagtctatttttagaggattgatctctggcacaagcagcttcctggagttacctcagcagaagactagaattagagaaaagggaaagaccttttcttctagtaagtgtcaagtacagatgctctttgacttatgatggggttatgtcccagtaaacccattggaagtcaaatgcatttaatacccctgactggacaccacagcttagcctcgtccaccctaaatgtactcagaacacttagaattgcccacagttgggcagaatcatctaacacaaactctattttataatcgagtgttgaatatatcatgtaatttattgaatattgtacattatgttgaaattgcaaccatttcacaccattgtaaagtccaaaaatcagaagctgaggactgtctgtacatgacattgaatcacatgaatggattactagggcctgaggggtgtccgttctttagaaaaatgtagagtatatatatcttcagggctgtgaattccatactagttatcaatattttaagatcattctgtatatacatattttaaattatgcaagcaaactaggaggagaatgtgcaattttgagggatacctaatttgcattcggttaggggatatttttcaacctcttgctttatactctgatatggggtgtgtttatgaacttgttaatgttatttaatcatgcagatttccaatcagtgtattgctcatttactgacaaaaagggaaaatacgaaacacagaaagggaaaataaactgacttttataatgaa

SEQ ID NO: 183933 - DNA, 3254 bp, Homo sapiens
  Payload ID: 16247
  Gene Symbol: SLC37A3
  Gene Name: solute carrier family 37, member 3
  Uniprot ID: Q8NCC5
  ENST ID: ENST00000447932
  CDS Start-End: 158-1594
ctggcggcgggggaggcgggcagcggagccaagctgacccggcgagcggagccggggctggagagcggcgaccactgcggatctcggaaggaagaaatgatgtaaatcactcatccaaaccttaaggtcaaaggtgagaaggaaggtcaggaagaacatggcctggccaaatgtttttcaaagagggtctctgctgtcccagttcagccatcatcatgttgtagtgttcctgctcactttcttcagttattcgttgctccatgcttcacgaaaaacatttagcaatgtcaaagtcagtatctctgagcagtggaccccaagtgcttttaacacgtcagttgagctgcctgtggagatctggagcagcaaccatttgttccccagtgcagagaaagcgactcttttcctcggcacactggataccattttcctcttctcctatgctgtgggcctattcatcagtggcatcgttggggatcggttgaatttgcgatgggttctgtcttttggcatgtgctcttctgcattagtggtgtttgtctttggtgcgctcacagaatggctgcgtttctacaacaaatggctgtactgctgcctgtggattgtgaacggcctgctgcagtccactggttggccctgtgtggttgctgttatgggcaactggtttgggaaagccggacgaggagttgtttttggtctctggagtgcctgtgcttcggtgggcaacattttgggagcgtgcctagcttcttctgttcttcagtatggttatgagtatgcctttctggtgacggcgtctgtgcagtttgctggtgggatcgttatcttctttggactcctggtgtcaccagaagaaattggtctctcgggtattgaggcagaagaaaactttgaagaagactcacacaggccattaattaatggtggtgaaaatgaagacgaatatgagccgaattattcaatccaagatgatagttctgttgcccaagtcaaggcgataagcttctaccaggcatgttgccttcctggagtcataccgtactcactggcctacgcctgcttgaagttagtgaattactccttcttcttctggctccccttttatctgagtaacaacttcggctggaaggaggcggaagccgacaagctgtccatttggtacgacgttggagggatcataggtggaactttgcaaggcttcatctctgatgtactacagaagagagcgccggttcttgccctgagtctgcttctggcagttgggtccctcatcgggtatagtcgattttttattggtggaccttctaatatgattagttctgctatttctgcggacttgggtcgccaggagctcatccaaaggagcagtgaagctttggccactgtcacaggaattgtggatggttcggggagcattggagctgcagtgggccagtatttagtgtctctgatccgggacaagctaggatggatgtgggttttctactttttcattctcatgacaagttgtacaattgtgtttatctcgccattaatagtgagggaaatattctctctcgtgctaaggagacaggctcacatattgagggagtgaccggtgcccgcgagacagaaagaacaatgtcagccacatcaggaccgctggggcttcgagtctgccctaatttgggtttgtctaggagctccagcctgatcttggattgtcaggcgtctctcaacactgccagccacctgagatgctgaccagcagtgaaggctgcactagttttctacactacaggaattactgttgatgatttttgctgttgtttcatgaatgtgccgagtgacttctgactctgccagcatctttgacctctgactctgcccgcgtctttgtttggcctattgaggtttagcgttttaaccttaactgttgttttggacttgaactttctctagccttgaaaatggagtgaacaggaggcaaagccacgcgtggtttgtgttggtggtatgttccacaaatggaagagatcattgcattttgctttggtaatgagtttacagagagtgggtcatctttgaagcatcaaatcctgatcaaatgctcaagctggaccgagctgcaagcctgccttggacaaagaatccctctgttcactgtggtgggaaagatcacactacatgcctgttgattggctcagtcactctgtgtctgatctaaacgtcattcagccctagaagcatgaattgcttcaaattattgtcaacttgttctcttccattttcattcaaattaactttgactcctggaagtattgagtcttcctttcaaggaccataaggtacatcagttatcttgaacattctgacgtgtaaaggaccataaggtacatcatttatcttgaacattccgacgtgtaactcacagccgaagcactccatcccagatttgttgtctgggaacttaggatcctctaggaagctaatctgcttagtctatttttagaggattgatctctggcacaagcagcttcctggagttacctcagcagaagactagaattagagaaaagggaaagaccttttcttctagtaagtgtcaagtacagatgctctttgacttatgatggggttatgtcccagtaaacccattggaagtcaaatgcatttaatacccctgactggacaccacagcttagcctcgtccaccctaaatgtactcagaacacttagaattgcccacagttgggcagaatcatctaacacaaactctattttataatcgagtgttgaatatatcatgtaatttattgaatattgtacattatgttgaaattgcaaccatttcacaccattgtaaagtccaaaaatcagaagctgaggactgtctgtacatgacattgaatcacatgaatggattactagggcctgaggggtgtccgttctttagaaaaatgtagagtatatatatcttcagggctgtgaattccatactagttatcaatattttaagatcattctgtatatacatattttaaattatgcaagcaaactaggaggagaatgtgcaattttgagggatacctaatttgcattcggttaggggatatttttcaacctcttgctttatactctgatatggggtgtgtttatgaacttgttaatgttatttaatcatgcagatttccaatcagtgtattgctcatttactgacaaaaagggaaaatacgaaacacagaaagggaaaataaactgacttttataatgaa

SEQ ID NO: 183934 - DNA, 544 bp, Homo sapiens
  Payload ID: 16247
  Gene Symbol: SLC37A3
  Gene Name: solute carrier family 37, member 3
  ENST ID: ENST00000491505
  CDS Start-End: 501-544
gccttgctgggaggcacaggcagcgtccaccccgatgatgtcctcccgccggcatcccgcagccttcgccttcctggttcacctgtcgcttacctgtctcgctctctcacctctgctggtcagcagatctgaatatctctttgtgaggagtcagagaaaggagatgatgcaaagagaaggaagcaaaaacaaaactaaaagaactttgaaggtatatgagaagaaaaagctgaaaagaaaatgtctgcctcactccctcaaaaattctaccatagagcaaaggttgacgtccagaaaacctcaagtttatcagtcccagatgctggcagtagaagcataaagctgagctaacattactggccaggtccgcagcagcagagttctgtgggctcccagcctccgccctcctcgccctcctccgcgccggcagaaggaagaaatgatgtaaatcactcatccaaaccttaaggtcaaaggtgagaaggaaggtcaggaagaacatggcctggccaaatgtttttcaaagagggtctctgctgtccca

SEQ ID NO: 183935 - DNA, 3488 bp, Homo sapiens
  Payload ID: 16247
  Gene Symbol: SLC37A3
  Gene Name: solute carrier family 37, member 3
  ENST ID: ENST00000477571
  CDS Start-End: 145-819
aggcgggcagcggagccaagctgacccggcgagcggagccggggctggagagcggcgaccactgcggatctcggaaggaagaaatgatgtaaatcactcatccaaaccttaaggtcaaaggtgagaaggaaggtcaggaagaacatggcctggccaaatgtttttcaaagagggtctctgctgtcccagttcagccatcatcatgttgtagtgttcctgctcactttcttcagttattcgttgctccatgcttcacgaaaaacatttagcaatgtcaaagtcagtatctctgagcagtggaccccaagtgcttttaacacgtcagttgagctgcctgtggagatctggagcagcaaccatttgttccccagtgcagagaaagcgactcttttcctcggcacactggataccattttcctcttctcctatgctgtgggcctattcatcagtggcatcgttggggatcggttgaatttgcgatgggttctgtcttttggcatgtgctcttctgcattagtggtgtttgtctttggtgcgctcacagaatggctgcgtttctacaacaaatggctgtactgctgcctgtggattgtgaacggcctgctgcagtccactggttggccctgtgtggttgctgttatgggcaactggtttgggaaagccggacgaggagttgtttttggtctctggagtgcctgtgcttcggtgggcaacattttgggagcgtgcctagcttcttctgttcttcagtatggttatgaggtctctcgggtattgaggcagaagaaaactttgaagaagactcacacaggccattaattaatggtggtgaaaatgaagacgaatatgagccgaattattcaatccaagatgatagttctgttgcccaagtcaaggcgataagcttctaccaggcatgttgccttcctggagtcataccgtactcactggcctacgcctgcttgaagttagtgaattactccttcttcttctggctccccttttatctgagtaacaacttcggctggaaggaggcggaagccgacaagctgtccatttggtacgacgttggagggatcataggtggaactttgcaaggcttcatctctgatgtactacagaagagagcgccggttcttgccctgagtctgcttctggcagttgggtccctcatcgggtatagtcgttctccaaatgataagtccatcaatgcccttctgatgactgttacaggattttttattggtggaccttctaatatgattagttctgctatttctgcggacttgggtcgccaggagctcatccaaaggagcagtgaagctttggccactgtcacaggaattgtggatggttcggggagcattggagctgcagtgggccagtatttagtgtctctgatccgggacaagctaggatggatgtgggttttctactttttcattctcatgagacggggtgtcaccatattgctcaggctggtctccaaatcctgagctcaaacgatctacctgccttggccttccaaagtgcgagccaccacacctggccctcttgtggtcttaaaggaaaggggaggagggcaggtgaagaacagaaatgccacatgtcatatttagtaggacaccagcaagtggagccatgctgcagcttcattttccccaaagctgaaacttcaaaggcaaatgacaacaacccaatccaggcaagactgctaaaggcttagacccttcaagaatgaaggtttgggtgatcccaccagtcaggaggccatgacccgctgaggtgcttgctgaggacaaaggaaatgaggaatgggtggtggcaggctcccgtcatcagtgtggatggcagccatgcctgcagctactctaccttcccctgatcctccttcagcttctccaactcctgggccagatggggcagctccatgacaatgggcactggcttcttcaggacatccagaccctcaaggtcaggggcagtgagactgacacaggttccagttcatgctgctcggttccagcttgtgcttgcaggttacaggctgtcctgctcttctctatttatatccatttccctcctaaccacctgccctgtgaacttaactctctagcatcagacatcccatccaggaggagaacatacacacagttgtttaactagcctcacaattactaagatcaaatttgcacaacaaatacacacacacacagagaaatatgtatcctaatgggtctgcctctctgattaaacccttaattgatacactcattctgtggacatcattcagtcctttttctccagccactccgtccttgctcagtgaactcacaaacaaaggggacatagcagcagcaatagaagggatgcaagggcttagtagcctggtcttctaccctccaagcctgaactgacaacagatcacagcccatactgaggccctaatatggcactattccccaagaggaccaatcagctgcctggtggcaggttaattacatcaggtcacctccattatgaaagaggaagtgctttgtacttgctggaatagacacttactatggacatgaattttccttccctacccacaatacttctgccagagccacagtaagtggacttacagaatgccctacccaccgtcaaggtaggccatatggcattacttctgaccaaggaagtcatttcatagcaaattaagtggatcagcgggctcctgctcatggagtttactagtcttaccgtgtttcccaccaccctgaagcagctggcccaatagaacaatggaatgagcttttgaagattcacaggaccagctaccatctaccatccctataaggatgacgacaccttatagagctggtgtatgatctatgctttttttttctttcaagtttaacctgataatttatttgtggggaaaaagctagttttgatgagaaaaagttgtcctttccttgtaaacacaaagaaactcaacaggaattttaaatgttatagtaggccagaaaatgcaacagtaactcttacaatccttttcaattaaacagacaaatcaagttgaagacaaatgttaaaatactatttagcccaaatatttatcagcgtatatatcctgttgttcaattggcttttgatttaaaaaccaaacagacaaaccaacaaactttataagagctacactggctgggcgcggtggctcatgcctgtaatcctagcactttgggaggccgaggcaggcagatcccttgatgtcaggagtttgagaccagcctggccaacagggcaaaaccccggctctactaaaaatacagaaatattagctgggtgtggtggcacatgcctttaatcccagctacttgggaggctgaggcaggggaatcacttaaacccaggagatggaggttgcagtgggccaagatcgtaccactgcactccagcatgggtgacaaagcgagactccctctcaaaaaaaaaaaaaaaaa

SEQ ID NO: 183936 - DNA, 570 bp, Homo sapiens
  Payload ID: 16247
  Gene Symbol: SLC37A3
  Gene Name: solute carrier family 37, member 3
  ENST ID: ENST00000485538
  CDS Start-End: 1-296
gttctgctatttctgcggacttgggtcgccaggagctcatccaaaggagcagtgaagctttggccactgtcacaggaattgtggatggttcggggagcattggagctgcagtgggccaggagacaggctcacatattgagggagtgaccggtgcccgcgagacagaaagaacaatgtcagccacatcaggaccgctggggcttcgagtctgccctaatttgggtttgtctaggagctccagcctgatcttggattgtcaggcgtctctcaacactgccagccacctgagatgctgaccagcagtgaaggctgcactagttttctacactacaggaattactgttgatgatttttgctgttgtttcatgaatgtgccgagtgacttctgactctgccagcatctttgacctctgactctgcccgcgtctttgtttggcctattgaggtttagcgttttaaccttaactgttgttttggacttgaactttctctagccttgaaaatggagtgaacaggaggcaaagccacgcgtggtttgtgttggtggtatgttccacaaatggaagagat

SEQ ID NO: 183937 - DNA, 551 bp, Homo sapiens
  Payload ID: 16247
  Gene Symbol: SLC37A3
  Gene Name: solute carrier family 37, member 3
  ENST ID: ENST00000492027
  CDS Start-End: 1-244
ttattcaatccaagatgatagttctgttgcccaagtcaaggcgataagcttctaccaggcatgttgccttcctggagtcataccgtatttagtgtctctgatccgggacaagctaggatggatgtgggttttctactttttcattctcatgacaagttgtacaattgtgtttatctcgccattaatagtgagggaaatattctctctcgtgctaaggagacaggctcacatattgagggagtgaccggtgcccgcgagacagaaagaacaatgtcagccacatcaggaccgctggggcttcgagtctgccctaatttgggtttgtctaggagctccagcctgatcttggattgtcaggcgtctctcaacactgccagccacctgagatgctgaccagcagtgaaggctgcactagttttctacactacaggaattactgttgatgatttttgctgttgtttcatgaatgtgccgagtgacttctgactctgccagcatctttgacctctgactctgcccgcgtctttgtttggcctattgaggtttagcgt

SEQ ID NO: 183938 - DNA, 601 bp, Homo sapiens
  Payload ID: 16247
  Gene Symbol: SLC37A3
  Gene Name: solute carrier family 37, member 3
  ENST ID: ENST00000464834
  CDS Start-End: 1-451
gttccccagtgcagagaaagcgactcttttcctcggcacactggataccattttcctcttctcctatgctgtgggcctattcatcagtggcatcgttggggatcggttgaatttgcgatgggttctgtcttttggcatgtgctcttctgcattagtggtgtttgtctttggtgcgctcacagaatggctgcgtttctacaacaaatggctgtactgctgcctgtggattgtgaacggcctgctgcagtccactggttggccctgtgtggttgctgttatgggcaactggtttgggaaagccggacgaggagttgtttttggtctctggagtgcctgtgcttcggtgggcaacattttgggagcgtgcctagcttcttctgttcttcagtatggttatgagatatgtaaggaccacctttcacccctctcctccagtatgcctttctggtgacggcgtctgtgcagtttgctggtgggatcgttatcttctttggactcctggtgtcaccagaagaaattggaaaactctgagctccttttagtgagtgaaaggagaacagtactgccgtttgagtcctgtcgacattgtagccagcccctg

SEQ ID NO: 183939 - DNA, 452 bp, Homo sapiens
  Payload ID: 16247
  Gene Symbol: SLC37A3
  Gene Name: solute carrier family 37, member 3
  ENST ID: ENST00000477006
  CDS Start-End: 1-452
gtctgcttctggcagttgggtccctcatcgggtatagtcgttctccaaatgataagtccatcaatgcccttctgatgactgttacaggattttttattggtggaccttctaatatgattagttctgctatttctgcggacttgggtcgccaggagctcatccaaaggagcagtgaagctttggccactgtcacaggaattgtggatggttcggggagcattggagctgcagtgggccagtatttagtgtctctgatccgggacaagctaggatggatgtgggttttctactttttcattctcatgacaggctcacatattgagggagtgaccggtgcccgcgagacagaaagaacaatgtcagccacatcaggaccgctggggcttcgagtctgccctaatttgggtttgtctaggagctccagcctgatcttggattgtcaggcgtctctc

SEQ ID NO: 183940 - DNA, 741 bp, Homo sapiens
  Payload ID: 16247
  Gene Symbol: SLC37A3
  Gene Name: solute carrier family 37, member 3
  ENST ID: ENST00000491357
  CDS Start-End: 1-369
ggctggaaggaggcggaagccgacaagctgtccatttggtacgacgttggagggatcatagtatttagtgtctctgatccgggacaagctaggatggatgtgggttttctactttttcattctcatgacaagttgtacaattgtgtttatctcgccattaatagtgagggaaatattctctctcgtgctaaggagacaggctcacatattgagggagtgaccggtgcccgcgagacagaaagaacaatgtcagccacatcaggaccgctggggcttcgagtctgccctaatttgggtttgtctaggagctccagcctgatcttggattgtcaggcgtctctcaacactgccagccacctgagatgctgaccagcagtgaaggctgcactagttttctacactacaggaattactgttgatgatttttgctgttgtttcatgaatgtgccgagtgacttctgactctgccagcatctttgacctctgactctgcccgcgtctttgtttggcctattgaggtttagcgttttaaccttaactgttgttttggacttgaactttctctagccttgaaaatggagtgaacaggaggcaaagccacgcgtggtttgtgttggtggtatgttccacaaatggaagagatcattgcattttgctttggtaatgagtttacagagagtgggtcatctttgaagcatcaaatcctgatcaaatgctcaagctggaccgagctgcaagcct

SEQ ID NO: 183941 - DNA, 879 bp, Homo sapiens
  Payload ID: 16247
  Gene Symbol: SLC37A3
  Gene Name: solute carrier family 37, member 3
  ENST ID: ENST00000498469
  CDS Start-End: 1-486
ctgagtctgcttctggcagttgggtccctcatcgggtatagtcgttctccaaatgataagtccatcaatgcccttctgatgactgttacaggattttttattggtggaccttctaatatgattagttctgctatttctgcggacttgggtcgccaggagctcatccaaaggagcagtgaagctttggccactgtcacaggaattgtggatggttcggggagcattggagctgcagtgggccagtatttagtgtctctgatccgggacaagctaggatggatgtgggttttctactttttcattctcatggagacaggctcacatattgagggagtgaccggtgcccgcgagacagaaagaacaatgtcagccacatcaggaccgctggggcttcgagtctgccctaatttgggtttgtctaggagctccagcctgatcttggattgtcaggcgtctctcaacactgccagccacctgagatgctgaccagcagtgaaggctgcactagttttctacactacaggaattactgttgatgatttttgctgttgtttcatgaatgtgccgagtgacttctgactctgccagcatctttgacctctgactctgcccgcgtctttgtttggcctattgaggtttagcgttttaaccttaactgttgttttggacttgaactttctctagccttgaaaatggagtgaacaggaggcaaagccacgcgtggtttgtgttggtggtatgttccacaaatggaagagatcattgcattttgctttggtaatgagtttacagagagtgggtcatctttgaagcatcaaatcctgatcaaatgctcaagctggaccgagctgcaagcctgccttggacaaagaatccctc

SEQ ID NO: 183942 - DNA, 574 bp, Homo sapiens
  Payload ID: 16247
  Gene Symbol: SLC37A3
  Gene Name: solute carrier family 37, member 3
  ENST ID: ENST00000490760
  CDS Start-End: 137-301
agcggagccaagctgacccggcgagcggagccggggctggagagcggcgaccactgcggatctcggaaggaagaaatgatgtaaatcactcatccaaaccttaaggtcaaaggtgagaaggaaggtcaggaagaacatggcctggccaaatgtttttcaaagagggtctctgctgtcccagttcagccatcatcatgttgtagtgttcctgctcactttcttcaggtgtttgtctttggtgcgctcacagaatggctgcgtttctacaacaaatggctgtactgctgcctgtggattgtgaacggcctgctgcagtccactggttggccctgtgtggttgctgttatgggcaactggtttgggaaagccggacgaggagttgtttttggtctctggagtgcctgtgcttcggtgggcaacattttgggagcgtgcctagcttcttctgttcttcagtatggttatgagtatgcctttctggtgacggcgtctgtgcagtttgctggtgggatcgttatcttctttggactcctggtgtcaccagaagaaattggtctctcgggtattgaggcag

SEQ ID NO: 183943 - DNA, 1792 bp, Homo sapiens
  Payload ID: 16247
  Gene Symbol: SLC37A3
  Gene Name: solute carrier family 37, member 3
  ENST ID: ENST00000469636
  CDS Start-End: 1-171
caaaggagcagtgaagctttggccactgtcacaggaattgtggatggttcggggagcattggagctgcagtgggccagacaagttgtacaattgtgtttatctcgccattaatagtgagggaaatattctctctcgtgctaaggagacaggctcacatattgagggagtgaccggtgcccgcgagacagaaagaacaatgtcagccacatcaggaccgctggggcttcgagtctgccctaatttgggtttgtctaggagctccagcctgatcttggattgtcaggcgtctctcaacactgccagccacctgagatgctgaccagcagtgaaggctgcactagttttctacactacaggaattactgttgatgatttttgctgttgtttcatgaatgtgccgagtgacttctgactctgccagcatctttgacctctgactctgcccgcgtctttgtttggcctattgaggtttagcgttttaaccttaactgttgttttggacttgaactttctctagccttgaaaatggagtgaacaggaggcaaagccacgcgtggtttgtgttggtggtatgttccacaaatggaagagatcattgcattttgctttggtaatgagtttacagagagtgggtcatctttgaagcatcaaatcctgatcaaatgctcaagctggaccgagctgcaagcctgccttggacaaagaatccctctgttcactgtggtgggaaagatcacactacatgcctgttgattggctcagtcactctgtgtctgatctaaacgtcattcagccctagaagcatgaattgcttcaaattattgtcaacttgttctcttccattttcattcaaattaactttgactcctggaagtattgagtcttcctttcaaggaccataaggtacatcagttatcttgaacattctgacgtgtaaaggaccataaggtacatcatttatcttgaacattccgacgtgtaactcacagccgaagcactccatcccagatttgttgtctgggaacttaggatcctctaggaagctaatctgcttagtctatttttagaggattgatctctggcacaagcagcttcctggagttacctcagcagaagactagaattagagaaaagggaaagaccttttcttctagtaagtgtcaagtacagatgctctttgacttatgatggggttatgtcccagtaaacccattggaagtcaaatgcatttaatacccctgactggacaccacagcttagcctcgtccaccctaaatgtactcagaacacttagaattgcccacagttgggcagaatcatctaacacaaactctattttataatcgagtgttgaatatatcatgtaatttattgaatattgtacattatgttgaaattgcaaccatttcacaccattgtaaagtccaaaaatcagaagctgaggactgtctgtacatgacattgaatcacatgaatggattactagggcctgaggggtgtccgttctttagaaaaatgtagagtatatatatcttcagggctgtgaattccatactagttatcaatattttaagatcattctgtatatacatattttaaattatgcaagcaaactaggaggagaatgtgcaattttgagggatacctaatttgcattcggttaggggatatttttcaacctcttgctttatactctgatatggggtgtgtttatgaacttgttaatgttatttaatcatgcagatttccaatcagtgtattgctcatttactgacaaaaagggaaaatacg

SEQ ID NO: 183944 - DNA, 647 bp, Homo sapiens
  Payload ID: 16247
  Gene Symbol: SLC37A3
  Gene Name: solute carrier family 37, member 3
  ENST ID: ENST00000469193
  CDS Start-End: 188-647
ggaaaccctggtcgcaccgccaggggtgagctggcggcgggggaggcgggcagcggagccaagctgacccggcgagcggagccggggctggagagcggcgaccactgcggatctcggaaggaagaaatgatgtaaatcactcatccaaaccttaaggtcaaaggtgagaaggaaggtcaggaagaacatggcctggccaaatgtttttcaaagagggtctctgctgtcccagttcagccatcatcatgttgtagtgttcctgctcactttcttcagttattcgttgctccatgcttcacgaaaaacatttagcaatgtcaaagtcagtatctctgagcagtggaccccaagtgcttttaacacgtcagttgagctgcctgtggagatctggagcagcaaccatttgttccccagtgcagagaaagcgactcttttcctcggcacactggataccattttcctcttctcctatgctgtgggcctattcatcagtggcatcgttggggatcggttgaatttgcgatgggttctgtcttttggcatgtgctcttctgcattagtgtatgcctttctggtgacggcgtctgtgcagtttgctggtgggatcgttatcttctttggactcctggtgtcaccagaagaaattg

SEQ ID NO: 183945 - DNA, 578 bp, Homo sapiens
  Payload ID: 16247
  Gene Symbol: SLC37A3
  Gene Name: solute carrier family 37, member 3
  ENST ID: ENST00000485734
  CDS Start-End: 1-578
ttatcttctttggactcctggtgtcaccagaagaaattggtctctcgggtattgaggcagaagaaaactttgaagaagactcacacaggccattaattaatggtggtgaaaatgaagacgaatatgagccgaattattcaatccaagatgatagttctgttgcccaagtcaaggcgataagcttctaccaggcatgttgccttcctggagtcataccgtactcactggcctacgcctgcttgaagttagtgaattactccttcttcttctggctccccttttatctgagtaacaacttcggctggaaggaggcggaagccgacaagctgtccatttggtacgacgttggagggatcataggtggaactttgcaaggcttcatctctgatgtactacagaagagagcgccggttcttgccctgagtctgcttctggcagttgggtccctcatcgggtatagtctatttagtgtctctgatccgggacaagctaggatggatgtgggttttctactttttcattctcatgacaagttgtacaattgtgtttatctcgccattaatagtgagggaaatatt

SEQ ID NO: 183946 - DNA, 551 bp, Homo sapiens
  Payload ID: 16247
  Gene Symbol: SLC37A3
  Gene Name: solute carrier family 37, member 3
  ENST ID: ENST00000462881
  CDS Start-End: 134-334
ggagccaagctgacccggcgagcggagccggggctggagagcggcgaccactgcggatctcggaaggaagaaatgatgtaaatcactcatccaaaccttaaggtcaaaggtgagaaggaaggtcaggaagaacatggcctggccaaatgtttttcaaagagggtctctgctgtcccagttcagccatcatcatgttgtagtgttcctgctcactttcttcagttattcgttgctccatgcttcacgaaaaacatttagcaatgtcaaagtcagtatctctgagcagtggaccccaagtgcttttaacacgtcagttgagctgcctgtggagtagagacggggtttcaccatgttagccaggatggtctcgatctcctgatctcatgatctgcccgcctcggcctccccaagtgtggggattacagatctggagcagcaaccatttgttccccagtgcagagaaagcgactcttttcctcggcacactggataccattttcctcttctcctatgctgtgggcctattcatcagtggcatcgttggggatcgg

SEQ ID NO: 183947 - DNA, 538 bp, Homo sapiens
  Payload ID: 16247
  Gene Symbol: SLC37A3
  Gene Name: solute carrier family 37, member 3
  ENST ID: ENST00000484416
  CDS Start-End: 1-378
ggcctattcatcagtggcatcgttggggatcggttgaatttgcgatgggttctgtcttttggcatgtgctcttctgcattagtggtgtttgtctttggtgcgctcacagaatggctgcgtttctacaacaaatggctgtactgctgcctgtggattgtgaacggcctgctgcagtccactggttggccctgtgtggttgctgttatgggcaactggtttgggaaagccggacgaggagttgtttttggtctctggagtgcctgtgcttcggtgggcaacattttgggagcgtgcctagcttcttctgttcttcagtatggttatgagatatgtaaggaccacctttcacccctctcctccagtatgcctttctggtgacggcgtctgtgcagtttgctggtgggatcgttatcttctttggactcctggtgtcaccagaagaaattggtctctcgggtattgaggcagaagaaaactttgaagaagactcacacaggccattaattaatggtggtgaaaatgaagacgaatatgagcc

SEQ ID NO: 183948 - DNA, 534 bp, Homo sapiens
  Payload ID: 16247
  Gene Symbol: SLC37A3
  Gene Name: solute carrier family 37, member 3
  ENST ID: ENST00000485861
  CDS Start-End: 1-534
gtgcagagaaagcgactcttttcctcggcacactggataccattttcctcttctcctatgctgtgggcctattcatcagtggcatcgttggggatcggttgaatttgcgatgggttctgtcttttggcatgtgctcttctgcattagtggtgtttgtctttggtgcgctcacagaatggctgcgtttctacaacaaatggctgtactgctgcctgtggattgtgaacggcctgctgcagtccactggttggccctgtgtggttgctgttatgggcaactggtttgggaaagccggacgaggagttgtttttggtctctggagtgcctgtgcttcggtgggcaacattttgggagcgtgcctagcttcttctgttcttcagtatggttatgagtactcactggcctacgcctgcttgaagttagtgaattactccttcttcttctggctccccttttatctgagtaacaacttcggctggaaggaggcggaagccgacaagctgtccatttggtacgacgttggagggatcatag

SEQ ID NO: 183949 - DNA, 8066 bp, Homo sapiens
  Payload ID: 16248
  Gene Symbol: SLC38A1
  Gene Name: solute carrier family 38, member 1
  Uniprot ID: Q9H2H9
  ENST ID: ENST00000398637
  CDS Start-End: 696-2159
gcacaggaggggaggagaccgcgcgcgggacggggaggaatggcctgtccgcgttaaaccatcacaagccatggttgcggaagggccacgcgtcccccagtaggagaatgactccgattcgtgaccctcagcgccggtgcatgtcgatgtaagtgcgaggccggcgagcagagtgtgagtgggggttggtggtgaggggagattctgatgcaatcggcccggaaaggaggagagccaggcgagcgcggactggggcggccacgccactccgccagaaggtcgccaggagcctccgcccttcaccttcctccgaaatccgccaggccacgccaagctccctgcccaacccttactgacgggggccacattttcccggcctccgcagccagaccttgacacaaaggacatcaaactgccgagggtaaaaaccccggaagggcggacacctccacatcgccttttgccacctttccctttatttccggagatatttattgagtgtctactgtgtgccaggcactatatctatgtgcatagaaaaaccctggaaggccatacaacaatatatatagagtgatcgtctctgcttgctgagctaacaggggtgtcaagcttccattttggtatctacttctaaatacactcagaacaggagaaatttggactaattttcaaactacagacactttctaatcatgatgcatttcaaaagtggactcgaattaactgagttgcaaaacatgacagtgcccgaggatgataacattagcaatgactccaatgatttcaccgaagtagaaaatggtcagataaatagcaagtttatttctgatcgtgaaagtagaagaagtctcacaaacagccatttggaaaaaaagaagtgtgatgagtatattccaggtacaacctccttaggcatgtctgtttttaacctaagcaacgccattatgggcagtgggattttgggactcgcctttgccctggcaaacactggaatcctactttttctggtacttttgacttcagtgacattgctgtctatatattcaataaacctcctattgatctgttcaaaagaaacaggctgcatggtgtatgaaaagctgggggaacaagtctttggcaccacagggaagttcgtaatctttggagccacctctctacagaacactggagcaatgctgagctacctcttcatcgtaaaaaatgaactaccctctgccataaagtttctaatgggaaaggaagagacattttcagcctggtacgtggatggccgcgttctggtggtgatagttacctttggcataattctccctctgtgtctcttgaagaacttagggtatcttggctatactagtggattttccttgagctgtatggtttttttcctaattgtggttatttacaagaaatttcaaattccctgcattgttccagagctaaattcaacaataagtgctaattcaacaaatgctgacacgtgtacgccaaaatatgttaccttcaattcaaagaccgtgtatgctttacccaccattgcatttgcatttgtttgccacccgtcagtcctgccaatttacagtgagcttaaagaccgatcacagaaaaaaatgcagatggtttcaaacatctcctttttcgccatgtttgttatgtacttcttgactgccatttttggctacttgacattctatgacaacgtgcagtccgacctccttcacaaatatcagagtaaagatgacattctcatcctgacagtgcggctggctgtcattgttgctgtgatcctcacagtgccggtgttatttttcacggttcgttcatctttatttgaactggctaagaaaacaaagtttaatttatgtcgtcataccgtggttacctgcatactcttggttgttatcaacttgttggtgatcttcataccctccatgaaggatatttttggagtcgtaggagttacatctgctaacatgcttattttcattcttccttcatctctttatttaaaaatcacagaccaggatggagataaaggaactcaaagaatttgggctgcccttttcttgggcctgggggtgttgttctccttggtcagcattcccttggtcatctatgactgggcctgctcatcgagtagtgacgaaggccactgaaacccgccgagaaaaagaaacatccctgttgtctgctcagtcaagtccccacacatcagcaatctctcaccacttcttttgcaagtttacagaagcaaacagaaatgtacaggatacttaaaatggaataactttttggttgcaaaacagagacatggttctataatgcttcatgtccctccaagatttgagatcaatttagggattgtgaaatttttttttcaaatttcatacaatcatatttcccagtacttttcacaatcattttttacccatctaactctatgttttgtggcttcccggtctcttagaactttgaaaacatgatatacaataatgtttatttattatacatccagattctgaaataattttcctactgatgttcagctcacactatctgtacctttttagaagagaaaagaatcttgaattgtatatatttattttgctttacagaaaaaaatggtttcgtaaataatttgcctattttggttaacatagcacatggagataatcatctgaaagttatagggcactgccactgctgaatcagagcatgcccaatatttgaggtggctctgatttcctggcagctgaactcgggtagtccagtggcctagctggtaccacatctattcccatccagagacattctctggcaagtgttctcagctgaaaagtggttggggatgattcttaccttggtaattaaatgaagctacacatttgggtaatctagcaaatgaagtattttttccctcttggcaacttgtgtcagagttactctggtctgagtcaactttcgctggggaaaacctatggaacctactgcaaaaagattgtccaaaatgcctaagaaaatactcctctgatgcatttagccttcaaccctacctgtcttgctgaagggagaaaaatgttttagtacattataggcccagcagcttttattcatgtccaccagctagttgcacagagaatcatgtgtacctaactaaggatgatctaggataagtaactcctgttttatattgagtattttagggaagtctttaaaagacttgttttatatctataaatctaggttattacaaatacaagaattttgtaccttaaataagcctcatttctatttcttcttcattaattctccatctagtcttgtgaaaaaaaaaaaaaaaaaaccctcagagatagtctttgtgaagagcttctgacagaatcactgagtaccttccttcccccagatgaggaagacaagggggtctcagtgtctgtgctgtctcctcttctcttccccaaccaaggactgtgccattactgcccgtctcaactgtccatgcaggaggacagagttgcctggtactcttacccttgtccctctcctaaagggagcacaaggaaactgaagagactgaaaaagaagagagtttgtagctgaaaaagaatagggatagcaaggaaacccagaactgcattcccctaagtggggccatcccatgtgattgaattgtccatagcttgcctatggtgagaaatgtgcatgctccgtgagctggtctcttgaaacaggacttatgcttcctctatattctggttaaattttccaaacacataagttcactgagcacagatttcttatccagagacaagtagaatctaaccgcagactgttggcagagtttccaggcacttagccatgttcccttcctgactcaaatccccaaaggccttcactctcactgagaatcacactactgtcccatagataaggcaggcattgaagcacctgtcgtgatcctctaggggggagaatgaaaggttatttcctgcattgcatcatcatagcttttaatataatgctacagaatcatatccacattaggttagagttcagatatttggatatgaatacctaacctagccatatccatggccatctctgttcttttcagcaatgttttccatattatattagcaatgacagaaacagaacaagccaagatccagtcagttcttgggagcttgtctagagcaccaagtaatgaaatagccaggtagtgggatgactgtacctttaaaaatacataatttagtttgcaagctatattatgctactttctattttccttgttactttatagcaattcattttaccctcacaaagtcaatttagaaccttatcattaactgggatgtgtagtgatatttttgggcctctgggtttcatgtgtcaatacaaggaatatttatttaaaatagatttatttagaggaggcacagtgttgttgatctgtgtgacaccacccatatttttaaaaacctttgtatgtttctctaaatttgttgttgactgaatataatagaccctaccataattcgtcaaatatcactgattagttacatcctttgtgtgagattagctgtaaagtatactgctcttattcttattcagaatagttaattggtagccaaaaatacatgtatcacagatgttaggtcgaatttaaacagcacagtcaagtgctatggaagtttttctgctaaattagtagattaaagaatactataccctaggcatggggagcagcacgttttcctttggtaggtaggatctctatactagtgaacagtgccagttccacactttggacttagaactgttctctagttattgtaacacagaatactgtcaatccctaatttacttaatgttacttattggaagtggggctgatgaaatacgcacaggagggaaatctactgtgtttaggcacaggcagccccagtgtataaggagatcatattccaaaaggttgtcagttggttgtttgcaacctggaatgtattttcctttagagaccaggttatccatggtggttaggcccctagagcagctggaaaagatgatcaaaccaataggttagctgacatcgaataatgtaataggtttgctaaagaatctaaccatcaaatataatattgtttccagggagggtgtttgttcagagttgcctgttagtagaatctggactgtccatcccagccacatcccacctactggacagtaggggtagagatgccaccagactacaggtgaccagattggcctgaaacatggtgtccagtaaaaacggggaggaataagtccatgactgctggagagcttggtggtaggaggagggtgaaggagggtgagggggcctctcatgggtcagaaacctccagggacatccctcagctggtaactctgctgttgtccggagggttcaggcttggtgtgccttcttctgtttgtctgacttttggctcctatggttcatctcctgccctgcccaccacagaaaaggatgctgctgcatagcttctccaatgtaccagtcattgaggccagcgcgcagcacttttaatgtttttagtgctagtaactgtgttttaactctccaggaataagctgggaggttagaaaacaagaaaaaagggggaaaaaaaaacctctccacccactttccttttttacagttacagaccctgttgagaaaaagaagcacccagatgggtgatggtgatagggcttgtggtggacacagggttgtggtaagattcctcagtgcttcggcgagcacctaagactattaccctggaactgactgctttctagagcttgattcatgcctctaagccagtggttctcaaagtgtggcccctagaccagtagcatcagcatcatcggggacctcattagaatgcagattctcagccccctcccagacatggtgaagtcagaagctctcagggagggactcagcaaatgattctaaagcgcatcaagtttgagaaccaccctaagccaatgagtctcccttttacttcccattagtcctccctcaccagatgattcctaggactcatggtgcaacatacaggagccaggctttagggaggggaggaaaggagcctggcggcaggggtctctgcaatggcaagaaagtgagtgaatccagcgctgccacctggttatccccttctcgttgaaaatagcagcgcaggtgcaaattcctaaacacaggctgcctgcactcggtgttacctcgggctgaggcatgataatattttattttttaaagctgtgaggaaatgaaagtgaggctttggttggggcgaggcagttgtgaaagaaattaaaataaaagaccctttgtaaatgcagacttagaagaaatactgaatttgtgtcagaagttctccagtgtttgtgttaatcgtgtggtgataatcctgtcctccttttaaagcgaattctctactgaaaggtctgctctgcttaaggagctacaaactgctctcaaaagaatgaaatactgagttccaattcagtgaggcacagtgttggactatggcacatttagttggagtcggggggaggtcaggaatatgatcagataatggattttataccttagagcaaaatctattagtctctctcagtttatcaatttaaatggctttaggcttatagggggtgtaaactttaagaatataattctcccattcaagtttacagcaaacatctagccaccttcaaaacaaagaatatacagaccatcatttagcaatactaatacatgattttccttggggatggcaggtttgagaatcctttagcaacaggacatacttcccctaaattacagtgaattatttataacgagataaagctttcaggtacaagctgaaggtggggtgtctaacaactaaaaactatcactaaatctcaaagagaaagttcttgcaaaatatgtaaagttcacaaggtgcagacattttccttctttaggcttttatctaaggaagggctatgaaactgggcccatctgtatacaggctcaaatttacgtttttaaaggaagaatctatgcagctgaggcttattgcaggaaatacttcatttgtatgtaaatattattgtaaataaataggaggctgtatatttttgaagttgttgatctgcactgaaatagaagtctctaggatctgcatataaacaataaatgtttcctagaaattagtggttttgtttgggaattagaaaaatttacattctctcccaggtaacatagttctctcaatgtaaacttggaacctgaaaccctacttaatttagagaaagaaatgtctgagaaatagttcccttgatttcttatgctggcattaagatcaattatttaacagatagtcctctgagatacaagtaaggaatatttagacacaaatccttgtcctatagaaacagatatacccaaatgacaaattgtttcttcataatgatcttccatttttaacactgataccactacacagtacatatgaaaacagaagctggggagaagaatgtttttttcacaattgaattgctgcatttctcaaactttgggatctatgaaagcggggagagggaacctgaatattaattatgagcacaaatttgaaggaaagaaaacaaagaaccattatctaatcaagctttgaaagtcctgcatgtttgccttttattttagtgttgacgccaacatagactgtctaaggtatttttttccccaaacacttgaatcttggtcgttggtatgtaatccactctctagagtccagtgtactttagacttcatctgagtccaatacatgtaccacactactgttttattaatgtaaaaaccttgtaaatgaatttcagatgggtgatttaagtgagtcacaagtcacaaaactttgctattcatagttaatcaaatagaactgggttttttttttcagagtgtggtgtaaataaagaaatataagaagttctgttctataactgctctgttaacatagtttttaaacattaaaaaatgtgaactaaaagta

SEQ ID NO: 183950 - DNA, 3436 bp, Homo sapiens
  Payload ID: 16248
  Gene Symbol: SLC38A1
  Gene Name: solute carrier family 38, member 1
  Uniprot ID: Q9H2H9
  ENST ID: ENST00000439706
  CDS Start-End: 804-2267
agaccgcgcgcgggacggggaggaatggcctgtccgcgttaaaccatcacaagccatggttgcggaagggccacgcgtcccccagtaggagaatgactccgattcgtgaccctcagcgccggtgcatgtcgatgtaagtgcgaggccggcgagcagagtgtgagtgggggttggtggtgaggggagattctgatgcaatcggcccggaaaggaggagagccaggcgagcgcggactggggcggccacgccactccgccagaaggtcgccaggagcctccgcccttcaccttcctccgaaatccgccaggccacgccaagctccctgcccaacccttactgacgggggccacattttcccggcctccgcagccagaccttgacacaaaggacatcaaactgccgagggtaaaaaccccggaagggcggacacctccacatcgccttttgccacctttccctttatttccggagagtcaaggaaacttttgagctatttacagcttgtagcaattatgtaaagtatactcctctgaacaaaatttggagcatgtttgtttctctctacctgatttccccagaatctggaaactatctatatttattgagtgtctactgtgtgccaggcactatatctatgtgcatagaaaaaccctggaaggccatacaacaatatatatagagtgatcgtctctgcttgctgagctaacaggggtgtcaagcttccattttggtatctacttctaaatacactcagaacaggagaaatttggactaattttcaaactacagacactttctaatcatgatgcatttcaaaagtggactcgaattaactgagttgcaaaacatgacagtgcccgaggatgataacattagcaatgactccaatgatttcaccgaagtagaaaatggtcagataaatagcaagtttatttctgatcgtgaaagtagaagaagtctcacaaacagccatttggaaaaaaagaagtgtgatgagtatattccaggtacaacctccttaggcatgtctgtttttaacctaagcaacgccattatgggcagtgggattttgggactcgcctttgccctggcaaacactggaatcctactttttctggtacttttgacttcagtgacattgctgtctatatattcaataaacctcctattgatctgttcaaaagaaacaggctgcatggtgtatgaaaagctgggggaacaagtctttggcaccacagggaagttcgtaatctttggagccacctctctacagaacactggagcaatgctgagctacctcttcatcgtaaaaaatgaactaccctctgccataaagtttctaatgggaaaggaagagacattttcagcctggtacgtggatggccgcgttctggtggtgatagttacctttggcataattctccctctgtgtctcttgaagaacttagggtatcttggctatactagtggattttccttgagctgtatggtttttttcctaattgtggttatttacaagaaatttcaaattccctgcattgttccagagctaaattcaacaataagtgctaattcaacaaatgctgacacgtgtacgccaaaatatgttaccttcaattcaaagaccgtgtatgctttacccaccattgcatttgcatttgtttgccacccgtcagtcctgccaatttacagtgagcttaaagaccgatcacagaaaaaaatgcagatggtttcaaacatctcctttttcgccatgtttgttatgtacttcttgactgccatttttggctacttgacattctatgacaacgtgcagtccgacctccttcacaaatatcagagtaaagatgacattctcatcctgacagtgcggctggctgtcattgttgctgtgatcctcacagtgccggtgttatttttcacggttcgttcatctttatttgaactggctaagaaaacaaagtttaatttatgtcgtcataccgtggttacctgcatactcttggttgttatcaacttgttggtgatcttcataccctccatgaaggatatttttggagtcgtaggagttacatctgctaacatgcttattttcattcttccttcatctctttatttaaaaatcacagaccaggatggagataaaggaactcaaagaatttgggctgcccttttcttgggcctgggggtgttgttctccttggtcagcattcccttggtcatctatgactgggcctgctcatcgagtagtgacgaaggccactgaaacccgccgagaaaaagaaacatccctgttgtctgctcagtcaagtccccacacatcagcaatctctcaccacttcttttgcaagtttacagaagcaaacagaaatgtacaggatacttaaaatggaataactttttggttgcaaaacagagacatggttctataatgcttcatgtccctccaagatttgagatcaatttagggattgtgaaatttttttttcaaatttcatacaatcatatttcccagtacttttcacaatcattttttacccatctaactctatgttttgtggcttcccggtctcttagaactttgaaaacatgatatacaataatgtttatttattatacatccagattctgaaataattttcctactgatgttcagctcacactatctgtacctttttagaagagaaaagaatcttgaattgtatatatttattttgctttacagaaaaaaatggtttcgtaaataatttgcctattttggttaacatagcacatggagataatcatctgaaagttatagggcactgccactgctgaatcagagcatgcccaatatttgaggtggctctgatttcctggcagctgaactcgggtagtccagtggcctagctggtaccacatctattcccatccagagacattctctggcaagtgttctcagctgaaaagtggttggggatgattcttaccttggtaattaaatgaagctacacatttgggtaatctagcaaatgaagtattttttccctcttggcaacttgtgtcagagttactctggtctgagtcaactttcgctggggaaaacctatggaacctactgcaaaaagattgtccaaaatgcctaagaaaatactcctctgatgcatttagccttcaaccctacctgtcttgctgaagggagaaaaatgttttagtacattataggcccagcagcttttattcatgtccaccagctagttgcacagagaatcatgtgtacctaactaaggatgatctaggataagtaactcctgttttatattgagtattttagggaagtctttaaaagacttgttttatatctataaatctaggttattacaaatacaagaattttgtaccttaaataagcctcatttctatttcttcttcattaattctccatctagtcttgtg

SEQ ID NO: 183951 - DNA, 2332 bp, Homo sapiens
  Payload ID: 16248
  Gene Symbol: SLC38A1
  Gene Name: solute carrier family 38, member 1
  Uniprot ID: Q9H2H9
  ENST ID: ENST00000546893
  CDS Start-End: 464-1927
gcatcgtcagagagctgcaagagggaggcagcaaggtgcggccgccagcagtgacaccatgtgaccggcacggctcactgacacgcagctttggttaaagagcgggcgcacaggaggggaggagaccgcgcgcgggacggggaggaatggcctgtccgcgttaaaccatcacaagccatggttgcggaagggccacgcgtcccccagtaggagaatgactccgattcgtgaccctcagcgccggtgcatgtcgatatatttattgagtgtctactgtgtgccaggcactatatctatgtgcatagaaaaaccctggaaggccatacaacaatatatatagagtgatcgtctctgcttgctgagctaacaggggtgtcaagcttccattttggtatctacttctaaatacactcagaacaggagaaatttggactaattttcaaactacagacactttctaatcatgatgcatttcaaaagtggactcgaattaactgagttgcaaaacatgacagtgcccgaggatgataacattagcaatgactccaatgatttcaccgaagtagaaaatggtcagataaatagcaagtttatttctgatcgtgaaagtagaagaagtctcacaaacagccatttggaaaaaaagaagtgtgatgagtatattccaggtacaacctccttaggcatgtctgtttttaacctaagcaacgccattatgggcagtgggattttgggactcgcctttgccctggcaaacactggaatcctactttttctggtacttttgacttcagtgacattgctgtctatatattcaataaacctcctattgatctgttcaaaagaaacaggctgcatggtgtatgaaaagctgggggaacaagtctttggcaccacagggaagttcgtaatctttggagccacctctctacagaacactggagcaatgctgagctacctcttcatcgtaaaaaatgaactaccctctgccataaagtttctaatgggaaaggaagagacattttcagcctggtacgtggatggccgcgttctggtggtgatagttacctttggcataattctccctctgtgtctcttgaagaacttagggtatcttggctatactagtggattttccttgagctgtatggtttttttcctaattgtggttatttacaagaaatttcaaattccctgcattgttccagagctaaattcaacaataagtgctaattcaacaaatgctgacacgtgtacgccaaaatatgttaccttcaattcaaagaccgtgtatgctttacccaccattgcatttgcatttgtttgccacccgtcagtcctgccaatttacagtgagcttaaagaccgatcacagaaaaaaatgcagatggtttcaaacatctcctttttcgccatgtttgttatgtacttcttgactgccatttttggctacttgacattctatgacaacgtgcagtccgacctccttcacaaatatcagagtaaagatgacattctcatcctgacagtgcggctggctgtcattgttgctgtgatcctcacagtgccggtgttatttttcacggttcgttcatctttatttgaactggctaagaaaacaaagtttaatttatgtcgtcataccgtggttacctgcatactcttggttgttatcaacttgttggtgatcttcataccctccatgaaggatatttttggagtcgtaggagttacatctgctaacatgcttattttcattcttccttcatctctttatttaaaaatcacagaccaggatggagataaaggaactcaaagaatttgggctgcccttttcttgggcctgggggtgttgttctccttggtcagcattcccttggtcatctatgactgggcctgctcatcgagtagtgacgaaggccactgaaacccgccgagaaaaagaaacatccctgttgtctgctcagtcaagtccccacacatcagcaatctctcaccacttcttttgcaagtttacagaagcaaacagaaatgtacaggatacttaaaatggaataactttttggttgcaaaacagagacatggttctataatgcttcatgtccctccaagatttgagatcaatttagggattgtgaaatttttttttcaaatttcatacaatcatatttcccagtacttttcacaatcattttttacccatctaactctatgttttgtggcttcccggtctcttagaactttgaaaacatgatatacaataatgtttatttattatacatccagattctgaaataattttcctactgatgttcagctcacactatctgta

SEQ ID NO: 183952 - DNA, 3196 bp, Homo sapiens
  Payload ID: 16248
  Gene Symbol: SLC38A1
  Gene Name: solute carrier family 38, member 1
  Uniprot ID: Q9H2H9
  ENST ID: ENST00000549049
  CDS Start-End: 564-2027
accgcgcgcgggacggggaggaatggcctgtccgcgttaaaccatcacaagccatggttgcggaagggccacgcgtcccccagtaggagaatgactccgattcgtgaccctcagcgccggtgcatgtcgatgtaagtgcgaggccggcgagcagagtgtgagtgggggttggtggtgaggggagattctgatgcaatcggcccggaaaggaggagagccaggcgagcgcggactggggcggccacgccactccgccagaaggtcgccaggagcctccgcccttcaccttcctccgaaatccgccaggccacgccaagctccctgcccaacccttactgacgggggccacattttcccggcctccgcagccagaccttgacacaaaggacatcaaactgccgagggtaaaaaccccggaagggcggacacctccacatcgccttttgccacctttccctttatttccggaggggtgtcaagcttccattttggtatctacttctaaatacactcagaacaggagaaatttggactaattttcaaactacagacactttctaatcatgatgcatttcaaaagtggactcgaattaactgagttgcaaaacatgacagtgcccgaggatgataacattagcaatgactccaatgatttcaccgaagtagaaaatggtcagataaatagcaagtttatttctgatcgtgaaagtagaagaagtctcacaaacagccatttggaaaaaaagaagtgtgatgagtatattccaggtacaacctccttaggcatgtctgtttttaacctaagcaacgccattatgggcagtgggattttgggactcgcctttgccctggcaaacactggaatcctactttttctggtacttttgacttcagtgacattgctgtctatatattcaataaacctcctattgatctgttcaaaagaaacaggctgcatggtgtatgaaaagctgggggaacaagtctttggcaccacagggaagttcgtaatctttggagccacctctctacagaacactggagcaatgctgagctacctcttcatcgtaaaaaatgaactaccctctgccataaagtttctaatgggaaaggaagagacattttcagcctggtacgtggatggccgcgttctggtggtgatagttacctttggcataattctccctctgtgtctcttgaagaacttagggtatcttggctatactagtggattttccttgagctgtatggtttttttcctaattgtggttatttacaagaaatttcaaattccctgcattgttccagagctaaattcaacaataagtgctaattcaacaaatgctgacacgtgtacgccaaaatatgttaccttcaattcaaagaccgtgtatgctttacccaccattgcatttgcatttgtttgccacccgtcagtcctgccaatttacagtgagcttaaagaccgatcacagaaaaaaatgcagatggtttcaaacatctcctttttcgccatgtttgttatgtacttcttgactgccatttttggctacttgacattctatgacaacgtgcagtccgacctccttcacaaatatcagagtaaagatgacattctcatcctgacagtgcggctggctgtcattgttgctgtgatcctcacagtgccggtgttatttttcacggttcgttcatctttatttgaactggctaagaaaacaaagtttaatttatgtcgtcataccgtggttacctgcatactcttggttgttatcaacttgttggtgatcttcataccctccatgaaggatatttttggagtcgtaggagttacatctgctaacatgcttattttcattcttccttcatctctttatttaaaaatcacagaccaggatggagataaaggaactcaaagaatttgggctgcccttttcttgggcctgggggtgttgttctccttggtcagcattcccttggtcatctatgactgggcctgctcatcgagtagtgacgaaggccactgaaacccgccgagaaaaagaaacatccctgttgtctgctcagtcaagtccccacacatcagcaatctctcaccacttcttttgcaagtttacagaagcaaacagaaatgtacaggatacttaaaatggaataactttttggttgcaaaacagagacatggttctataatgcttcatgtccctccaagatttgagatcaatttagggattgtgaaatttttttttcaaatttcatacaatcatatttcccagtacttttcacaatcattttttacccatctaactctatgttttgtggcttcccggtctcttagaactttgaaaacatgatatacaataatgtttatttattatacatccagattctgaaataattttcctactgatgttcagctcacactatctgtacctttttagaagagaaaagaatcttgaattgtatatatttattttgctttacagaaaaaaatggtttcgtaaataatttgcctattttggttaacatagcacatggagataatcatctgaaagttatagggcactgccactgctgaatcagagcatgcccaatatttgaggtggctctgatttcctggcagctgaactcgggtagtccagtggcctagctggtaccacatctattcccatccagagacattctctggcaagtgttctcagctgaaaagtggttggggatgattcttaccttggtaattaaatgaagctacacatttgggtaatctagcaaatgaagtattttttccctcttggcaacttgtgtcagagttactctggtctgagtcaactttcgctggggaaaacctatggaacctactgcaaaaagattgtccaaaatgcctaagaaaatactcctctgatgcatttagccttcaaccctacctgtcttgctgaagggagaaaaatgttttagtacattataggcccagcagcttttattcatgtccaccagctagttgcacagagaatcatgtgtacctaactaaggatgatctaggataagtaactcctgttttatattgagtattttagggaagtctttaaaagacttgttttatatctataaatctaggttattacaaatacaagaattttgtaccttaaataagcctcatttctatttcttcttcattaattctccatctagtcttgtg

SEQ ID NO: 183953 - DNA, 891 bp, Homo sapiens
  Payload ID: 16248
  Gene Symbol: SLC38A1
  Gene Name: solute carrier family 38, member 1
  ENST ID: ENST00000550173
  CDS Start-End: 657-891
agttgcccctgctcccctccatgccgctccctcgtcccccggacttggagcgccccagctccgttaacctggacgcaccaggtccttcggtcgggaccacgtggggtctccaggccctccaagagctggcccccggctctttgcgcctaggccggtgctttctcggtgctcagcaaatccttctggttcacctcacacccagtccccaaagcagagctccacagggcagatctcaggaagggctgaccaggtctgcgggtgctggatccggaagaggggaggtgcctcccgcttcagccgcggtcgctgcatcgtcagagagctgcaagagggaggcagcaaggtgcggccgccagcagtgacaccatgtgaccggcacggctcactgacacgcagctttggttaaagagcgggcgcacaggaggggaggagaccgcgcgcgggacggggaggaatggcctgtccgcgttaaaccatcacaagccatggttgcggaagggccacgcgtcccccagtaggagaatgactccgattcgtgaccctcagcgccggtgcatgtcgatgggtgtcaagcttccattttggtatctacttctaaatacactcagaacaggagaaatttggactaattttcaaactacagacactttctaatcatgatgcatttcaaaagtggactcgaattaactgagttgcaaaacatgacagtgcccgaggatgataacattagcaatgactccaatgatttcaccgaagtagaaaatggtcagataaatagcaagtttatttctgatcgtgaaagtagaagaagtctcacaaacagccatttggaaaaaaagaagtgtgatgagtatattccaggtacaacctccttaggcatgtctgttttta

SEQ ID NO: 183954 - DNA, 2599 bp, Homo sapiens
  Payload ID: 16248
  Gene Symbol: SLC38A1
  Gene Name: solute carrier family 38, member 1
  ENST ID: ENST00000552197
  CDS Start-End: 686-2197
gttgccgcagaggcctttaaacgcgtgggtcggtgccgggaggagagcgcatcttcgcccttgtgcgagccccttgccccctaaattatccacctcctggcgcatggggctccccagcacccactgggacccagtaggttacccggctgcctgggcaccgtttgcctgccaaatcgcccgcctgaggtttgtgctgaactgtagttagagaaggcacaagtgcatatggcagcaaaaggaatttcgcggtacccgcgtcacgccgctcccagtgcctttcacaggctgccttgggctggggaaggtggtgctacaattcagagtcctttgtcttgctctgcggcgcggacccggggtttgtacaaaccctcgttctctgttagaaacctaactgccgccaggatcacgtactttctcggacgaatccgcggtgatgtgtgtagcaaaagtgaaaaaagacgcctctgctagaaaacgatatttattgagtgtctactgtgtgccaggcactatatctatgtgcatagaaaaaccctggaaggccatacaacaatatatatagagtgatcgtctctgcttgctgagctaacaggggtgtcaagcttccattttggtatctacttctaaatacactcagaacaggagaaatttggactaattttcaaactacagacactttctaatcatgatgcatttcaaaagtggactcgaattaactgagttgcaaaacatgacagtgcccgaggatgataacattagcaatgactccaatgatttcaccgaagtagaaaatggtcagataaatagcaagtttatttctgatcgtgaaagtagaagaagtctcacaaacagccatttggaaaaaaagaagtgtgatgagtatattccaggtacaacctccttaggcatgtctgtttttaacctaagcaacgccattatgggcagtgggattttgggactcgcctttgccctggcaaacactggaatcctactttttctggtacttttgacttcagtgacattgctgtctatatattcaataaacctcctattgatctgttcaaaagaaacaggctgcatggtgtatgaaaagctgggggaacaagtctttggcaccacagggaagttcgtaatctttggagccacctctctacagaacactggagcaatgctgagctacctcttcatcgtaaaaaatgaactaccctctgccataaagtttctaatgggaaaggaagagacattttcagcctggtacgtggatggccgcgttctggtggtgatagttacctttggcataattctccctctgtgtctcttgaagaacttagggtatcttggctatactagtggattttccttgagctgtatggtttttttcctaattgtggttatttacaagaaatttcaaattccctgcattgttccagagctaaattcaacaataagtgctaattcaacaaatgctgacacgtgtacgccaaaatatgttaccttcaattcaaagaccgtgtatgctttacccaccattgcatttgcatttgtttgccacccgtcagtcctgccaatttacagtgagcttaaagaccgatcacagaaaaaaatgcagatggtttcaaacatctcctttttcgccatgtttgttatgtacttcttgactgccatttttggctacttgacattctatgacaacgtgcagtccgacctccttcacaaatatcagagtaaagatgacattctcatcctgacagtgcggctggctgtcattgttgctgtgatcctcacagtgccggtgttatttttcacggttcgttcatctttatttgaactggctaagaaaacaaagtttaatttatgtcgtcataccgtggttacctgcatactcttggttgttatcaacttgttggtgatcttcataccctccatgaaggatatttttggagtcgtaggagttacatctgctaacatgcttattttcattcttccttcatctctttatttaaaaatcacagaccaggatggagataaaggaactcaaagaatttggctctttctcttcctccagtttccagtccagccctgttggctctcagaatgcatcatccttctccctgcagcgctctcactgaacatgctcaagcgcaaggaacttataatcttgtgttctctggattctggatttagtaatctgtattagtctgttctcacactgctaataaagaaatacctgaggttgcttccaagatagccaaataggaacagctctggtctgcagctcccagcaagatcgatgtagaagatgggtgatttctgcatttccaactgaggtacctggttcatctcactgggactggttggacagtgggtgcagcccatggaaggtgagctgaagcaaggtggggcgtcacctcacccaggaagcacaaggggtcaggggatttacctttcccagccaagggaagccatgacagactgtaactggagaaacggtacactcctgaccaaatactgcacttttcccacagtcttagcaactggcagaccaggtaataccctcccgtgcctggctcagtgggttccatgccaacggagccttgct

SEQ ID NO: 183955 - DNA, 1607 bp, Homo sapiens
  Payload ID: 16248
  Gene Symbol: SLC38A1
  Gene Name: solute carrier family 38, member 1
  ENST ID: ENST00000612161
  CDS Start-End: 96-1607
aggggtgtcaagcttccattttggtatctacttctaaatacactcagaacaggagaaatttggactaattttcaaactacagacactttctaatcatgatgcatttcaaaagtggactcgaattaactgagttgcaaaacatgacagtgcccgaggatgataacattagcaatgactccaatgatttcaccgaagtagaaaatggtcagataaatagcaagtttatttctgatcgtgaaagtagaagaagtctcacaaacagccatttggaaaaaaagaagtgtgatgagtatattccaggtacaacctccttaggcatgtctgtttttaacctaagcaacgccattatgggcagtgggattttgggactcgcctttgccctggcaaacactggaatcctactttttctggtacttttgacttcagtgacattgctgtctatatattcaataaacctcctattgatctgttcaaaagaaacaggctgcatggtgtatgaaaagctgggggaacaagtctttggcaccacagggaagttcgtaatctttggagccacctctctacagaacactggagcaatgctgagctacctcttcatcgtaaaaaatgaactaccctctgccataaagtttctaatgggaaaggaagagacattttcagcctggtacgtggatggccgcgttctggtggtgatagttacctttggcataattctccctctgtgtctcttgaagaacttagggtatcttggctatactagtggattttccttgagctgtatggtttttttcctaattgtggttatttacaagaaatttcaaattccctgcattgttccagagctaaattcaacaataagtgctaattcaacaaatgctgacacgtgtacgccaaaatatgttaccttcaattcaaagaccgtgtatgctttacccaccattgcatttgcatttgtttgccacccgtcagtcctgccaatttacagtgagcttaaagaccgatcacagaaaaaaatgcagatggtttcaaacatctcctttttcgccatgtttgttatgtacttcttgactgccatttttggctacttgacattctatgacaacgtgcagtccgacctccttcacaaatatcagagtaaagatgacattctcatcctgacagtgcggctggctgtcattgttgctgtgatcctcacagtgccggtgttatttttcacggttcgttcatctttatttgaactggctaagaaaacaaagtttaatttatgtcgtcataccgtggttacctgcatactcttggttgttatcaacttgttggtgatcttcataccctccatgaaggatatttttggagtcgtaggagttacatctgctaacatgcttattttcattcttccttcatctctttatttaaaaatcacagaccaggatggagataaaggaactcaaagaatttggctctttctcttcctccagtttccagtccagccctgttggctctcagaatgcatcatccttctccctgcagcgctctcactgaacatgctcaagcgcaaggaacttataatcttgtgttctctggattctggatttagtaatctgtattag

SEQ ID NO: 183956 - DNA, 2708 bp, Homo sapiens
  Payload ID: 16249
  Gene Symbol: SLC38A10
  Gene Name: solute carrier family 38, member 10
  Uniprot ID: Q9HBR0
  ENST ID: ENST00000288439
  CDS Start-End: 347-2689
gtgtccctagctggctctgcggctcttccgggtctgggctcggagattcacaggcggcccgcgaggccgagcgagggacgcatggccctgaggcggccgcagggcttggcggggtccggaggttgacctcgcccccgcagccggccttcgaggctgcctcctccaggcagcctctggggcccgcgcccgcgcctgctcaggctcccgtgttcaggctgcccatcccctccccaccggcgtcccggacgttgggacctgtgaccgtggcctcgggctgggcttccaaagccggccgcagcccggcgacccccgaggcctctcgccccgggcccctagacctctcactatgaccgcggccgccgcctccaactgggggctgatcacgaacatcgtgaacagcatcgtaggggtcagtgtcctcaccatgcccttctgcttcaaacagtgcggcatcgtcctgggggcgctgctcttggtcttctgctcatggatgacgcaccagtcgtgcatgttcttggtgaagtcggccagcctgagcaagcggaggacctacgccggcctggcattccacgcctacgggaaggcaggcaagatgctggtggagaccagcatgatcgggctgatgctgggcacctgcatcgccttctacgtcgtgatcggcgacttggggtccaacttctttgcccggctgttcgggtttcaggtgggcggcaccttccgcatgttcctgctgttcgccgtgtcgctgtgcatcgtgctcccgctcagcctgcagcggaacatgatggcctccatccagtccttcagcgccatggccctcctcttctacaccgtgttcatgttcgtgatcgtgctctcctctctcaagcacggcctcttcagtgggcagtggctgcggcgggtcagctacgtccgctgggagggcgtcttccgctgcatccccatcttcggcatgtccttcgcctgccagtcccaggtgctgcccacctacgacagcctggatgagccgtcagtgaaaaccatgagctccatatttgcttcctcccttaatgtggtcaccaccttctacgtcatggtggggtttttcggctacgtcagcttcaccgaggccacggccggcaacgtgctcatgcactttccctccaacctggtgacggagatgctccgtgtgggcttcatgatgtcagtggctgtgggcttccccatgatgatcctgccatgcaggcaggccctgagcacgctgctgtgtgagcagcagcaaaaagatggcacctttgcagcagggggctacatgccccctctccggtttaaagcacttaccctctctgtggtgtttggaaccatggttggtggcatccttatccccaacgtggagaccatcctgggcctcacaggagcgaccatgggaagcctcatctgcttcatctgcccggcgctgatctacaagaaaatccacaagaacgcactttcctcccaggtggtgctgtgggtcggcctgggcgtcctggtggtgagcactgtcaccacactgtctgtgagcgaggaggtccccgaggacttggcagaggaagcccctggcggccggcttggagaggccgagggtttgatgaaggtggaggcagcgcggctctcagcccaggatccggttgtggccgtggctgaggatggccgggagaagccgaagctgccgaaggagagagaggagctggagcaggcccagatcaaggggcccgtggatgtgcctggacgggaagatggcaaggaggcaccggaggaggcacagctcgatcgccctgggcaagggattgctgtgcctgtgggcgaggcccaccgccacgagcctcctgttcctcacgacaaggtggtggtagatgaaggccaagaccgagaggtgccagaagagaacaaacctccatccagacacgcgggcggaaaggctccaggggtccagggccagatggcgccgcctctgcccgactcagaaagagagaaacaagagccggagcagggagaggttgggaagaggcctggacaggcccaggccttggaggaggcgggtgatcttcctgaagatccccagaaagttccagaagcagatggtcagccagctgtccagcctgcaaaggaggacctggggccaggagacaggggcctgcatcctcggccccaggcagtgctgtctgagcagcagaacggcctggcggtgggtggaggggaaaaggccaaggggggaccgccgccaggcaacgccgccggggacacagggcagcccgcagaggacagcgaccacggtgggaagcctcccctcccagcggagaagccggctccagggcctgggctgccgcccgagcctcgcgagcagagggacgtggagcgagcgggtggaaaccaggcggccagccagctggagggtaaggcctccgccctacagccgcctgcctcaggcccagggagcggcagccccctcccccagccctggggtgatgcccaggtcatcctcgggagccctgccaggccccccttctctttccagccgcctgctgagcagacccctcggagagctttctgctcccttcccatcagcagcttgctttctgggaaccttttatctgccttactcccctttaaacacctgcggcatcgtcacatggcttgtgattaccgttttatctcccttgctcccctttaaaacacctgcggcattgtca

SEQ ID NO: 183957 - DNA, 4300 bp, Homo sapiens
  Payload ID: 16249
  Gene Symbol: SLC38A10
  Gene Name: solute carrier family 38, member 10
  Uniprot ID: Q9HBR0
  ENST ID: ENST00000374759
  CDS Start-End: 385-3744
aagtgtgagcgccgcggcggcagctgagttgggctgaggtgtccctagctggctctgcggctcttccgggtctgggctcggagattcacaggcggcccgcgaggccgagcgagggacgcatggccctgaggcggccgcagggcttggcggggtccggaggttgacctcgcccccgcagccggccttcgaggctgcctcctccaggcagcctctggggcccgcgcccgcgcctgctcaggctcccgtgttcaggctgcccatcccctccccaccggcgtcccggacgttgggacctgtgaccgtggcctcgggctgggcttccaaagccggccgcagcccggcgacccccgaggcctctcgccccgggcccctagacctctcactatgaccgcggccgccgcctccaactgggggctgatcacgaacatcgtgaacagcatcgtaggggtcagtgtcctcaccatgcccttctgcttcaaacagtgcggcatcgtcctgggggcgctgctcttggtcttctgctcatggatgacgcaccagtcgtgcatgttcttggtgaagtcggccagcctgagcaagcggaggacctacgccggcctggcattccacgcctacgggaaggcaggcaagatgctggtggagaccagcatgatcgggctgatgctgggcacctgcatcgccttctacgtcgtgatcggcgacttggggtccaacttctttgcccggctgttcgggtttcaggtgggcggcaccttccgcatgttcctgctgttcgccgtgtcgctgtgcatcgtgctcccgctcagcctgcagcggaacatgatggcctccatccagtccttcagcgccatggccctcctcttctacaccgtgttcatgttcgtgatcgtgctctcctctctcaagcacggcctcttcagtgggcagtggctgcggcgggtcagctacgtccgctgggagggcgtcttccgctgcatccccatcttcggcatgtccttcgcctgccagtcccaggtgctgcccacctacgacagcctggatgagccgtcagtgaaaaccatgagctccatatttgcttcctcccttaatgtggtcaccaccttctacgtcatggtggggtttttcggctacgtcagcttcaccgaggccacggccggcaacgtgctcatgcactttccctccaacctggtgacggagatgctccgtgtgggcttcatgatgtcagtggctgtgggcttccccatgatgatcctgccatgcaggcaggccctgagcacgctgctgtgtgagcagcagcaaaaagatggcacctttgcagcagggggctacatgccccctctccggtttaaagcacttaccctctctgtggtgtttggaaccatggttggtggcatccttatccccaacgtggagaccatcctgggcctcacaggagcgaccatgggaagcctcatctgcttcatctgcccggcgctgatctacaagaaaatccacaagaacgcactttcctcccaggtggtgctgtgggtcggcctgggcgtcctggtggtgagcactgtcaccacactgtctgtgagcgaggaggtccccgaggacttggcagaggaagcccctggcggccggcttggagaggccgagggtttgatgaaggtggaggcagcgcggctctcagcccaggatccggttgtggccgtggctgaggatggccgggagaagccgaagctgccgaaggagagagaggagctggagcaggcccagatcaaggggcccgtggatgtgcctggacgggaagatggcaaggaggcaccggaggaggcacagctcgatcgccctgggcaagggattgctgtgcctgtgggcgaggcccaccgccacgagcctcctgttcctcacgacaaggtggtggtagatgaaggccaagaccgagaggtgccagaagagaacaaacctccatccagacacgcgggcggaaaggctccaggggtccagggccagatggcgccgcctctgcccgactcagaaagagagaaacaagagccggagcagggagaggttgggaagaggcctggacaggcccaggccttggaggaggcgggtgatcttcctgaagatccccagaaagttccagaagcagatggtcagccagctgtccagcctgcaaaggaggacctggggccaggagacaggggcctgcatcctcggccccaggcagtgctgtctgagcagcagaacggcctggcggtgggtggaggggaaaaggccaaggggggaccgccgccaggcaacgccgccggggacacagggcagcccgcagaggacagcgaccacggtgggaagcctcccctcccagcggagaagccggctccagggcctgggctgccgcccgagcctcgcgagcagagggacgtggagcgagcgggtggaaaccaggcggccagccagctggaggaagctggcagggcggagatgctggaccacgccgtcctgcttcaggtgatcaaagaacagcaggtgcagcaaaagcgcttgctggaccagcaggagaagctgctggcggtgatcgaggagcagcacaaggagatccaccagcagaggcaggaggacgaggaggataaacccaggcaggtggaggtgcatcaagagcccggggcagcggtgcccagaggccaggaggcccctgaaggcaaggccagggagacggtggagaatctgcctcccctgcctttggaccctgtcctcagagctcctgggggccgccctgctccatcccaggaccttaaccagcgctccctggagcactctgaggggcctgtgggcagagaccctgctggccctcctgacggcggccctgacacagagcctcgggcagcccaggccaagctgagagatggccagaaggatgccgcccccagggcagctggcactgtgaaggagctccccaagggcccggagcaggtgcccgtgccagaccccgccagggaagccgggggcccagaggagcgcctcgcagaggaattccctgggcaaagtcaggacgttactggcggttcccaagacaggaaaaaacctgggaaggaggtggcagccactggcaccagcattctgaaggaagccaactggctcgtggcagggccaggagcagagacgggggaccctcgcatgaagcccaagcaagtgagccgagacctgggccttgcagcggacctgcccggtggggcggaaggagcagctgcacagccccaggctgtgttacgccagccggaactgcgggtcatctctgatggcgagcagggtggacagcagggccaccggctggaccatggcggtcacctggagatgagaaaggcccgcgggggggaccatgtgcctgtgtcccacgagcagccgagaggcggggaggacgctgctgtccaggagcccaggcagaggccagagccagagctggggctcaaacgagctgtcccggggggccagaggccggacaatgccaagcccaaccgggacctgaaactgcaggctggctccgacctccggaggcgacggcgggaccttggccctcatgcagagggtcagctggccccgagggatggggtcatcattggccttaaccccctgcctgatgtccaggtgaacgacctccgtggcgccctggatgcccagctccgccaggctgcggggggagctctgcaggtggtccacagccggcagcttagacaggcgcctgggcctccagaggagtcctagcacctgctggccatgagggccacgccagccactgccctcctcggccagcagcaggtctgtctcagccgcatcccagccaaactctggaggtcacactcgcctctccccagggtttcatgtctgaggccctcaccaagtgtgagtgacagtataaaagattcactgtggcatcgtttccagaatgttcttgctgtcgttctgttgcagctcttagtctgaggtcctctgacctctagactctgagctcactccagcctgtgaggagaaacggcctccgctgcgagctggctggtgcactcccaggctcaggctggggagctgctgcgtctgtggtcaggcctcctgctcctgccagggagcacgcgtggtcttcgggttgagctcggccgtgcgtggaggtgcgcatggctgctcatggtcccaacacaggctactgtgagagccagcatccaaccccacgcttgcagtgactcagaatgataattattatgactgtttatcgatgcttcccacagtgtggtagaaagtcttgaataaacacttttgccttcaccca

SEQ ID NO: 183958 - DNA, 896 bp, Homo sapiens
  Payload ID: 16249
  Gene Symbol: SLC38A10
  Gene Name: solute carrier family 38, member 10
  ENST ID: ENST00000540966
  CDS Start-End: 1-896
ggggaaaaggccaaggggggaccgccgccaggcaacgccgccggggacacagggcagcccgcagaggacagcgaccacggtgggaagcctcccctcccagcggagaagccggctccagggcctgggctgccgcccgagcctcgcgagcagagggacgtggagcgagcgggtggaaaccaggcggccagccagctggaggctgaaattaaaaagatagtagcagaagctggcagggcggagatgctggaccacgccgtcctgcttcaggtgatcaaagaacagcaggtgcagcaaaagcgcttgctggaccagcaggagaagctgctggcggtgatcgaggagcagcacaaggagatccaccagcagaggcaggaggacgaggaggataaacccaggcaggtggaggtgcatcaagagcccggggcagcggtgcccagaggccaggaggcccctgaaggcaaggccagggagacggtggagaatctgcctcccctgcctttggaccctgtcctcagagctcctgggggccgccctgctccatcccaggaccttaaccagcgctccctggagcactctgaggggcctgtgggcagagaccctgctggccctcctgacggcggccctgacacagagcctcgggcagcccaggccaagctgagagatggccagaaggatgccgcccccagggcagctggcactgtgaaggagctccccaagggcccggagcaggtgcccgtgccagaccccgccagggaagccgggggcccagaggagcgcctcgcagaggaattccctgggcaaagtcaggacgttactggcggttcccaagacaggaaaaaacctgggaaggaggtggcagccactggcaccagcattctgaaggaagccaactggct

SEQ ID NO: 183959 - DNA, 528 bp, Homo sapiens
  Payload ID: 16249
  Gene Symbol: SLC38A10
  Gene Name: solute carrier family 38, member 10
  ENST ID: ENST00000539748
  CDS Start-End: 172-528
cgcgactgcccatccaaaccgaggcctcgcggggcgagtcccttgtcctccagctcgttgaactggggccccgggcacaggtcggctggaccagcttggcgaaccggacagctgcgagaccctcagtgcggcatcgtcctgggggcgctgctcttggtcttctgctcatggatgacgcaccagtcgtgcatgttcttggtgaagtcggccagcctgagcaagcggaggacctacgccggcctggcattccacgcctacgggaaggcaggcaagatgctggtggagaccagcatgatcgggctgatgctgggcacctgcatcgccttctacgtcgtgatcggcgacttggggtccaacttctttgcccggctgttcgggtttcaggtgggcggcaccttccgcatgttcctgctgttcgccgtgtcgctgtgcatcgtgctcccgctcagcctgcagcggaacatgatggcctccatccagtccttcagcgccatggccctcctcttctacaccgtgttcatgttcgtg

SEQ ID NO: 183960 - DNA, 663 bp, Homo sapiens
  Payload ID: 16249
  Gene Symbol: SLC38A10
  Gene Name: solute carrier family 38, member 10
  ENST ID: ENST00000543204
  CDS Start-End: 1-211
gcagcggaacatgatggcctccatccagtccttcagcgccatggccctcctcttctacaccgtgttcatgttcgtgatcgtgctctcctctctcaagcacggcctcttcagtgggcagtggctgcggcgggtcagctacgtccgctgggagggcgtcttccgctgcatccccatcttcggcatgtccttcgcctgccagtcggctctgtaaatgtggatcgggctcttccataattccagcagcattaccttctccaccaaaatgacaagagcgagtgattcgtgcccggttggaacatggtaaccggctgaaaagagaggcgtaaatccggcgcagacgggaaaagaccatcggcatgcggggggctggcagagcggcccctgtagcgttagtgggcatgcattgagccaatcgtaaactaatgtgacagatgaaatttgttcataccgctgtgtttacacccacatgcgagatccaaatcgtcatttcccacttagcgtctctcttggcagctccatctccaccagaacgcgccccagtcttgctgtttaatatcccattatgatcggtgacagaagccgcattcttccgccacgtacctagttaccagttgccctttgtgtctgcgtgtttgcatatttagaaataaatctgcagctggg

SEQ ID NO: 183961 - DNA, 774 bp, Homo sapiens
  Payload ID: 16249
  Gene Symbol: SLC38A10
  Gene Name: solute carrier family 38, member 10
  ENST ID: ENST00000576151
  CDS Start-End: 1-774
gggaaaaggccaaggggggaccgccgccaggcaacgccgccggggacacagggcagcccgcagaggacagcgaccacggtgggaagcctcccctcccagcggagaagccggctccagggcctgggctgccgcccgagcctcgcgagcagagggacgtggagcgagcgggtggaaaccaggcggccagccagctggaggctggcagggcggagatgctggaccacgccgtcctgcttcaggtgatcaaagaacagcaggtgcagcaaaagcgcttgctggaccagcaggagaagctgctggcggtgatcgaggagcagcacaaggagatccaccagcagaggcaggaggacgaggaggataaacccaggcaggtggaggtgcatcaagagcccggggcagcggtgcccagaggccaggaggcccctgaaggcaaggccagggagacggtggagaatctgcctcccctgcctttggaccctgtcctcagagctcctgggggccgccctgctccatcccaggaccttaaccagcgctccctggagcactctgaggggcctgtgggcagagaccctgctggccctcctgacggcggccctgacacagagcctcgggcagcccaggccaagctgagagatggccagaaggatgccgcccccagggcagctggcactgtgaaggagctccccaagggcccggagcaggtgcccgtgccagaccccgccagggaagccgggggcccagaggagcgcctcgcagaggaattccctgggcaaa

SEQ ID NO: 183962 - DNA, 3737 bp, Homo sapiens
  Payload ID: 16250
  Gene Symbol: SLC38A11
  Gene Name: solute carrier family 38, member 11
  Uniprot ID: Q08AI6
  ENST ID: ENST00000303735
  CDS Start-End: 332-1486
agaaacatcctgcagcatctccgtctccggaggaaaaatacatttgtctgggcgaactccggtggaaaagcgccccaggctgccacagcctagagatcttggggctgcagccctcgcggcctgccgagggagcagggggcgcccgtggaactggctccctgcagctctgcggctacacgcggacctcggctgtgtgcgaggtggcggaggaggctggccgggtgcgaatccgtacccagccccagcatcttccacctgctgaggaccaccgctcagccatgggctaccagaggcaggagcctgtcatcccgccgcaggattgccttattcaatgaagcaagctgggtttcctttgggaatattgcttttattctgggtttcatatgttacagacttttcccttgttttattgataaaaggaggggccctctctggaacagatacctaccagtctttggtcaataaaactttcggctttccagggtatctgctcctctctgttcttcagtttttgtatccttttatagttgatcctgaaaacgtgtttattggtcgccacttcattattggactttccacagttacctttactctgcctttatccttgtaccgaaatatagcaaagcttggaaaggtctccctcatctctacaggtttaacaactctgattcttggaattgtaatggcaagggcaatttcactgggtccacacataccaaaaacagaagacgcttgggtatttgcaaagcccaatgccattcaagcggtcggggttatgtcttttgcatttatttgccaccataactccttcttagtttacagttctctagaagaacccacagtagctaagtggtcccgccttatccatatgtccatcgtgatttctgtatttatctgtatattctttgctacatgtggatacttgacatttactggcttcacccaaggggacttatttgaaaattactgcagaaatgatgacctggtaacatttggaagattttgttatggtgtcactgtcattttgacataccctatggaatgctttgtgacaagagaggtaattgccaatgtgttttttggtgggaatctttcatcggttttccacattgttgtaacagtgatggtcatcactgtagccacgcttgtgtcattgctgattgattgcctcgggatagttctagaactcaatggtgtgctctgtgcaactcccctcatttttatcattccatcagcctgttatctgaaactgtctgaagaaccaaggacacactccgataagattatgtcttgtgtcatgcttcccattggtgctgtggtgatggtttttggattcgtcatggctattacaaatactcaagactgcacccatgggcaggaaatgttctactgctttcctgacaatttctctctcacaaatacctcagagtctcatgttcagcagacaacacaactttctactttaaatattagtatctttcaatgagttgactgctttaaaaatatgtatgttttcatagactttaaaacacataacatttacgcttgctttagtctgtatttatgttatataaaattattattttggcttttatcaagacttggcttttatgagtagtgcaatataaaagataaagaaaagaaaaattgaatgtatttcacctttaactggaacaaaataagggttttgttctaatgactgcactacactaatgctaattgaagaagggagagttaagcctttagcattttctgccatcccccttttatttaatatgcaaaccagtatattgtgctccaaaataagtaggtgattgtgggttggaattttgtgtagatgtcttttggtgggggggtgtggggggtgggcattttctttgtccttaaaagtctgtggaactgaagagaagggaaacccaaaacgattgaaaagaagacatatcccaagaacaaagaggagctctccgttataatttcagcagcatcctttgtttaaagggaaatggatccctggagaaatgagcaaagacctctccatgtgaggaatcctgaatcatagactggctgtgaggagcaaggtgtgtaaagaatcaaaatcacctcccatcttctgatgctgtgggaatacaatggtagcaccattctaaaacagaaaaacaaacaaacaaacaaaaaaaacaaaaacaaaaaacagttgttctgtggcaagaacctaagagattggtgatatggacctgttggatttttagtgctgtcaggaatgtacaactggaagctgaactttgaaactagaaacgtgtaagaagaatcagggctacagaagaagctttctcagtccactgggggttcctcagagagatttctgggagctcttgttgactgggtctttgggagcagatagtgagatggagtttatcataactaatgggagagaggggaaagcaggattgttagggagaggtagaactgcagtgcaggctgacctcagccaaatccacagggaagctggtgcatacatgacccatcagagttgtccctgttcaagggtaatagcccagttttgatactgctgcctccatcagtcatttaatgtgagcatctggagaaggatgagttcttgggctaggcagctctttgcagcagagcaaaccctaaaggaactgagagctcgaggtggtctactgatagctttgtcaccacatgcttccttacaggggtatctgggagacacagctgtgcccaccacagatgccctcggtttactgaggatttttaaatgattttttaatgaggactttgtgtctttgtatgtatgacaatcttcaaaaagtaacatgaaaatctggggccatctggatggcttccttatatcaagtatcacctaagattttcatttcatttgtattccaatcaggttgtccatctgtggcactatattaattgttgccaaataacgagaaactatcacaagcagagttaatacatatatgatgagtttgtacaaatcaaatgcaaaaagaaatcctacaggaagtgtataaagggtaggttcacagtagtttgaataaagtggcaagagctgagtcactgtgtgactcatagtgagaaaggcctattgaacataaaggaagatgcattttagcaggtagaaccatgctcagggttttagtggtgatttattttttcaataaaatattatccttaccattaaattaatttaaattctgttgggtaacttttctgtatttaacttataaatttgtttttttatagttaagggtcataggctaagcagtttgtgcctgtttttagattggtacatgtttaggtaaaatataataaaaatgctttcattccatgtaagaaatgaggaaatgtaagaaatttttgccacagtctgtcattacattgctcaagactgagaaacactgacctacataattattaaataaagtcatgagggatgagatctctaagcatgtacaaagaaaagtatgtcaaggataacataatttagcacgtaaccatctcttatcttgtactttggtgttgcttcatactcttcaagtagatgaaagctcctggtaggaactgagcgcagcattagtgcctaataaacatgtattggtttatttatttttaatcagctgtagaacaagactgcttatgacccagttattagctgcacggattaccgacatctttcaaattataatttaataaatcttaggaactca

SEQ ID NO: 183963 - DNA, 1621 bp, Homo sapiens
  Payload ID: 16250
  Gene Symbol: SLC38A11
  Gene Name: solute carrier family 38, member 11
  Uniprot ID: Q08AI6
  ENST ID: ENST00000409149
  CDS Start-End: 293-1513
acatttgtctgggcgaactccggtggaaaagcgccccaggctgccacagcctagagatcttggggctgcagccctcgcggcctgccgagggagcagggggcgcccgtggaactggctccctgcagctctgcggctacacgcggacctcggctgtgtgcgaggtggcggaggaggctggccgggtgcgaatccgtacccagccccagcatcttccacctgctgaggaccaccgctcagccatgggctaccagaggcaggagcctgtcatcccgccgcaggattgccttattcaatgaagcaagctgggtttcctttgggaatattgcttttattctgggtttcatatgttacagacttttcccttgttttattgataaaaggaggggccctctctggaacagatacctaccagtctttggtcaataaaactttcggctttccagggtatctgctcctctctgttcttcagtttttgtatccttttatagcaatgataagttacaatataatagctggagatactttgagcaaagtttttcaaagaatcccaggagttgatcctgaaaacgtgtttattggtcgccacttcattattggactttccacagttacctttactctgcctttatccttgtaccgaaatatagcaaagcttggaaaggtctccctcatctctacaggtttaacaactctgattcttggaattgtaatggcaagggcaatttcactgggtccacacataccaaaaacagaagacgcttgggtatttgcaaagcccaatgccattcaagcggtcggggttatgtcttttgcatttatttgccaccataactccttcttagtttacagttctctagaagaacccacagtagctaagtggtcccgccttatccatatgtccatcgtgatttctgtatttatctgtatattctttgctacatgtggatacttgacatttactggcttcacccaaggggacttatttgaaaattactgcagaaatgatgacctggtaacatttggaagattttgttatggtgtcactgtcattttgacataccctatggaatgctttgtgacaagagaggtaattgccaatgtgttttttggtgggaatctttcatcggttttccacattgttgtaacagtgatggtcatcactgtagccacgcttgtgtcattgctgattgattgcctcgggatagttctagaactcaatggtgtgctctgtgcaactcccctcatttttatcattccatcagcctgttatctgaaactgtctgaagaaccaaggacacactccgataagattatgtcttgtgtcatgcttcccattggtgctgtggtgatggtttttggattcgtcatggctattacaaatactcaagactgcacccatgggcaggaaatgttctactgctttcctgacaatttctctctcacaaatacctcagagtctcatgttcagcagacaacacaactttctactttaaatattagtatctttcaatgagttgactgctttaaaaatatgtatgttttcatagactttaaaacacataacatttacgcttgctttagtctgtatttatgttatataaaattattattttggctttta

SEQ ID NO: 183964 - DNA, 1542 bp, Homo sapiens
  Payload ID: 16250
  Gene Symbol: SLC38A11
  Gene Name: solute carrier family 38, member 11
  Uniprot ID: Q08AI6
  ENST ID: ENST00000409662
  CDS Start-End: 259-1479
tgggctaccagaggcaggagcctgtcatcccgccgcagagagatttagatgacagagaaacccttgtttctgaacatgagtataaagagaaaacctgtcagtctgctgctctttttaatgttgtcaactcgattataggatctggtataatagtagccccattttgactccagagtctgtctttcttaatattccataacccttctgtgctccttattatcctctctgctttcttggctagcaggattgccttattcaatgaagcaagctgggtttcctttgggaatattgcttttattctgggtttcatatgttacagacttttcccttgttttattgataaaaggaggggccctctctggaacagatacctaccagtctttggtcaataaaactttcggctttccagggtatctgctcctctctgttcttcagtttttgtatccttttatagcaatgataagttacaatataatagctggagatactttgagcaaagtttttcaaagaatcccaggagttgatcctgaaaacgtgtttattggtcgccacttcattattggactttccacagttacctttactctgcctttatccttgtaccgaaatatagcaaagcttggaaaggtctccctcatctctacaggtttaacaactctgattcttggaattgtaatggcaagggcaatttcactgggtccacacataccaaaaacagaagacgcttgggtatttgcaaagcccaatgccattcaagcggtcggggttatgtcttttgcatttatttgccaccataactccttcttagtttacagttctctagaagaacccacagtagctaagtggtcccgccttatccatatgtccatcgtgatttctgtatttatctgtatattctttgctacatgtggatacttgacatttactggcttcacccaaggggacttatttgaaaattactgcagaaatgatgacctggtaacatttggaagattttgttatggtgtcactgtcattttgacataccctatggaatgctttgtgacaagagaggtaattgccaatgtgttttttggtgggaatctttcatcggttttccacattgttgtaacagtgatggtcatcactgtagccacgcttgtgtcattgctgattgattgcctcgggatagttctagaactcaatggtgtgctctgtgcaactcccctcatttttatcattccatcagcctgttatctgaaactgtctgaagaaccaaggacacactccgataagattatgtcttgtgtcatgcttcccattggtgctgtggtgatggtttttggattcgtcatggctattacaaatactcaagactgcacccatgggcaggaaatgttctactgctttcctgacaatttctctctcacaaatacctcagagtctcatgttcagcagacaacacaactttctactttaaatattagtatctttcaatgagttgactgctttaaaaatatgtatgttttcatagactttaaaacacataacatttacgcttgc

SEQ ID NO: 183965 - DNA, 1647 bp, Homo sapiens
  Payload ID: 16250
  Gene Symbol: SLC38A11
  Gene Name: solute carrier family 38, member 11
  ENST ID: ENST00000409058
  CDS Start-End: 231-1544
tgggcgaactccggtggaaaagcgccccaggctgccacagcctagagatcttggggctgcagccctcgcggcctgccgagggagcagggggcgcccgtggaactggctccctgcagctctgcggctacacgcggacctcggctgtgtgcgaggtggcggaggaggctggccgggtgcgaatccgtacccagccccagcatcttccacctgctgaggaccaccgctcagccatgggctaccagaggcaggagcctgtcatcccgccgcagagagatttagatgacagagaaacccttgtttctgaacatgagtataaagagaaaacctgtcagtctgctgctctttttaatgttgtcaactcgattataggatctggtataatagacttttcccttgttttattgataaaaggaggggccctctctggaacagatacctaccagtctttggtcaataaaactttcggctttccagggtatctgctcctctctgttcttcagtttttgtatccttttatagcaatgataagttacaatataatagctggagatactttgagcaaagtttttcaaagaatcccaggagttgatcctgaaaacgtgtttattggtcgccacttcattattggactttccacagttacctttactctgcctttatccttgtaccgaaatatagcaaagcttggaaaggtctccctcatctctacaggtttaacaactctgattcttggaattgtaatggcaagggcaatttcactgggtccacacataccaaaaacagaagacgcttgggtatttgcaaagcccaatgccattcaagcggtcggggttatgtcttttgcatttatttgccaccataactccttcttagtttacagttctctagaagaacccacagtagctaagtggtcccgccttatccatatgtccatcgtgatttctgtatttatctgtatattctttgctacatgtggatacttgacatttactggcttcacccaaggggacttatttgaaaattactgcagaaatgatgacctggtaacatttggaagattttgttatggtgtcactgtcattttgacataccctatggaatgctttgtgacaagagaggtaattgccaatgtgttttttggtgggaatctttcatcggttttccacattgttgtaacagtgatggtcatcactgtagccacgcttgtgtcattgctgattgattgcctcgggatagttctagaactcaatggtgtgctctgtgcaactcccctcatttttatcattccatcagcctgttatctgaaactgtctgaagaaccaaggacacactccgataagattatgtcttgtgtcatgcttcccattggtgctgtggtgatggtttttggattcgtcatggctattacaaatactcaagactgcacccatgggcaggaaatgttctactgctttcctgacaatttctctctcacaaatacctcagagtctcatgttcagcagacaacacaactttctactttaaatattagtatctttcaatgagttgactgctttaaaaatatgtatgttttcatagactttaaaacacataacatttacgcttgctttagtctgtatttatgttatataaaattattattttggc

SEQ ID NO: 183966 - DNA, 452 bp, Homo sapiens
  Payload ID: 16250
  Gene Symbol: SLC38A11
  Gene Name: solute carrier family 38, member 11
  ENST ID: ENST00000424914
  CDS Start-End: 1-452
ctcatctctacaggtttaacaactctgattcttggaattgtaatggcaagggcaatttcactgggtccacacataccaaaaacagaagacgcttgggtatttgcaaagcccaatgccattcaagcggtcggggttatgtcttttggggacttatttgaaaattactgcagaaatgatgacctggtaacatttggaagattttgttatggtgtcactgtcattttgacataccctatggaatgctttgtgacaagagaggtaattgccaatgtgttttttggtgggaatctttcatcggttttccacattgttgtaacagtgatggtcatcactgtagccacgcttgtgtcattgctgattgattgcctcgggatagttctagaactcaatggtgtgctctgtgcaactcccctcatttttatcattccatcagcctgttatctgaaactgtc

SEQ ID NO: 183967 - DNA, 4888 bp, Homo sapiens
  Payload ID: 16251
  Gene Symbol: SLC38A2
  Gene Name: solute carrier family 38, member 2
  Uniprot ID: Q96QD8
  ENST ID: ENST00000256689
  CDS Start-End: 446-1966
gatacacaaagagaaggcgcccgggcggccgcggtcccgcccactgacgcgtccccggggtgccgctataacccgccgctcgcagggctgctccacagccgcgcgacgccgccgccttagaacgcctttccagtactgctagcagcagcccgaccacgcgttaccgcacgctcgcgcctttcccttgacacggcggacgccggaggattggggcggcaatttgtcttttccttttttattaaaattatttttcctgcctgttgttggatttggggaaattttttgtttgttttttatgatttgtatttgactgagagaaacccactgaagacgtctgcgtgagaatagagaccaccgaggccgactcgcgggccgctgcacccaccgccaaggacaaaaggagcccagcgctactagctgcacccgattcctcccagtgcttagcatgaagaaggccgaaatgggacgattcagtatttccccggatgaagacagcagcagctacagttccaacagcgacttcaactactcctaccccaccaagcaagctgctctgaaaagccattatgcagatgtagatcctgaaaaccagaactttttacttgaatcgaatttggggaagaagaagtatgaaacagaatttcatccaggtactacttcctttggaatgtcagtatttaatctgagcaatgcgattgtgggcagtggaatccttgggctttcttatgccatggctaatactggaattgctctttttataattctcttgacatttgtgtcaatattttccctgtattctgttcatctccttttgaagactgccaatgaaggagggtctttattatatgaacaattgggatataaggcatttggattagttggaaagcttgcagcatctggatcaattacaatgcagaacattggagctatgtcaagctacctcttcatagtgaaatatgagttgcctttggtgatccaggcattaacgaacattgaagataaaactggattgtggtatctgaacgggaactatttggttctgttggtgtcattggtggtcattcttcctttgtcgctgtttagaaatttaggatatttgggatataccagtggcctttccttgttgtgtatggtgttctttctgattgtggtcatttgcaagaaatttcaggttccgtgtcctgtggaagctgctttgataattaacgaaacaataaacaccaccttaacacagccaacagctcttgtacctgctttgtcacataacgtgactgaaaatgactcttgcagacctcactattttattttcaactcacagactgtctatgctgtgccaattctgatcttttcatttgtctgtcatcctgctgttcttcccatctatgaagaactgaaagaccgcagccgtagaagaatgatgaatgtgtccaagatttcattttttgctatgtttctcatgtatctgcttgccgccctctttggatacctaacattttacgaacatgttgagtcagaattgcttcatacctactcttctatcttgggaactgatattcttcttctcattgtccgtctggctgtgttaatggctgtgaccctgacagtaccagtagttattttcccaatccggagttctgtaactcacttgttgtgtgcatcaaaagatttcagttggtggcgtcatagtctcattacagtgtctatcttggcatttaccaatttacttgtcatctttgtcccaactattagggatatctttggttttattggtgcatctgcagcttctatgttgatttttattcttccttctgccttctatatcaagttggtgaagaaagaacctatgaaatctgtacaaaagattggggctttgttcttcctgttaagtggtgtactggtgatgaccggaagcatggccttgattgttttggattgggtacacaatgcacctggaggtggccattaattggcaccactcaaactcaaactcagtccatctgatgccagtgttgagtaaactcaactactatgaaatttcacctaatgttttcagtttcacttccttttgaagtgcagattcctcgctggttcttctgagtgcagaataagtgaacttttttgttttgttttgtttttttaagaaacttatctgtatgttagaaatggatatgaacaacaaaaccacgagtctcgggttaagggaagtgacaattttattccattccagagaatggacaaactcttaacttttatcaagccacatgcttggctgtgtcattgtttaacttggatattttatgattttacttgaatgtgcctaatggaaccatttgatgtgagaaacaattctttttaatttacagcaaaatattgaataaccattgacaaaaacactattattttttgtaccaaaaatacttaaagacctcagaagcactcttttacttttaagaaattgcttttttgaactttattcagaagcagttatcaataaattccataaaataatgtcattggtatttaaaaatgaatattaatataatgaaatggtttgcctttttgtaggcataataagccaaatacttttttacccaaaataatttttagagaaaatgatgtaatgaaaaattgtaccatgaattaggagcatagttttttccatttaaacgtcaccattacttaaaagatgattgattattgctataccaaatcagatgaactctgttcatcacttttcttctctgtccccaaacaatttggttcattcagactgaaatgtttgtgtcttcaacttattagaatggaagataatgcagatatttctgtgggaaataaaataactaattttgaggtaccaaatagtgcaattgggtaaaacagggtttattcagttgcatctgtctccagtgttgtattgacagctctgggtctttttttgggccagcccttttttgacattgcttccagcagtggaaaatgggcatttgatggcaataggccaaaattattgtgtccagagagtacactttttcaaaatgctcacctactggaagtgtgaattacttgacaatgtatggcttagttgtgttcatgttttgtctacagtagaggtctaatccacaggttacacctatgtttgatatgatataagttctctttgcgtaggccactgggtttctcatgcagtaagctttataaaaactcatttgcactggactgtcatctcattcttgtacaacgtagaattacttgtttacatccaacaaatggttagctagggaaaacagtgcaaactgagtgttagtagtcattttggtccaactgcatgtcaacccttccatttcaatcccagttagaaatgaaaataattactttgaaacttggctttaagagcacatttatcgtacgtcacagtgtatggtgaatatattattaaataatgtggtacttcgctcatcaggcataatgtctaaaatctaatatacataattccattaagtggttgaaggaagcaaataatggaattgtcaattggtcatctggctgtaaggtttgcccttgaactaaaaatgttgtttggggcaagggccagaaatgtggagacatggtttttgttacgcattcttgtattatatgtgactaaatttacaaacaagatacatgtgtaattaaagacccttatggaactggaagacgtcttgtagtgctacattgggtgaaaccgttggtccatttttgtctgtttctatgaagataaaataattgggggccatctagaaatagaaaggcagtgggaagacagattctacggcactgctttcatttaattgggctttaggcactccattcgaatgcagaacctcacctctagttgagaccaagaattggcaaatttgcatgagctcctggaaagagttgctgactttgtatctaagacctgccagggaataccaagagttgtttctacagacttttttttttttttttgtatgggagaagatactgtggcaaccaggaaggaatggaaaaaaaattcttttctctacagcaaattaatgtgaggaagctcctccaatcctctggctatttaaggttcaaaatcaagtgcctagggaaaattccaatggatgattttctgggagctatcttgtctaccttgaggttcctgaacaatgaattcccattaatgagcagtcttcagtattaaaaccactgtcttgtcacctcattttgcattactgtcttccgtggatgtttcagttacaactgtaatgttatttatagaacaacattaatccattaaagctaacctatttttcaatatttatgataatctatgtacatatattgtctgtccatatgtatttgtaaataggttgtatataatgtcaggtttgggtcttgggttcaagtgtatatattcctgtaagtttcttaactgcattttgatgaattcacattatgtaactataagaattgtcccaaaagtacctgtacagaaaattgaatattgaaaaattgacaaattgtgtacaaacactaaaaaaaacttgtttaaattgtatttgcaataaacaacatcaaattttttcatgaaatcttggtacaaattcagatctcttatttaaaatttaaataaggaatacattttcaaaatgcagtaatcaaaatgtgatctagtgtaatgaaataaaatgtgatctagtgtaatggaagacctttgagaacctgggtgtattaactttgtgtatatagtgtaaatatccccactgtactgttagaggccaacaattctagtatggcttgttggcaaagagtgctacaccgtttcaatgaaacaatgtatgtttgttttaactgaactaaaataaatacatgcttaatcctg

SEQ ID NO: 183968 - DNA, 4384 bp, Homo sapiens
  Payload ID: 16251
  Gene Symbol: SLC38A2
  Gene Name: solute carrier family 38, member 2
  ENST ID: ENST00000549258
  CDS Start-End: 350-616
agccgcgcgacgccgccgccttagaacgcctttccagtactgctagcagcagcccgaccacgcgttaccgcacgctcgcgcctttcccttgacacggcggacgccggaggattggggcggcaatttgtcttttccttttttattaaaattatttttcctgcctgttgttggatttggggaaattttttgtttgttttttatgatttgtatttgactgagagaaacccactgaagacgtctgcgtgagaatagagaccaccgaggccgactcgcgggccgctgcacccaccgccaaggacaaaaggagcccagcgctactagctgcacccgattcctcccagtgcttagcatgaagaaggccgaaatgggacgattcagtatttccccggatgaagacagcagcagctacagttccaacagcgacttcaactactcctaccccaccaagcaagctgctctgaaaagccattatgcagatgtagatcctgaaaaccagaactttttacttgaatcgaatttggggaagaagaagtatgaaacagaatttaattctcttgacatttgtgtcaatattttccctgtattctgttcatctccttttgaagactgccaatgaaggagggtctttattatatgaacaattgggatataaggcatttggattagttggaaagcttgcagcatctggatcaattacaatgcagaacattggagctatgtcaagctacctcttcatagtgaaatatgagttgcctttggtgatccaggcattaacgaacattgaagataaaactggattgtggtatctgaacgggaactatttggttctgttggtgtcattggtggtcattcttcctttgtcgctgtttagaaatttaggatatttgggatataccagtggcctttccttgttgtgtatggtgttctttctgattgtggtcatttgcaagaaatttcaggttccgtgtcctgtggaagctgctttgataattaacgaaacaataaacaccaccttaacacagccaacagctcttgtacctgctttgtcacataacgtgactgaaaatgactcttgcagacctcactattttattttcaactcacagactgtctatgctgtgccaattctgatcttttcatttgtctgtcatcctgctgttcttcccatctatgaagaactgaaagaccgcagccgtagaagaatgatgaatgtgtccaagatttcattttttgctatgtttctcatgtatctgcttgccgccctctttggatacctaacattttacgaacatgttgagtcagaattgcttcatacctactcttctatcttgggaactgatattcttcttctcattgtccgtctggctgtgttaatggctgtgaccctgacagtaccagtagttattttcccaatccggagttctgtaactcacttgttgtgtgcatcaaaagatttcagttggtggcgtcatagtctcattacagtgtctatcttggcatttaccaatttacttgtcatctttgtcccaactattagggatatctttggttttattggtgcatctgcagcttctatgttgatttttattcttccttctgccttctatatcaagttggtgaagaaagaacctatgaaatctgtacaaaagattggggctttgttcttcctgttaagtggtgtactggtgatgaccggaagcatggccttgattgttttggattgggtacacaatgcacctggaggtggccattaattggcaccactcaaactcaaactcagtccatctgatgccagtgttgagtaaactcaactactatgaaatttcacctaatgttttcagtttcacttccttttgaagtgcagattcctcgctggttcttctgagtgcagaataagtgaacttttttgttttgttttgtttttttaagaaacttatctgtatgttagaaatggatatgaacaacaaaaccacgagtctcgggttaagggaagtgacaattttattccattccagagaatggacaaactcttaacttttatcaagccacatgcttggctgtgtcattgtttaacttggatattttatgattttacttgaatgtgcctaatggaaccatttgatgtgagaaacaattctttttaatttacagcaaaatattgaataaccattgacaaaaacactattattttttgtaccaaaaatacttaaagacctcagaagcactcttttacttttaagaaattgcttttttgaactttattcagaagcagttatcaataaattccataaaataatgtcattggtatttaaaaatgaatattaatataatgaaatggtttgcctttttgtaggcataataagccaaatacttttttacccaaaataatttttagagaaaatgatgtaatgaaaaattgtaccatgaattaggagcatagttttttccatttaaacgtcaccattacttaaaagatgattgattattgctataccaaatcagatgaactctgttcatcacttttcttctctgtccccaaacaatttggttcattcagactgaaatgtttgtgtcttcaacttattagaatggaagataatgcagatatttctgtgggaaataaaataactaattttgaggtaccaaatagtgcaattgggtaaaacagggtttattcagttgcatctgtctccagtgttgtattgacagctctgggtctttttttgggccagcccttttttgacattgcttccagcagtggaaaatgggcatttgatggcaataggccaaaattattgtgtccagagagtacactttttcaaaatgctcacctactggaagtgtgaattacttgacaatgtatggcttagttgtgttcatgttttgtctacagtagaggtctaatccacaggttacacctatgtttgatatgatataagttctctttgcgtaggccactgggtttctcatgcagtaagctttataaaaactcatttgcactggactgtcatctcattcttgtacaacgtagaattacttgtttacatccaacaaatggttagctagggaaaacagtgcaaactgagtgttagtagtcattttggtccaactgcatgtcaacccttccatttcaatcccagttagaaatgaaaataattactttgaaacttggctttaagagcacatttatcgtacgtcacagtgtatggtgaatatattattaaataatgtggtacttcgctcatcaggcataatgtctaaaatctaatatacataattccattaagtggttgaaggaagcaaataatggaattgtcaattggtcatctggctgtaaggtttgcccttgaactaaaaatgttgtttggggcaagggccagaaatgtggagacatggtttttgttacgcattcttgtattatatgtgactaaatttacaaacaagatacatgtgtaattaaagacccttatggaactggaagacgtcttgtagtgctacattgggtgaaaccgttggtccatttttgtctgtttctatgaagataaaataattgggggccatctagaaatagaaaggcagtgggaagacagattctacggcactgctttcatttaattgggctttaggcactccattcgaatgcagaacctcacctctagttgagaccaagaattggcaaatttgcatgagctcctggaaagagttgctgactttgtatctaagacctgccagggaataccaagagttgtttctacagacttttttttttttttttgtatgggagaagatactgtggcaaccaggaaggaatggaaaaaaaattcttttctctacagcaaattaatgtgaggaagctcctccaatcctctggctatttaaggttcaaaatcaagtgcctagggaaaattccaatggatgattttctgggagctatcttgtctaccttgaggttcctgaacaatgaattcccattaatgagcagtcttcagtattaaaaccactgtcttgtcacctcattttgcattactgtcttccgtggatgtttcagttacaactgtaatgttatttatagaacaacattaatccattaaagctaacctatttttcaatatttatgataatctatgtacatatattgtctgtccatatgtatttgtaaataggttgtatataatgtcaggtttgggtcttgggttcaagtgtatatattcctgtaagtttcttaactgcattttgatgaattcacattatgtaactataagaattgtcccaaaagtacctgtacagaaaattgaatattgaaaaattgacaaattgtgtacaaacactaaaaaaaacttgtttaaattgtatttgcaataaacaacatcaaattttttcatga

SEQ ID NO: 183969 - DNA, 2802 bp, Homo sapiens
  Payload ID: 16251
  Gene Symbol: SLC38A2
  Gene Name: solute carrier family 38, member 2
  ENST ID: ENST00000551374
  CDS Start-End: 42-1076
atgtcttttttgtgtgtttgttttcatggtattcctatgaaatgagtcctgttagaagatgtgtatatttttcagaggatatttgtgactgttttgaccttgtttctgttttctttagattgtggtatctgaacgggaactatttggttctgttggtgtcattggtggtcattcttcctttgtcgctgtttagaaatttaggatatttgggatataccagtggcctttccttgttgtgtatggtgttctttctgattgtggtcatttgcaagaaatttcaggttccgtgtcctgtggaagctgctttgataattaacgaaacaataaacaccaccttaacacagccaacagctcttgtacctgctttgtcacataacgtgactgaaaatgactcttgcagacctcactattttattttcaactcacagactgtctatgctgtgccaattctgatcttttcatttgtctgtcatcctgctgttcttcccatctatgaagaactgaaagaccgcagccgtagaagaatgatgaatgtgtccaagatttcattttttgctatgtttctcatgtatctgcttgccgccctctttggatacctaacattttacgaacatgttgagtcagaattgcttcatacctactcttctatcttgggaactgatattcttcttctcattgtccgtctggctgtgttaatggctgtgaccctgacagtaccagtagttattttcccaatccggagttctgtaactcacttgttgtgtgcatcaaaagatttcagttggtggcgtcatagtctcattacagtgtctatcttggcatttaccaatttacttgtcatctttgtcccaactattagggatatctttggttttattggtgcatctgcagcttctatgttgatttttattcttccttctgccttctatatcaagttggtgaagaaagaacctatgaaatctgtacaaaagattggggctttgttcttcctgttaagtggtgtactggtgatgaccggaagcatggccttgattgttttggattgggtacacaatgcacctggaggtggccattaattggcaccactcaaactcaaactcagtccatctgatgccagtgttgagtaaactcaactactatgaaatttcacctaatgttttcagtttcacttccttttgaagtgcagattcctcgctggttcttctgagtgcagaataagtgaacttttttgttttgttttgtttttttaagaaacttatctgtatgttagaaatggatatgaacaacaaaaccacgagtctcgggttaagggaagtgacaattttattccattccagagaatggacaaactcttaacttttatcaagccacatgcttggctgtgtcattgtttaacttggatattttatgattttacttgaatgtgcctaatggaaccatttgatgtgagaaacaattctttttaatttacagcaaaatattgaataaccattgacaaaaacactattattttttgtaccaaaaatacttaaagacctcagaagcactcttttacttttaagaaattgcttttttgaactttattcagaagcagttatcaataaattccataaaataatgtcattggtatttaaaaatgaatattaatataatgaaatggtttgcctttttgtaggcataataagccaaatacttttttacccaaaataatttttagagaaaatgatgtaatgaaaaattgtaccatgaattaggagcatagttttttccatttaaacgtcaccattacttaaaagatgattgattattgctataccaaatcagatgaactctgttcatcacttttcttctctgtccccaaacaatttggttcattcagactgaaatgtttgtgtcttcaacttattagaatggaagataatgcagatatttctgtgggaaataaaataactaattttgaggtaccaaatagtgcaattgggtaaaacagggtttattcagttgcatctgtctccagtgttgtattgacagctctgggtctttttttgggccagcccttttttgacattgcttccagcagtggaaaatgggcatttgatggcaataggccaaaattattgtgtccagagagtacactttttcaaaatgctcacctactggaagtgtgaattacttgacaatgtatggcttagttgtgttcatgttttgtctacagtagaggtctaatccacaggttacacctatgtttgatatgatataagttctctttgcgtaggccactgggtttctcatgcagtaagctttataaaaactcatttgcactggactgtcatctcattcttgtacaacgtagaattacttgtttacatccaacaaatggttagctagggaaaacagtgcaaactgagtgttagtagtcattttggtccaactgcatgtcaacccttccatttcaatcccagttagaaatgaaaataattactttgaaacttggctttaagagcacatttatcgtacgtcacagtgtatggtgaatatattattaaataatgtggtacttcgctcatcaggcataatgtctaaaatctaatatacataattccattaagtggttgaaggaagcaaataatggaattgtcaattggtcatctggctgtaaggtttgcccttgaactaaaaatgttgtttggggcaagggccagaaatgtggagacatggtttttgttacgcattcttgtattatatgtgactaaatttacaaacaagatacatgtgtaattaaagacccttatggaactggaa

SEQ ID NO: 183970 - DNA, 1221 bp, Homo sapiens
  Payload ID: 16251
  Gene Symbol: SLC38A2
  Gene Name: solute carrier family 38, member 2
  Uniprot ID: Q96QD8
  ENST ID: ENST00000612232
  CDS Start-End: 1-1221
atgaaacagaatttaattctcttgacatttgtgtcaatattttccctgtattctgttcatctccttttgaagactgccaatgaaggagggtctttattatatgaacaattgggatataaggcatttggattagttggaaagcttgcagcatctggatcaattacaatgcagaacattggagctatgtcaagctacctcttcatagtgaaatatgagttgcctttggtgatccaggcattaacgaacattgaagataaaactggattgtggtatctgaacgggaactatttggttctgttggtgtcattggtggtcattcttcctttgtcgctgtttagaaatttaggatatttgggatataccagtggcctttccttgttgtgtatggtgttctttctgattgtggtcatttgcaagaaatttcaggttccgtgtcctgtggaagctgctttgataattaacgaaacaataaacaccaccttaacacagccaacagctcttgtacctgctttgtcacataacgtgactgaaaatgactcttgcagacctcactattttattttcaactcacagactgtctatgctgtgccaattctgatcttttcatttgtctgtcatcctgctgttcttcccatctatgaagaactgaaagaccgcagccgtagaagaatgatgaatgtgtccaagatttcattttttgctatgtttctcatgtatctgcttgccgccctctttggatacctaacattttacgaacatgttgagtcagaattgcttcatacctactcttctatcttgggaactgatattcttcttctcattgtccgtctggctgtgttaatggctgtgaccctgacagtaccagtagttattttcccaatccggagttctgtaactcacttgttgtgtgcatcaaaagatttcagttggtggcgtcatagtctcattacagtgtctatcttggcatttaccaatttacttgtcatctttgtcccaactattagggatatctttggttttattggtgcatctgcagcttctatgttgatttttattcttccttctgccttctatatcaagttggtgaagaaagaacctatgaaatctgtacaaaagattggggctttgttcttcctgttaagtggtgtactggtgatgaccggaagcatggccttgattgttttggattgggtacacaatgcacctggaggtggccattaa

SEQ ID NO: 183971 - DNA, 584 bp, Homo sapiens
  Payload ID: 16252
  Gene Symbol: SLC38A3
  Gene Name: solute carrier family 38, member 3
  ENST ID: ENST00000610458
  CDS Start-End: 297-584
atcccgcgtcgctgttgtcgctgttgcagccgagttcagccgggagcagagcgaaccgcaccggcccgagcggagcgccgcacgttcccaaccgcgaggccaggtggggtctcactctgttgcccaagctggagtgcagtggcacaatctcgcctcactgcaaccgccgcctcccaggcccaagcaattctcccacctcagccttctgagtagccaggaccgcaagtgtgcaacatcaagcctggacatctgactgttggtgtgagaccagtgctcctggtggtgtgccctgagccatggaggcgcctttgcagacagagatggtggagctggtgcccaatggcaaacactcagaggggctgctcccggtcatcacccccatggcaggcaaccagagggtcgaggaccctgcacggagctgtatggagggcaagagcttcctacagaaaagtcccagcaaggagccacacttcactgacttcgaggggaagacatcattcgggatgtcagtgttcaacctcagcaatgccatcatgggcagcggcatcctgggactcgcctatgccatggccaatacgggcatt

SEQ ID NO: 183972 - DNA, 880 bp, Homo sapiens
  Payload ID: 16252
  Gene Symbol: SLC38A3
  Gene Name: solute carrier family 38, member 3
  ENST ID: ENST00000445096
  CDS Start-End: 233-880
cgggagcagagcgaaccgcaccggcccgagcggagcgccgcacgttcccaaccgcgaggccaggttcctgttgacagctgtcgccttgctctccagctactccatccacctgctactcaagtcctcaggggtcgtgggcatccgtgcctatgagcagctgggctaccgtgcctttgggaccccaggaaagctggcagcagccctggccatcacgctccagaacatcggagccatgtccagctacctgtacatcatcaagtctgagctgccacttgtcatacagaccttcctgaacctggaggagaaaacctcggactggtacatgaacgggaactacctggtaatccttgtctctgtcaccatcattctgcccctggcactgatgcggcagcttggctacctgggctactccagcggcttctctcttagctgcatggtgttcttcctaattgcagtcatctacaaaaagttccacgtgccctgcccactgccccccaacttcaacaacaccacaggcaacttcagccacgtggagatcgtgaaggagaaggtgcagctgcaggtcgagcctgaggcttcagccttctgcactcccagctacttcacgctcaactcacagacagcatacaccatccccatcatggccttcgccttcgtctgccaccccgaggtgctgcccatctatactgagctcaaggacccctccaagaagaagatgcagcacatctccaacctgtccatcgctgtcatgtacatcatgtacttcctggctgccctcttcggctacctcaccttctacaacggggtggagtcggagctgctgcacacctacagcaaggtggacccgtttgacgtcctgatcctgtgtgtgcgcgtggcc

SEQ ID NO: 183973 - DNA, 2978 bp, Homo sapiens
  Payload ID: 16252
  Gene Symbol: SLC38A3
  Gene Name: solute carrier family 38, member 3
  Uniprot ID: Q99624
  ENST ID: ENST00000614032
  CDS Start-End: 155-1669
atcccgcgtcgctgttgtcgctgttgcagccgagttcagccgggagcagagcgaaccgcaccggcccgagcggagcgccgcacgttcccaaccgcgaggccagacatctgactgttggtgtgagaccagtgctcctggtggtgtgccctgagccatggaggcgcctttgcagacagagatggtggagctggtgcccaatggcaaacactcagaggggctgctcccggtcatcacccccatggcaggcaaccagagggtcgaggaccctgcacggagctgtatggagggcaagagcttcctacagaaaagtcccagcaaggagccacacttcactgacttcgaggggaagacatcattcgggatgtcagtgttcaacctcagcaatgccatcatgggcagcggcatcctgggactcgcctatgccatggccaatacgggcattatccttttcctgttcctgttgacagctgtcgccttgctctccagctactccatccacctgctactcaagtcctcaggggtcgtgggcatccgtgcctatgagcagctgggctaccgtgcctttgggaccccaggaaagctggcagcagccctggccatcacgctccagaacatcggagccatgtccagctacctgtacatcatcaagtctgagctgccacttgtcatacagaccttcctgaacctggaggagaaaacctcggactggtacatgaacgggaactacctggtaatccttgtctctgtcaccatcattctgcccctggcactgatgcggcagcttggctacctgggctactccagcggcttctctcttagctgcatggtgttcttcctaattgcagtcatctacaaaaagttccacgtgccctgcccactgccccccaacttcaacaacaccacaggcaacttcagccacgtggagatcgtgaaggagaaggtgcagctgcaggtcgagcctgaggcttcagccttctgcactcccagctacttcacgctcaactcacagacagcatacaccatccccatcatggccttcgccttcgtctgccaccccgaggtgctgcccatctatactgagctcaaggacccctccaagaagaagatgcagcacatctccaacctgtccatcgctgtcatgtacatcatgtacttcctggctgccctcttcggctacctcaccttctacaacggggtggagtcggagctgctgcacacctacagcaaggtggacccgtttgacgtcctgatcctgtgtgtgcgcgtggccgtgctgacagcagtcacgctcacagtgcccatcgttctgttcccggtgcgccgcgccatccagcagatgctgtttccaaaccaggagttcagctggctgcggcatgtgcttattgccgttggcctgctcacttgtatcaacctgctggtcatctttgcccccaacatcctgggcatctttggggtcatcggtgccacatctgccccattcctcatcttcatcttccctgccatcttctacttccgaatcatgcccacggagaaggagcctgcaagatccacccccaaaatcctggccctgtgttttgctatgcttggcttcttgctgatgaccatgagcttgagcttcatcatcattgactgggcctcagggaccagccggcatggaggaaaccactagggtgaccctcatcctgttctgtctactcaccctagcagccctgcccagactcttcagcccctgctcccatccagtggccagtcgggggaggagaaagacgcgattaacactgtggcattcagccaggccccatgtcctctctgtggaaggtttttgttcaagagccaggaccaaggcccttgggccactaccctgctaggctctggagctgtagaggcttcctgaactgggagcagggtagggctgtcgccttagatcccgcccaagcccctcattccctccttgcacagatgcatacactggggcccagcagctgcctcctgaggtgacacagcctgtaggaacatacacagctgggatcagcctgcagccatcccccgaccctgctgctaggccacggtctgcgccctggggcctcatctcccccagcccacttgttttccccccttttattccctaggcccttttcagactcctgggcccttggatactcttctcccatctcccttcacaggatgacaccctcccataccccatagctggggccagcaggttctgctgagggtggggctggtgtagggacccccaagagacccctgtcctgtcccttcaccagtcctggggaggctgggactccccctgccacaagcctgggccacagctcacattccactgctgggagaagaaacaggccgaggcccagagtggcctgcccccgggagccaaagaccccagtggccacactgggatagggtggggaggctggcagccctcttttataaatattatacataagaccagctgtgttttctattcttggtctccatggtccctggattcctggaaagtgaggtacgggccagaacatggatggtgatggagggcccccgtctccttgtctgggatgagggtggggacagggcaagtcccccacccaccccaccccctgcctcccaaactaaccagtggcacactcagacccagctctgggcctgggccaggctcagcacagacctgctttctcacgggttgaggtggggaggaattaatgaggccccaggaagtgggacagagagaggcctccggaaggaggcaacgtgaggtgcatccccagcagcttcagggagggtctgagctgggggcagctgagccctgagggagccccaggaagggccccctgccctcccctagctcccaggctgccatgtcaactctctgtcaatgccctgagtctggggacaaaagtccaggaatcctgtgccctgttgggctgatctttttatcaacagtaaaatccactacgaataaa

SEQ ID NO: 183974 - DNA, 992 bp, Homo sapiens
  Payload ID: 16252
  Gene Symbol: SLC38A3
  Gene Name: solute carrier family 38, member 3
  ENST ID: ENST00000621714
  CDS Start-End: 133-447
gttgcagccgagttcagccgggagcagagcgaaccgcaccggcccgagcggagcgccgcacgttcccaaccgcgaggccagacatctgactgttggtgtgagaccagtgctcctggtggtgtgccctgagccatggaggcgcctttgcagacagagatggtggagctggtgcccaatggcaaacactcagaggggctgctcccggtcatcacccccatggcaggcaaccagagggtcgaggaccctgcacggagctgtatggagggcaagagcttcctacagaaaagtcccagcaaggagccacacttcactgacttcgaggggaagacatcattcgggatgtcagtgttcaacctcagcaatgccatcatgggcagcggcatcctgggactcgcctatgccatggccaatacgggcattatccttttcctgcatccgtgcctatgagcagctgggctaccgtgcctttgggaccccaggaaagctggcagcagccctggccatcacgctccagaacatcggagccatgtccagctacctgtacatcatcaagtctgagctgccacttgtcatacagaccttcctgaacctggaggagaaaacctcggactggtacatgaacgggaactacctggtaatccttgtctctgtcaccatcattctgcccctggcactgatgcggcagcttggctacctgggctactccagcggcttctctcttagctgcatggtgttcttcctaattgcagtcatctacaaaaagttccacgtgccctgcccactgccccccaacttcaacaacaccacaggcaacttcagccacgtggagatcgtgaaggagaaggtgcagctgcaggtcgagcctgaggcttcagccttctgcactcccagctacttcacgctcaactcacagacagcatacaccatccccatcatggccttcgccttcgtctgccaccccgaggtgctgcccatctatactgagctcaagg

SEQ ID NO: 183975 - DNA, 635 bp, Homo sapiens
  Payload ID: 16252
  Gene Symbol: SLC38A3
  Gene Name: solute carrier family 38, member 3
  ENST ID: ENST00000621456
  CDS Start-End: 337-635
tgaagggtaggcctttgactctgggtggtaggacagacataggagaacagggtggggctctagaggaccaggcggggcttctgggggccaaagggaaggaccagctgctgggcaggaggggctttccggccagtggcctggggtggcttggttttgaatttccgctctgcgggccacgtcctgtacacagcctctcagccagcacgtctgcacacgtgcatggctgctgggaatgggggtcactccgactgaccatcatctccacatgtattttccattgctcagacatctgactgttggtgtgagaccagtgctcctggtggtgtgccctgagccatggaggcgcctttgcagacagagatggtggagctggtgcccaatggcaaacactcagaggggctgctcccggtcatcacccccatggcaggcaaccagagggtcgaggaccctgcacggagctgtatggagggcaagagcttcctacagaaaagtcccagcaaggagccacacttcactgacttcgaggggaagacatcattcgggatgtcagtgttcaacctcagcaatgccatcatgggcagcggcatcctgggactcgcctatgccatggccaatacgggcattatccttttcct

SEQ ID NO: 183976 - DNA, 2728 bp, Homo sapiens
  Payload ID: 16253
  Gene Symbol: SLC38A4
  Gene Name: solute carrier family 38, member 4
  Uniprot ID: Q969I6
  ENST ID: ENST00000266579
  CDS Start-End: 400-2043
actggggtgtgcgcagcgcctggagcatgagccgggtggtggcgtgcacggaggatcgcgggaggctgccgcctcgggacaccccactcacacagagctgacgcaagttggacagaaggaggtgttggggtgaggtggtggtgttgattggcttgtctcgttcactcccactggtctttaaatcaatgtctagatctctaaagtttcatataaatcaaagctgttacacgggtctgccattccaaacaagtcaggaaagcctgcacaggactggataaataattaagaacagagtgttctgaacatcaacacaaagtggaagaaccttaagctgaaggtacagtatattatttacactgaaggggcttgtgtgtggacaagaaagcgctgacagctcaaatggatcccatggaactgagaaatgtcaacatcgaaccagatgatgagagcagcagtggagaaagtgctccagatagctacatcgggataggaaattcagaaaaggcagcaatgagcagtcaatttgctaatgaagacactgaaagtcagaaattcctgacaaatggatttttggggaaaaagaagctggcagattatgctgatgaacaccatcccggaaccacttcctttggaatgtcttcatttaacctgagtaatgccatcatgggcagtgggatcctgggcttgtcctatgccatggccaacacagggatcatactttttataatcatgctgcttgctgtggcaatattatcactgtattcagttcaccttttattaaaaacagccaaggaaggagggtctttgatttatgaaaaattaggagaaaaggcatttggatggccgggaaaaattggagcttttgtttccattacaatgcagaacattggagcaatgtcaagctacctctttatcattaaatatgaactacctgaagtaatcagagcattcatgggacttgaagaaaatactggagaatggtacctcaatggcaactacctcatcatatttgtgtctgttggaattattcttccactttcgctccttaaaaatttaggttatcttggctataccagtggattttctcttacctgcatggtgttttttgttagtgtggtgatttacaagaaattccaaataccctgccctctacctgttttggatcacagtgttggaaatctgtcattcaacaacacgcttccaatgcatgtggtaatgttacccaacaactctgagagttctgatgtgaacttcatgatggattacacccaccgcaatcctgcagggctggatgagaaccaggccaagggctctcttcatgacagtggagtagaatatgaagctcatagtgatgacaagtgtgaacccaaatactttgtattcaactcccggacggcctatgcaattcctatcctagtatttgcttttgtatgccaccctgaggtccttcccatctacagtgaacttaaagatcggtcccggagaaaaatgcaaacggtgtcaaatatttccatcacggggatgcttgtcatgtacctgcttgccgccctctttggttacctaaccttctatggagaagttgaagatgaattacttcatgcctacagcaaagtgtatacattagacatccctcttctcatggttcgcctggcagtccttgtggcagtaacactaactgtgcccattgtcctcttcccaattcgtacatcagtgatcacactgttatttcccaaacgacccttcagctggatacgacatttcctgattgcagctgtgcttattgcacttaataatgttctggtcatccttgtgccaactataaaatacatcttcggattcataggggcttcttctgccactatgctgatttttattcttccagcagttttttatcttaaacttgtcaagaaagaaacttttaggtcaccccaaaaggtcggggctttaattttccttgtggttggaatattcttcatgattggaagcatggcactcattataattgactggatttatgatcctccaaattccaagcatcactaacacaaggaaaaatactttctttttctattggaaatggttacaagttatactccaaaagatatttgaattatcttgattggaatgttattcataggaaataacaggaagattccaaagacgtttaccagtaatatcaccaggcacctgcagaagaggaaaatcactgtttttgtcaaggatggttgtgtatgtgtttaaaataaaacctgtggtgcacatttctacccaggttttgctagagcagtgtgagatgatgaaggtgtatttttgctgctttacgagcagaataagggtaactgcatgtaacaatcatcagatagtactctttcccctgccgtctcctcatcctgcaccccctaaaaaagtaccaaacatttgcattctcagaacatcaaacaaaaatgccctggtggcaaagctatcaccatttaatgtcttctctcagtcttgcaccaaagtctctggtctgtttactaacagaggcaaaaggcatgtcttaggaactgtttctgtttctgtaaggtacatgaatggtcaaacaccagtctagagcatcttattgtcaacagcaaaataatattttgcccaccctgtttgtgacattgagttgtgacttctatattcaatagatttttgtaaatgttaaaacatctatatttaaatgttaaaacactaaatatagaga

SEQ ID NO: 183977 - DNA, 3791 bp, Homo sapiens
  Payload ID: 16253
  Gene Symbol: SLC38A4
  Gene Name: solute carrier family 38, member 4
  Uniprot ID: Q969I6
  ENST ID: ENST00000447411
  CDS Start-End: 208-1851
actggggtgtgcgcagcgcctggagcatgagccgggtggtggcgtgcacggaggatcgcgggaggctgccgcctcgggacaccccactcacacagaacagagtgttctgaacatcaacacaaagtggaagaaccttaagctgaaggtacagtatattatttacactgaaggggcttgtgtgtggacaagaaagcgctgacagctcaaatggatcccatggaactgagaaatgtcaacatcgaaccagatgatgagagcagcagtggagaaagtgctccagatagctacatcgggataggaaattcagaaaaggcagcaatgagcagtcaatttgctaatgaagacactgaaagtcagaaattcctgacaaatggatttttggggaaaaagaagctggcagattatgctgatgaacaccatcccggaaccacttcctttggaatgtcttcatttaacctgagtaatgccatcatgggcagtgggatcctgggcttgtcctatgccatggccaacacagggatcatactttttataatcatgctgcttgctgtggcaatattatcactgtattcagttcaccttttattaaaaacagccaaggaaggagggtctttgatttatgaaaaattaggagaaaaggcatttggatggccgggaaaaattggagcttttgtttccattacaatgcagaacattggagcaatgtcaagctacctctttatcattaaatatgaactacctgaagtaatcagagcattcatgggacttgaagaaaatactggagaatggtacctcaatggcaactacctcatcatatttgtgtctgttggaattattcttccactttcgctccttaaaaatttaggttatcttggctataccagtggattttctcttacctgcatggtgttttttgttagtgtggtgatttacaagaaattccaaataccctgccctctacctgttttggatcacagtgttggaaatctgtcattcaacaacacgcttccaatgcatgtggtaatgttacccaacaactctgagagttctgatgtgaacttcatgatggattacacccaccgcaatcctgcagggctggatgagaaccaggccaagggctctcttcatgacagtggagtagaatatgaagctcatagtgatgacaagtgtgaacccaaatactttgtattcaactcccggacggcctatgcaattcctatcctagtatttgcttttgtatgccaccctgaggtccttcccatctacagtgaacttaaagatcggtcccggagaaaaatgcaaacggtgtcaaatatttccatcacggggatgcttgtcatgtacctgcttgccgccctctttggttacctaaccttctatggagaagttgaagatgaattacttcatgcctacagcaaagtgtatacattagacatccctcttctcatggttcgcctggcagtccttgtggcagtaacactaactgtgcccattgtcctcttcccaattcgtacatcagtgatcacactgttatttcccaaacgacccttcagctggatacgacatttcctgattgcagctgtgcttattgcacttaataatgttctggtcatccttgtgccaactataaaatacatcttcggattcataggggcttcttctgccactatgctgatttttattcttccagcagttttttatcttaaacttgtcaagaaagaaacttttaggtcaccccaaaaggtcggggctttaattttccttgtggttggaatattcttcatgattggaagcatggcactcattataattgactggatttatgatcctccaaattccaagcatcactaacacaaggaaaaatactttctttttctattggaaatggttacaagttatactccaaaagatatttgaattatcttgattggaatgttattcataggaaataacaggaagattccaaagacgtttaccagtaatatcaccaggcacctgcagaagaggaaaatcactgtttttgtcaaggatggttgtgtatgtgtttaaaataaaacctgtggtgcacatttctacccaggttttgctagagcagtgtgagatgatgaaggtgtatttttgctgctttacgagcagaataagggtaactgcatgtaacaatcatcagatagtactctttcccctgccgtctcctcatcctgcaccccctaaaaaagtaccaaacatttgcattctcagaacatcaaacaaaaatgccctggtggcaaagctatcaccatttaatgtcttctctcagtcttgcaccaaagtctctggtctgtttactaacagaggcaaaaggcatgtcttaggaactgtttctgtttctgtaaggtacatgaatggtcaaacaccagtctagagcatcttattgtcaacagcaaaataatattttgcccaccctgtttgtgacattgagttgtgacttctatattcaatagatttttgtaaatgttaaaacatctatatttaaatgttaaaacactaaatatagagaggggctttatttcaatcatagagcaacaacaaaaataatgcttatagctaaactgcctgttctagaaagcatctgctttttcatgttattcctaaatcctcttgtcatacttttgtcattgaacaatgctctccctctcgtcttccatcctcattcagaatttttagaagaccacaatcgtggagatacactacccagtattgtttgatacatttttatttgataaacattcagtgcaggaaactgtgatttgctatatgtttatgtatataatcttattctgtagtcatcagaatgttaatgtaaggtacatttgatttttattttttacatgtgtagttttctttcttcacagtcaaagcatttatattattgggggtgggggcagggaattaagttggtgggctcgaaaatccattcatatgtatctgtctacaaatgtctggggataatttaaatttgaaacctaagttatatatagtttggcaatgctcttcttcaatatttacaataataggatgatctacaagaaaataagtttctttttgcaaatttttatcatactaaagttgttcttttaatttagcatatctaaaataggatttagttcagtttagctcacacaggtgtttgctgacattcattggccatttaatacagtgttgagtggttctctgtaaaagtataagtgctaacactacgaagaaatgcacacgatcattcttgctcacttctataacaaacttacataaaatggatttaaaaattcctactcacagcctaaaacttctggagttcactacctttttttcaaatcatagtaagatcacttgtgtattttatattttagtaaagccaattatgaagtacaagtatcatacacgtacttttgagctactattatttgaaaaaaatctgccaaatagcatctttaggatatatttacattttcactcatctaaaaagtatacaaaaataaaaagtggaaaaaggtatcttctgaatgttcaagagcatcctatagtgccaaataataaagcaccatttttttcttcataaccaggattaaaattcatatatactgcagggcagacatacatatgatagcttgtgctgattaatttaaccccatttgtaaacagatgaaaattttattttcttatttcatttataagatggctcaatgtattgggaggcttcttttttattacagaaagtgtatattggtatataataaatgaacttttcaaatgac

SEQ ID NO: 183978 - DNA, 423 bp, Homo sapiens
  Payload ID: 16253
  Gene Symbol: SLC38A4
  Gene Name: solute carrier family 38, member 4
  ENST ID: ENST00000550670
  CDS Start-End: 1-423
aatacatcttcggattcataggggcttcttctgccactatgctgatttttattcttccagcagttttttatcttaaacttgtcaagaaagaaacttttaggtcaccccaaaaggtcggggaaataacaggaagattccaaagacgtttaccagtaatatcaccaggcacctgcagaagaggaaaatcactgtttttgtcaaggatggttgtgtatgtgtttaaaataaaacctgtggtgcacatttctacccaggttttgctagagcagtgtgagatgatgaaggtgtatttttgctgctttacgagcagaataagggtaactgcatgtaacaatcatcagatagtactctttcccctgccgtctcctcatcctgcaccccctaaaaaagtaccaaacatttgcattctcagaacatcaaaca

SEQ ID NO: 183979 - DNA, 764 bp, Homo sapiens
  Payload ID: 16253
  Gene Symbol: SLC38A4
  Gene Name: solute carrier family 38, member 4
  ENST ID: ENST00000546940
  CDS Start-End: 190-764
aaaagaaagaagggtctctccatccatccctttctgatactttccctgaatcccagtctggaaagggtagtaaaagaggcggagtgttctgaacatcaacacaaagtggaagaaccttaagctgaaggtacagtatattatttacactgaaggggcttgtgtgtggacaagaaagcgctgacagctcaaatggatcccatggaactgagaaatgtcaacatcgaaccagatgatgagagcagcagtggagaaagtgctccagatagctacatcgggataggaaattcagaaaaggcagcaatgagcagtcaatttgctaatgaagacactgaaagtcagaaattcctgacaaatggatttttggggaaaaagaagctggcagattatgctgatgaacaccatcccggaaccacttcctttggaatgtcttcatttaacctgagtaatgccatcatgggcagtgggatcctgggcttgtcctatgccatggccaacacagggatcatactttttataatcatgctgcttgctgtggcaatattatcactgtattcagttcaccttttattaaaaacagccaaggaaggagggtctttgatttatgaaaaattaggagaaaaggcatttggatggccgggaaaaattggagcttttgtttccattacaatgcagaacattggagcaatgtcaagctacctctttatcattaaatatgaactacctgaagtaatcagagcattcatgggacttgaagaaaatactgg

SEQ ID NO: 183980 - DNA, 933 bp, Homo sapiens
  Payload ID: 16253
  Gene Symbol: SLC38A4
  Gene Name: solute carrier family 38, member 4
  ENST ID: ENST00000547477
  CDS Start-End: 276-933
gcagcgcctggagcatgagccgggtggtggcgtgcacggaggatcgcgggaggctgccgcctcgggacaccccactcacacagggcaaaaggatgtatacactccatcttcatttaaaacactggaggattggaaaggagaaaaggaacaggacagaaaaaaaaacagagtgttctgaacatcaacacaaagtggaagaaccttaagctgaaggtacagtatattatttacactgaaggggcttgtgtgtggacaagaaagcgctgacagctcaaatggatcccatggaactgagaaatgtcaacatcgaaccagatgatgagagcagcagtggagaaagtgctccagatagctacatcgggataggaaattcagaaaaggcagcaatgagcagtcaatttgctaatgaagacactgaaagtcagaaattcctgacaaatggatttttggggaaaaagaagctggcagattatgctgatgaacaccatcccggaaccacttcctttggaatgtcttcatttaacctgagtaatgccatcatgggcagtgggatcctgggcttgtcctatgccatggccaacacagggatcatactttttataatcatgctgcttgctgtggcaatattatcactgtattcagttcaccttttattaaaaacagccaaggaaggagggtctttgatttatgaaaaattaggagaaaaggcatttggatggccgggaaaaattggagcttttgtttccattacaatgcagaacattggagcaatgtcaagctacctctttatcattaaatatgaactacctgaagtaatcagagcattcatgggacttgaagaaaatactggagaatggtacctcaatggcaactacctcatcatatttgtgtctgttggaattattcttccactttcgctccttaaaaatttag

SEQ ID NO: 183981 - DNA, 708 bp, Homo sapiens
  Payload ID: 16254
  Gene Symbol: SLC38A5
  Gene Name: solute carrier family 38, member 5
  ENST ID: ENST00000416711
  CDS Start-End: 135-708
tttctgagatacctccttcccaaggagtaagcgcgggagggagctggggtttcttcagagacgctgtacctacaagacaggggctccaggctcgggtggggattgcagagacacccccaccccaggaaactcggatggaactgcaggatccaaagatgaatggagccctcccttcggatgctgtgggctacaggcaagaacgtgagggcttcctgcccagtcgtggtcctgctcctgggagcaagccggtccagttcatggatttcgaggggaagacatcgtttggaatgtcagtgttcaacctcagcaacgccatcatgggcagcggcatcctggggctggcctatgccatggcccacacgggggtcatcttcttcctggccctgctgctgtgcattgcgcttctgtcgtcctactccatccacctcctgctgacctgtgctggtattgcaggcatccgagcctatgagcagctgggacagagggcattcgggcctgcggggaaggtagtggtggccacagtcatctgtctgcacaatgttggggccatgtccagttacctgttcatcatcaaatctgagctccccctggttatcggcaccttcctgtacatggaccccgagggggactggttcttgaagggaaacctcctcatcatcatcgtcagtgtgttaatcatcctgcccctcgccctcatgaaacacttgg

SEQ ID NO: 183982 - DNA, 910 bp, Homo sapiens
  Payload ID: 16254
  Gene Symbol: SLC38A5
  Gene Name: solute carrier family 38, member 5
  ENST ID: ENST00000440085
  CDS Start-End: 73-910
agacagcgtgagtctggggtctgggaggagaggctatcccttctccacgtggtcggctcatctgcgctggggatggaactgcaggatccaaagatgaatggagccctcccttcggatgctgtgggctacaggcaagaacgtgagggcttcctgcccagtcgtggtcctgctcctgggagcaagccggtccagttcatggatttcgaggggaagacatcgtttggaatgtcagtgttcaacctcagcaacgccatcatgggcagcggcatcctggggctggcctatgccatggcccacacgggggtcatcttcttcctggccctgctgctgtgcattgcgcttctgtcgtcctactccatccacctcctgctgacctgtgctggtattgcaggcatccgagcctatgagcagctgggacagagggcattcgggcctgcggggaaggtagtggtggccacagtcatctgtctgcacaatgttggggccatgtccagttacctgttcatcatcaaatctgagctccccctggttatcggcaccttcctgtacatggaccccgagggggactggttcttgaagggaaacctcctcatcatcatcgtcagtgtgttaatcatcctgcccctcgccctcatgaaacacttgggctacctggggtacaccagtggtctctctctgacctgcatgctgtttttccttgtttcggtcatctacaagaagttccaacttggctgtgctataggccacaatgaaacagcaatggagagtgaagctctcgtgggactccccagccaaggactcaacagcagctgtgaggcccagatgttcacagttgactcacagatgtcctacacagtgcccattatggcttttgcttttgtctgccaccctgaggtgctgcccatctata

SEQ ID NO: 183983 - DNA, 741 bp, Homo sapiens
  Payload ID: 16254
  Gene Symbol: SLC38A5
  Gene Name: solute carrier family 38, member 5
  ENST ID: ENST00000413668
  CDS Start-End: 86-741
ggccacgcggtgagggtggagggaaggagagggggtggcgcgggggaccggggaatgaaagacacagatggcaagagagacagcgatggaactgcaggatccaaagatgaatggagccctcccttcggatgctgtgggctacaggcaagaacgtgagggcttcctgcccagtcgtggtcctgctcctgggagcaagccggtccagttcatggatttcgaggggaagacatcgtttggaatgtcagtgttcaacctcagcaacgccatcatgggcagcggcatcctggggctggcctatgccatggcccacacgggggtcatcttcttcctggccctgctgctgtgcattgcgcttctgtcgtcctactccatccacctcctgctgacctgtgctggtattgcaggcatccgagcctatgagcagctgggacagagggcattcgggcctgcggggaaggtagtggtggccacagtcatctgtctgcacaatgttggggccatgtccagttacctgttcatcatcaaatctgagctccccctggttatcggcaccttcctgtacatggaccccgagggggactggttcttgaagggaaacctcctcatcatcatcgtcagtgtgttaatcatcctgcccctcgccctcatgaaacacttgggctacctggggtacaccagtggtctctctctgacctgcatgctgtttttccttgtttcggtcatctacaagaagttccaact

SEQ ID NO: 183984 - DNA, 871 bp, Homo sapiens
  Payload ID: 16254
  Gene Symbol: SLC38A5
  Gene Name: solute carrier family 38, member 5
  ENST ID: ENST00000441948
  CDS Start-End: 55-871
cgtctggggcaggggtctccgagtctgtccccaaccctcagctcactcaacaggatggaactgcaggatccaaagatgaatggagccctcccttcggatgctgtgggctacaggcaagaacgtgagggcttcctgcccagtcgtggtcctgctcctgggagcaagccggtccagttcatggatttcgaggggaagacatcgtttggaatgtcagtgttcaacctcagcaacgccatcatgggcagcggcatcctggggctggcctatgccatggcccacacgggggtcatcttcttcctggccctgctgctgtgcattgcgcttctgtcgtcctactccatccacctcctgctgacctgtgctggtattgcaggcatccgagcctatgagcagctgggacagagggcattcgggcctgcggggaaggtagtggtggccacagtcatctgtctgcacaatgttggggccatgtccagttacctgttcatcatcaaatctgagctccccctggttatcggcaccttcctgtacatggaccccgagggggactggttcttgaagggaaacctcctcatcatcatcgtcagtgtgttaatcatcctgcccctcgccctcatgaaacacttgggctacctggggtacaccagtggtctctctctgacctgcatgctgtttttccttgtttcggtcatctacaagaagttccaacttggctgtgctataggccacaatgaaacagcaatggagagtgaagctctcgtgggactccccagccaaggactcaacagcagctgtgaggcccagatgttcacagttgactcacagatgtcctacacagtgcccattatggcttttgcttttgtctgccacc

SEQ ID NO: 183985 - DNA, 656 bp, Homo sapiens
  Payload ID: 16254
  Gene Symbol: SLC38A5
  Gene Name: solute carrier family 38, member 5
  ENST ID: ENST00000429543
  CDS Start-End: 166-656
ctgcctccctctgggggcccccaagatctagggtcctctcgtgcctaggctgtctgcctgaggaaaaaaaaaaaagtaccgctccagagcaggagcctaggcagccgagagggtgcccgaacctgagtctgagttgcggccacttcaggagctgagaggagcaggatggaactgcaggatccaaagatgaatggagccctcccttcggatgctgtgggctacaggcaagaacgtgagggcttcctgcccagtcgtggtcctgctcctgggagcaagccggtccagttcatggatttcgaggggaagacatcgtttggaatgtcagtgttcaacctcagcaacgccatcatgggcagcggcatcctggggctggcctatgccatggcccacacgggggtcatcttcttcctggccctgctgctgtgcattgcgcttctgtcgtcctactccatccacctcctgctgacctgtgctggtattgcaggcatccgagcctatgagcagctgggacagagggcattcgggcctgcggggaaggtagtggtggccacagtcatctgtctgcacaatgttggggccatgtccagttacctgttcatcatcaaatctgagctccccctggttatcggcaccttcctgtacatggaccccgaggg

SEQ ID NO: 183986 - DNA, 2659 bp, Homo sapiens
  Payload ID: 16254
  Gene Symbol: SLC38A5
  Gene Name: solute carrier family 38, member 5
  Uniprot ID: Q8WUX1
  ENST ID: ENST00000595796
  CDS Start-End: 845-2263
gcctggaatagcctggctactacccctgcacctgttcccctgctgtccccaggcctctctgcctgaatctgcctctctctgcctcttttctcctgtccctccaggagtctctctgcctcaaccactctctctgccccttcatctctctgagctggtgtgtctggtcctaccctctgtttggggagctgtctggctctgtcccccacctcttggccagcctgtgtctcctgtctatgactgagcccaattgcctgttgcctttctgcaggtgtttccacgagcctatccctacccacctgtttgtttctgagtctgcctgtgtgtccctttctccctgtctctgcctgtcttccaagctcccctagcatcccctcctcccgcccatctgtctttctgtcccttctgtggtctgtctgttcctgtgctgtttctcatgcctgctttctttgtaacttcagttctcctactctctctctgtctcctctctgcacctttttctgccatccatcccatcctgctgtccgtctgctctgtgagtccatcccctctgtctgcctgtcactctctctagctgtgggtctacaccctcaatctttcaggccatttcccccaccatcaacacacaaacaaaccgctgtctccctccaagtgggtccagatagggggcgccccttctccacctcttcccccgcccagggccagaaggagggaaacgaaattaaaattaacatttcttctcaggaaaaaaaaaaaagtaccgctccagagcaggagcctaggcagccgagagggtgcccgaacctgagtctgagttgcggccacttcaggagctgagaggagcaggatggaactgcaggatccaaagatgaatggagccctcccttcggatgctgtgggctacaggcaagaacgtgagggcttcctgcccagtcgtggtcctgctcctgggagcaagccggtccagttcatggatttcgaggggaagacatcgtttggaatgtcagtgttcaacctcagcaacgccatcatgggcagcggcatcctggggctggcctatgccatggcccacacgggggtcatcttcttcctggccctgctgctgtgcattgcgcttctgtcgtcctactccatccacctcctgctgacctgtgctggtattgcaggcatccgagcctatgagcagctgggacagagggcattcgggcctgcggggaaggtagtggtggccacagtcatctgtctgcacaatgttggggccatgtccagttacctgttcatcatcaaatctgagctccccctggttatcggcaccttcctgtacatggaccccgagggggactggttcttgaagggaaacctcctcatcatcatcgtcagtgtgttaatcatcctgcccctcgccctcatgaaacacttgggctacctggggtacaccagtggtctctctctgacctgcatgctgtttttccttgtttcggtcatctacaagaagttccaacttggctgtgctataggccacaatgaaacagcaatggagagtgaagctctcgtgggactccccagccaaggactcaacagcagctgtgaggcccagatgttcacagttgactcacagatgtcctacacagtgcccattatggcttttgcttttgtctgccaccctgaggtgctgcccatctatacggagctctgccggccctccaagcgcaggatgcaggccgtggccaacgtgtccattggggccatgttctgcatgtatgggctcacagcaacctttggatacctcaccttctacagcagtgtgaaggcggagatgctgcacatgtacagccagaaggacccgctcatcctctgtgtgcgcctggccgtgctgctcgcggtgaccctcactgtgccagtcgtgctgttccctatccgccgggccctgcagcagctgcttttcccaggcaaggccttcagctggccacgacatgtggccatagctctgatcctgcttgttttggtcaatgtccttgtcatctgtgtgccaaccatccgggatatctttggagttatcgggtccacctcagcccccagcctcatcttcatcctccccagcatcttctacctccgcattgtaccctctgaggtggagcctttcttatcctggcccaagatccaggccctgtgctttggagtcctgggagtcctcttcatggccgtcagtctaggctttatgtttgccaactgggccacaggccagagccgcatgtctggacactgatcaggccctgctggcccaggtccctgtgcgcatgcacatggaggggtcagggccgctccctagggtccctcctgcccaacatgtggaggtggctggttcccatgaacgtggttgtcagaggcgggggacagcagaggctgcagactggcccacttccctcctccccagggatgccaagcttggatcatggccctaatcccaaccccaaccccatgggaggaggaggaggaggaagaagaggaggaggaggaggaggaggaggaggaggaggaggccaggtcctggtggagcctttgcccagcccagtcctctctgcctcctcctggctgaagctgtttgtcaggattaccctcgggctaaagaggaaaaataaagatgttgagctaccactctgga

SEQ ID NO: 183987 - DNA, 2100 bp, Homo sapiens
  Payload ID: 16254
  Gene Symbol: SLC38A5
  Gene Name: solute carrier family 38, member 5
  Uniprot ID: Q8WUX1
  ENST ID: ENST00000619100
  CDS Start-End: 441-1706
ccgctcttcggcccagtgactgccctccctggctgctcccctcccggcctgcctttctcctccagctgttcttcctcctccagcactccccatcctcagcctatccccacccgcagcgtctcccctccccagctgttttacctctggtggctgcttcaccctcccccggtcctctccacttccagctgctccctccaaagtttgtcctagtttcccccttcccagctctccccattcgcagcctcttccatcttcaactcttcttccctgctagcctcttccctcctccgatggtctctccttggcttctctccaccccgcttgcttcttctctagtctttccctggccctggcattagtctccttaccctgtgccctgtcccaatgtgtgcccgggctttgctccttgcgtgcagttcgaggggaagacatcgtttggaatgtcagtgttcaacctcagcaacgccatcatgggcagcggcatcctggggctggcctatgccatggcccacacgggggtcatcttcttcctggccctgctgctgtgcattgcgcttctgtcgtcctactccatccacctcctgctgacctgtgctggtattgcaggcatccgagcctatgagcagctgggacagagggcattcgggcctgcggggaaggtagtggtggccacagtcatctgtctgcacaatgttggggccatgtccagttacctgttcatcatcaaatctgagctccccctggttatcggcaccttcctgtacatggaccccgagggggactggttcttgaagggaaacctcctcatcatcatcgtcagtgtgttaatcatcctgcccctcgccctcatgaaacacttgggctacctggggtacaccagtggtctctctctgacctgcatgctgtttttccttgtttcggtcatctacaagaagttccaacttggctgtgctataggccacaatgaaacagcaatggagagtgaagctctcgtgggactccccagccaaggactcaacagcagctgtgaggcccagatgttcacagttgactcacagatgtcctacacagtgcccattatggcttttgcttttgtctgccaccctgaggtgctgcccatctatacggagctctgccggccctccaagcgcaggatgcaggccgtggccaacgtgtccattggggccatgttctgcatgtatgggctcacagcaacctttggatacctcaccttctacagcagtgtgaaggcggagatgctgcacatgtacagccagaaggacccgctcatcctctgtgtgcgcctggccgtgctgctcgcggtgaccctcactgtgccagtcgtgctgttccctatccgccgggccctgcagcagctgcttttcccaggcaaggccttcagctggccacgacatgtggccatagctctgatcctgcttgttttggtcaatgtccttgtcatctgtgtgccaaccatccgggatatctttggagttatcgggtccacctcagcccccagcctcatcttcatcctccccagcatcttctacctccgcattgtaccctctgaggtggagcctttcttatcctggcccaagatccaggccctgtgctttggagtcctgggagtcctcttcatggccgtcagtctaggctttatgtttgccaactgggccacaggccagagccgcatgtctggacactgatcaggccctgctggcccaggtccctgtgcgcatgcacatggaggggtcagggccgctccctagggtccctcctgcccaacatgtggaggtggctggttcccatgaacgtggttgtcagaggcgggggacagcagaggctgcagactggcccacttccctcctccccagggatgccaagcttggatcatggccctaatcccaaccccaaccccatgggaggaggaggaggaggaagaagaggaggaggaggaggaggaggaggaggaggaggaggccaggtcctggtggagcctttgcccagcccagtcctctctgcctcctcctggctgaagctgtttgtcaggattaccctcgggctaaagaggaaaaataaagatgttgagctaccactctg

SEQ ID NO: 183988 - DNA, 1993 bp, Homo sapiens
  Payload ID: 16254
  Gene Symbol: SLC38A5
  Gene Name: solute carrier family 38, member 5
  Uniprot ID: Q8WUX1
  ENST ID: ENST00000620913
  CDS Start-End: 179-1597
acaaatgccctccctgcctccctctgggggcccccaagatctagggtcctctcgtgcctaggctgtctgcctgaggaaaaaaaaaaaagtaccgctccagagcaggagcctaggcagccgagagggtgcccgaacctgagtctgagttgcggccacttcaggagctgagaggagcaggatggaactgcaggatccaaagatgaatggagccctcccttcggatgctgtgggctacaggcaagaacgtgagggcttcctgcccagtcgtggtcctgctcctgggagcaagccggtccagttcatggatttcgaggggaagacatcgtttggaatgtcagtgttcaacctcagcaacgccatcatgggcagcggcatcctggggctggcctatgccatggcccacacgggggtcatcttcttcctggccctgctgctgtgcattgcgcttctgtcgtcctactccatccacctcctgctgacctgtgctggtattgcaggcatccgagcctatgagcagctgggacagagggcattcgggcctgcggggaaggtagtggtggccacagtcatctgtctgcacaatgttggggccatgtccagttacctgttcatcatcaaatctgagctccccctggttatcggcaccttcctgtacatggaccccgagggggactggttcttgaagggaaacctcctcatcatcatcgtcagtgtgttaatcatcctgcccctcgccctcatgaaacacttgggctacctggggtacaccagtggtctctctctgacctgcatgctgtttttccttgtttcggtcatctacaagaagttccaacttggctgtgctataggccacaatgaaacagcaatggagagtgaagctctcgtgggactccccagccaaggactcaacagcagctgtgaggcccagatgttcacagttgactcacagatgtcctacacagtgcccattatggcttttgcttttgtctgccaccctgaggtgctgcccatctatacggagctctgccggccctccaagcgcaggatgcaggccgtggccaacgtgtccattggggccatgttctgcatgtatgggctcacagcaacctttggatacctcaccttctacagcagtgtgaaggcggagatgctgcacatgtacagccagaaggacccgctcatcctctgtgtgcgcctggccgtgctgctcgcggtgaccctcactgtgccagtcgtgctgttccctatccgccgggccctgcagcagctgcttttcccaggcaaggccttcagctggccacgacatgtggccatagctctgatcctgcttgttttggtcaatgtccttgtcatctgtgtgccaaccatccgggatatctttggagttatcgggtccacctcagcccccagcctcatcttcatcctccccagcatcttctacctccgcattgtaccctctgaggtggagcctttcttatcctggcccaagatccaggccctgtgctttggagtcctgggagtcctcttcatggccgtcagtctaggctttatgtttgccaactgggccacaggccagagccgcatgtctggacactgatcaggccctgctggcccaggtccctgtgcgcatgcacatggaggggtcagggccgctccctagggtccctcctgcccaacatgtggaggtggctggttcccatgaacgtggttgtcagaggcgggggacagcagaggctgcagactggcccacttccctcctccccagggatgccaagcttggatcatggccctaatcccaaccccaaccccatgggaggaggaggaggaggaagaagaggaggaggaggaggaggaggaggaggaggaggaggccaggtcctggtggagcctttgcccagcccagtcctctctgcctcctcctggctgaagctgtttgtcaggattaccctcgggctaaagaggaaaaataaagatgttgagctaccactctgga

SEQ ID NO: 183989 - DNA, 525 bp, Homo sapiens
  Payload ID: 16254
  Gene Symbol: SLC38A5
  Gene Name: solute carrier family 38, member 5
  ENST ID: ENST00000494034
  CDS Start-End: 1-88
ggccctgctgctgtgcattgcgcttctgtcgtcctactccatccacctcctgctgacctgtgctggtattgcagggactggttcttgaagggaaacctcctcatcatcatcgtcagtgtgttaatcatcctgcccctcgccctcatgaaacacttgggctacctggggtacaccagtggtctctctctgacctgcatgctgtttttccttgtttcggtcatctacaagaagttccaacttggctgtgctataggccacaatgaaacagcaatggagagtgaagctctcgtgggactccccagccaaggactcaacagcagctgtgaggcccagatgttcacagttgactcacagatgtcctacacagtgcccattatggcttttgcttttgtctgccaccctgaggtgctgcccatctatacggagctctgccgcgcaggatgcaggccgtggccaacgtgtccattggggccatgttctgcatgtatgggctcacagcaacctttggatacctcaccttctaca

SEQ ID NO: 183990 - DNA, 622 bp, Homo sapiens
  Payload ID: 16254
  Gene Symbol: SLC38A5
  Gene Name: solute carrier family 38, member 5
  ENST ID: ENST00000488083
  CDS Start-End: 132-622
acacaaacaaaccgctgtctccctccaagaaaaaaaaaaaagtaccgctccagagcaggagcctaggcagccgagagggtgcccgaacctgagtctgagttgcggccacttcaggagctgagaggagcaggatggaactgcaggatccaaagatgaatggagccctcccttcggatgctgtgggctacaggcaagaacgtgagggcttcctgcccagtcgtggtcctgctcctgggagcaagccggtccagttcatggatttcgaggggaagacatcgtttggaatgtcagtgttcaacctcagcaacgccatcatgggcagcggcatcctggggctggcctatgccatggcccacacgggggtcatcttcttcctggccctgctgctgtgcattgcgcttctgtcgtcctactccatccacctcctgctgacctgtgctggtattgcaggcatccgagcctatgagcagctgggacagagggcattcgggcctgcggggaaggtagtggtggccacagtcatctgtctgcacaatgttggggccatgtccagttacctgttcatcatcaaatctgagctccccctggttatcggcaccttcctgtacatggaccccgaggg

SEQ ID NO: 183991 - DNA, 2100 bp, Homo sapiens
  Payload ID: 16254
  Gene Symbol: SLC38A5
  Gene Name: solute carrier family 38, member 5
  ENST ID: ENST00000622196
  CDS Start-End: 691-1902
ccgctcttcggcccagtgactgccctccctggctgctcccctcccggcctgcctttctcctccagctgttcttcctcctccagcactccccatcctcagcctatccccacccgcagcgtctcccctccccagctgttttacctctggtggctgcttcaccctcccccggtcctctccacttccagctgctccctccaaagtttgtcctagtttcccccttcccagctctccccattcgcagcctcttccatcttcaactcttcttccctgctagcctcttccctcctccgatggtctctccttggcttctctccaccccgcttgcttcttctctagtctttccctggccctggcattagtctccttaccctgtgccctgtcccaatgtgtgcccgggctttgctccttgcgtgcagttcgaggggaagacatcgtttggaatgtcagtgttcaacctcagcaacgccatcatgggcagcggcatcctggggctggcctatgccatggcccacacgggggtcatcttcttcctggccctgctgctgtgcattgcgcttctgtcgtcctactccatccacctcctgctgacctgtgctggtattgcaggcatccgagcctatgagcagctgggacagagggcattcgggcctgcggggaaggtagtggtggccacagtcatctgtctgcacaatgttggggccatgtccagttacctgttcatcatcaaatctgagctccccctggttatcggcaccttcctgtacatggaccccgaggggggactggttcttgaagggaaacctcctcatcatcatcgtcagtgtgttaatcatcctgcccctcgccctcatgaaacacttgggctacctggggtacaccagtggtctctctctgacctgcatgctgtttttccttgtttcggtcatctacaagaagttccaacttggctgtgctataggccacaatgaaacagcaatggagagtgaagctctcgtgggactccccagccaaggactcaacagcagctgtgaggcccagatgttcacagttgactcacagatgtcctacacagtgcccattatggcttttgcttttgtctgccaccctgaggtgctgcccatctatacggagctctgccggccctccaagcgcaggatgcaggccgtggccaacgtgtccattggggccatgttctgcatgtatgggctcacagcaacctttggatacctcaccttctacagcagtgtgaaggcggagatgctgcacatgtacagccagaaggacccgctcatcctctgtgtgcgcctggccgtgctgctcgcggtgaccctcactgtgccagtcgtgctgttccctatccgccgggccctgcagcagctgcttttcccaggcaaggccttcagctggccacgacatgtggccatagctctgatcctgcttgttttggtcaatgtccttgtcatctgtgtgccaaccatccgggatatctttggagttatcgggtccacctcagcccccagcctcatcttcatcctccccagcatcttctacctccgcattgtaccctctgaggtggagcctttcttatcctggcccaagatccaggccctgtgctttggagtcctgggagtcctcttcatggccgtcagtctaggctttatgtttgccaactgggccacaggcagagccgcatgtctggacactgatcaggccctgctggcccaggtccctgtgcgcatgcacatggaggggtcagggccgctccctagggtccctcctgcccaacatgtggaggtggctggttcccatgaacgtggttgtcagaggcgggggacagcagaggctgcagactggcccacttccctcctccccagggatgccaagcttggatcatggccctaatcccaaccccaaccccatgggaggaggaggaggaggaagaagaggaggaggaggaggaggaggaggaggaggaggaggccaggtcctggtggagcctttgcccagcccagtcctctctgcctcctcctggctgaagctgtttgtcaggattaccctcgggctaaagaggaaaaataaagatgttgagctaccactctg

SEQ ID NO: 183992 - DNA, 1688 bp, Homo sapiens
  Payload ID: 16255
  Gene Symbol: SLC38A6
  Gene Name: solute carrier family 38, member 6
  Uniprot ID: Q8IZM9
  ENST ID: ENST00000267488
  CDS Start-End: 117-1487
gtacggaatgccggaagggccgggctcaaagctccgcctctggcgcgaccgacgactggagcgcagggcaggggtagaggctcgtagatggaactggtagtcagctggagagcagcatggaggcgtcctgggggagcttcaacgctgagcggggctggtatgtctctgtccagcagcctgaagaagcggaggccgaagagttgagtccgttgctaagcaacgaacttcacagacagcgatccccaggtgtttcatttggtttatcagtgtttaatttgatgaatgccatcatgggaagtggcatccttggcttagcttatgttttggctaataccggtgtctttggatttagcttcttgctgctgacagttgctctcctggcttcttactcagtccatcttctgcttagtatgtgtattcagacagctgtaacatcttatgaagatcttggactctttgcatttggattacctggaaagttggtggtggcaggcaccataataattcagaatattggagctatgtcatcttatcttttaattattaaaacagagcttcctgctgctattgcagaatttttgactggagactatagtagatattggtatcttgatggacaaacactactaataatcatatgtgttggcattgtgttccctcttgcacttcttcccaaaataggctttcttggctacacaagtagtttatcatttttctttatgatgttctttgctcttgtggtaataattaaaaaatggtccatcccttgtcctctgacattaaattatgtagagaaaggtttccagatttcaaatgttacagatgattgtaagccaaagctctttcatttctccaaagagagtgcttatgccttaccaaccatggctttttcatttctctgccatacctcaatattgcccatatactgtgaacttcaaagtccttcaaagaaaagaatgcagaatgttaccaatacagcaattgctttaagttttctcatttattttatatctgcactctttgggtacctcactttttatgacaaagtggagtcagaattactaaaaggttatagtaaatacttatcacatgatgttgttgtcatgactgtgaagttatgcatactatttgctgtgcttttgacagtccctctaatccacttccctgccagaaaagctgtaacaatgatgtttttctccaattttccattctcatggattcgccattttttgatcactctagcactcaatattatcatcgttttacttgcaatatatgttcctgacattagaaatgtatttggtgtagttggtgccagtacatcaacatgtttgatttttatattcccaggactattttatcttaaacttagcagagaggattttctgtcatggaaaaagcttggggcattcgttttgctcatctttggaattttggttgggaattttagtttagcactcatcatttttgattggattaataaataaaagaaatattttcctacttcttacaagaataatatacccctagttgcaagaatgaattattccggaagacaccctggatgaaaaataacattttaataaaaattattaacagaaaagcagaacaaaatggcagtgggtatggggaagtaagagtgtggcagttttaatcaaaaaaagaaacaaactcgaaatgctcttaaa

SEQ ID NO: 183993 - DNA, 1730 bp, Homo sapiens
  Payload ID: 16255
  Gene Symbol: SLC38A6
  Gene Name: solute carrier family 38, member 6
  Uniprot ID: Q8IZM9
  ENST ID: ENST00000354886
  CDS Start-End: 165-1730
gtcatcagatcaagtcgactcgctcctctccttccaggccctggtgaagtacggaatgccggaagggccgggctcaaagctccgcctctggcgcgaccgacgactggagcgcagggcaggggtagaggctcgtagatggaactggtagtcagctggagagcagcatggaggcgtcctgggggagcttcaacgctgagcggggctggtatgtctctgtccagcagcctgaagaagcggaggccgaagagttgagtccgttgctaagcaacgaacttcacagacagcgatccccaggtgtttcatttggtttatcagtgtttaatttgatgaatgccatcatgggaagtggcatccttggcttagcttatgttttggctaataccggtgtctttggatttagcttcttgctgctgacagttgctctcctggcttcttactcagtccatcttctgcttagtatgtgtattcagacagctgtaacatcttatgaagatcttggactctttgcatttggattacctggaaagttggtggtggcaggcaccataataattcagaatattggagctatgtcatcttatcttttaattattaaaacagagcttcctgctgctattgcagaatttttgactggagactatagtagatattggtatcttgatggacaaacactactaataatcatatgtgttggcattgtgttccctcttgcacttcttcccaaaataggctttcttggctacacaagtagtttatcatttttctttatgatgttctttgctcttgtggtaataattaaaaaatggtccatcccttgtcctctgacattaaattatgtagagaaaggtttccagatttcaaatgttacagatgattgtaagccaaagctctttcatttctccaaagagagtgcttatgccttaccaaccatggctttttcatttctctgccatacctcaatattgcccatatactgtgaacttcaaagtccttcaaagaaaagaatgcagaatgttaccaatacagcaattgctttaagttttctcatttattttatatctgcactctttgggtacctcactttttatgacaaagtggagtcagaattactaaaaggttatagtaaatacttatcacatgatgttgttgtcatgactgtgaagttatgcatactatttgctgtgcttttgacagtccctctaatccacttccctgccagaaaagctgtaacaatgatgtttttctccaattttccattctcatggattcgccattttttgatcactctagcactcaatattatcatcgttttacttgcaatatatgttcctgacattagaaatgtatttggtgtagttggtgccagtacatcaacatgtttgatttttatattcccaggactattttatcttaaacttagcagagaggattttctgtcatggaaaaagcttgggggtctcattctgtcgcacaggttggcgtgcagtggtgtgatctcagctcattgcaacctctgcctcccggactcaagcaatcctcccacctcagcctccagagtagctgagactacaggaagagataccatggagatgtgcacccagaggaaaggccacgcaaggacacagcaagaaggcaactgtttacaagccaagggaagaggcctcaggagaaccaaacgtgtccacaccttgatcttgcacttcccaacctccagaactgtgagcaaataa

SEQ ID NO: 183994 - DNA, 1568 bp, Homo sapiens
  Payload ID: 16255
  Gene Symbol: SLC38A6
  Gene Name: solute carrier family 38, member 6
  ENST ID: ENST00000451406
  CDS Start-End: 1-1551
gggagcttcaacgctgagcggggctggtatgtctctgtccagcagcctgaagaagcggaggccgaagagttgagtccgttgctaagcaacgaacttcacagacagcgatccccaggtgtttcatttggtttatcagtgtttaatttgatgaatgccatcatgggaagtggcatccttggcttagcttatgttttggctaataccggtgtctttggatttagcttcttgctgctgacagttgctctcctggcttcttactcagtccatcttctgcttagtatgtgtattcagacagctgtaacatcttatgaagatcttggactctttgcatttggattacctggaaagttggtggtggcaggcaccataataattcagaatattggagctatgtcatcttatcttttaattattaaaacagagcttcctgctgctattgcagaatttttgactggagactatagtagatattggtatcttgatggacaaacactactaataatcatatgtgttggcattgtgttccctcttgcacttcttcccaaaataggctttcttggctacacaagtagtttatcatttttctttatgatgttctttgctcttgtggtaataattaaaaaatggtccatcccttgtcctctgacattaaattatgtagagaaaggtttccagatttcaaatgttacagatgattgtaagccaaagctctttcatttctccaaagagagtgcttatgccttaccaaccatggctttttcatttctctgccatacctcaatattgcccatatactgtgaacttcaaagtccttcaaagaaaagaatgcagaatgttaccaatacagcaattgctttaagttttctcatttattttatatctgcactctttgggtacctcactttttatgacaaagtggagtcagaattactaaaaggttatagtaaatacttatcacatgatgttgttgtcatgactgtgaagttatgcatactatttgctgtgcttttgacagtccctctaatccacttccctgccagaaaagctgtaacaatgatgtttttctccaattttccattctcatggattcgccattttttgatcactctagcactcaatattatcatcgttttacttgcaatatatgttcctgacattagaaatgtatttggtgtagttggtgccagtacatcaacatgtttgatttttatattcccaggactattttatcttaaacttagcagagaggattttctgtcatggaaaaagcttgggggtctcattctgtcgcacaggttggcgtgcagtggtgtgatctcagctcattgcaacctctgcctcccggactcaagcaatcctcccacctcagcctccagagtagctgagactacaggaagagataccatggagatgtgcacccagaggaaaggccacgcaaggacacagcaagaaggcaactgtttacaagccaagggaagaggcctcaggagaaccaaacgtgtccacaccttgatcttgcacttcccaacctccagaactgtgagcaaataaatgatgttgtttaatca

SEQ ID NO: 183995 - DNA, 2501 bp, Homo sapiens
  Payload ID: 16255
  Gene Symbol: SLC38A6
  Gene Name: solute carrier family 38, member 6
  ENST ID: ENST00000491344
  CDS Start-End: 2-328
catggaggcgtcctgggggagcttcaacgctgagcggggctggtatgtctctgtccagcagcctgaagaagcggaggccgaagagttgagtccgttgctaagcaacgaacttcacagacagcgatccccaggtgtttcatttggtttatcagtgtttaatttgatgaatgccatcatgggaagtggcatccttggcttagcttatgttttggctaataccggtgtctttggatttagcttcttgctgctgacagttgctctcctggcttcttactcagtccatcttctgcttagtatgtgtattcagacagcctacttgggcccatgaactaactacttcatggttctgcctgcacattgactcacctgtcttccgttgattgaattccttcaatctttgtaaaattctctgtggagctgtaacatcttatgaagatcttggactctttgcatttggattacctggaaagttggtggtggcaggcaccataataattcagaatattggagctatgtcatcttatcttttaattattaaaacagagcttcctgctgctattgcagaatttttgactggagactatagtagacatataaaatgaagttgttgagccagatgatctctaaggtctcttccagctctaacattccataactgtgattctgagttactgctgggaggagatattggtatcttgatggacaaacactactaataatcatatgtgttggcattgtgttccctcttgcacttcttcccaaaataggctttcttggctacacaagtagtttatcatttttctttatgatgttctttgctcttgtggtaataattaaaaaatggtccatcccttgtcctctgacattaaattatgtagagaaaggtttccagatttcaaatgttacagatgattgtaagccaaagctctttcatttctccaaagagagtgcttatgccttaccaaccatggctttttcatttctctgccatacctcaatattgcccatatactgtgaacttcaaagtccttcaaagaaaagaatgcagaatgttaccaatacagcaattgctttaagttttctcatttattttatatctgcactctttgggtacctcactttttatgacaaagtggagtcagaattactaaaaggttatagtaaatacttatcacatgatgttgttgtcatgactgtgaagttatgcatactatttgctgtgcttttgacagtccctctaatccacttccctgccagaaaagctgtaacaatgatgtttttctccaattttccattctcatggattcgccattttttgatcactctagcactcaatattatcatcgttttacttgcaatatatgttcctgacattagaaatgtatttggtgtagttggtgccagtacatcaacatgtttgatttttatattcccaggactattttatcttaaacttagcagagaggattttctgtcatggaaaaagcttggggcattcgttttgctcatctttggaattttggttgggaattttagtttagcactcatcatttttgattggattaataaataaaagaaatattttcctacttcttacaagaataatatacccctagttgcaagaatgaattattccggaagacaccctggatgaaaaataacattttaataaaaattattaacagaaaagcagaacaaaatggcagtgggtatggggaagtaagagtgtggcagttttaatcaaaaaaagaaacaaactcgaaatgctcttaaatatattgggttgatcttttgttttttaaattaatatttttatggtagttttatgtttgcagaaatactgaacagaaagtacagagttcacatataccgttttaccccaacatacagtttcccctattattaactcttgcgttcatgtggtacatttgttacatttgatgagccaatattaactattattattaactaaagttcatagtttaccttaggtttcattcttggcagccactagcaaccactgatttttttttaacttttattttaggttcaagggtacatgtgaaagcttgttacataggtaaactcgtgtcacgggaatttgttatacagattatttcatctcccaggcaagaccaacccctcccctgccttcttctcagcctcctcaacatgaagacaatgagaatgaagacctttatgatgatccagtttcacttaatagttggcgtgcagtggtgtgatctcagctcattgcaacctctgcctcccggactcaagcaatcctcccacctcagcctccagagtagctgagactacagaaaaggaagagataccatggagatgtgcacccagaggaaaggccacgcaaggacacagcaagaaggcaactgtttacaagccaagggaagaggcctcaggagaaccaaacgtgtccacaccttgatcttgcacttcccaacctccagaactgtgagcaaataaatgatgttgtttaatca

SEQ ID NO: 183996 - DNA, 2787 bp, Homo sapiens
  Payload ID: 16255
  Gene Symbol: SLC38A6
  Gene Name: solute carrier family 38, member 6
  ENST ID: ENST00000525723
  CDS Start-End: 53-274
agggcaggggtagaggctcgtagatggaactggtagtcagctggagagcagcatggaggcgtcctgggggagcttcaacgctgagcggggctggtatgtctctgtccagcagcctgaagaagcggaggccgaagagttgagtccgttgctaagcaacgtaagtgggctgtgttcgcttccccgcgctgacgccctccggcttccctcaagtgcctgccaaataagacccagaaaaggaggaccgcaccgggacaggggagatgctggagcctgaaccctgggggatggggtctgaaggcagccgccgagattcagatgagattggcgcagttatgaacgtgatagcagcctagcatactctagaaagaaaagatgaaaagcgtcgggtggaagagatgcagcgttgagtggaagctgcgaacatgatgggatgagcggccctaggattatgtactcactgctgaacttcacagacagcgatccccaggtgtttcatttggtttatcagtgtttaatttgatgaatgccatcatgggaagtggcatccttggcttagcttatgttttggctaataccggtgtctttggatttagcttcttgctgctgacagttgctctcctggcttcttactcagtccatcttctgcttagtatgtgtattcagacagcctacttgggcccatgaactaactacttcatggttctgcctgcacattgactcacctgtcttccgttgattgaattccttcaatctttgtaaaattctctgtggagctgtaacatcttatgaagatcttggactctttgcatttggattacctggaaagttggtggtggcaggcaccataataattcagaatattggagctatgtcatcttatcttttaattattaaaacagagcttcctgctgctattgcagaatttttgactggagactatagtagacatataaaatgaagttgttgagccagatgatctctaaggtctcttccagctctaacattccataactgtgattctgagttactgctgggaggagatattggtatcttgatggacaaacactactaataatcatatgtgttggcattgtgttccctcttgcacttcttcccaaaataggctttcttggctacacaagtagtttatcatttttctttatgatgttctttgctcttgtggtaataattaaaaaatggtccatcccttgtcctctgacattaaattatgtagagaaaggtttccagatttcaaatgttacagatgattgtaagccaaagctctttcatttctccaaagagagtgcttatgccttaccaaccatggctttttcatttctctgccatacctcaatattgcccatatactgtgaacttcaaagtccttcaaagaaaagaatgcagaatgttaccaatacagcaattgctttaagttttctcatttattttatatctgcactctttgggtacctcactttttatgacaaagtggagtcagaattactaaaaggttatagtaaatacttatcacatgatgttgttgtcatgactgtgaagttatgcatactatttgctgtgcttttgacagtccctctaatccacttccctgccagaaaagctgtaacaatgatgtttttctccaattttccattctcatggattcgccattttttgatcactctagcactcaatattatcatcgttttacttgcaatatatgttcctgacattagaaatgtatttggtgtagttggtgccagtacatcaacatgtttgatttttatattcccaggactattttatcttaaacttagcagagaggattttctgtcatggaaaaagcttggggcattcgttttgctcatctttggaattttggttgggaattttagtttagcactcatcatttttgattggattaataaataaaagaaatattttcctacttcttacaagaataatatacccctagttgcaagaatgaattattccggaagacaccctggatgaaaaataacattttaataaaaattattaacagaaaagcagaacaaaatggcagtgggtatggggaagtaagagtgtggcagttttaatcaaaaaaagaaacaaactcgaaatgctcttaaatatattgggttgatcttttgttttttaaattaatatttttatggtagttttatgtttgcagaaatactgaacagaaagtacagagttcacatataccgttttaccccaacatacagtttcccctattattaactcttgcgttcatgtggtacatttgttacatttgatgagccaatattaactattattattaactaaagttcatagtttaccttaggtttcattcttggcagccactagcaaccactgatttttttttaacttttattttaggttcaagggtacatgtgaaagcttgttacataggtaaactcgtgtcacgggaatttgttatacagattatttcatctcccagggtctcattctgtcgcacaggttggcgtgcagtggtgtgatctcagctcattgcaacctctgcctcccggactcaagcaatcctcccacctcagcctccagagtagctgagactacagaaaaggaagagataccatggagatgtgcacccagaggaaaggccacgcaaggacacagcaagaaggcaactgtttacaagccaagggaagaggcctcaggagaaccaaacgtgtccacaccttgatcttgcacttcccaacctccagaactgtgagcaaataaatgatgttgtttaatcaccca

SEQ ID NO: 183997 - DNA, 583 bp, Homo sapiens
  Payload ID: 16255
  Gene Symbol: SLC38A6
  Gene Name: solute carrier family 38, member 6
  ENST ID: ENST00000533744
  CDS Start-End: 1-583
ttaatttgatgaatgccatcatgggaagtggcatccttggcttagcttatgttttggctaataccggtgtctttggatttagcttcttgctgctgacagttgctctcctggcttcttactcagtccatcttctgcttagtatgtgtattcagacagctatgtcatcttatcttttaattattaaaacagagcttcctgctgctattgcagaatttttgactggagactatagtagatattggtatcttgatggacaaacactactaataatcatatgtgttggcattgtgttccctcttgcacttcttcccaaaataggctttcttggctacacaagtagtttatcatttttctttatgatgttctttgctcttgtggtaataattaaaaaatggtccatcccttgtcctctgacattaaattatgtagagaaaggtttccagatttcaaatgttacagatgattgtaagccaaagctctttcatttctccaaagagagtgcttatgccttaccaaccatggctttttcatttctctgccatacctcaatattgcccatatactgtgaacttcaaagtccttc

SEQ ID NO: 183998 - DNA, 1689 bp, Homo sapiens
  Payload ID: 16255
  Gene Symbol: SLC38A6
  Gene Name: solute carrier family 38, member 6
  ENST ID: ENST00000527591
  CDS Start-End: 1-63
gcctgccaaataagacccagaaaaggaggaccgcaccgggacaggggagatgctggagcctgaaccctgggggatggggtctgaaggcagccgccgagattcagatgagattggcgcagttatgaacgtgatagcagcctagcatactctagaaagaaaagatgaaaagcgtcgggtggaagagatgcagcgttgagtggaagctgcgaacatgatgggatgagcggccctaggattatgtactcactgctgaacttcacagacagcgatccccaggtgtttcatttggtttatcagtgtttaatttgatgaatgccatcatgggaagtggcatccttggcttagcttatgttttggctaataccggtgtctttggatttagcttcttgctgctgacagttgctctcctggcttcttactcagtccatcttctgcttagtatgtgtattcagacagcctacttgggcccatgaactaactacttcatggttctgcctgcacattgactcacctgtcttccgttgattgaattccttcaatctttgtaaaattctctgtggagctgtaacatcttatgaagatcttggactctttgcatttggattacctggaaagttggtggtggcaggcaccataataattcagaatattggagctatgtcatcttatcttttaattattaaaacagagcttcctgctgctattgcagaatttttgactggagactatagtagatattggtatcttgatggacaaacactactaataatcatatgtgttggcattgtgttccctcttgcacttcttcccaaaataggctttcttggctacacaagtagtttatcatttttctttatgatgttctttgctcttgtggtaataattaaaaaatggtccatcccttgtcctctgacattaaattatgtagagaaaggtttccagatttcaaatgttacagatgattgtaagccaaagctctttcatttctccaaagagagtgcttatgccttaccaaccatggctttttcatttctctgccatacctcaatattgcccatatactgtgaacttcaaagtccttcaaagaaaagaatgcagaatgttaccaatacagcaattgctttaagttttctcatttattttatatctgcactctttgggtacctcactttttatgatgaacaactaaagcccagagaggtgaagtgacctgtcacagaattaaagacaaagtggagtcagaattactaaaaggttatagtaaatacttatcacatgatgttgttgtcatgactgtgaagttatgcatactatttgctgtgcttttgacagtccctctaatccacttccctgccagaaaagctgtaacaatgatgtttttctccaattttccattctcatggattcgccattttttgatcactctagcactcaatattatcatcgttttacttgcaatatatgttcctgacattagaaatgtatttggtgtagttggtgccagtacatcaacatgtttgatttttatattcccaggactattttatcttaaacttagcagagaggattttctgtcatggaaaaagcttggggcattcgttttgctcatctttggaattttggttgggaattttagtttagcactcatcatttttgattggattaataaataaaagaaatattttccta

SEQ ID NO: 183999 - DNA, 1734 bp, Homo sapiens
  Payload ID: 16255
  Gene Symbol: SLC38A6
  Gene Name: solute carrier family 38, member 6
  ENST ID: ENST00000529345
  CDS Start-End: 1-56
aaataagacccagaaaaggaggaccgcaccgggacaggggagatgctggagcctgaaccctgggggatggggtctgaaggcagccgccgagattcagatgagattggcgcagttatgaacgtgatagcagcctagcatactctagaaagaaaagatgaaaagcgtcgggtggaagagatgcagcgttgagtggaagctgcgaacatgatgggatgagcggccctaggattatgtactcactgctgttagaacttcacagacagcgatccccaggtgtttcatttggtttatcagtgtttaatttgatgaatgccatcatgggaagtggcatccttggcttagcttatgttttggctaataccggtgtctttggatttagcttcttgctgctgacagttgctctcctggcttcttactcagtccatcttctgcttagtatgtgtattcagacagctgtaacatcttatgaagatcttggactctttgcatttggattacctggaaagttggtggtggcaggcaccataataattcagaatattggagctatgtcatcttatcttttaattattaaaacagagcttcctgctgctattgcagaatttttgactggagactatagtagatattggtatcttgatggacaaacactactaataatcatatgtgttggcattgtgttccctcttgcacttcttcccaaaataggctttcttggctacacaagtagtttatcatttttctttatgatgttctttgctcttgtggtaataattaaaaaatggtccatcccttgtcctctgacattaaattatgtagagaaaggtttccagatttcaaatgttacagatgattgtaagccaaagctctttcatttctccaaagagagtgcttatgccttaccaaccatggctttttcatttctctgccatacctcaatattgcccatatactgtgaacttcaaagtccttcaaagaaaagaatgcagaatgttaccaatacagcaattgctttaagttttctcatttattttatatctgcactctttgggtacctcactttttatgacaaagtggagtcagaattactaaaaggttatagtaaatacttatcacatgatgttgttgtcatgactgtgaagttatgcatactatttgctgtgcttttgacagtccctctaatccacttccctgccagaaaagctgtaacaatgatgtttttctccaattttccattctcatggattcgccattttttgatcactctagcactcaatattatcatcgttttacttgcaatatatgttcctgacattagaaatgtatttggtgtagttggtgccagtacatcaacatgtttgatttttatattcccaggactattttatcttaaacttagcagagaggattttctgtcatggaaaaagcttgggggtctcattctgtcgcacaggttggcgtgcagtggtgtgatctcagctcattgcaacctctgcctcccggactcaagcaatcctcccacctcagcctccagagtagctgagactacagaaaaggaagagataccatggagatgtgcacccagaggaaaggccacgcaaggacacagcaagaaggcaactgtttacaagccaagggaagaggcctcaggagaaccaaacgtgtccacaccttgatcttgcacttcccaacctccagaactgtgagcaaataaatgatgttgtttaatcaccc

SEQ ID NO: 184000 - DNA, 722 bp, Homo sapiens
  Payload ID: 16255
  Gene Symbol: SLC38A6
  Gene Name: solute carrier family 38, member 6
  ENST ID: ENST00000529212
  CDS Start-End: 1-690
ataattaaaaaatggtccatcccttgtcctctgacattaaattatgtagagaaaggtttccagagtgcttatgccttaccaaccatggctttttcatttctctgccatacctcaatattgcccatatactgtgaacttcaaagtccttcaaagaaaagaatgcagaatgttaccaatacagcaattgctttaagttttctcatttattttatatctgcactctttgggtacctcactttttatgacaaagtggagtcagaattactaaaaggttatagtaaatacttatcacatgatgttgttgtcatgactgtgaagttatgcatactatttgctgtgcttttgacagtccctctaatccacttccctgccagaaaagctgtaacaatgatgtttttctccaattttccattctcatggattcgccattttttgatcactctagcactcaatattatcatcgttttacttgcaatatatgttcctgacattagaaatgtatttggtgtagttggtgccagtacatcaacatgtttgatttttatattcccaggactattttatcttaaacttagcagagaggattttctgtcatggaaaaagcttggggcattcgttttgctcatctttggaattttggttgggaattttagtttagcactcatcatttttgattggattaataaataaaagaaatattttcctacttcttacaagaataa

SEQ ID NO: 184001 - DNA, 755 bp, Homo sapiens
  Payload ID: 16255
  Gene Symbol: SLC38A6
  Gene Name: solute carrier family 38, member 6
  ENST ID: ENST00000526539
  CDS Start-End: 1-66
attgctttaagttttctcatttattttatatctgcactctttgggtacctcactttttatggataacaggagctttgtgtcataggaagaaattgctggttgaacctgagatcttataagggctagcctcaacttaaggcttccaattcattttacagatgaacaactaaagcccagagaggtgaagtgacctgtcacagaattaaagacaaagtggagtcagaattactaaaaggttatagtaaatacttatcacatgatgttgttgtcatgactgtgaagttatgcatactatttgctgtgcttttgacagtccctctaatccacttccctgccagaaaagctgtaacaatgatgtttttctccaattttccattctcatggattcgccattttttgatcactctagcactcaatattatcatcgttttacttgcaatatatgttcctgacattagaaatgtatttggtgtagttggtgccagtacatcaacatgtttgatttttatattcccaggactattttatcttaaacttagcagagaggattttctgtcatggaaaaagcttggggttggcgtgcagtggtgtgatctcagctcattgcaacctctgcctcccggactcaagcaatcctcccacctcagcctccagagtagctgagactacagaaaaggaagagataccatggagatgtgcacccagaggaaaggccacgcaaggacacagcaagaaggcaactgtttacaagccaa

SEQ ID NO: 184002 - DNA, 580 bp, Homo sapiens
  Payload ID: 16255
  Gene Symbol: SLC38A6
  Gene Name: solute carrier family 38, member 6
  ENST ID: ENST00000526105
  CDS Start-End: 201-580
agtgttggttaagcaacgagtgtgtcatacaaaccctggtggtttgcagcttttttccataatctttcatttatggaatttctttacgaaattttaacttcaccgtccaaacatttaacactactaaatttgtgtgcttacaggaacttcacagacagcgatccccaggtgtttcatttggtttatcagtgtttaatttgatgaatgccatcatgggaagtggcatccttggcttagcttatgttttggctaataccggtgtctttggatttagcttcttgctgctgacagttgctctcctggcttcttactcagtccatcttctgcttagtatgtgtattcagacagctgtaacatcttatgaagatcttggactctttgcatttggattacctggaaagttggtggtggcaggcaccataataattcagaatattggagctatgtcatcttatcttttaattattaaaacagagcttcctgctgctattgcagaatttttgactggagactatagtagatattggtatcttgatggacaaacactactaataatcatatgtgttggcattgtgttccc

SEQ ID NO: 184003 - DNA, 768 bp, Homo sapiens
  Payload ID: 16255
  Gene Symbol: SLC38A6
  Gene Name: solute carrier family 38, member 6
  ENST ID: ENST00000524402
  CDS Start-End: 1-270
ctctccccactccattcccatcctatcttcatctcttgcagtcacaaggaacttcacagacagcgatccccaggtgtttcatttggtttatcagtgtttaatttgatgaatgccatcatgggaagtggcatccttggcttagcttatgttttggctaataccggtgtctttggatttagcttcttgctgctgacagttgctctcctggcttcttactcagtccatcttctgcttagtatgtgtattcagacagcctacttgggcccatgaactaactacttcatggttctgcctgcacattgactcacctgtcttccgttgattgaattccttcaatctttgtaaaattctctgtggagctgtaacatcttatgaagatcttggactctttgcatttggattacctggaaagttggtggtggcaggcaccataataattcagaatattggagctatgtcatcttatcttttaattattaaaacagagcttcctgctgctattgcagaatttttgactggagactatagtagacatataaaatgaagttgttgagccagatgatctctaaggtctcttccagctctaacattccataactgtgattctgagttactgctgggaggagatattggtatcttgatggacaaacactactaataatcatatgtgttggcattgtgttccctcttgcacttcttcccaaaataggctttcttggctacacaagtagtttatcatttttctttatgatgttctttgctcttgtg

SEQ ID NO: 184004 - DNA, 555 bp, Homo sapiens
  Payload ID: 16255
  Gene Symbol: SLC38A6
  Gene Name: solute carrier family 38, member 6
  ENST ID: ENST00000528350
  CDS Start-End: 1-173
ttaatttgatgaatgccatcatgggaagtggcatccttggcttagcttatgttttggctaataccggtgtctttggatttagcttcttgctgctgacagttgctctcctggcttcttactcagtccatcttctgcttagtatgtgtattcagacagcctacttgggcccatgaactaactacttcatggttctgcctgcacattgactcacctgtcttccgttgattgaattccttcaatctttgtaaaattctctgtggagctgtaacatcttatgaagatcttggactctttgcatttggattacctggaaagttggtggtggcaggcaccataataattcagaatattggagctatgtcatcttatcttttaattattaaaacagagcttcctgctgctattgcagaatttttgactggagactatagtaggctttcttggctacacaagtagtttatcatttttctttatgatgttctttgctcttgtggtaataattaaaaaatggtccatcccttgtcctctgacattaaattatgtagagaaaggttt

SEQ ID NO: 184005 - DNA, 640 bp, Homo sapiens
  Payload ID: 16255
  Gene Symbol: SLC38A6
  Gene Name: solute carrier family 38, member 6
  ENST ID: ENST00000534758
  CDS Start-End: 1-128
tacagttggtggtggcaggcaccataataattcagaatattggagctatgtcatcttatcttttaattattaaaacagagcttcctgctgctattgcagaatttttgactggagactatagtaggtaagaaaaagtattttacattgtgtccgttcatgtattaatttgataaatatgtattaagctgtaaatggcaatacttgtagtggcaggtaaaataaatgtagtccttgccctcaagacagttacaaattaggcagaagtgaagcagtaatagaatagaaactactcagccaatgtttgattacccatatgaaagcgctgttctgtgaaccatatgaagcaccagatataatccttgcattccttgggggtgtgagataggctaagacaggtctgagattgagatgctcttaaggaggaataaagggtaaatttctggggatatgcaagacacaggttggggatgggagaaggttgaatatactgacagtacgggtcttaaacaaaggaggggagtgaatgatattgctgtcatttctcagcaaatcatagtgataaaaaatgtggcagttacaactatacctgtttgaaattcctattatataccatggcaaaaaaataaattatttgcaagga

SEQ ID NO: 184006 - DNA, 4392 bp, Homo sapiens
  Payload ID: 16256
  Gene Symbol: SLC38A7
  Gene Name: solute carrier family 38, member 7
  Uniprot ID: Q9NVC3
  ENST ID: ENST00000219320
  CDS Start-End: 728-2116
ctgattaaaaaaaaactccagtgctctggccatgggcgtgaaggcaaggacagagaccgggaggataatgaggccaaacagctttggcccaccgccaccgggactggcaaagaggccagacctcctaatgctcttccttggaggaaggagcagtgtttgatttggtcaagaggccaagactaaaagtaagaggataaacacgagctggctggacgcgaggctggctcagggcagtgctgtcgggctgaggattcagggagctggtgttgtccaagcttcacatttgcggaaactacaactcccagcgtgtcccgcggccgcccgagcgggcgtcatgtgatgcatgctcacgtgtctccgcagccggctcgggaaagaatcccccaagctccatttcatgagtaagcgtgagagccgctcagtttcctccagctctgctgaagccagcacagaagtagcccaaactcttccctctgctgacagcaaattttaggcaaagtcttgagaaagaagaaattgggtccagaaagggaagtgaggagaatcagatcccagacctttggggagaaggagcaaccgcctctggcacagcccatcagggagaaagagcaggttgagaagagtcctaagctaacagccccaaacaggtgggtgttgctcagctccctgaggcatgtggttgtaaggcagaacccacagaccttgcaggaagaaggctctcggggccatggcccaggtcagcatcaacaatgactacagcgagtgggacttgagcacggatgccggggagcgggctcggctgctgcagagtccctgtgtggacacagcccccaagagtgagtgggaagcctctcctgggggtctggacagaggcaccacttccacacttggggccatcttcatcgtcgtcaacgcgtgcctgggtgcagggttactcaacttcccagcagccttcagcactgcggggggcgtggcagcaggcatcgcactgcagatgggtatgctggttttcatcatcagtggccttgtcatcctggcctactgctcccaggccagcaatgagaggacctaccaggaggtggtatgggctgtgtgtggcaagctgacaggtgtgctatgtgaggtggccatcgctgtctacacctttggcacctgcattgccttcctaatcatcattggcgaccagcaggacaagattatagctgtgatggcgaaagagccggagggggccagcggcccttggtacacagaccgcaagttcaccatcagcctcactgccttcctcttcatcctgcccctctccatccccagggagattggtttccagaaatatgccagcttcctgagcgtcgtgggtacctggtacgtcacagccatcgttatcatcaagtacatctggccagataaagagatgaccccagggaacatcctgaccaggccggcttcctggatggctgtgttcaatgccatgcccaccatctgcttcggatttcagtgccacgtcagcagtgtgcccgtcttcaacagcatgcagcagcctgaagtgaagacctggggtggagtggtgacagctgccatggtcatagccctcgctgtctacatggggacaggcatctgtggcttcctgacctttggagctgctgtggatcctgacgtgctcctgtcctatccctcggaggacatggccgtggccgttgcccgagccttcatcatcctgagcgtgctcacctcctaccctatcctgcacttctgtgggcgggcggtggtggaaggcctgtggctgcgctaccagggggtgccagtggaggaggacgtggggcgggagcggcggcggcgagtgctgcagacgctggtctggttcctgctcaccctgctgctggcgctcttcatccctgacatcggcaaggtgatctcagtcattggaggcctggccgcctgcttcatcttcgtcttcccagggctgtgcctcattcaagccaaactctctgagatggaagaggtcaaaccagccagctggtgggtgctggtcagctacggagtcctcttggtcaccctgggagccttcatcttcggccagaccacagccaacgccatctttgtggatctcttggcataaccactgcctcccagggaacacaaggcctttgccattggtcgcaggaacccatctcttagagctatggggccattcttagtccacgatcattccaactggtgggatgacatccggacatcctcttccagggactggggcaaactcaggccccacacctctggacagctcaaatccagtccccttcctgctccccagtcctggcagtgccgtggatggcggcaggaagtctcacatcatagaggacccctcctcctctcccagttctcaacttctccatgcctggaatccacgggtgaagagagtcggtagatctcataagaaagaatccagtctgacttccctctggagaatgactatggacagaaggccaccatcctccacagagcaccctgtcctgagtaggggttgtgctcattaccccaggccagtggtagcttcctcaggagcctggccacttccaacggtagcactgaagtcatgcaaatgcatagtcaggtagattcagaccttgtccacaccttcctgggcaacccccaccatgaacctgtcagcctctttcccatagctaatagacatttcccaggccttgaggggccccaccctgtctctttcatcaaacctgatggtccaggctgggcatccctctcctcctccatccccagacatcaccaggtctaatgtttacaaacggtgccagcccggctctgaagccaagggccgtcccgtgccacggtgctgtgagtattcctccgttagctttccccataaggttgggagtatctgcttttgtgtctgagatgggcccctcttttcagaggccgcagggtgggtgatggagaaggctgagaacctttcagaccctctgtgtgggctgggctggtcagaatcagggtgtacctccccgacaccttctttttcagtgatgttttctcttcttcctgcctttcctctgcctcctcccctgccagccctagcgtgactacccagagacaaaaaaaaaaaaaaaaaaaaaaggcagggctgggcgcagtggctcacgcctgtaatcccagcactttgggaggccaaggcgggcagatgacttgaggtcaggagttcgagaccagcctggccaacacggcaaaaccccatctctactaaaaatacaaaaaattaaccgggcatggtggcgggcacctgtaatcccagctacttgggaggctgaggcagcagagccgcttaaacccaggaggcagagactgcaatgagctgagatcgtgccattgcactccagcttgggcaacaagagtgaaacttcatctcaaaaaaacagaaacaaacaaaaaggcagctgggttgtcactgatgggcagcatttgagcctgccacactggcctggaagtttcccttccagtctggattttgtctgctccttccttccccctcaccccgttacctcttcacctcccatctcacttcactgtgtagctcagtctctcccacgcacataattggggacagtgggggctctcttaccagcctcctcagcaacgcacgtccatcaggcctggcctcagtggccagccacattgatgtcacactggaattgttaccccagagagggcgaagagataggctatctccccacctcccaccctactccccactatattcccgttttgaccacctcagcccctcagctgccccctctcactttggccaatcccaggcaccaatcagacttcctcctccacctggagcccctagcatttccttgtcccctcttccccaaaacctctgtaaagggtacgagagggaccccctgccgagccgcccgccactcagggcagtccgatctaagaagcagaagctggttggaggctggctgggcctctgtccagtccccagatggataaactgccttttctcacatcccctcttggtgcctgatcttctctgcccccggggccagacccactgtgctgttttctgtcagtctgtggcacagcaccaagctctgccagcaccagtccctgacagggctaggaggacagcctggtcagcagggctgcagtcccccagtgccgtgtttcgggggtcaagggatgtaagtggagtcattgcacagagacagaccagtcaggagaaggagctggaatctggcctcttgtcctaacctcaggagccccctcccatcctctccccaccctccctatcggggtacttcactgtttcttttctacttgtgtatactcgagaaagggaagatggttaataaaagggatttgtgctgctga

SEQ ID NO: 184007 - DNA, 2867 bp, Homo sapiens
  Payload ID: 16256
  Gene Symbol: SLC38A7
  Gene Name: solute carrier family 38, member 7
  ENST ID: ENST00000564100
  CDS Start-End: 869-1933
cggagacaggctctggagggtggaagtgttagatccccgaggtctgtggagcccctcagtccccgccaccgcggaaaagctcagaccctttccctgcaggggtccagatcctggcgtcctcgccccacgcccgtccctctgttgcgccagctctgccgcgcctttacccagccagagggtctccacccagtcctaggccgggatcgggtcccggagctcctccccaggttaccccacagtagcccacccttctcgctccaggcctgggaatcgccccgccccggcctcctggcccgggtgcgccctggctcacctcacaaagcctcacctcacaaagcagcccaccctttctatctcagggctccaaccccaggctggactgggagcacactccagttgggatctgaggggcctacatcgctggcctgagcatgtgggcatcaggcttctattctggctctgccagctacccactgtgaccttagtctaacctctccctcctgggcctgttttcctatctgtcctgaagctccatttcatgagtaagcgtgagagccgctcagtttcctccagctctgctgaagccagcacagaagtagcccaaactcttccctctgctgacagcaaattttaggcaaagtcttgagaaagaagaaattgggtccagaaagggaagtgaggagaatcagatcccagacctttggggagaaggagcaaccgcctctggcacagcccatcagggagaaagagcaggttgagaagagtcctaagctaacagccccaaacaggtgggtgttgctcagctccctgaggcatgtggttgtaaggcagaacccacagaccttgcaggaagaaggctctcggggccatggcccaggtcagcatcaacaatgactacagcgagtgggacttgagcacggatgccggggagcgggctcggctgctgcagagtccctgtgtggacacagcccccaagagtgagtgggaagcctctcctgggggtctggacagaggcaccacttccacacttggggccatcttcatcgtcgtcaacgcgtgcctgggtgcagggttactcaacttcccagcagccttcagcactgcggggggcgtggcagcaggcatcgcactgcagatgggtatgctggttttcatcatcagtggccttgtcatcctggcctactgctcccaggccagcaatgagaggacctaccaggaggtggtatgggctgtgtgtggcaagctgacaggtgtgctatgtgaggtggccatcgctgtctacacctttggcacctgcattgccttcctaatcatcattggcgaccagcaggacaagattatagctgtgatggcgaaagagccggagggggccagcggcccttggtacacagaccgcaagttcaccatcagcctcactgccttcctcttcatcctgcccctctccatccccagggagattggtttccagaaatatgccagcttcctgagcgtcgtgggtacctggtacgtcacagccatcgttatcatcaagtacatctggccagataaagagatgaccccagggaacatcctgaccaggccggcttcctggatggctgtgttcaatgccatgcccaccatctgcttcggatttcagtgccacgtcagcagtgtgcccgtcttcaacagcatgcagcagcctgaagtgaagacctggggtggagtggtgacagctgccatggtcatagccctcgctgtctacatggggacagctggtgggtgctggtcagctacggagtcctcttggtcaccctgggagccttcatcttcggccagaccacagccaacgccatctttgtggatctcttggcataaccactgcctcccagggaacacaaggcctttgccattggtcgcaggaacccatctcttagagctatggggccattcttagtccacgatcattccaactggtgggatgacatccggacatcctcttccagggactggggcaaactcaggccccacacctctggacagctcaaatccagtccccttcctgctccccagtcctggcagtgccgtggatggcggcaggaagtctcacatcatagaggacccctcctcctctcccagttctcaacttctccatgcctggaatccacgggtgaagagagtcggtagatctcataagaaagaatccagtctgacttccctctggagaatgactatggacagaaggccaccatcctccacagagcaccctgtcctgagtaggggttgtgctcattaccccaggccagtggtagcttcctcaggagcctggccacttccaacggtagcactgaagtcatgcaaatgcatagtcaggtagattcagaccttgtccacaccttcctgggcaacccccaccatgaacctgtcagcctctttcccatagctaatagacatttcccaggccttgaggggccccaccctgtctctttcatcaaacctgatggtccaggctgggcatccctctcctcctccatccccagacatcaccaggtctaatgtttacaaacggtgccagcccggctctgaagccaagggccgtcccgtgccacggtgctgtgagtattcctccgttagctttccccataaggttgggagtatctgcttttgtgtctgagatgggcccctcttttcagaggccgcagggtgggtgatggagaaggctgagaacctttcagaccctctgtgtgggctgggctggtcagaatcagggtgtacctccccgacaccttctttttcagtgatgttttctcttcttcctgcctttcctctgcctcctcccctgccagccctagcgtgactacccagagacaaaaaaaaaaaaaaaaaaaaaa

SEQ ID NO: 184008 - DNA, 4549 bp, Homo sapiens
  Payload ID: 16256
  Gene Symbol: SLC38A7
  Gene Name: solute carrier family 38, member 7
  Uniprot ID: Q9NVC3
  ENST ID: ENST00000570101
  CDS Start-End: 885-2273
ccccaaggtaggtggccggagacaggctctggagggtggaagtgttagatccccgaggtctgtggagcccctcagtccccgccaccgcggaaaagctcagaccctttccctgcaggggtccagatcctggcgtcctcgccccacgcccgtccctctgttgcgccagctctgccgcgcctttacccagccagagggtctccacccagtcctaggccgggatcgggtcccggagctcctccccaggttaccccacagtagcccacccttctcgctccaggcctgggaatcgccccgccccggcctcctggcccgggtgcgccctggctcacctcacaaagcctcacctcacaaagcagcccaccctttctatctcagggctccaaccccaggctggactgggagcacactccagttgggatctgaggggcctacatcgctggcctgagcatgtgggcatcaggcttctattctggctctgccagctacccactgtgaccttagtctaacctctccctcctgggcctgttttcctatctgtcctgaagctccatttcatgagtaagcgtgagagccgctcagtttcctccagctctgctgaagccagcacagaagtagcccaaactcttccctctgctgacagcaaattttaggcaaagtcttgagaaagaagaaattgggtccagaaagggaagtgaggagaatcagatcccagacctttggggagaaggagcaaccgcctctggcacagcccatcagggagaaagagcaggttgagaagagtcctaagctaacagccccaaacaggtgggtgttgctcagctccctgaggcatgtggttgtaaggcagaacccacagaccttgcaggaagaaggctctcggggccatggcccaggtcagcatcaacaatgactacagcgagtgggacttgagcacggatgccggggagcgggctcggctgctgcagagtccctgtgtggacacagcccccaagagtgagtgggaagcctctcctgggggtctggacagaggcaccacttccacacttggggccatcttcatcgtcgtcaacgcgtgcctgggtgcagggttactcaacttcccagcagccttcagcactgcggggggcgtggcagcaggcatcgcactgcagatgggtatgctggttttcatcatcagtggccttgtcatcctggcctactgctcccaggccagcaatgagaggacctaccaggaggtggtatgggctgtgtgtggcaagctgacaggtgtgctatgtgaggtggccatcgctgtctacacctttggcacctgcattgccttcctaatcatcattggcgaccagcaggacaagattatagctgtgatggcgaaagagccggagggggccagcggcccttggtacacagaccgcaagttcaccatcagcctcactgccttcctcttcatcctgcccctctccatccccagggagattggtttccagaaatatgccagcttcctgagcgtcgtgggtacctggtacgtcacagccatcgttatcatcaagtacatctggccagataaagagatgaccccagggaacatcctgaccaggccggcttcctggatggctgtgttcaatgccatgcccaccatctgcttcggatttcagtgccacgtcagcagtgtgcccgtcttcaacagcatgcagcagcctgaagtgaagacctggggtggagtggtgacagctgccatggtcatagccctcgctgtctacatggggacaggcatctgtggcttcctgacctttggagctgctgtggatcctgacgtgctcctgtcctatccctcggaggacatggccgtggccgttgcccgagccttcatcatcctgagcgtgctcacctcctaccctatcctgcacttctgtgggcgggcggtggtggaaggcctgtggctgcgctaccagggggtgccagtggaggaggacgtggggcgggagcggcggcggcgagtgctgcagacgctggtctggttcctgctcaccctgctgctggcgctcttcatccctgacatcggcaaggtgatctcagtcattggaggcctggccgcctgcttcatcttcgtcttcccagggctgtgcctcattcaagccaaactctctgagatggaagaggtcaaaccagccagctggtgggtgctggtcagctacggagtcctcttggtcaccctgggagccttcatcttcggccagaccacagccaacgccatctttgtggatctcttggcataaccactgcctcccagggaacacaaggcctttgccattggtcgcaggaacccatctcttagagctatggggccattcttagtccacgatcattccaactggtgggatgacatccggacatcctcttccagggactggggcaaactcaggccccacacctctggacagctcaaatccagtccccttcctgctccccagtcctggcagtgccgtggatggcggcaggaagtctcacatcatagaggacccctcctcctctcccagttctcaacttctccatgcctggaatccacgggtgaagagagtcggtagatctcataagaaagaatccagtctgacttccctctggagaatgactatggacagaaggccaccatcctccacagagcaccctgtcctgagtaggggttgtgctcattaccccaggccagtggtagcttcctcaggagcctggccacttccaacggtagcactgaagtcatgcaaatgcatagtcaggtagattcagaccttgtccacaccttcctgggcaacccccaccatgaacctgtcagcctctttcccatagctaatagacatttcccaggccttgaggggccccaccctgtctctttcatcaaacctgatggtccaggctgggcatccctctcctcctccatccccagacatcaccaggtctaatgtttacaaacggtgccagcccggctctgaagccaagggccgtcccgtgccacggtgctgtgagtattcctccgttagctttccccataaggttgggagtatctgcttttgtgtctgagatgggcccctcttttcagaggccgcagggtgggtgatggagaaggctgagaacctttcagaccctctgtgtgggctgggctggtcagaatcagggtgtacctccccgacaccttctttttcagtgatgttttctcttcttcctgcctttcctctgcctcctcccctgccagccctagcgtgactacccagagacaaaaaaaaaaaaaaaaaaaaaaggcagggctgggcgcagtggctcacgcctgtaatcccagcactttgggaggccaaggcgggcagatgacttgaggtcaggagttcgagaccagcctggccaacacggcaaaaccccatctctactaaaaatacaaaaaattaaccgggcatggtggcgggcacctgtaatcccagctacttgggaggctgaggcagcagagccgcttaaacccaggaggcagagactgcaatgagctgagatcgtgccattgcactccagcttgggcaacaagagtgaaacttcatctcaaaaaaacagaaacaaacaaaaaggcagctgggttgtcactgatgggcagcatttgagcctgccacactggcctggaagtttcccttccagtctggattttgtctgctccttccttccccctcaccccgttacctcttcacctcccatctcacttcactgtgtagctcagtctctcccacgcacataattggggacagtgggggctctcttaccagcctcctcagcaacgcacgtccatcaggcctggcctcagtggccagccacattgatgtcacactggaattgttaccccagagagggcgaagagataggctatctccccacctcccaccctactccccactatattcccgttttgaccacctcagcccctcagctgccccctctcactttggccaatcccaggcaccaatcagacttcctcctccacctggagcccctagcatttccttgtcccctcttccccaaaacctctgtaaagggtacgagagggaccccctgccgagccgcccgccactcagggcagtccgatctaagaagcagaagctggttggaggctggctgggcctctgtccagtccccagatggataaactgccttttctcacatcccctcttggtgcctgatcttctctgcccccggggccagacccactgtgctgttttctgtcagtctgtggcacagcaccaagctctgccagcaccagtccctgacagggctaggaggacagcctggtcagcagggctgcagtcccccagtgccgtgtttcgggggtcaagggatgtaagtggagtcattgcacagagacagaccagtcaggagaaggagctggaatctggcctcttgtcctaacctcaggagccccctcccatcctctccccaccctccctatcggggtacttcactgtttcttttctacttgtgtatactcgagaaagggaagatggttaataaaagggatttgtgctgctga

SEQ ID NO: 184009 - DNA, 582 bp, Homo sapiens
  Payload ID: 16256
  Gene Symbol: SLC38A7
  Gene Name: solute carrier family 38, member 7
  ENST ID: ENST00000563196
  CDS Start-End: 299-582
atgtgatgcatgctcacgtgtctccgcagccggctcgggaaagaatcccccaagcaaattttaggcaaagtcttgagaaagaagaaattgggtccagaaagggaagtgaggagaatcagatcccagacctttggggagaaggagcaaccgcctctggcacagcccatcagggagaaagagcaggttgagaagagtcctaagctaacagccccaaacaggtgggtgttgctcagctccctgaggcatgtggttgtaaggcagaacccacagaccttgcaggaagaaggctctcggggccatggcccaggtcagcatcaacaatgactacagcgagtgggacttgagcacggatgccggggagcgggctcggctgctgcagagtccctgtgtggacacagcccccaagagtgagtgggaagcctctcctgggggtctggacagaggcaccacttccacacttggggccatcttcatcgtcgtcaacgcgtgcctgggtgcagggttactcaacttcccagcagccttcagcactgcggggggcgtggcagcaggcatcgcactgcagatgggtatgctggtttt

SEQ ID NO: 184010 - DNA, 1806 bp, Homo sapiens
  Payload ID: 16256
  Gene Symbol: SLC38A7
  Gene Name: solute carrier family 38, member 7
  ENST ID: ENST00000566598
  CDS Start-End: 343-1125
aagctccatttcatgagtaagcgtgagagccgctcagtttcctccagctctgctgaagccagcacagaagtagcccaaactcttccctctgctgacagcaaattttaggcaaagtcttgagaaagaagaaattgggtccagaaagggaagtgaggagaatcagatcccagacctttggggagaaggagcaaccgcctctggcacagcccatcagggagaaagagcaggttgagaagagtcctaagctaacagccccaaacaggtgggtgttgctcagctccctgaggcatgtggttgtaaggcagaacccacagaccttgcaggaagaaggctctcggggccatggcccaggtcagcatcaacaatgactacagcgagtgggacttgagcacggatgccggggagcgggctcggctgctgcagagtccctgtgtggacacagcccccaagagtgagtgggaagcctctcctgggggtctggacagaggcaccacttccacacttggggccatcttcatcgtcgtcaacgcgtgcctgggtgcagggttactcaacttcccagcagccttcagcactgcggggggcgtggcagcaggcatcgcactgcagatgggtatgctggttttcatcatcagtggccttgtcatcctggcctactgctcccaggccagcaatgagaggacctaccaggaggtggtatgggctgtgtgtggcaagctgacaggtgtgctatgtgaggtggccatcgctgtctacacctttggcacctgcattgccttcctaatcatcattggcgaccagcaggacaagattatagctgtgatggcgaaagagccggagggggccagcggcccttggtacacagaccgcaagttcaccatcagcctcactgccttcctcttcatcctgcccctctccatccccagggagattggtttccagaaatatgccagcttcctgagcgtcgtgggtacctggtacgtcacagccatcgttatcatcaagtacatctggccagataaagagatgaccccagggaacatcctgaccaggccggcttcctggatggctgtgttcaatgccatgcccaccatctgcttcggatttcagcatgcagcagcctgaagtgaagacctggggtggagtggtgacagctgccatggtcatagccctcgctgtctacatggggacaggcatctgtggcttcctgacctttggagctgctgtggatcctgacgtgctcctgtcctatccctcggaggacatggccgtggccgttgcccgagccttcatcatcctgagcgtgctcacctcctaccctatcctgcacttctgtgggcgggcggtggtggaaggcctgtggctgcgctaccagggggtgccagtggaggaggacgtggggcgggagcggcggcggcgagtgctgcagacgctggtctggttcctgctcaccctgctgctggcgctcttcatccctgacatcggcaaggtgatctcagtcattggaggcctggccgcctgcttcatcttcgtcttcccagggctgtgcctcattcaagccaaactctctgagatggaagaggtcaaaccagccagctggtgggtgctggtcagctacggagtcctcttggtcaccctgggagccttcatcttcggccagaccacagccaacgccatctttgtggatctcttggcataaccactgcctcccagggaacacaaggcctttgccattggtcgcaggaacccatctcttagagctatggggccattcttagtccacgatcattccaactggtgggatga

SEQ ID NO: 184011 - DNA, 1437 bp, Homo sapiens
  Payload ID: 16256
  Gene Symbol: SLC38A7
  Gene Name: solute carrier family 38, member 7
  ENST ID: ENST00000564010
  CDS Start-End: 293-1414
atgtgatgcatgctcacgtgtctccgcagccggctcgggaaagaatcccccaagctccatttcatgagtaagcgtgagagccgctcagtttcctccagctctgctgaagccagcacagaagtagcccaaactcttccctctgctgacagcaaattttaggcaaagtcttgagaaagaagaaattgggtccagaaagggaagtgaggagaatcagatcccagacctttggggagaaggagcaaccgcctctggcacagcccatcagggagaaagagcaggcatcgcactgcagatgggtatgctggttttcatcatcagtggccttgtcatcctggcctactgctcccaggccagcaatgagaggacctaccaggaggtggtatgggctgtgtgtggcaagctgacaggtgtgctatgtgaggtggccatcgctgtctacacctttggcacctgcattgccttcctaatcatcattggcgaccagcaggacaagattatagctgtgatggcgaaagagccggagggggccagcggcccttggtacacagaccgcaagttcaccatcagcctcactgccttcctcttcatcctgcccctctccatccccagggagattggtttccagaaatatgccagcttcctgagcgtcgtgggtacctggtacgtcacagccatcgttatcatcaagtacatctggccagataaagagatgaccccagggaacatcctgaccaggccggcttcctggatggctgtgttcaatgccatgcccaccatctgcttcggatttcagtgccacgtcagcagtgtgcccgtcttcaacagcatgcagcagcctgaagtgaagacctggggtggagtggtgacagctgccatggtcatagccctcgctgtctacatggggacaggcatctgtggcttcctgacctttggagctgctgtggatcctgacgtgctcctgtcctatccctcggaggacatggccgtggccgttgcccgagccttcatcatcctgagcgtgctcacctcctaccctatcctgcacttctgtgggcgggcggtggtggaaggcctgtggctgcgctaccagggggtgccagtggaggaggacgtggggcgggagcggcggcggcgagtgctgcagacgctggtctggttcctgctcaccctgctgctggcgctcttcatccctgacatcggcaaggtgatctcagtcattggaggcctggccgcctgcttcatcttcgtcttcccagggctgtgcctcattcaagccaaactctctgagatggaagaggtcaaaccagccagctggtgggtgctggtcagctacggagtcctcttggtcaccctgggagccttcatcttcggccagaccacagccaacgccatctttgtggatctcttggcataaccactgcctcccagggaacacaa

SEQ ID NO: 184012 - DNA, 564 bp, Homo sapiens
  Payload ID: 16256
  Gene Symbol: SLC38A7
  Gene Name: solute carrier family 38, member 7
  ENST ID: ENST00000562397
  CDS Start-End: 143-564
agccggctcgggaaagaatcccccaaggttgagaagagtcctaagctaacagccccaaacaggtgggtgttgctcagctccctgaggcatgtggttgtaaggcagaacccacagaccttgcaggaagaaggctctcggggccatggcccaggtcagcatcaacaatgactacagcgagtgggacttgagcacggatgccggggagcgggctcggctgctgcagagtccctgtgtggacacagcccccaagagtgagtgggaagcctctcctgggggtctggacagaggcaccacttccacacttggggccatcttcatcgtcgtcaacgcgtgcctgggtgcagggttactcaacttcccagcagccttcagcactgcggggggcgtggcagcaggcatcgcactgcagatgggtatgctggttttcatcatcagtggccttgtcatcctggcctactgctcccaggccagcaatgagaggacctaccaggaggtggtatgggctgtgtgtggcaagctgacaggtgtgctatgtgaggtggccatcgctgtctacacctttgg

SEQ ID NO: 184013 - DNA, 546 bp, Homo sapiens
  Payload ID: 16256
  Gene Symbol: SLC38A7
  Gene Name: solute carrier family 38, member 7
  ENST ID: ENST00000570214
  CDS Start-End: 352-546
atgtgatgcatgctcacgtgtctccgcagccggctcgggaaagaatcccccaagctccatttcatgagtaagcgtgagagccgctcagtttcctccagctctgctgaagccagcacagaagtagcccaaactcttccctctgctgacagcaaattttaggcaaagtcttgagaaagaagaaattgggtccagaaagggaagtgaggagaatcagatcccagacctttggggagaaggagcaaccgcctctggcacagcccatcagggagaaagagcagcttcctgagcgtcgtgggtacctggtacgtcacagccatcgttatcatcaagtacatctggccagataaagagatgaccccagggaacatcctgaccaggccggcttcctggatggctgtgttcaatgccatgcccaccatctgcttcggatttcagtgccacgtcagcagtgtgcccgtcttcaacagcatgcagcagcctgaagtgaagacctggggtggagtggtgacagctgccatggtcatagccctcgctgtctacatgggg

SEQ ID NO: 184014 - DNA, 731 bp, Homo sapiens
  Payload ID: 16256
  Gene Symbol: SLC38A7
  Gene Name: solute carrier family 38, member 7
  ENST ID: ENST00000564391
  CDS Start-End: 215-622
aaattgggtccagaaagggaagtgaggagaatcagatcccagacctttggggagaaggagcaaccgcctctggcacagcccatcagggagaaagagcaggttgagaagagtcctaagctaacagccccaaacaggtgggtgttgctcagctccctgaggcatgtggttgtaaggcagaacccacagaccttgcaggaagaaggctctcggggccatggcccaggtcagcatcaacaatgactacagcgagtgggacttgagcacggatgccggggagcgggctcggctgctgcagagtccctgtgtggacacagcccccaagagtgagtgggaagcctctcctgggggtctggacagaggcaccacttccacacttggggccatcttcatcgtcgtcaacgcgtgcctgggtgcagggttactcaacttcccagcagccttcagcactgcggggggcgtggcagcaggcatcgcactgcagatggtgagtgcactggccgggagggcagaggtgcagttcagttgggcgctttgcctcaaaagggaggcttcgggtcagggatggccagtaagtgatacacgcactgctctcccctccctcacacatggcagacatgactaatctattctagtattctttcctgtgacccaaatgaggcttcagaagccttccaacaatcagagaaatttgaacatcaattacatctctaattttttaggtgtaacattga

SEQ ID NO: 184015 - DNA, 760 bp, Homo sapiens
  Payload ID: 16256
  Gene Symbol: SLC38A7
  Gene Name: solute carrier family 38, member 7
  ENST ID: ENST00000565785
  CDS Start-End: 1-511
catcgctgtctacacctttggcacctgcattgccttcctaatcatcattggcgaccagcaggacaagattatagctgtgatggcgaaagagccggagggggccagcggcccttggtacacagaccgcaagttcaccatcagcctcactgccttcctcttcatcctgcccctctccatccccagggagattggtttccagaaatatgccagcttcctgagcgtcgtgggtacctggtacgtcacagccatcgttatcatcaagtacatctggccagataaagagatgaccccagggaacatcctgaccaggccggcttcctggatggctgtgttcaatgccatgcccaccatctgcttcggatttcagtgccacgtcagcagtgtgcccgtcttcaacagcatgcagcagcctgaagtgaagacctggggtggagtggtgacagctgccatggtcatagccctcgctgtctacatggggacagcagagacaaggtctcactatgttgcctagcctggtcttgaattcctgggctcaagcaattctcctgcctcggcctcccaaagtgctggggttacaggcatgagccaccaacccagcctaaaatggggaaggcatctgtggcttcctgacctttggagctgctgtggatcctgacgtgctcctgtcctatccctcggaggacatggccgtggccgttgcccgagccttcatcatcctgagcgtgctcacctcctaccctatcctgcacttctgtgggcg

SEQ ID NO: 184016 - DNA, 1308 bp, Homo sapiens
  Payload ID: 16257
  Gene Symbol: SLC38A8
  Gene Name: solute carrier family 38, member 8
  Uniprot ID: A6NNN8
  ENST ID: ENST00000299709
  CDS Start-End: 1-1308
atggagggacagaccccaggaagcaggggccttccagaaaagcctcaccctgccacggctgctgccactctgtcctcgatgggcgctgtcttcatcctcatgaagtccgcgctgggagctggcctgctcaacttcccctgggccttctccaaagcgggcggagtggtccctgccttcctggtggagctggtctcgttggtcttcctgatcagcgggctggtcatcctgggctatgctgctgctgtcagtggccaggccacctaccagggtgtggtcagggggctgtgtggccctgccattgggaagctgtgtgaggcctgcttcctcctcaacctgctcatgatctccgtggccttcctcagggtgatcggggaccagctggagaagctgtgtgactccctcctgtctggcaccccgcccgccccgcagccgtggtacgcagaccagcgcttcaccctgcccctgctctccgtgctggtcatcctgcccctgtctgccccgcgggagatcgccttccagaaatacacaagcatcctaggcactctggctgcctgttacctggccctggtcatcaccgtgcagtactacctctggccccagggcctcgtgcgtgagtcccatccttcactgagccctgcctcctggacctctgtgttcagtgtcttccccaccatctgcttcgggtttcagtgtcacgaagctgccgtctccatctactgcagcatgcgcaaacggagcctctcccactgggccctggtgtctgtgctgtccttgctggcctgctgcctcatctattcactgacgggggtttatggcttcctgacttttgggacagaagtttctgctgacgtcttgatgtcctacccaggcaatgatatggtcatcattgtggcccgggtcctttttgctgtctccatcgtaactgtctaccccatcgtgctcttcctggggaggtcagtgatgcaggacttctggaggaggagctgcttggggggatgggggcccagcgccctggccgacccctcagggctgtgggtccggatgccgctgaccatcctgtgggtcaccgtgacgctcgccatggcgctgtttatgcctgacctcagcgagatcgtcagcatcatcggaggcatcagttccttcttcatcttcatcttcccaggtttgtgcctcatctgtgcaatgggtgtcgagcctataggaccaagagtcaagtgctgcctggaggtctggggagtggtctctgtgctggtcggcaccttcatctttgggcagagcacggcggcagcggtctgggagatgttctga

SEQ ID NO: 184017 - DNA, 578 bp, Homo sapiens
  Payload ID: 16257
  Gene Symbol: SLC38A8
  Gene Name: solute carrier family 38, member 8
  ENST ID: ENST00000569816
  CDS Start-End: 441-578
acggagtgagactctgtcttaaacacacaaaaacaaagctcgactcctgtgtgcagattgagcctaaaactggtgtgacactcccacactccccacacagagccgggccggccttgcctggtgtcggatgttccgctctcctgcctgccgggtgcaaagccagaattcccttttggggaagcgcggacgccgcgctcttctctttgctgcgggagagccactgatgagcacagctttattttctaagatcctttgccgctggctgatggaatgaattgctgcattttgtggtctcgttggtcttcctgatcagcgggctggtcatcctgggctatgctgctgctgtcagtggccaggccacctaccagggtgtggtcagggggctgtgtggccctgccattgggaagctgtgtgaggcctgcttcctcctcaacctgctcatgatctccgtggccttcctcagggtgatcggggaccagctggagaagctgtgtgactccctcctgtctggcaccccgcccgccccgcagccgtggtacgcagaccagcgcttcaccctgcccctgctctccgtgctg

SEQ ID NO: 184018 - DNA, 861 bp, Homo sapiens
  Payload ID: 16257
  Gene Symbol: SLC38A8
  Gene Name: solute carrier family 38, member 8
  ENST ID: ENST00000568178
  CDS Start-End: 76-861
aaatgcaactgagccacctggagtaagcccgagtcccatccccaacagccaaagactgtccggcaccttaaaaccatggagggacagaccccaggaagcaggggccttccagaaaagcctcaccctgccacggctgctgccactctgtcctcgatgggcgctgtcttcatcctcatgaagtccgcgctgggagctggcctgctcaacttcccctgggccttctccaaagcgggcggagtggtccctgccttcctggtggagctggtctcgttggtcttcctgatcagcgggctggtcatcctgggctatgctgctgctgtcagtggccaggccacctaccagggtgtggtcagggggctgtgtggccctgccattgggaagctgtgtgaggcctgcttcctcctcaacctgctcatgatctccgtggccttcctcagggtgatcggggaccagctggagaagctgtgtgactccctcctgtctggcaccccgcccgccccgcagccgtggtacgcagaccagcgcttcaccctgcccctgctctccgtgctggtcatcctgcccctgtctgccccgcgggagatcgccttccagaaatacacaagcatcctaggcactctggctgcctgttacctggccctggtcatcaccgtgcagtactacctctggccccagggcctcgtgcgtgagtcccatccttcactgagccctgcctcctggacctctgtgttcagtgtcttccccaccatctgcttcgggtttcagtgtcacgaagctgccgtctccatctactgcagcatgcgcaaacggagcctctcccactgggccctggtgtctgtgctgtccttgctggcctgctgc

SEQ ID NO: 184019 - DNA, 2369 bp, Homo sapiens
  Payload ID: 16258
  Gene Symbol: SLC38A9
  Gene Name: solute carrier family 38, member 9
  Uniprot ID: Q8NBW4
  ENST ID: ENST00000318672
  CDS Start-End: 37-1722
aggactaacttcttcagtgcttagagtgtgagaaaaatggcaaatatgaatagtgattctaggcatcttggcacctctgaggtagatcatgaaagagatcctggacctatgaatatccagtttgagccatcggatctaagatccaaaaggcctttctgtatagagcccacaaacatcgtgaatgtgaatcatgtcattcagagggttagtgaccatgcctctgccatgaacaagagaattcattactacagccggctcaccactcctgcagacaaggcactgattgccccagaccatgtagttccagctccagaagagtgctatgtgtatagtccattgggctctgcttataaacttcaaagttacactgaaggatacggtaaaaacaccagtttagtaaccatttttatgatttggaataccatgatgggaacatctatactaagcattccttggggcataaaacaggctggatttactactggaatgtgtgtcatcatactgatgggccttttaacactttattgctgctacagagtagtgaaatcacggactatgatgttttcgttggataccactagctgggaatatccagatgtctgcagacattatttcggctcctttgggcagtggtcgagtctccttttctccttggtgtctctcattggagcaatgatagtttattgggtgcttatgtcaaattttctttttaatactggaaagtttatttttaattttattcatcacattaatgacacagacactatactgagtaccaataatagcaaccctgtgatttgtccaagtgccgggagtggaggccatcctgacaacagctctatgattttctatgccaatgacacaggagcccaacagtttgaaaagtggtgggataagtccaggacagtccccttttatcttgtagggctcctcctcccactgctcaatttcaagtctccttcatttttttcaaaatttaatatcctaggcacagtgtctgtcctttatttgattttccttgtcacctttaaggctgttcgcttgggatttcatttggaatttcattggtttataccaacagaattttttgtaccagagataagatttcagtttccacagctgactggagtgcttacccttgctttttttattcataattgtatcatcacactcttgaagaacaacaagaaacaagaaaacaatgtgagggacttgtgcattgcttatatgctggtgacattaacttatctctatattggagtcctggtttttgcttcatttccttcaccaccattatccaaagattgtattgagcagaattttttagacaacttccctagcagtgacaccctgtccttcattgcaaggatattcctgctgttccagatgatgactgtatacccactcttaggctacctggctcgtgtccagcttttgggccatatcttcggtgacatttatcctagcattttccatgtgctgattcttaatctaattattgtgggagctggagtgatcatggcctgtttctacccaaacataggagggatcataagatattcaggagcagcatgtggactggcctttgtattcatatacccatctctcatctatataatttccctccaccaagaagagcgtctgacatggcctaaattaatcttccacgttttcatcatcattttgggcgtggctaacctgattgttcagttttttatgtgaaatacctcaactgtttttttcaagagctctcatgatattttgagccttgacaacagttctatataaattcacttgtaaatgctgctgttgtgtaattctaaatattttctaagataatttgaaagcaagggaaatagtggccccttaatgagtatttttttattggggtggggaaaggggcaaaaagaatgatcttagtgtctttacctttctcatattaactcacctctttattctgtggtcttttctgaatagaaatgtatgccctaggaagaaatcatgctgggttttgcttttagagataaaaggtggtggatttattttgcctgcagtaaagattctcagggtgtcagagcagcatattgtcaaatcctgcttctgttttatgtttcagtgtattcactttcattttcttacttactagaccatttctgcagtttgcccaaacctctactgtttgggacagtaagccaaatacctcatttttaaaaagaagttttcatggcatcagtgttaataaagtacatttttaactgagtcttaatctctatttgaagaaaaagtagagacaaaagtaatgtcaatgtaatccccaggatcatgaaatgtatacaaaataaataaagtaggagagtttgttgctgtct

SEQ ID NO: 184020 - DNA, 2927 bp, Homo sapiens
  Payload ID: 16258
  Gene Symbol: SLC38A9
  Gene Name: solute carrier family 38, member 9
  Uniprot ID: Q8NBW4
  ENST ID: ENST00000396865
  CDS Start-End: 593-2278
ggtccaaggacgtaaccagatcatacaacacgcgccaggaaagcccaaaagaggggtgatccctcgatggaggtgccgcatcagcgttttctcacgtggcctccggggctctatgaatggcaagagattgcattccttctactacccctcccagcctccagccgggacaaggaactggagcaaactcggggctgcagttccgactggactcgcccacctgggcgcgccggctgcccagcctcctgaagcctcggggctgggccctgcggtgatgggcgtgctggccgtcgcagagccctctgggagttgtagtccgtagcggcgagaggtttgacagcgaccgcgggcttggcgcattcagaactccaactcccgccggcccctgcgacccaggctattgccgcttcctgtttggactaggagccccgcggtcgcaaattgcgagaatttgggaagggaatctttatcttctcgtctagttctccgaggttgaaggctcggcctgctcagagaaggaaactgaggtccaccgagttggagaaacctactcaacaccaggactaacttcttcagtgcttagagtgtgagaaaaatggcaaatatgaatagtgattctaggcatcttggcacctctgaggtagatcatgaaagagatcctggacctatgaatatccagtttgagccatcggatctaagatccaaaaggcctttctgtatagagcccacaaacatcgtgaatgtgaatcatgtcattcagagggttagtgaccatgcctctgccatgaacaagagaattcattactacagccggctcaccactcctgcagacaaggcactgattgccccagaccatgtagttccagctccagaagagtgctatgtgtatagtccattgggctctgcttataaacttcaaagttacactgaaggatacggtaaaaacaccagtttagtaaccatttttatgatttggaataccatgatgggaacatctatactaagcattccttggggcataaaacaggctggatttactactggaatgtgtgtcatcatactgatgggccttttaacactttattgctgctacagagtagtgaaatcacggactatgatgttttcgttggataccactagctgggaatatccagatgtctgcagacattatttcggctcctttgggcagtggtcgagtctccttttctccttggtgtctctcattggagcaatgatagtttattgggtgcttatgtcaaattttctttttaatactggaaagtttatttttaattttattcatcacattaatgacacagacactatactgagtaccaataatagcaaccctgtgatttgtccaagtgccgggagtggaggccatcctgacaacagctctatgattttctatgccaatgacacaggagcccaacagtttgaaaagtggtgggataagtccaggacagtccccttttatcttgtagggctcctcctcccactgctcaatttcaagtctccttcatttttttcaaaatttaatatcctaggcacagtgtctgtcctttatttgattttccttgtcacctttaaggctgttcgcttgggatttcatttggaatttcattggtttataccaacagaattttttgtaccagagataagatttcagtttccacagctgactggagtgcttacccttgctttttttattcataattgtatcatcacactcttgaagaacaacaagaaacaagaaaacaatgtgagggacttgtgcattgcttatatgctggtgacattaacttatctctatattggagtcctggtttttgcttcatttccttcaccaccattatccaaagattgtattgagcagaattttttagacaacttccctagcagtgacaccctgtccttcattgcaaggatattcctgctgttccagatgatgactgtatacccactcttaggctacctggctcgtgtccagcttttgggccatatcttcggtgacatttatcctagcattttccatgtgctgattcttaatctaattattgtgggagctggagtgatcatggcctgtttctacccaaacataggagggatcataagatattcaggagcagcatgtggactggcctttgtattcatatacccatctctcatctatataatttccctccaccaagaagagcgtctgacatggcctaaattaatcttccacgttttcatcatcattttgggcgtggctaacctgattgttcagttttttatgtgaaatacctcaactgtttttttcaagagctctcatgatattttgagccttgacaacagttctatataaattcacttgtaaatgctgctgttgtgtaattctaaatattttctaagataatttgaaagcaagggaaatagtggccccttaatgagtatttttttattggggtggggaaaggggcaaaaagaatgatcttagtgtctttacctttctcatattaactcacctctttattctgtggtcttttctgaatagaaatgtatgccctaggaagaaatcatgctgggttttgcttttagagataaaaggtggtggatttattttgcctgcagtaaagattctcagggtgtcagagcagcatattgtcaaatcctgcttctgttttatgtttcagtgtattcactttcattttcttacttactagaccatttctgcagtttgcccaaacctctactgtttgggacagtaagccaaatacctcatttttaaaaagaagttttcatggcatcagtgttaataaagtacatttttaactgagtcttaatctctatttgaagaaaaagtagagacaaaagtaatgtcaatgtaatccccaggatcatgaaatgtatacaaaataaataaagtaggagagtttgttgctgtctaa

SEQ ID NO: 184021 - DNA, 2236 bp, Homo sapiens
  Payload ID: 16258
  Gene Symbol: SLC38A9
  Gene Name: solute carrier family 38, member 9
  ENST ID: ENST00000416547
  CDS Start-End: 276-1589
aggactaacttcttcagtgcttagagtgtgagaaaaatggcaaatatgaatagtgattctaggcatcttggcacctctgaggtagatcatgaaagagatcctggacctatgaatatccagtttgagccatcggatctaagatccaaaagattgccccagaccatgtagttccagctccagaagagtgctatgtgtatagtccattgggctctgcttataaacttcaaagttacactgaaggatacggtaaaaacaccagtttagtaaccatttttatgatttggaataccatgatgggaacatctatactaagcattccttggggcataaaacaggctggatttactactggaatgtgtgtcatcatactgatgggccttttaacactttattgctgctacagagtagtgaaatcacggactatgatgttttcgttggataccactagctgggaatatccagatgtctgcagacattatttcggctcctttgggcagtggtcgagtctccttttctccttggtgtctctcattggagcaatgatagtttattgggtgcttatgtcaaattttctttttaatactggaaagtttatttttaattttattcatcacattaatgacacagacactatactgagtaccaataatagcaaccctgtgatttgtccaagtgccgggagtggaggccatcctgacaacagctctatgattttctatgccaatgacacaggagcccaacagtttgaaaagtggtgggataagtccaggacagtccccttttatcttgtagggctcctcctcccactgctcaatttcaagtctccttcatttttttcaaaatttaatatcctaggcacagtgtctgtcctttatttgattttccttgtcacctttaaggctgttcgcttgggatttcatttggaatttcattggtttataccaacagaattttttgtaccagagataagatttcagtttccacagctgactggagtgcttacccttgctttttttattcataattgtatcatcacactcttgaagaacaacaagaaacaagaaaacaatgtgagggacttgtgcattgcttatatgctggtgacattaacttatctctatattggagtcctggtttttgcttcatttccttcaccaccattatccaaagattgtattgagcagaattttttagacaacttccctagcagtgacaccctgtccttcattgcaaggatattcctgctgttccagatgatgactgtatacccactcttaggctacctggctcgtgtccagcttttgggccatatcttcggtgacatttatcctagcattttccatgtgctgattcttaatctaattattgtgggagctggagtgatcatggcctgtttctacccaaacataggagggatcataagatattcaggagcagcatgtggactggcctttgtattcatatacccatctctcatctatataatttccctccaccaagaagagcgtctgacatggcctaaattaatcttccacgttttcatcatcattttgggcgtggctaacctgattgttcagttttttatgtgaaatacctcaactgtttttttcaagagctctcatgatattttgagccttgacaacagttctatataaattcacttgtaaatgctgctgttgtgtaattctaaatattttctaagataatttgaaagcaagggaaatagtggccccttaatgagtatttttttattggggtggggaaaggggcaaaaagaatgatcttagtgtctttacctttctcatattaactcacctctttattctgtggtcttttctgaatagaaatgtatgccctaggaagaaatcatgctgggttttgcttttagagataaaaggtggtggatttattttgcctgcagtaaagattctcagggtgtcagagcagcatattgtcaaatcctgcttctgttttatgtttcagtgtattcactttcattttcttacttactagaccatttctgcagtttgcccaaacctctactgtttgggacagtaagccaaatacctcatttttaaaaagaagttttcatggcatcagtgttaataaagtacatttttaactgagtcttaatctctatttgaagaaaaagtagagacaaaagtaatgtcaatgtaatccccaggatcatgaaatgtatacaaaataaataaagtaggagagtttgttgctgtct

SEQ ID NO: 184022 - DNA, 2673 bp, Homo sapiens
  Payload ID: 16258
  Gene Symbol: SLC38A9
  Gene Name: solute carrier family 38, member 9
  Uniprot ID: Q8NBW4
  ENST ID: ENST00000515629
  CDS Start-End: 541-2037
aagagatgaaagatggttggtttaagctaatcttgataatcctattttcattcgcacatacttaagtttttagtctttcttaaaactagaggtggaaatgtgaaatttatcacatgagaaatttatcattgtcatttatagtggccatcagaaaagataatgaaataagacttttgattcttacttatataatccaatgtcagtaaatataagcactaatgaatgctgacttgaatgctcagggttttcttgaaaattctaaattctgtgataaataattgaccactgtgacaacagaatgtaagtcattaaagtgcattccattacagtaagttggcaggagttcaaacagttctctgtaaatttgtttaactgcgtagattaaatggcaatatattttctataatgaaacttgttgaaatgagagggaatcagctatttacaatcatggcataactacctaggcctttctgtatagagcccacaaacatcgtgaatgtgaatcatgtcattcagagggttagtgaccatgcctctgccatgaacaagagaattcattactacagccggctcaccactcctgcagacaaggcactgattgccccagaccatgtagttccagctccagaagagtgctatgtgtatagtccattgggctctgcttataaacttcaaagttacactgaaggatacggtaaaaacaccagtttagtaaccatttttatgatttggaataccatgatgggaacatctatactaagcattccttggggcataaaacaggctggatttactactggaatgtgtgtcatcatactgatgggccttttaacactttattgctgctacagagtagtgaaatcacggactatgatgttttcgttggataccactagctgggaatatccagatgtctgcagacattatttcggctcctttgggcagtggtcgagtctccttttctccttggtgtctctcattggagcaatgatagtttattgggtgcttatgtcaaattttctttttaatactggaaagtttatttttaattttattcatcacattaatgacacagacactatactgagtaccaataatagcaaccctgtgatttgtccaagtgccgggagtggaggccatcctgacaacagctctatgattttctatgccaatgacacaggagcccaacagtttgaaaagtggtgggataagtccaggacagtccccttttatcttgtagggctcctcctcccactgctcaatttcaagtctccttcatttttttcaaaatttaatatcctaggcacagtgtctgtcctttatttgattttccttgtcacctttaaggctgttcgcttgggatttcatttggaatttcattggtttataccaacagaattttttgtaccagagataagatttcagtttccacagctgactggagtgcttacccttgctttttttattcataattgtatcatcacactcttgaagaacaacaagaaacaagaaaacaatgtgagggacttgtgcattgcttatatgctggtgacattaacttatctctatattggagtcctggtttttgcttcatttccttcaccaccattatccaaagattgtattgagcagaattttttagacaacttccctagcagtgacaccctgtccttcattgcaaggatattcctgctgttccagatgatgactgtatacccactcttaggctacctggctcgtgtccagcttttgggccatatcttcggtgacatttatcctagcattttccatgtgctgattcttaatctaattattgtgggagctggagtgatcatggcctgtttctacccaaacataggagggatcataagatattcaggagcagcatgtggactggcctttgtattcatatacccatctctcatctatataatttccctccaccaagaagagcgtctgacatggcctaaattaatcttccacgttttcatcatcattttgggcgtggctaacctgattgttcagttttttatgtgaaatacctcaactgtttttttcaagagctctcatgatattttgagccttgacaacagttctatataaattcacttgtaaatgctgctgttgtgtaattctaaatattttctaagataatttgaaagcaagggaaatagtggccccttaatgagtatttttttattggggtggggaaaggggcaaaaagaatgatcttagtgtctttacctttctcatattaactcacctctttattctgtggtcttttctgaatagaaatgtatgccctaggaagaaatcatgctgggttttgcttttagagataaaaggtggtggatttattttgcctgcagtaaagattctcagggtgtcagagcagcatattgtcaaatcctgcttctgttttatgtttcagtgtattcactttcattttcttacttactagaccatttctgcagtttgcccaaacctctactgtttgggacagtaagccaaatacctcatttttaaaaagaagttttcatggcatcagtgttaataaagtacatttttaactgagtcttaatctctatttgaagaaaaagtagagacaaaagtaatgtcaatgtaatccccaggatcatgaaatgtatacaaaataaataaagtaggagagtt

SEQ ID NO: 184023 - DNA, 468 bp, Homo sapiens
  Payload ID: 16258
  Gene Symbol: SLC38A9
  Gene Name: solute carrier family 38, member 9
  ENST ID: ENST00000507109
  CDS Start-End: 356-468
gctattgccgcttcctgtttggactaggagccccgcggtcgcaaattgcgagaatttgggaagggaatctttatcttctcgtctagttctccgaggttgaaggctcggcctgctcagagaaggaaactgaggtccaccgagttggagaaacctactcaacaccagtaggactaagctaatgagagctttgacttgcttaaacgttgggcaggaaagcagaagagaaaagggaagtggaaatcaaaacaacagagaaaagaaaatgcacatatttgggaaatagaacatgttactaacatctgtgtcacataataatcagtggactaacttcttcagtgcttagagtgtgagaaaaatggcaaatatgaatagtgattctaggcatcttggcacctctgaggtagatcatgaaagagatcctggacctatgaatatccagtttgagccatcggatctaagatccaaaag

SEQ ID NO: 184024 - DNA, 571 bp, Homo sapiens
  Payload ID: 16258
  Gene Symbol: SLC38A9
  Gene Name: solute carrier family 38, member 9
  ENST ID: ENST00000513993
  CDS Start-End: 282-571
cccgcggtcgcaaattgcgagaatttgggaagggaatctttatcttctcgtctagttctccgaggttgaaggctcggcctgctcagagaaggaaactgaggtccaccgagttggagaaacctactcaacaccagagtttcctgaataagtttttcccaagttctgtgttattctttttgatgaaaggatactggcttccctacaatcatcttttcaacttctaaaatgtttaattttttaaattgaggactaacttcttcagtgcttagagtgtgagaaaaatggcaaatatgaatagtgattctaggcatcttggcacctctgaggtagatcatgaaagagatcctggacctatgaatatccagtttgagccatcggatctaagatccaaaaggcctttctgtatagagcccacaaacatcgtgaatgtgaatcatgtcattcagagggttagtgaccatgcctctgccatgaacaagagaattcattactacagccggctcaccactcctgcagacaaggcactgattgccccagaccatgtagttccagctccagaagagtgctatgt

SEQ ID NO: 184025 - DNA, 1399 bp, Homo sapiens
  Payload ID: 16258
  Gene Symbol: SLC38A9
  Gene Name: solute carrier family 38, member 9
  ENST ID: ENST00000511233
  CDS Start-End: 35-1399
gactaacttcttcagtgcttagagtgtgagaaaaatggcaaatatgaatagtgattctaggcatcttggcacctctgaggtagatcatgaaagagatcctggacctatgaatatccagtttgagccatcggatctaagatccaaaaggcctttctgtatagagcccacaaacatcgtgaatgtgaatcatgtcattcagagggttagtgaccatgcctctgccatgaacaagagaattcattactacagccggctcaccactcctgcagacaaggcactgattgccccagaccatgtagttccagctccagaagagtgctatgtgtatagtccattgggctctgcttataaacttcaaagttacactgaaggatacggtaaaaacaccagtttagtaaccatttttatgatttggaataccatgatgggaacatctatactaagcattccttggggcataaaacaggctggatttactactggaatgtgtgtcatcatactgatgggccttttaacactttattgctgctacagagtagtgaaatcacggactatgatgttttcgttggataccactagctgggaatatccagatgtctgcagacattatttcggctcctttgggcagtggtcgagtctccttttctccttggtgtctctcattggagcaatgatagtttattgggtgcttatgtcaaattttctttttaatactggaaagtttatttttagcacagtgtctgtcctttatttgattttccttgtcacctttaaggctgttcgcttgggatttcatttggaatttcattggtttataccaacagaattttttgtaccagagataagatttcagtttccacagctgactggagtgcttacccttgctttttttattcataattgtatcatcacactcttgaagaacaacaagaaacaagaaaacaatgtgagggacttgtgcattgcttatatgctggtgacattaacttatctctatattggagtcctggtttttgcttcatttccttcaccaccattatccaaagattgtattgagcagaattttttagacaacttccctagcagtgacaccctgtccttcattgcaaggatattcctgctgttccagatgatgactgtatacccactcttaggctacctggctcgtgtccagcttttgggccatatcttcggtgacatttatcctagcattttccatgtgctgattcttaatctaattattgtgggagctggagtgatcatggcctgtttctacccaaacataggagggatcataagatattcaggagcagcatgtggactggcctttgtattcatatacccatctctcatctatataatttccctccaccaagaagagcgtctgacatggcctaaa

SEQ ID NO: 184026 - DNA, 950 bp, Homo sapiens
  Payload ID: 16258
  Gene Symbol: SLC38A9
  Gene Name: solute carrier family 38, member 9
  ENST ID: ENST00000505563
  CDS Start-End: 157-288
aattgcgagaatttgggaagggaatctttatcttctcgtctagttctccgaggttgaaggctcggcctgctcagagaaggaaactgaggtccaccgagttggagaaacctactcaacaccaggactaacttcttcagtgcttagagtgtgagaaaaatggcaaatatgaatagtgattctaggcatcttggcacctctgaggtagatcatgaaagagatcctggacctatgaatatccagtttgagccatcggatctaagatccaaaagacagggtctcactctgtagcccacactggagtgtgatggtgcaatcatggcttgctgcagccttgatctcctgggctgaagcagtcctcccacttcagcctcctgagtagctgggactacaggattggataaataagttgtggcacatttatacaatggaatattttttcctcttaaaaaggaggtggctttattacatatcaaaatggaacaagtcttcaacttattttgttaagtgaaaaattgaagtacagagcagtgtgtatagtatgccaccatttgggtaaaaataaataaatataatatgtataaatgaagttttgggtagtaaataggaaactgtaagatggttgccccctcagagggaaactgagtgctttaggcgggatggtgtggcagatactgttaggtagacacccaacaattaatcagcaaccctacctattccttaatgtcaacagaatccttatttttttgagtcacaatgggtcttcatccaagagatgaaagatggttggtttaagctaatcttgataatcctattttcattcgcacatacttaagtttttagtctttcttaaaactagaggtggaaatgtgaaatttatcacatgagaaatttatcattgtcatttatagtggccatcagaaaagataatgaaataagacttttgattctta

SEQ ID NO: 184027 - DNA, 625 bp, Homo sapiens
  Payload ID: 16258
  Gene Symbol: SLC38A9
  Gene Name: solute carrier family 38, member 9
  ENST ID: ENST00000503817
  CDS Start-End: 320-625
agctatttacaatcatggcataactacctaggcactcagcatctcgatgaaaactgttggaaaagaaaaactttcagagtcattctgccctcagagtagtcaagccaactaaactgtgagaagtcaatgccttgcctttgtgcatcccattactaatggaggataagaagttattttcttcaaaggctgacttccagaatttttggctgaacactttttgtcaagtgtatattccctttgtaggcctttctgtatagagcccacaaacatcgtgaatgtgaatcatgtcattcagagggttagtgaccatgcctctgccatgaacaagagaattcattactacagccggctcaccactcctgcagacaaggcactgattgccccagaccatgtagttccagctccagaagagtgctatgtgtatagtccattgggctctgcttataaacttcaaagttacactgaaggatacggtaaaaacaccagtttagtaaccatttttatgatttggaataccatgatgggaacatctatactaagcattccttggggcataaaacaggctggatttactactggaatgtgtgtcatcatactgatgggccttttaacactttattgctgc

SEQ ID NO: 184028 - DNA, 541 bp, Homo sapiens
  Payload ID: 16258
  Gene Symbol: SLC38A9
  Gene Name: solute carrier family 38, member 9
  ENST ID: ENST00000503891
  CDS Start-End: 149-541
attgccgcttcctgtttggactaggagccccgcggtcgcaaattgcgagaatttgggaagggaatctttatcttctcgtctagttctccgaggttgaaggctcggcctgctcaggactaacttcttcagtgcttagagtgtgagaaaaatggcaaatatgaatagtgattctaggcatcttggcacctctgaggtagatcatgaaagagatcctggacctatgaatatccagtttgagccatcggatctaagatccaaaaggcctttctgtatagagcccacaaacatcgtgaatgtgaatcatgtcattcagagggttagtgaccatgcctctgccatgaacaagagaattcattactacagccggctcaccactcctgcagacaaggcactgattgccccagaccatgtagttccagctccagaagagtgctatgtgtatagtccattgggctctgcttataaacttcaaagttacactgaaggatacggtaaaaacaccagtttagtaaccatttttatgatttggaataccatgatg

SEQ ID NO: 184029 - DNA, 370 bp, Homo sapiens
  Payload ID: 16258
  Gene Symbol: SLC38A9
  Gene Name: solute carrier family 38, member 9
  ENST ID: ENST00000506624
  CDS Start-End: 258-370
aaattgcgagaatttgggaagggaatctttatcttctcgtctagttctccgaggttgaaggctcggcctgctcagagaaggaaactgaggtccaccgagttggagaaacctactcaacaccaggtaaccatttaatggcaaactcgaccaacacctaattgtcatgactcccaggcagtgtcttatccattgccgtgctctgtagatgagcacactataagttgactaacttcttcagtgcttagagtgtgagaaaaatggcaaatatgaatagtgattctaggcatcttggcacctctgaggtagatcatgaaagagatcctggacctatgaatatccagtttgagccatcggatctaagatccaaaag

SEQ ID NO: 184030 - DNA, 508 bp, Homo sapiens
  Payload ID: 16258
  Gene Symbol: SLC38A9
  Gene Name: solute carrier family 38, member 9
  ENST ID: ENST00000513275
  CDS Start-End: 429-508
gcaaattgcgagaatttgggaagggaatctttatcttctcgtctagttctccgaggttgaaggctcggcctgctcagagaaggaaactgaggtccaccgagttggagaaacctactcaacaccagagtttcctgaataagtttttcccaagttctgtgttattctttttgatgaaaggatactggcttccctacaatcatcttttcaacttctaaaatgtttaattttttaaattgagtaggactaagctaatgagagctttgacttgcttaaacgttgggcaggaaagcagaagagaaaagggaagtggaaatcaaaacaacagagaaaagaaaatgcacatatttgggaaatagaacatgttactaacatctgtgtcacataataatcagtggactaacttcttcagtgcttagagtgtgagaaaaatggcaaatatgaatagtgattctaggcatcttggcacctctgaggtagatcatgaaagagatcctggacctatgaatat

SEQ ID NO: 184031 - DNA, 731 bp, Homo sapiens
  Payload ID: 16258
  Gene Symbol: SLC38A9
  Gene Name: solute carrier family 38, member 9
  ENST ID: ENST00000512208
  CDS Start-End: 170-731
atcttctcgtctagttctccgaggttgaaggctcggcctgctcagagaaggaaactgaggtccaccgagttggagaaacctactcaacaccaggcctttctgtatagagcccacaaacatcgtgaatgtgaatcatgtcattcagagggttagtgaccatgcctctgccatgaacaagagaattcattactacagccggctcaccactcctgcagacaaggcactgattgccccagaccatgtagttccagctccagaagagtgctatgtgtatagtccattgggctctgcttataaacttcaaagttacactgaaggatacggtaaaaacaccagtttagtaaccatttttatgatttggaataccatgatgggaacatctatactaagcattccttggggcataaaacaggctggatttactactggaatgtgtgtcatcatactgatgggccttttaacactttattgctgctacagagtagtgaaatcacggactatgatgttttcgttggataccactagctgggaatatccagatgtctgcagacattatttcggctcctttgggcagtggtcgagtctccttttctccttggtgtctctcattggagcaatgatagtttattgggtgcttatgtcaaattttctttttaatactggaaagtttatttttaattttattcatcacattaatgacacagacactatactgagtaccaataatagca

SEQ ID NO: 184032 - DNA, 2370 bp, Homo sapiens
  Payload ID: 16258
  Gene Symbol: SLC38A9
  Gene Name: solute carrier family 38, member 9
  ENST ID: ENST00000508124
  CDS Start-End: 182-313
ttggactaggagccccgcggtcgcaaattgcgagaatttgggaagggaatctttatcttctcgtctagttctccgaggttgaaggctcggcctgctcagagaaggaaactgaggtccaccgagttggagaaacctactcaacaccaggactaacttcttcagtgcttagagtgtgagaaaaatggcaaatatgaatagtgattctaggcatcttggcacctctgaggtagatcatgaaagagatcctggacctatgaatatccagtttgagccatcggatctaagatccaaaagattgccccagaccatgtagttccagctccagaagagtgctatgtgtatagtccattgggctctgcttataaacttcaaagttacactgaaggatacggtaaaaacaccagtttagtaaccatttttatgatttggaataccatgatgggaacatctatactaagcattccttggggcataaaacaggctggatttactactggaatgtgtgtcatcatactgatgggccttttaacactttattgctgctacagagtagtgaaatcacggactatgatgttttcgttggataccactagctgggaatatccagatgtctgcagacattatttcggctcctttgggcagtggtcgagtctccttttctccttggtgtctctcattggagcaatgatagtttattgggtgcttatgtcaaattttctttttaatactggaaagtttatttttaattttattcatcacattaatgacacagacactatactgagtaccaataatagcaaccctgtgatttgtccaagtgccgggagtggaggccatcctgacaacagctctatgattttctatgccaatgacacaggagcccaacagtttgaaaagtggtgggataagtccaggacagtccccttttatcttgtagggctcctcctcccactgctcaatttcaagtctccttcatttttttcaaaatttaatatcctaggcacagtgtctgtcctttatttgattttccttgtcacctttaaggctgttcgcttgggatttcatttggaatttcattggtttataccaacagaattttttgtaccagagataagatttcagtttccacagctgactggagtgcttacccttgctttttttattcataattgtatcatcacactcttgaagaacaacaagaaacaagaaaacaatgtgagggacttgtgcattgcttatatgctggtgacattaacttatctctatattggagtcctggtttttgcttcatttccttcaccaccattatccaaagattgtattgagcagaattttttagacaacttccctagcagtgacaccctgtccttcattgcaaggatattcctgctgttccagatgatgactgtatacccactcttaggctacctggctcgtgtccagcttttgggccatatcttcggtgacatttatcctagcattttccatgtgctgattcttaatctaattattgtgggagctggagtgatcatggcctgtttctacccaaacataggagggatcataagatattcaggagcagcatgtggactggcctttgtattcatatacccatctctcatctatataatttccctccaccaagaagagcgtctgacatggcctaaattaatcttccacgttttcatcatcattttgggcgtggctaacctgattgttcagttttttatgtgaaatacctcaactgtttttttcaagagctctcatgatattttgagccttgacaacagttctatataaattcacttgtaaatgctgctgttgtgtaattctaaatattttctaagataatttgaaagcaagggaaatagtggccccttaatgagtatttttttattggggtggggaaaggggcaaaaagaatgatcttagtgtctttacctttctcatattaactcacctctttattctgtggtcttttctgaatagaaatgtatgccctaggaagaaatcatgctgggttttgcttttagagataaaaggtggtggatttattttgcctgcagtaaagattctcagggtgtcagagcagcatattgtcaaatcctgcttctgttttatgtttcagtgtattcactttcattttcttacttactagaccatttctgcagtttgcccaaacctctactgtttgggacagtaagccaaatacctcatttttaaaaagaagttttcatggcatcagtgttaataaagtacatttttaactgagtcttaatctctatttgaagaaaaagtagagacaaaagtaatgtcaatgtaatccccaggatcatgaaatgtatacaaaataaataaagtaggagagtt

SEQ ID NO: 184033 - DNA, 1756 bp, Homo sapiens
  Payload ID: 16258
  Gene Symbol: SLC38A9
  Gene Name: solute carrier family 38, member 9
  Uniprot ID: Q8NBW4
  ENST ID: ENST00000512595
  CDS Start-End: 177-1673
aaatttgtttaactgcgtagattaaatggcaatatattttctataatgaaacttgttgaaatgagagggaatcagctatttacaatcatggcataactacctagggctctgttgtcagcttggtattataatggaaaacaattggatatgtcagagacttagtctattacatttccatggctatttgcattttaacatggagaatccggcctttctgtatagagcccacaaacatcgtgaatgtgaatcatgtcattcagagggttagtgaccatgcctctgccatgaacaagagaattcattactacagccggctcaccactcctgcagacaaggcactgattgccccagaccatgtagttccagctccagaagagtgctatgtgtatagtccattgggctctgcttataaacttcaaagttacactgaaggatacggtaaaaacaccagtttagtaaccatttttatgatttggaataccatgatgggaacatctatactaagcattccttggggcataaaacaggctggatttactactggaatgtgtgtcatcatactgatgggccttttaacactttattgctgctacagagtagtgaaatcacggactatgatgttttcgttggataccactagctgggaatatccagatgtctgcagacattatttcggctcctttgggcagtggtcgagtctccttttctccttggtgtctctcattggagcaatgatagtttattgggtgcttatgtcaaattttctttttaatactggaaagtttatttttaattttattcatcacattaatgacacagacactatactgagtaccaataatagcaaccctgtgatttgtccaagtgccgggagtggaggccatcctgacaacagctctatgattttctatgccaatgacacaggagcccaacagtttgaaaagtggtgggataagtccaggacagtccccttttatcttgtagggctcctcctcccactgctcaatttcaagtctccttcatttttttcaaaatttaatatcctagagataagatttcagtttccacagctgactggagtgcttacccttgctttttttattcataattgtatcatcacactcttgaagaacaacaagaaacaagaaaacaatgtgagggacttgtgcattgcttatatgctggtgacattaacttatctctatattggagtcctggtttttgcttcatttccttcaccaccattatccaaagattgtattgagcagaattttttagacaacttccctagcagtgacaccctgtccttcattgcaaggatattcctgctgttccagatgatgactgtatacccactcttaggctacctggctcgtgtccagcttttgggccatatcttcggtgacatttatcctagcattttccatgtgctgattcttaatctaattattgtgggagctggagtgatcatggcctgtttctacccaaacataggagggatcataagatattcaggagcagcatgtggactggcctttgtattcatatacccatctctcatctatataatttccctccaccaagaagagcgtctgacatggcctaaattaatcttccacgttttcatcatcattttgggcgtggctaacctgattgttcagttttttatgtgaaatacctcaactgtttttttcaagagctctcatgatattttgagccttgacaacagttctatataaattcacttgtaaatgct

SEQ ID NO: 184034 - DNA, 556 bp, Homo sapiens
  Payload ID: 16258
  Gene Symbol: SLC38A9
  Gene Name: solute carrier family 38, member 9
  ENST ID: ENST00000502247
  CDS Start-End: 449-556
attacagtaagttggcaggagttcaaacagttctctgtaaatttgtttaactgcgtagattaaatggcaatatattttctataatgaaacttgttgaaatgagagggaatcagctatttacaatcatggcataactacctaggcactcagcatctcgatgaaaactgttggaaaagaaaaactttcagagtcattctgccctcagagtagtcaagccaactaaactgtatattactggaaacttcagaagaaaatgagggagtttcagaaaggaactgaagaggttgatgactgaaaaggatgattgaacaccaaaatctgcagttgattaggatgcagacgtggaaaggaagcatgtatataaataaaagggcctttctgtatagagcccacaaacatcgtgaatgtgaatcatgtcattcagagggttagtgaccatgcctctgccatgaacaagagaattcattactacagccggctcaccactcctgcagacaaggcactgattgccccagaccatgtagttccagctccagaagagtgctatgtgtatagt

SEQ ID NO: 184035 - DNA, 2324 bp, Homo sapiens
  Payload ID: 16258
  Gene Symbol: SLC38A9
  Gene Name: solute carrier family 38, member 9
  ENST ID: ENST00000505708
  CDS Start-End: 214-1407
agtaagttggcaggagttcaaacagttctctgtaaatttgtttaactgcgtagattaaatggcaatatattttctataatgaaacttgttgaaatgagagggaatcagctatttacaatcatggcataactacctaggcctttctgtatagagcccacaaacatcgtgaatgtgaatcatgtcattcagagggttagtgaccatgcctctgccatgaacaagagaattcattactacagccggctcaccactcctgcagacaaggcactgattgccccagaccatgtagttccagctccagaagagtgctatgtgtatagtccattgggctctgcttataaacttcaaagttacactgaaggatacggtaaaaacaccagtttagtaaccatttttatgatttggaataccatgatgggaacatctatactaagcattccttggggcataaaacaggctggatttactactggaatgtgtgtcatcatactgatgggccttttaacactttattgctgctacagagtagtgaaatcacggactatgatgttttcgttggataccactagctgggaatatccagatgtctgcagacattatttcggctcctttgggcagtggtcgagtctccttttctccttggtgtctctcattggagcaatgatagtttattgggtgcttatgtcaaattttctttttaatactggaaagtttatttttaattttattcatcacattaatgacacagacactatactgagtaccaataatagcaaccctgtgatttgtccaagtgccgggagtggaggccatcctgacaacagctctatgattttctatgccaatgacacaggagcccaacagtttgaaaagtggtgggataagtccaggacagtccccttttatcttgtagggctcctcctcccactgctcaatttcaagtctccttcatttttttcaaaatttaatatcctaggcacagtgtctgtcctttatttgattttccttgtcacctttaaggctgttcgcttgggatttcatttggaatttcattggtttataccaacagaattttttgtaccagagataagatttcagtttccacagctgactggagtgcttacccttgctttttttattcataattgtatcatcacactcttgaagaacaacaagaaacaagaaaacaatgtgagggacttgtgcattgcttatatgctggtgacattaacttatctctatattggagtcctggtttttgcttcatttccttcaccaccattatccaaagattgtattgagcaggctacctggctcgtgtccagcttttgggccatatcttcggtgacatttatcctaggtaagggctcttctcttgaccagcaggatgtgccaagcaacaaatgactgtgcaagcagcattttccatgtgctgattcttaatctaattattgtgggagctggagtgatcatggcctgtttctacccaaacataggagggatcataagatattcaggagcagcatgtggactggcctttgtattcatatacccatctctcatctatataatttccctccaccaagaagagcgtctgacatggcctaaattaatcttccacgttttcatcatcattttgggcgtggctaacctgattgttcagttttttatgtgaaatacctcaactgtttttttcaagagctctcatgatattttgagccttgacaacagttctatataaattcacttgtaaatgctgctgttgtgtaattctaaatattttctaagataatttgaaagcaagggaaatagtggccccttaatgagtatttttttattggggtggggaaaggggcaaaaagaatgatcttagtgtctttacctttctcatattaactcacctctttattctgtggtcttttctgaatagaaatgtatgccctaggaagaaatcatgctgggttttgcttttagagataaaaggtggtggatttattttgcctgcagtaaagattctcagggtgtcagagcagcatattgtcaaatcctgcttctgttttatgtttcagtgtattcactttcattttcttacttactagaccatttctgcagtttgcccaaacctctactgtttgggacagtaagccaaatacctcatttttaaaaagaagttttcatggcatcagtgttaataaagtacatttttaactgagtcttaatctctatttgaagaaaaagtagagacaaaagtaatgtcaatgtaatccccaggatcatgaaatgtatacaaaataaataaagtaggagagtttgttgctgtctaa

SEQ ID NO: 184036 - DNA, 2427 bp, Homo sapiens
  Payload ID: 16259
  Gene Symbol: SLC39A1
  Gene Name: solute carrier family 39 (zinc transporter), member 1
  Uniprot ID: Q9NY26
  ENST ID: ENST00000310483
  CDS Start-End: 467-1441
aggagagtcaggccaatggggccgcagttctttcttttttttttctttattcttatttttggagacagggtctcgctctgttgcccaggctggagtgcggtggtgcgatcacggttccatgcagcccccgacctcccgggctcaggtgattctcccgcctcagcaccgcgagcagctaggaccacaggcgcgagccactgcgtccggccggcgggacttatttgtcaggcggggattgggttccgccagcctaaagggaggggtaagcgccagaatatgaatcgccgggaagctgggagaaagctccgggaaaccctgagcagccaggtcgcctgctccgcccgctcccgctcccgatctctgattgctcctaactgacgtcactcccggtctgtccccgcccactcggtgctgccattggcagtcggtcgtgggtctgagagtcactggagctaccagaagcatcatggggccctggggagagccagagctcctggtgtggcgccccgaggcggtagcttcagagcctccagtgcctgtggggctggaggtgaagttgggggccctggtgctgctgctggtgctcaccctcctctgcagcctggtgcccatctgtgtgctgcgccggccaggagctaaccatgaaggctcagcttcccgccagaaagccctgagcctagtaagctgtttcgcggggggcgtctttttggccacttgtctcctggacctgctgcctgactacctggctgccatagatgaggccctggcagccttgcacgtgacgctccagttcccactgcaagagttcatcctggccatgggcttcttcctggtcctggtgatggagcagatcacactggcttacaaggagcagtcagggccgtcacctctggaggaaacaagggctctgctgggaacagtgaatggtgggccgcagcattggcatgatgggccaggggtcccacaggcgagtggagccccagcaaccccctcagccttgcgtgcctgtgtactggtgttctccctggccctccactccgtgttcgaggggctggcggtagggctgcagcgagaccgggctcgggccatggagctgtgcctggctttgctgctccacaagggcatcctggctgtcagcctgtccctgcggctgttgcagagccaccttagggcacaggtggtggctggctgtgggatcctcttctcatgcatgacacctctaggcatcgggctgggtgcagctctggcagagtcggcaggacctctgcaccagctggcccagtctgtgctagagggcatggcagctggcacctttctctatatcacctttctggaaatcctgccccaggagctggccagttctgagcaaaggatcctcaaggtcattctgctcctagcaggctttgccctgctcactggcctgctcttcatccaaatctagggggcttcaagagaggggcaggggagattgatgatcaggtgcccctgttctcccttccctcccccagttgtggggaataggaaggaaaggggaagggaaatactgaggaccaaaaagttctctgggagctaaagatagagcctttggggctatctgactaatgagagggaagtgggcagacaagaggctggccccagtcccaaggaacaagagatggtcaagtcgctagagacatatcaggggacattaggattggggaagacacttgactgctagaatcagaggttggacactatacataaggacaggctcacatgggaggctggaggtgggtacccagctgctgtggaacgggtatggacaggtcataaacctagagtcagtgtcctgttggtcctagcccatttcagcaccctgccacttggagtggacccctcctactcttcttagcgcctaccctcatacctatctccctcctcccatctcctaggggactggcgccaaatggtctctccctgccaattttggtatcttctctggcctctccagtcctgcttactcctctatttttaaagtgccaaacaaatccccttcctctttctcaaagcacagtaatgtggcactgagccctacccagcacctcagtgaagggggcctgcttgctctttattttggtcccggatcctggggtggggcagaaatattttctgggctggggtaggaggaaggttgttgcagccatctactgctgctgtaccctaggaatatggggacatggacatggtgtcccatgcccagatgataaacactgagctgccaaaacatttttttaaatacacccgaggagcccaagggggaagggcaatgcctacccccagcgttatttttggggagggagggctgtgcatagggacatattctttagaatctattttattaactgacctgttttgggacctgttacccaaataaaagatgtttctaga

SEQ ID NO: 184037 - DNA, 2084 bp, Homo sapiens
  Payload ID: 16259
  Gene Symbol: SLC39A1
  Gene Name: solute carrier family 39 (zinc transporter), member 1
  Uniprot ID: Q9NY26
  ENST ID: ENST00000356205
  CDS Start-End: 111-1085
gggagctatgggagggggcgggaattcccgactctaggccggaagcgcgcggagaccatgtagtgagaccctcgcgaggtctgagagtcactggagctaccagaagcatcatggggccctggggagagccagagctcctggtgtggcgccccgaggcggtagcttcagagcctccagtgcctgtggggctggaggtgaagttgggggccctggtgctgctgctggtgctcaccctcctctgcagcctggtgcccatctgtgtgctgcgccggccaggagctaaccatgaaggctcagcttcccgccagaaagccctgagcctagtaagctgtttcgcggggggcgtctttttggccacttgtctcctggacctgctgcctgactacctggctgccatagatgaggccctggcagccttgcacgtgacgctccagttcccactgcaagagttcatcctggccatgggcttcttcctggtcctggtgatggagcagatcacactggcttacaaggagcagtcagggccgtcacctctggaggaaacaagggctctgctgggaacagtgaatggtgggccgcagcattggcatgatgggccaggggtcccacaggcgagtggagccccagcaaccccctcagccttgcgtgcctgtgtactggtgttctccctggccctccactccgtgttcgaggggctggcggtagggctgcagcgagaccgggctcgggccatggagctgtgcctggctttgctgctccacaagggcatcctggctgtcagcctgtccctgcggctgttgcagagccaccttagggcacaggtggtggctggctgtgggatcctcttctcatgcatgacacctctaggcatcgggctgggtgcagctctggcagagtcggcaggacctctgcaccagctggcccagtctgtgctagagggcatggcagctggcacctttctctatatcacctttctggaaatcctgccccaggagctggccagttctgagcaaaggatcctcaaggtcattctgctcctagcaggctttgccctgctcactggcctgctcttcatccaaatctagggggcttcaagagaggggcaggggagattgatgatcaggtgcccctgttctcccttccctcccccagttgtggggaataggaaggaaaggggaagggaaatactgaggaccaaaaagttctctgggagctaaagatagagcctttggggctatctgactaatgagagggaagtgggcagacaagaggctggccccagtcccaaggaacaagagatggtcaagtcgctagagacatatcaggggacattaggattggggaagacacttgactgctagaatcagaggttggacactatacataaggacaggctcacatgggaggctggaggtgggtacccagctgctgtggaacgggtatggacaggtcataaacctagagtcagtgtcctgttggtcctagcccatttcagcaccctgccacttggagtggacccctcctactcttcttagcgcctaccctcatacctatctccctcctcccatctcctaggggactggcgccaaatggtctctccctgccaattttggtatcttctctggcctctccagtcctgcttactcctctatttttaaagtgccaaacaaatccccttcctctttctcaaagcacagtaatgtggcactgagccctacccagcacctcagtgaagggggcctgcttgctctttattttggtcccggatcctggggtggggcagaaatattttctgggctggggtaggaggaaggttgttgcagccatctactgctgctgtaccctaggaatatggggacatggacatggtgtcccatgcccagatgataaacactgagctgccaaaacatttttttaaatacacccgaggagcccaagggggaagggcaatgcctacccccagcgttatttttggggagggagggctgtgcatagggacatattctttagaatctattttattaactgacctgttttgggacctgttacccaaataaaagatgtttctagacatctgtacagta

SEQ ID NO: 184038 - DNA, 2398 bp, Homo sapiens
  Payload ID: 16259
  Gene Symbol: SLC39A1
  Gene Name: solute carrier family 39 (zinc transporter), member 1
  Uniprot ID: Q9NY26
  ENST ID: ENST00000368621
  CDS Start-End: 437-1411
gtcggctgcccaggcctccccgggcccgggaacaggagtcccagctcacgcattcttcatctgcttcccgcgacgcttggcggcctcgcaccccgcctcctggagcccggactttcaggcaccgccctcagtgtcgcctcagtccgtcccgggaccgcagactcttagggcccctctctttggccatctgcctctaggtcccatcctggggcctgaagcgcttgttctctgcgctgggaaaaggggaacgatggagcgatccagcacccaaacttaccctgtccaggtggcccacgaagctacccaagacatctctgcacagccctagcctttttggcttcacccactccgttcgggagttggggacccggcctctacattccttaggggaactccagctccaggtctgagagtcactggagctaccagaagcatcatggggccctggggagagccagagctcctggtgtggcgccccgaggcggtagcttcagagcctccagtgcctgtggggctggaggtgaagttgggggccctggtgctgctgctggtgctcaccctcctctgcagcctggtgcccatctgtgtgctgcgccggccaggagctaaccatgaaggctcagcttcccgccagaaagccctgagcctagtaagctgtttcgcggggggcgtctttttggccacttgtctcctggacctgctgcctgactacctggctgccatagatgaggccctggcagccttgcacgtgacgctccagttcccactgcaagagttcatcctggccatgggcttcttcctggtcctggtgatggagcagatcacactggcttacaaggagcagtcagggccgtcacctctggaggaaacaagggctctgctgggaacagtgaatggtgggccgcagcattggcatgatgggccaggggtcccacaggcgagtggagccccagcaaccccctcagccttgcgtgcctgtgtactggtgttctccctggccctccactccgtgttcgaggggctggcggtagggctgcagcgagaccgggctcgggccatggagctgtgcctggctttgctgctccacaagggcatcctggctgtcagcctgtccctgcggctgttgcagagccaccttagggcacaggtggtggctggctgtgggatcctcttctcatgcatgacacctctaggcatcgggctgggtgcagctctggcagagtcggcaggacctctgcaccagctggcccagtctgtgctagagggcatggcagctggcacctttctctatatcacctttctggaaatcctgccccaggagctggccagttctgagcaaaggatcctcaaggtcattctgctcctagcaggctttgccctgctcactggcctgctcttcatccaaatctagggggcttcaagagaggggcaggggagattgatgatcaggtgcccctgttctcccttccctcccccagttgtggggaataggaaggaaaggggaagggaaatactgaggaccaaaaagttctctgggagctaaagatagagcctttggggctatctgactaatgagagggaagtgggcagacaagaggctggccccagtcccaaggaacaagagatggtcaagtcgctagagacatatcaggggacattaggattggggaagacacttgactgctagaatcagaggttggacactatacataaggacaggctcacatgggaggctggaggtgggtacccagctgctgtggaacgggtatggacaggtcataaacctagagtcagtgtcctgttggtcctagcccatttcagcaccctgccacttggagtggacccctcctactcttcttagcgcctaccctcatacctatctccctcctcccatctcctaggggactggcgccaaatggtctctccctgccaattttggtatcttctctggcctctccagtcctgcttactcctctatttttaaagtgccaaacaaatccccttcctctttctcaaagcacagtaatgtggcactgagccctacccagcacctcagtgaagggggcctgcttgctctttattttggtcccggatcctggggtggggcagaaatattttctgggctggggtaggaggaaggttgttgcagccatctactgctgctgtaccctaggaatatggggacatggacatggtgtcccatgcccagatgataaacactgagctgccaaaacatttttttaaatacacccgaggagcccaagggggaagggcaatgcctacccccagcgttatttttggggagggagggctgtgcatagggacatattctttagaatctattttattaactgacctgttttgggacctgttacccaaataaaagatgtttctagac

SEQ ID NO: 184039 - DNA, 2723 bp, Homo sapiens
  Payload ID: 16259
  Gene Symbol: SLC39A1
  Gene Name: solute carrier family 39 (zinc transporter), member 1
  Uniprot ID: Q9NY26
  ENST ID: ENST00000368623
  CDS Start-End: 761-1735
cagcggggtccatgtcggctgcccaggcctccccgggcccgggaacaggagtcccagctcacgcattcttcatctgcttcccgcgacgcttggcggcctcgcaccccgcctcctggagcccggactttcaggcaccgccctcagtgtcgcctcagtccgtcccgggaccgcagactcttagggcccctctctttggccatctgcctctaggtcccatcctggggcctgaagcgcttgttctctgcgctgggaaaaggggaacgatggagcgatccagcacccaaacttaccctgtccaggtggcccacgaagctacccaagacatctctgcacagccctagcctttttggcttcacccactccgttcgggagttggggacccggcctctacattccttaggggaactccagctccaggtcctatttggaggcggctcctagtttcctagttttctgggggcaccaggtgaaagggtgatgagatatccatacagcctttctcatgcctcggtttcccccgtgcagtctccctgaataagtcacttgggaaagaaagtgtgagaagagaggaatgttcctggtacaggagtagatgagtcaccctgggtaggggaaggtcacaaagtggctggggccagggagctgcactctgctgaccaagcttccccattccttgccccatcttcctttgcatgatttttcccaaccactctggtctgtcttcctaggtctgagagtcactggagctaccagaagcatcatggggccctggggagagccagagctcctggtgtggcgccccgaggcggtagcttcagagcctccagtgcctgtggggctggaggtgaagttgggggccctggtgctgctgctggtgctcaccctcctctgcagcctggtgcccatctgtgtgctgcgccggccaggagctaaccatgaaggctcagcttcccgccagaaagccctgagcctagtaagctgtttcgcggggggcgtctttttggccacttgtctcctggacctgctgcctgactacctggctgccatagatgaggccctggcagccttgcacgtgacgctccagttcccactgcaagagttcatcctggccatgggcttcttcctggtcctggtgatggagcagatcacactggcttacaaggagcagtcagggccgtcacctctggaggaaacaagggctctgctgggaacagtgaatggtgggccgcagcattggcatgatgggccaggggtcccacaggcgagtggagccccagcaaccccctcagccttgcgtgcctgtgtactggtgttctccctggccctccactccgtgttcgaggggctggcggtagggctgcagcgagaccgggctcgggccatggagctgtgcctggctttgctgctccacaagggcatcctggctgtcagcctgtccctgcggctgttgcagagccaccttagggcacaggtggtggctggctgtgggatcctcttctcatgcatgacacctctaggcatcgggctgggtgcagctctggcagagtcggcaggacctctgcaccagctggcccagtctgtgctagagggcatggcagctggcacctttctctatatcacctttctggaaatcctgccccaggagctggccagttctgagcaaaggatcctcaaggtcattctgctcctagcaggctttgccctgctcactggcctgctcttcatccaaatctagggggcttcaagagaggggcaggggagattgatgatcaggtgcccctgttctcccttccctcccccagttgtggggaataggaaggaaaggggaagggaaatactgaggaccaaaaagttctctgggagctaaagatagagcctttggggctatctgactaatgagagggaagtgggcagacaagaggctggccccagtcccaaggaacaagagatggtcaagtcgctagagacatatcaggggacattaggattggggaagacacttgactgctagaatcagaggttggacactatacataaggacaggctcacatgggaggctggaggtgggtacccagctgctgtggaacgggtatggacaggtcataaacctagagtcagtgtcctgttggtcctagcccatttcagcaccctgccacttggagtggacccctcctactcttcttagcgcctaccctcatacctatctccctcctcccatctcctaggggactggcgccaaatggtctctccctgccaattttggtatcttctctggcctctccagtcctgcttactcctctatttttaaagtgccaaacaaatccccttcctctttctcaaagcacagtaatgtggcactgagccctacccagcacctcagtgaagggggcctgcttgctctttattttggtcccggatcctggggtggggcagaaatattttctgggctggggtaggaggaaggttgttgcagccatctactgctgctgtaccctaggaatatggggacatggacatggtgtcccatgcccagatgataaacactgagctgccaaaacatttttttaaatacacccgaggagcccaagggggaagggcaatgcctacccccagcgttatttttggggagggagggctgtgcatagggacatattctttagaatctattttattaactgacctgttttgggacctgttacccaaataaaagatgtttctagaca

SEQ ID NO: 184040 - DNA, 1030 bp, Homo sapiens
  Payload ID: 16259
  Gene Symbol: SLC39A1
  Gene Name: solute carrier family 39 (zinc transporter), member 1
  ENST ID: ENST00000413622
  CDS Start-End: 311-1030
ggagtgcggtggtgcgatcacggttccatgcagcccccgacctcccgggctcaggtgattctcccgcctcagcaccgcgagcagctaggaccacaggcgcgagccactgcgtccggccggcgggacttatttgtcaggcggggattgggttccgccagcctaaagggaggggtcgcctgctccgcccgctcccgctcccgatctctgattgctcctaactgacgtcactcccggtctgtccccgcccactcggtgctgccattggcagtcggtcgtgggtctgagagtcactggagctaccagaagcatcatggggccctggggagagccagagctcctggtgtggcgccccgaggcggtagcttcagagcctccagtgcctgtggggctggaggtgaagttgggggccctggtgctgctgctggtgctcaccctcctctgcagcctggtgcccatctgtgtgctgcgccggccaggagctaaccatgaaggctcagcttcccgccagaaagccctgagcctagtaagctgtttcgcggggggcgtctttttggccacttgtctcctggacctgctgcctgactacctggctgccatagatgaggccctggcagccttgcacgtgacgctccagttcccactgcaagagttcatcctggccatgggcttcttcctggtcctggtgatggagcagatcacactggcttacaaggagcagtcagggccgtcacctctggaggaaacaagggctctgctgggaacagtgaatggtgggccgcagcattggcatgatgggccaggggtcccacaggcgagtggagccccagcaaccccctcagccttgcgtgcctgtgtactggtgttctccctggccctccactccgtgttcgaggggctggcggtagggctgcagcgagaccgggctcgggccatggagctgtgcctggctttgctgctccacaagggcatcctggctgtcagcctgtccctgcggctgttgcagagccaccttagggcacaggtggtggct

SEQ ID NO: 184041 - DNA, 1141 bp, Homo sapiens
  Payload ID: 16259
  Gene Symbol: SLC39A1
  Gene Name: solute carrier family 39 (zinc transporter), member 1
  ENST ID: ENST00000429040
  CDS Start-End: 179-1141
agtccgtcccgggaccgcagactcttagggcccctctctttggccatctgcctctaggtcccatcctggggcctgaagcgcttgttctctgcgctgggaaaaggggaacgatggagcgatccagcacccaaacttaccctgtccaggtctgagagtcactggagctaccagaagcatcatggggccctggggagagccagagctcctggtgtggcgccccgaggcggtagcttcagagcctccagtgcctgtggggctggaggtgaagttgggggccctggtgctgctgctggtgctcaccctcctctgcagcctggtgcccatctgtgtgctgcgccggccaggagctaaccatgaaggctcagcttcccgccagaaagccctgagcctagtaagctgtttcgcggggggcgtctttttggccacttgtctcctggacctgctgcctgactacctggctgccatagatgaggccctggcagccttgcacgtgacgctccagttcccactgcaagagttcatcctggccatgggcttcttcctggtcctggtgatggagcagatcacactggcttacaaggagcagtcagggccgtcacctctggaggaaacaagggctctgctgggaacagtgaatggtgggccgcagcattggcatgatgggccaggggtcccacaggcgagtggagccccagcaaccccctcagccttgcgtgcctgtgtactggtgttctccctggccctccactccgtgttcgaggggctggcggtagggctgcagcgagaccgggctcgggccatggagctgtgcctggctttgctgctccacaagggcatcctggctgtcagcctgtccctgcggctgttgcagagccaccttagggcacaggtggtggctggctgtgggatcctcttctcatgcatgacacctctaggcatcgggctgggtgcagctctggcagagtcggcaggacctctgcaccagctggcccagtctgtgctagagggcatggcagctggcacctttctctatatcacctttctggaaatcctgccccaggagctggccagttctgagcaaaggatcctcaaggtcattctgctcctagcaggctttgccctgctcactggcctgctcttc

SEQ ID NO: 184042 - DNA, 912 bp, Homo sapiens
  Payload ID: 16259
  Gene Symbol: SLC39A1
  Gene Name: solute carrier family 39 (zinc transporter), member 1
  ENST ID: ENST00000417348
  CDS Start-End: 294-912
ccatcctggggcctgaagcgcttgttctctgcgctgggaaaaggggaacgatggagcgatccagcacccaaacttaccctgtccaggtggcccacgaagctacccaagacatctctgcacagccctagcctttttggcttcacccactccgttcgggagttggggacccggcctctacattccttaggggaactccagctccaggtcctatttggaggcggctcctagtttcctagttttctgggggcaccaggtgaaagggtctgagagtcactggagctaccagaagcatcatggggccctggggagagccagagctcctggtgtggcgccccgaggcggtagcttcagagcctccagtgcctgtggggctggaggtgaagttgggggccctggtgctgctgctggtgctcaccctcctctgcagcctggtgcccatctgtgtgctgcgccggccaggagctaaccatgaaggctcagcttcccgccagaaagccctgagcctagtaagctgtttcgcggggggcgtctttttggccacttgtctcctggacctgctgcctgactacctggctgccatagatgaggccctggcagccttgcacgtgacgctccagttcccactgcaagagttcatcctggccatgggcttcttcctggtcctggtgatggagcagatcacactggcttacaaggagcagtcagggccgtcacctctggaggaaacaagggctctgctgggaacagtgaatggtgggccgcagcattggcatgatgggccaggggtcccacaggcgagtggagccccagcaaccccctcagccttgcgtgcctgtgtactggtgttctccctggccctccactccgtgttcgaggggctggcggtagggctgcagcgagaccgggctcggg

SEQ ID NO: 184043 - DNA, 2022 bp, Homo sapiens
  Payload ID: 16259
  Gene Symbol: SLC39A1
  Gene Name: solute carrier family 39 (zinc transporter), member 1
  ENST ID: ENST00000537590
  CDS Start-End: 180-530
gtctgtccccgcccactcggtgctgccattggcagtcggtcgtgggtacgcggctcctgtgggggaggggggagctatgggagggggcgggaattcccgactctaggccggaagcgcgcggagaccatgtagtgagaccctcgcgaggtctgagagtcactggagctaccagaagcatcatggggccctggggagagccagagctcctggtgtggcgccccgaggcggtagcttcagagcctccagtgcctgtggggctggaggtgaagttgggggccctggtgctgctgctggtgctcaccctcctctgcagcctggtgcccatctgtgtgctgcgccggccaggagctaaccatgaaggctcagctccagttcccactgcaagagttcatcctggccatgggcttcttcctggtcctggtgatggagcagatcacactggcttacaaggagcagtcagggccgtcacctctggaggaaacaagggctctgctgggaacagtgaatggtgggccgcagcattggcatgatgggccaggggtcccacaggcgagtggagccccagcaaccccctcagccttgcgtgcctgtgtactggtgttctccctggccctccactccgtgttcgaggggctggcggtagggctgcagcgagaccgggctcgggccatggagctgtgcctggctttgctgctccacaagggcatcctggctgtcagcctgtccctgcggctgttgcagagccaccttagggcacaggtggtggctggctgtgggatcctcttctcatgcatgacacctctaggcatcgggctgggtgcagctctggcagagtcggcaggacctctgcaccagctggcccagtctgtgctagagggcatggcagctggcacctttctctatatcacctttctggaaatcctgccccaggagctggccagttctgagcaaaggatcctcaaggtcattctgctcctagcaggctttgccctgctcactggcctgctcttcatccaaatctagggggcttcaagagaggggcaggggagattgatgatcaggtgcccctgttctcccttccctcccccagttgtggggaataggaaggaaaggggaagggaaatactgaggaccaaaaagttctctgggagctaaagatagagcctttggggctatctgactaatgagagggaagtgggcagacaagaggctggccccagtcccaaggaacaagagatggtcaagtcgctagagacatatcaggggacattaggattggggaagacacttgactgctagaatcagaggttggacactatacataaggacaggctcacatgggaggctggaggtgggtacccagctgctgtggaacgggtatggacaggtcataaacctagagtcagtgtcctgttggtcctagcccatttcagcaccctgccacttggagtggacccctcctactcttcttagcgcctaccctcatacctatctccctcctcccatctcctaggggactggcgccaaatggtctctccctgccaattttggtatcttctctggcctctccagtcctgcttactcctctatttttaaagtgccaaacaaatccccttcctctttctcaaagcacagtaatgtggcactgagccctacccagcacctcagtgaagggggcctgcttgctctttattttggtcccggatcctggggtggggcagaaatattttctgggctggggtaggaggaaggttgttgcagccatctactgctgctgtaccctaggaatatggggacatggacatggtgtcccatgcccagatgataaacactgagctgccaaaacatttttttaaatacacccgaggagcccaagggggaagggcaatgcctacccccagcgttatttttggggagggagggctgtgcatagggacatattctttagaatctattttattaactgacctgttttgggacctgttacccaaataaaagatgtttctagacatctgtacagta

SEQ ID NO: 184044 - DNA, 2214 bp, Homo sapiens
  Payload ID: 16259
  Gene Symbol: SLC39A1
  Gene Name: solute carrier family 39 (zinc transporter), member 1
  Uniprot ID: Q9NY26
  ENST ID: ENST00000617697
  CDS Start-End: 241-1215
actacaaaagtggatgccaccttgccaggagccacggtagggccgctgtatctgggagtaggggactaagagtctgagggtccacaaacggaatttaagaagtcgcctgctccgcccgctcccgctcccgatctctgattgctcctaactgacgtcactcccggtctgtccccgcccactcggtgctgccattggcagtcggtcgtgggtctgagagtcactggagctaccagaagcatcatggggccctggggagagccagagctcctggtgtggcgccccgaggcggtagcttcagagcctccagtgcctgtggggctggaggtgaagttgggggccctggtgctgctgctggtgctcaccctcctctgcagcctggtgcccatctgtgtgctgcgccggccaggagctaaccatgaaggctcagcttcccgccagaaagccctgagcctagtaagctgtttcgcggggggcgtctttttggccacttgtctcctggacctgctgcctgactacctggctgccatagatgaggccctggcagccttgcacgtgacgctccagttcccactgcaagagttcatcctggccatgggcttcttcctggtcctggtgatggagcagatcacactggcttacaaggagcagtcagggccgtcacctctggaggaaacaagggctctgctgggaacagtgaatggtgggccgcagcattggcatgatgggccaggggtcccacaggcgagtggagccccagcaaccccctcagccttgcgtgcctgtgtactggtgttctccctggccctccactccgtgttcgaggggctggcggtagggctgcagcgagaccgggctcgggccatggagctgtgcctggctttgctgctccacaagggcatcctggctgtcagcctgtccctgcggctgttgcagagccaccttagggcacaggtggtggctggctgtgggatcctcttctcatgcatgacacctctaggcatcgggctgggtgcagctctggcagagtcggcaggacctctgcaccagctggcccagtctgtgctagagggcatggcagctggcacctttctctatatcacctttctggaaatcctgccccaggagctggccagttctgagcaaaggatcctcaaggtcattctgctcctagcaggctttgccctgctcactggcctgctcttcatccaaatctagggggcttcaagagaggggcaggggagattgatgatcaggtgcccctgttctcccttccctcccccagttgtggggaataggaaggaaaggggaagggaaatactgaggaccaaaaagttctctgggagctaaagatagagcctttggggctatctgactaatgagagggaagtgggcagacaagaggctggccccagtcccaaggaacaagagatggtcaagtcgctagagacatatcaggggacattaggattggggaagacacttgactgctagaatcagaggttggacactatacataaggacaggctcacatgggaggctggaggtgggtacccagctgctgtggaacgggtatggacaggtcataaacctagagtcagtgtcctgttggtcctagcccatttcagcaccctgccacttggagtggacccctcctactcttcttagcgcctaccctcatacctatctccctcctcccatctcctaggggactggcgccaaatggtctctccctgccaattttggtatcttctctggcctctccagtcctgcttactcctctatttttaaagtgccaaacaaatccccttcctctttctcaaagcacagtaatgtggcactgagccctacccagcacctcagtgaagggggcctgcttgctctttattttggtcccggatcctggggtggggcagaaatattttctgggctggggtaggaggaaggttgttgcagccatctactgctgctgtaccctaggaatatggggacatggacatggtgtcccatgcccagatgataaacactgagctgccaaaacatttttttaaatacacccgaggagcccaagggggaagggcaatgcctacccccagcgttatttttggggagggagggctgtgcatagggacatattctttagaatctattttattaactgacctgttttgggacctgttacccaaataaaagatgtttctagacatctgtacagta

SEQ ID NO: 184045 - DNA, 2322 bp, Homo sapiens
  Payload ID: 16259
  Gene Symbol: SLC39A1
  Gene Name: solute carrier family 39 (zinc transporter), member 1
  Uniprot ID: Q9NY26
  ENST ID: ENST00000621013
  CDS Start-End: 349-1323
gagtgcgggctgtctggcagcggggtccatgtcggctgcccaggcctccccgggcccgggaacaggagtcccagctcacgcattcttcatctgcttcccgcgacgcttggcggcctcgcaccccgcctcctggagcccggactttcaggcaccgccctcagtgtcgcctcagtccgtcccgggaccgcagactcttagggcccctctctttggccatctgcctctaggtcccatcctggggcctgaagcgcttgttctctgcgctgggaaaaggggaacgatggagcgatccagcacccaaacttaccctgtccaggtctgagagtcactggagctaccagaagcatcatggggccctggggagagccagagctcctggtgtggcgccccgaggcggtagcttcagagcctccagtgcctgtggggctggaggtgaagttgggggccctggtgctgctgctggtgctcaccctcctctgcagcctggtgcccatctgtgtgctgcgccggccaggagctaaccatgaaggctcagcttcccgccagaaagccctgagcctagtaagctgtttcgcggggggcgtctttttggccacttgtctcctggacctgctgcctgactacctggctgccatagatgaggccctggcagccttgcacgtgacgctccagttcccactgcaagagttcatcctggccatgggcttcttcctggtcctggtgatggagcagatcacactggcttacaaggagcagtcagggccgtcacctctggaggaaacaagggctctgctgggaacagtgaatggtgggccgcagcattggcatgatgggccaggggtcccacaggcgagtggagccccagcaaccccctcagccttgcgtgcctgtgtactggtgttctccctggccctccactccgtgttcgaggggctggcggtagggctgcagcgagaccgggctcgggccatggagctgtgcctggctttgctgctccacaagggcatcctggctgtcagcctgtccctgcggctgttgcagagccaccttagggcacaggtggtggctggctgtgggatcctcttctcatgcatgacacctctaggcatcgggctgggtgcagctctggcagagtcggcaggacctctgcaccagctggcccagtctgtgctagagggcatggcagctggcacctttctctatatcacctttctggaaatcctgccccaggagctggccagttctgagcaaaggatcctcaaggtcattctgctcctagcaggctttgccctgctcactggcctgctcttcatccaaatctagggggcttcaagagaggggcaggggagattgatgatcaggtgcccctgttctcccttccctcccccagttgtggggaataggaaggaaaggggaagggaaatactgaggaccaaaaagttctctgggagctaaagatagagcctttggggctatctgactaatgagagggaagtgggcagacaagaggctggccccagtcccaaggaacaagagatggtcaagtcgctagagacatatcaggggacattaggattggggaagacacttgactgctagaatcagaggttggacactatacataaggacaggctcacatgggaggctggaggtgggtacccagctgctgtggaacgggtatggacaggtcataaacctagagtcagtgtcctgttggtcctagcccatttcagcaccctgccacttggagtggacccctcctactcttcttagcgcctaccctcatacctatctccctcctcccatctcctaggggactggcgccaaatggtctctccctgccaattttggtatcttctctggcctctccagtcctgcttactcctctatttttaaagtgccaaacaaatccccttcctctttctcaaagcacagtaatgtggcactgagccctacccagcacctcagtgaagggggcctgcttgctctttattttggtcccggatcctggggtggggcagaaatattttctgggctggggtaggaggaaggttgttgcagccatctactgctgctgtaccctaggaatatggggacatggacatggtgtcccatgcccagatgataaacactgagctgccaaaacatttttttaaatacacccgaggagcccaagggggaagggcaatgcctacccccagcgttatttttggggagggagggctgtgcatagggacatattctttagaatctattttattaactgacctgttttgggacctgttacccaaataaaagatgtttctagacatctgtacagta

SEQ ID NO: 184046 - DNA, 5322 bp, Homo sapiens
  Payload ID: 16260
  Gene Symbol: SLC39A10
  Gene Name: solute carrier family 39 (zinc transporter), member 10
  Uniprot ID: Q9ULF5
  ENST ID: ENST00000359634
  CDS Start-End: 166-2661
gagtggaccttgtacgccgcaagcgtagcagggtgtcagacgcgccggtttctgcgacgcagttagcgcagtctgctttggtgaatacacgatttggtgcagccggggtttggtaccgagcggagaggagatgcacacggcactcgagtgtgaggaaaaatagaaatgaaggtacatatgcacacaaaattttgcctcatttgtttgctgacatttatttttcatcattgcaaccattgccatgaagaacatgaccatggccctgaagcgcttcacagacagcatcgtggaatgacagaattggagccaagcaaattttcaaagcaagctgctgaaaatgaaaaaaaatactatattgaaaaactttttgagcgttatggtgaaaatggaagattatccttttttggtttggagaaacttttaacaaacttgggccttggagagagaaaagtagttgagattaatcatgaggatcttggccacgatcatgtttctcatttagatattttggcagttcaagagggaaagcattttcactcacataaccaccagcattcccataatcatttaaattcagaaaatcaaactgtgaccagtgtatccacaaaaagaaaccataaatgtgatccagagaaagagacagttgaagtgtctgtaaaatctgatgataaacatatgcatgaccataatcaccgcctacgtcatcaccatcgtttgcatcatcatcttgatcataacaacactcaccattttcataatgattccattactcccagtgagcgtggggagcctagcaatgaaccttcaacagagaccaataaaacccaggaacaatctgatgttaaactaccgaaaggaaagaggaagaaaaaagggaggaaaagtaatgaaaattctgaggttattacaccaggttttccccctaaccatgatcagggtgaacagtatgagcataatcgggtccacaaacctgatcgtgtacataacccaggtcattctcatgtacatcttccagaacgtaatggtcatgatcctggtcgtggacaccaagatcttgatcctgataatgaaggtgaacttcgacatactagaaagagagaagcaccacatgttaaaaataatgcaataatttctttgagaaaagatctaaatgaagatgaccatcatcatgaatgtttgaacgtcactcagttattaaaatactatggtcatggtgccaactctcccatctcaactgatttatttacatacctttgccctgcattgttatatcaaatcgacagcagactttgtattgagcattttgacaaacttttagttgaagatataaataaggataaaaacctggttcctgaagatgaggcaaatataggggcatcagcctggatttgtggtatcatttctatcactgtcattagcctgctttccttgctaggcgtgatcttggttcctatcattaaccaaggatgcttcaaattccttcttacattccttgttgcattagctgtaggaacaatgagtggagacgcccttcttcatctactgccccattctcagggtggacatgatcacagtcaccaacatgcacatgggcatggacattctcatggacatgaatctaacaagtttttggaagaatatgatgctgtattgaaaggacttgttgctctaggaggcatttacttgctatttatcattgaacactgcattagaatgtttaagcactacaaacaacaaagaggaaaacagaaatggtttatgaaacagaacacagaagaatcaactattggaagaaagctttcagatcacaagttaaacaatacaccagattctgactggcttcaactcaagcctcttgccggaactgatgactcggttgtttctgaagatcgacttaatgaaactgaactgacagatttagaaggccaacaagaatcccctcctaaaaattacctttgtatagaagaggagaaaatcatagaccattctcacagtgatggattacataccattcatgagcatgatctccatgctgctgcacataaccaccacggcgagaacaaaactgtgctgaggaagcataatcaccagtggcaccacaagcattctcatcattcccatggcccctgtcattctggatccgatctgaaagaaacaggaatagctaatatagcctggatggtgatcatgggggatggcatccacaacttcagtgatgggctcgcaattggtgcagctttcagtgctggattgacaggaggaatcagtacttctatagccgtcttctgtcatgaactgccacatgaattaggagattttgcagttcttcttaaagcaggcatgactgtaaagcaagcaattgtatacaacctcctctctgccatgatggcttacataggcatgctcataggcacagctgttggtcagtatgccaataacatcacactttggatctttgcagtcactgcaggcatgttcctctatgtagccttggtggatatgcttccagaaatgttgcatggtgatggtgacaatgaagaacatggcttttgtcctgtggggcaattcatccttcagaatttaggattgctctttggatttgccattatgctggtgattgccctctatgaagataaaattgtgtttgacatccagttttgacctttcccagtaatcactgttgattacgagaatgttaccatgcagctttgcatctgttccttgtactgtatgcacattgctcaaaggaaagtcagtggcttgcactacttacaagtttcatagatttgagcctaaccacaagaggctggtgcttagtactgttttccctgcacgtaggggtcttttaaaaatataaagcttgtgataaagagaggagaatatgggactccatgaaccagtgttgatatgtttgattaagacttttcacaaaataatcatataaaacactagtctctttattagtagaaacttctgtggctatgcagaaatagagatcgaaccaaaaaaaatcatttaaactttaaaaatattttaaatggactttggggagacattttttgtgtgttttaagaatgaattgtagtgctctttaattcagctacatatattcatgtggtgatagggatcaacttgacacaactttgaaactgcataaagtagacataggaactagaggaaagctcaggctgcattagagtatgaatttagcattgggaaaagcccttattcttgaatctagagttactatttttgtatatatttgcatagtgtttaaacctgcagcctaaactactgaaatttgtgattgtatgtttgtgtgagcttcagtttaatgaaagattcataatggttctttgtattattataatacttggtgttggggtgttctttctgttttgttttttactttaattttgttttgattttttttttttttttttggcgggggtaggtgagggtttggagcatgtggtctttttaaaaaattgtaaccctctagaaaatatcaaagaaatgaaccagacgtggtttaaatagttgattttcctattttaacagtaccaactagttaattgggaaatgtaagttctgaatgttcacattgctttaccagtttggcactggaaccaagagcacatgtcgtggctggctacaaggttgtaaagcagaaaatcgaagtttaccatgtctgtaatgtgtacatgaagtgtcaatttagaacagttactaggataaactccattattgccatggctgtcatggtacccaagtgacttggaagatgcatttaaattactcagctgaaatcacttgatcatcttgtgccaagatatgctgttggtgcctgatagggattagtcttttaggtgccctgttctcctaccataattgtgaatgatttgtgagaagtgcaagccatgtttatcctgaatttttacttaataatttgtattactagtcatatgcatgtagctttctgtttacatcctatgccacatggtcttcatttatgccaggtaaactgtatttgaactatgtgcagctagctttgttttaatctgcttggcaaccagtgtagctgctgtaacaatctatcttattgttcaaatatataagagccaaactcttttccattccatctaaaatgttttcatttagtactcttctttcctcctactctatgaacttcaaaacaaaaacaaaactttgagagcagcacatgcatccaggtatttatagattattgccagtgtcttttctgtatgctataagcaagggagcttaggtgttatttctttaatttatgcttgaatctgaaaaattatttctgacttactccatggcctccttataataagtagaagttttatatataattaattttcagcattgggcactgaattaggacagtcctcatctcattgcttggcccttcaagcaacctagctaaaaggtgctgatattttatttagtactgccaacttcaagtgatttagatatctatctatctagatttctgaaccaagatatatttatagttcacttttgggtttttatacccacggtaggattctgcattccagcattaaatctgcttcattttagaacctttataaaagcaatagctggaatatactcccagttttaaaataaatgcctgattgatttaaagcaagtaggttatgctgaagtatataaagaagttttatattctctcaaaaatggtattatctttctttatttgctagattcttacaaatcttttaagagggctgtaacagttgctgctagtattagggttccacatcattctaatgtatagtttcaagtcttaatagacaatctgaattccactacatttcttttggctccaacattccttttagcttgaccagtctaatttaaaatgtgtttgttggaggtcattaacgttacttgtacaatgctgtcactgtgtgacatccatatgaattttggtatatatcaatcaatcaatcaatcacattgcattcaatcaatcagctgtgattgattgattatgcttagaaatactatagtaactagatgcagtgtgaattttttccattaacaaacaaacaagtcagtggcttaaatgtgattatggtcctgcaaggtgattcttgctaaaatatctaaacttttgttttgttttaactgaatcattttttaacttaaaaagctggaaaatatcaaatgctgttttttttttttcattgtcaacagtggtgtgtcattttatgtatgttcctaatgcttatggaactcctccaaaataaagttactcaaagagagcaaata

SEQ ID NO: 184047 - DNA, 5432 bp, Homo sapiens
  Payload ID: 16260
  Gene Symbol: SLC39A10
  Gene Name: solute carrier family 39 (zinc transporter), member 10
  Uniprot ID: Q9ULF5
  ENST ID: ENST00000409086
  CDS Start-End: 276-2771
agttgatcactctgaagctttttggctaaagcgtttgggtttagagcttccattactcattcgccttgcccaaggcctcagcaaccgacgttcgaaagccaggagaaaaggcgaatgataaagggcgctccacgcatgcgttaagaagccgccccaactcccccgcggcgttctttcttggaacaaaactagcgcggagccacggaactccgcagtttgcgtagacttgaatttcctattcctcggacgatccatgtggaatccgaaaaatagaaatgaaggtacatatgcacacaaaattttgcctcatttgtttgctgacatttatttttcatcattgcaaccattgccatgaagaacatgaccatggccctgaagcgcttcacagacagcatcgtggaatgacagaattggagccaagcaaattttcaaagcaagctgctgaaaatgaaaaaaaatactatattgaaaaactttttgagcgttatggtgaaaatggaagattatccttttttggtttggagaaacttttaacaaacttgggccttggagagagaaaagtagttgagattaatcatgaggatcttggccacgatcatgtttctcatttagatattttggcagttcaagagggaaagcattttcactcacataaccaccagcattcccataatcatttaaattcagaaaatcaaactgtgaccagtgtatccacaaaaagaaaccataaatgtgatccagagaaagagacagttgaagtgtctgtaaaatctgatgataaacatatgcatgaccataatcaccgcctacgtcatcaccatcgtttgcatcatcatcttgatcataacaacactcaccattttcataatgattccattactcccagtgagcgtggggagcctagcaatgaaccttcaacagagaccaataaaacccaggaacaatctgatgttaaactaccgaaaggaaagaggaagaaaaaagggaggaaaagtaatgaaaattctgaggttattacaccaggttttccccctaaccatgatcagggtgaacagtatgagcataatcgggtccacaaacctgatcgtgtacataacccaggtcattctcatgtacatcttccagaacgtaatggtcatgatcctggtcgtggacaccaagatcttgatcctgataatgaaggtgaacttcgacatactagaaagagagaagcaccacatgttaaaaataatgcaataatttctttgagaaaagatctaaatgaagatgaccatcatcatgaatgtttgaacgtcactcagttattaaaatactatggtcatggtgccaactctcccatctcaactgatttatttacatacctttgccctgcattgttatatcaaatcgacagcagactttgtattgagcattttgacaaacttttagttgaagatataaataaggataaaaacctggttcctgaagatgaggcaaatataggggcatcagcctggatttgtggtatcatttctatcactgtcattagcctgctttccttgctaggcgtgatcttggttcctatcattaaccaaggatgcttcaaattccttcttacattccttgttgcattagctgtaggaacaatgagtggagacgcccttcttcatctactgccccattctcagggtggacatgatcacagtcaccaacatgcacatgggcatggacattctcatggacatgaatctaacaagtttttggaagaatatgatgctgtattgaaaggacttgttgctctaggaggcatttacttgctatttatcattgaacactgcattagaatgtttaagcactacaaacaacaaagaggaaaacagaaatggtttatgaaacagaacacagaagaatcaactattggaagaaagctttcagatcacaagttaaacaatacaccagattctgactggcttcaactcaagcctcttgccggaactgatgactcggttgtttctgaagatcgacttaatgaaactgaactgacagatttagaaggccaacaagaatcccctcctaaaaattacctttgtatagaagaggagaaaatcatagaccattctcacagtgatggattacataccattcatgagcatgatctccatgctgctgcacataaccaccacggcgagaacaaaactgtgctgaggaagcataatcaccagtggcaccacaagcattctcatcattcccatggcccctgtcattctggatccgatctgaaagaaacaggaatagctaatatagcctggatggtgatcatgggggatggcatccacaacttcagtgatgggctcgcaattggtgcagctttcagtgctggattgacaggaggaatcagtacttctatagccgtcttctgtcatgaactgccacatgaattaggagattttgcagttcttcttaaagcaggcatgactgtaaagcaagcaattgtatacaacctcctctctgccatgatggcttacataggcatgctcataggcacagctgttggtcagtatgccaataacatcacactttggatctttgcagtcactgcaggcatgttcctctatgtagccttggtggatatgcttccagaaatgttgcatggtgatggtgacaatgaagaacatggcttttgtcctgtggggcaattcatccttcagaatttaggattgctctttggatttgccattatgctggtgattgccctctatgaagataaaattgtgtttgacatccagttttgacctttcccagtaatcactgttgattacgagaatgttaccatgcagctttgcatctgttccttgtactgtatgcacattgctcaaaggaaagtcagtggcttgcactacttacaagtttcatagatttgagcctaaccacaagaggctggtgcttagtactgttttccctgcacgtaggggtcttttaaaaatataaagcttgtgataaagagaggagaatatgggactccatgaaccagtgttgatatgtttgattaagacttttcacaaaataatcatataaaacactagtctctttattagtagaaacttctgtggctatgcagaaatagagatcgaaccaaaaaaaatcatttaaactttaaaaatattttaaatggactttggggagacattttttgtgtgttttaagaatgaattgtagtgctctttaattcagctacatatattcatgtggtgatagggatcaacttgacacaactttgaaactgcataaagtagacataggaactagaggaaagctcaggctgcattagagtatgaatttagcattgggaaaagcccttattcttgaatctagagttactatttttgtatatatttgcatagtgtttaaacctgcagcctaaactactgaaatttgtgattgtatgtttgtgtgagcttcagtttaatgaaagattcataatggttctttgtattattataatacttggtgttggggtgttctttctgttttgttttttactttaattttgttttgattttttttttttttttttggcgggggtaggtgagggtttggagcatgtggtctttttaaaaaattgtaaccctctagaaaatatcaaagaaatgaaccagacgtggtttaaatagttgattttcctattttaacagtaccaactagttaattgggaaatgtaagttctgaatgttcacattgctttaccagtttggcactggaaccaagagcacatgtcgtggctggctacaaggttgtaaagcagaaaatcgaagtttaccatgtctgtaatgtgtacatgaagtgtcaatttagaacagttactaggataaactccattattgccatggctgtcatggtacccaagtgacttggaagatgcatttaaattactcagctgaaatcacttgatcatcttgtgccaagatatgctgttggtgcctgatagggattagtcttttaggtgccctgttctcctaccataattgtgaatgatttgtgagaagtgcaagccatgtttatcctgaatttttacttaataatttgtattactagtcatatgcatgtagctttctgtttacatcctatgccacatggtcttcatttatgccaggtaaactgtatttgaactatgtgcagctagctttgttttaatctgcttggcaaccagtgtagctgctgtaacaatctatcttattgttcaaatatataagagccaaactcttttccattccatctaaaatgttttcatttagtactcttctttcctcctactctatgaacttcaaaacaaaaacaaaactttgagagcagcacatgcatccaggtatttatagattattgccagtgtcttttctgtatgctataagcaagggagcttaggtgttatttctttaatttatgcttgaatctgaaaaattatttctgacttactccatggcctccttataataagtagaagttttatatataattaattttcagcattgggcactgaattaggacagtcctcatctcattgcttggcccttcaagcaacctagctaaaaggtgctgatattttatttagtactgccaacttcaagtgatttagatatctatctatctagatttctgaaccaagatatatttatagttcacttttgggtttttatacccacggtaggattctgcattccagcattaaatctgcttcattttagaacctttataaaagcaatagctggaatatactcccagttttaaaataaatgcctgattgatttaaagcaagtaggttatgctgaagtatataaagaagttttatattctctcaaaaatggtattatctttctttatttgctagattcttacaaatcttttaagagggctgtaacagttgctgctagtattagggttccacatcattctaatgtatagtttcaagtcttaatagacaatctgaattccactacatttcttttggctccaacattccttttagcttgaccagtctaatttaaaatgtgtttgttggaggtcattaacgttacttgtacaatgctgtcactgtgtgacatccatatgaattttggtatatatcaatcaatcaatcaatcacattgcattcaatcaatcagctgtgattgattgattatgcttagaaatactatagtaactagatgcagtgtgaattttttccattaacaaacaaacaagtcagtggcttaaatgtgattatggtcctgcaaggtgattcttgctaaaatatctaaacttttgttttgttttaactgaatcattttttaacttaaaaagctggaaaatatcaaatgctgttttttttttttcattgtcaacagtggtgtgtcattttatgtatgttcctaatgcttatggaactcctccaaaataaagttactcaaagagagcaaata

SEQ ID NO: 184048 - DNA, 593 bp, Homo sapiens
  Payload ID: 16260
  Gene Symbol: SLC39A10
  Gene Name: solute carrier family 39 (zinc transporter), member 10
  ENST ID: ENST00000458054
  CDS Start-End: 216-593
attagatggggggctgcggcttggagaacactcacagttctgagttcagctgtggacggaataatgaagggcagctgcagaaggaggtagagctgcagattcagagcccctggacctgagaggcttcaataattgttacctgagttggattgaattgaaataaagaagtaaagatcctatatcatctactgaaatctttaaagggaaaaatagaaatgaaggtacatatgcacacaaaattttgcctcatttgtttgctgacatttatttttcatcattgcaaccattgccatgaagaacatgaccatggccctgaagcgcttcacagacagcatcgtggaatgacagaattggagccaagcaaattttcaaagcaagctgctgaaaatgaaaaaaaatactatattgaaaaactttttgagcgttatggtgaaaatggaagattatccttttttggtttggagaaacttttaacaaacttgggccttggagagagaaaagtagttgagattaatcatgaggatcttggccacgatcatgtttctcatttagatattttggcagttcaagagggaaagcattttcactcacat

SEQ ID NO: 184049 - DNA, 544 bp, Homo sapiens
  Payload ID: 16260
  Gene Symbol: SLC39A10
  Gene Name: solute carrier family 39 (zinc transporter), member 10
  ENST ID: ENST00000444421
  CDS Start-End: 112-231
gcggcgttctttcttggaacaaaactagcgcggagccacggaactccgcagtttgcgtagacttgaatttcctattcctcggacgatccatgtggaatccgaaaaatagaaatgaagaacgtaatggtcatgatcctggtcgtggacaccaagatcttgatcctgataatgaaggtgaacttcgacatactagaaagagagaagcaccacatgttaaaaataatgcaataatttctttgagaaaagatctaaatgaagatgaccatcatcatgaatgtttgaacgtcactcagttattaaaatactatggtcatggtgccaactctcccatctcaactgatttatttacatacctttgccctgcattgttatatcaaatcgacagcagactttgtattgagcattttgacaaacttttagttgaagatataaataaggataaaaacctggttcctgaagatgaggcaaatataggggcatcagcctggatttgtggtatcatttctatcactgtcattagcctgctttccttgctaggcgtgat

SEQ ID NO: 184050 - DNA, 4478 bp, Homo sapiens
  Payload ID: 16260
  Gene Symbol: SLC39A10
  Gene Name: solute carrier family 39 (zinc transporter), member 10
  ENST ID: ENST00000430412
  CDS Start-End: 166-285
gagtggaccttgtacgccgcaagcgtagcagggtgtcagacgcgccggtttctgcgacgcagttagcgcagtctgctttggtgaatacacgatttggtgcagccggggtttggtaccgagcggagaggagatgcacacggcactcgagtgtgaggaaaaatagaaatgaagaacgtaatggtcatgatcctggtcgtggacaccaagatcttgatcctgataatgaaggtgaacttcgacatactagaaagagagaagcaccacatgttaaaaataatgcaataatttctttgagaaaagatctaaatgaagatgaccatcatcatgaatgtttgaacgtcactcagttattaaaatactatggtcatggtgccaactctcccatctcaactgatttatttacatacctttgccctgcattgttatatcaaatcgacagcagactttgtattgagcattttgacaaacttttagttgaagatataaataaggataaaaacctggttcctgaagatgaggcaaatataggggcatcagcctggatttgtggtatcatttctatcactgtcattagcctgctttccttgctaggcgtgatcttggttcctatcattaaccaaggatgcttcaaattccttcttacattccttgttgcattagctgtaggaacaatgagtggagacgcccttcttcatctactgccccattctcagggtggacatgatcacagtcaccaacatgcacatgggcatggacattctcatggacatgaatctaacaagtttttggaagaatatgatgctgtattgaaaggacttgttgctctaggaggcatttacttgctatttatcattgaacactgcattagaatgtttaagcactacaaacaacaaagaggaaaacagaaatggtttatgaaacagaacacagaagaatcaactattggaagaaagctttcagatcacaagttaaacaatacaccagattctgactggcttcaactcaagcctcttgccggaactgatgactcggttgtttctgaagatcgacttaatgaaactgaactgacagatttagaaggccaacaagaatcccctcctaaaaattacctttgtatagaagaggagaaaatcatagaccattctcacagtgatggattacataccattcatgagcatgatctccatgctgctgcacataaccaccacggcgagaacaaaactgtgctgaggaagcataatcaccagtggcaccacaagcattctcatcattcccatggcccctgtcattctggatccgatctgaaagaaacaggaatagctaatatagcctggatggtgatcatgggggatggcatccacaacttcagtgatgggctcgcaattggtgcagctttcagtgctggattgacaggaggaatcagtacttctatagccgtcttctgtcatgaactgccacatgaattaggagattttgcagttcttcttaaagcaggcatgactgtaaagcaagcaattgtatacaacctcctctctgccatgatggcttacataggcatgctcataggcacagctgttggtcagtatgccaataacatcacactttggatctttgcagtcactgcaggcatgttcctctatgtagccttggtggatatgcttccagaaatgttgcatggtgatggtgacaatgaagaacatggcttttgtcctgtggggcaattcatccttcagaatttaggattgctctttggatttgccattatgctggtgattgccctctatgaagataaaattgtgtttgacatccagttttgacctttcccagtaatcactgttgattacgagaatgttaccatgcagctttgcatctgttccttgtactgtatgcacattgctcaaaggaaagtcagtggcttgcactacttacaagtttcatagatttgagcctaaccacaagaggctggtgcttagtactgttttccctgcacgtaggggtcttttaaaaatataaagcttgtgataaagagaggagaatatgggactccatgaaccagtgttgatatgtttgattaagacttttcacaaaataatcatataaaacactagtctctttattagtagaaacttctgtggctatgcagaaatagagatcgaaccaaaaaaaatcatttaaactttaaaaatattttaaatggactttggggagacattttttgtgtgttttaagaatgaattgtagtgctctttaattcagctacatatattcatgtggtgatagggatcaacttgacacaactttgaaactgcataaagtagacataggaactagaggaaagctcaggctgcattagagtatgaatttagcattgggaaaagcccttattcttgaatctagagttactatttttgtatatatttgcatagtgtttaaacctgcagcctaaactactgaaatttgtgattgtatgtttgtgtgagcttcagtttaatgaaagattcataatggttctttgtattattataatacttggtgttggggtgttctttctgttttgttttttactttaattttgttttgattttttttttttttttttggcgggggtaggtgagggtttggagcatgtggtctttttaaaaaattgtaaccctctagaaaatatcaaagaaatgaaccagacgtggtttaaatagttgattttcctattttaacagtaccaactagttaattgggaaatgtaagttctgaatgttcacattgctttaccagtttggcactggaaccaagagcacatgtcgtggctggctacaaggttgtaaagcagaaaatcgaagtttaccatgtctgtaatgtgtacatgaagtgtcaatttagaacagttactaggataaactccattattgccatggctgtcatggtacccaagtgacttggaagatgcatttaaattactcagctgaaatcacttgatcatcttgtgccaagatatgctgttggtgcctgatagggattagtcttttaggtgccctgttctcctaccataattgtgaatgatttgtgagaagtgcaagccatgtttatcctgaatttttacttaataatttgtattactagtcatatgcatgtagctttctgtttacatcctatgccacatggtcttcatttatgccaggtaaactgtatttgaactatgtgcagctagctttgttttaatctgcttggcaaccagtgtagctgctgtaacaatctatcttattgttcaaatatataagagccaaactcttttccattccatctaaaatgttttcatttagtactcttctttcctcctactctatgaacttcaaaacaaaaacaaaactttgagagcagcacatgcatccaggtatttatagattattgccagtgtcttttctgtatgctataagcaagggagcttaggtgttatttctttaatttatgcttgaatctgaaaaattatttctgacttactccatggcctccttataataagtagaagttttatatataattaattttcagcattgggcactgaattaggacagtcctcatctcattgcttggcccttcaagcaacctagctaaaaggtgctgatattttatttagtactgccaacttcaagtgatttagatatctatctatctagatttctgaaccaagatatatttatagttcacttttgggtttttatacccacggtaggattctgcattccagcattaaatctgcttcattttagaacctttataaaagcaatagctggaatatactcccagttttaaaataaatgcctgattgatttaaagcaagtaggttatgctgaagtatataaagaagttttatattctctcaaaaatggtattatctttctttatttgctagattcttacaaatcttttaagagggctgtaacagttgctgctagtattagggttccacatcattctaatgtatagtttcaagtcttaatagacaatctgaattccactacatttcttttggctccaacattccttttagcttgaccagtctaatttaaaatgtgtttgttggaggtcattaacgttacttgtacaatgctgtcactgtgtgacatccatatgaattttggtatatatcaatcaatcaatcaatcacattgcattcaatcaatcagctgtgattgattgattatgcttagaaatactatagtaactagatgcagtgtgaattttttccattaacaaacaaacaagtcagtggcttaaatgtgattatggtcctgcaaggtgattcttgctaaaatatctaaacttttgttttgttttaactgaatcattttttaacttaaaaagctggaaaatatcaaatgctgttttttttttttcattgtcaacagtggtgtgtcattttatgtatgttcctaatgcttatggaactcctccaaaataaagttactcaaagagagcaaata

SEQ ID NO: 184051 - DNA, 337 bp, Homo sapiens
  Payload ID: 16260
  Gene Symbol: SLC39A10
  Gene Name: solute carrier family 39 (zinc transporter), member 10
  ENST ID: ENST00000412905
  CDS Start-End: 222-337
cttgtacgccgcaagcgtagcagggtgtcagacgcgccggtttctgcgacgcagttagcgcagtctgctttggtgaatacacgatttggtgcagccggggtttggtaccgagcggagaggagatgcacacggcactcgagtgtgagagatcctctttgtgctgtcgatggaaaagattgttaacatctactggaatgcttgggaaactctgaaaaatagaaatgaaggtacatatgcacacaaaattttgcctcatttgtttgctgacatttatttttcatcattgcaaccattgccatgaagaacatgaccatggccctgaagcgcttcacagaca

SEQ ID NO: 184052 - DNA, 563 bp, Homo sapiens
  Payload ID: 16260
  Gene Symbol: SLC39A10
  Gene Name: solute carrier family 39 (zinc transporter), member 10
  ENST ID: ENST00000418005
  CDS Start-End: 173-563
gcagtcggcggcggccagccgaagcagagcgcgtggtgggcagagtgttgggcgccgcggctcctcgtgtgcggtctgggctgctgcgggccgcgggatcgggagccggcggcatccacttcgcgtgcggagcctcgcgcccccctcaccttcctgtggaggaaaaatagaaatgaaggtacatatgcacacaaaattttgcctcatttgtttgctgacatttatttttcatcattgcaaccattgccatgaagaacatgaccatggccctgaagcgcttcacagacagcatcgtggaatgacagaattggagccaagcaaattttcaaagcaagctgctgaaaatgaaaaaaaatactatattgaaaaactttttgagcgttatggtgaaaatggaagattatccttttttggtttggagaaacttttaacaaacttgggccttggagagagaaaagtagttgagattaatcatgaggatcttggccacgatcatgtttctcatttagatattttggcagttcaagagggaaagcattttcactcacataaccaccagcatt

SEQ ID NO: 184053 - DNA, 2808 bp, Homo sapiens
  Payload ID: 16261
  Gene Symbol: SLC39A12
  Gene Name: solute carrier family 39 (zinc transporter), member 12
  Uniprot ID: Q504Y0
  ENST ID: ENST00000377369
  CDS Start-End: 274-2349
ttgttaccttcagagcagctctctccatagcaactgaaaacttttctgggctgaaataatcctctctagctcccagtgcacagtcaaagaattttaaaaacagggaactttgtaactgtgaaatactctccaggatttaaaaggctgtggagctccagataaagaatcgtttatctttcttctgaagaaattcctttggttacaagtttaccccataaacggcaacacactcacctccatccaagacagactcaaggtggaggaagcgtggaaatgtgcttccggacaaagctctcagtatcctgggtgccattgtttcttctactcagccgtgttttttctactgagacagacaaaccctcagcccaggatagcagaagccgtgggagttcaggccaaccggcagacctgctacaggttctctctgctggtgaccacccaccccacaaccactcaagaagcctcatcaaaacattgttggagaaaactgggtgcccacggaggagaaacggaatgcaaggagattgcaatctgtgctttgaaccagatgcactattactaatagctggaggaaattttgaagatcagcttagagaagaagtggtccagagagtttctcttctccttctctattacattattcatcaggaagagatctgttcttcaaagctcaacatgagtaataaagagtataaattttacctacacagcctactgagcctcaggcaggatgaagattcctctttcctttcacagaatgagacagaagatatcttggctttcaccaggcagtactttgacacttctcaaagccagtgtatggaaaccaaaacgctgcagaaaaaatctggaatagtgagcagtgaaggtgctaatgaaagtacgcttcctcagttggcagccatgatcattactttgtccctccagggtgtttgtctgggacaaggaaacttgccttccccagactactttacagaatatattttcagttccttgaatcgtacgaataccctccgcctatcagaactagaccaactcctcaacactctctggaccagaagtacttgtatcaaaaatgagaaaatccatcaatttcaaaggaaacaaaacaacataataacccatgatcaggactattctaatttctcttcatccatggaaaaagagtctgaggatggtccagtttcctgggatcagacctgcttctctgctaggcagctggtggagatatttctacagaagggcctctcactcatttctaaggaggactttaagcaaatgagtccagggatcatccagcagctcctcagctgctcctgccacttacccaaggaccaacaagcaaagctgccacctaccactctggagaaatacggctacagcacggtggctgtcacccttctcacactgggctccatgctggggacagcgctggtccttttccatagctgtgaggagaactacaggcttatcttacagctgtttgtgggcttggccgtcgggacactgtctggggacgctctgctccaccttatccctcaggttcttggtttacataagcaggaagccccagaatttgggcatttccatgaaagcaaaggtcatatttggaaactgatgggattaattggaggcatccatggatttttcttgatagaaaaatgttttattcttcttgtatcaccaaatgacaagcagggcctgtcattggttaatgggcacgtgggtcattcccaccatcttgcactcaactctgaattaagtgaccaggcaggcagaggcaaatctgcttcaactatccagttgaaaagcccagaagattcacaggcagctgaaatgcctataggcagtatgacagcctccaacagaaaatgtaaagccattagcttgttagcaatcatgattctggttggggacagcctgcataattttgcagatggcctagccataggagcagccttctcatcatcatccgagtcaggagtgaccactacgattgctatcttgtgtcatgaaatcccacatgaaatgggagactttgccgtgctcttaagctctggactttctatgaagactgccatcctgatgaattttataagctccctaactgccttcatgggattatacattggcctttccgtgtcagctgatccatgtgttcaagactggatcttcacagtcactgctgggatgttcttatatttatccttggttgaaatgcttcctgaaatgactcatgttcaaacacaacgaccctggatgatgtttctcctgcaaaactttggattgatcctaggttggctttctctcctgctcttggctatatatgagcaaaatattaaaatataagtgaggatcttcaacatctttcaaaaatgcatttatatagtcttactttgtttctttcattgcactctataatgatttttaaattaagaattttttatcttaggcaaagtgtgtctctttcaattcattaacttattaattttataatgcagttttatttttggaaacatataaatatcagactgtccttaattgaaattttgtctttggtttccaacaccatgatgaagctcttgctttttaaaaagtagttagtaaattctgcatgaattttagtaaactttaaaaaatagattttttccctaagaaagaatgtttgtagaatttaaagtggacagatgcctgttggagtaaaatcaactgcaactttttgatgttaatttttttccctgtgcaattataaactataagcaagttaagtgacaagcaaatgtaataaagactagttttaatatggtg

SEQ ID NO: 184054 - DNA, 2725 bp, Homo sapiens
  Payload ID: 16261
  Gene Symbol: SLC39A12
  Gene Name: solute carrier family 39 (zinc transporter), member 12
  Uniprot ID: Q504Y0
  ENST ID: ENST00000377371
  CDS Start-End: 199-2271
gtgcacagtcaaagaattttaaaaacagggaactttgtaactgtgaaatactctccaggatttaaaaggctgtggagctccagataaagaatcgtttatctttcttctgaagaaattcctttggttacaagtttaccccataaacggcaacacactcacctccatccaagacagactcaaggtggaggaagcgtggaaatgtgcttccggacaaagctctcagtatcctgggtgccattgtttcttctactcagccgtgttttttctactgagacagacaaaccctcagcccaggatagcagaagccgtgggagttcaggccaaccggcagacctgctacaggttctctctgctggtgaccacccaccccacaaccactcaagaagcctcatcaaaacattgttggagaaaactgggtgcccacggaggagaaacggaatgcaaggagattgcaatctgtgctttgaaccagatgcactattactaatagctggaggaaattttgaagatcagcttagagaagaagtggtccagagagtttctcttctccttctctattacattattcatcaggaagagatctgttcttcaaagctcaacatgagtaataaagagtataaattttacctacacagcctactgagcctcaggcaggatgaagattcctctttcctttcacagaatgagacagaagatatcttggctttcaccaggcagtactttgacacttctcaaagccagtgtatggaaaccaaaacgctgcagaaaaaatctggaatagtgagcagtgaaggtgctaatgaaagtacgcttcctcagttggcagccatgatcattactttgtccctccagggtgtttgtctgggacaaggaaacttgccttccccagactactttacagaatatattttcagttccttgaatcgtacgaataccctccgcctatcagaactagaccaactcctcaacactctctggaccagaagtacttgtatcaaaaatgagaaaatccatcaatttcaaaggaaacaaaacaacataataacccatgatcaggactattctaatttctcttcatccatggaaaaagagtctgaggatggtccagtttcctgggatcagacctgcttctctgctaggcagctggtggagatatttctacagaagggcctctcactcatttctaaggaggactttaagcaaatgagtccagggatcatccagcagctcctcagctgctcctgccacttacccaaggaccaacaagcaaagctgccacctaccactctggagaaatacggctacagcacggtggctgtcacccttctcacactgggctccatgctggggacagcgctggtccttttccatagctgtgaggagaactacaggcttatcttacagctgtttgtgggcttggccgtcgggacactgtctggggacgctctgctccaccttatccctcaggttcttggtttacataagcaggaagccccagaatttgggcatttccatgaaagcaaaggtcatatttggaaactgatgggattaattggaggcatccatggatttttcttgatagaaaaatgttttattcttcttgtatcaccaaatgacaagggcctgtcattggttaatgggcacgtgggtcattcccaccatcttgcactcaactctgaattaagtgaccaggcaggcagaggcaaatctgcttcaactatccagttgaaaagcccagaagattcacaggcagctgaaatgcctataggcagtatgacagcctccaacagaaaatgtaaagccattagcttgttagcaatcatgattctggttggggacagcctgcataattttgcagatggcctagccataggagcagccttctcatcatcatccgagtcaggagtgaccactacgattgctatcttgtgtcatgaaatcccacatgaaatgggagactttgccgtgctcttaagctctggactttctatgaagactgccatcctgatgaattttataagctccctaactgccttcatgggattatacattggcctttccgtgtcagctgatccatgtgttcaagactggatcttcacagtcactgctgggatgttcttatatttatccttggttgaaatgcttcctgaaatgactcatgttcaaacacaacgaccctggatgatgtttctcctgcaaaactttggattgatcctaggttggctttctctcctgctcttggctatatatgagcaaaatattaaaatataagtgaggatcttcaacatctttcaaaaatgcatttatatagtcttactttgtttctttcattgcactctataatgatttttaaattaagaattttttatcttaggcaaagtgtgtctctttcaattcattaacttattaattttataatgcagttttatttttggaaacatataaatatcagactgtccttaattgaaattttgtctttggtttccaacaccatgatgaagctcttgctttttaaaaagtagttagtaaattctgcatgaattttagtaaactttaaaaaatagattttttccctaagaaagaatgtttgtagaatttaaagtggacagatgcctgttggagtaaaatcaactgcaactttttgatgttaatttttttccctgtgcaattataaactataagcaagttaagtgacaagcaaatgtaataaagactagttttaata

SEQ ID NO: 184055 - DNA, 2639 bp, Homo sapiens
  Payload ID: 16261
  Gene Symbol: SLC39A12
  Gene Name: solute carrier family 39 (zinc transporter), member 12
  Uniprot ID: Q504Y0
  ENST ID: ENST00000377374
  CDS Start-End: 221-2185
aaataatcctctctagctcccagtgcacagtcaaagaattttaaaaacagggaactttgtaactgtgaaatactctccaggatttaaaaggctgtggagctccagataaagaatcgtttatctttcttctgaagaaattcctttggttacaagtttaccccataaacggcaacacactcacctccatccaagacagactcaaggtggaggaagcgtggaaatgtgcttccggacaaagctctcagtatcctgggtgccattgtttcttctactcagccgtgttttttctactgagacagacaaaccctcagcccaggatagcagaagccgtgggagttcaggccaaccggcagacctgctacaggttctctctgctggtgaccacccaccccacaaccactcaagaagcctcatcaaaacattgttggagaaaactgggtgcccacggaggagaaacggaatgcaaggagattgcaatctgtgctttgaaccagatgcactattactaatagctggaggaaattttgaagatcagcttagagaagaagtggtccagagagtttctcttctccttctctattacattattcatcaggaagagatctgttcttcaaagctcaacatgagtaataaagagtataaattttacctacacagcctactgagcctcaggcaggatgaagattcctctttcctttcacagaatgagacagaagatatcttggctttcaccaggcagtactttgacacttctcaaagccagtgtatggaaaccaaaacgctgcagaaaaaatctggaatagtgagcagtgaaggtgctaatgaaagtacgcttcctcagttggcagccatgatcattactttgtccctccagggtgtttgtctgggacaaggaaacttgccttccccagactactttacagaatatattttcagttccttgaatcgtacgaataccctccgcctatcagaactagaccaactcctcaacactctctggaccagaagtacttgtatcaaaaatgagaaaatccatcaatttcaaaggaaacaaaacaacataataacccatgatcaggactattctaatttctcttcatccatggaaaaagagtctgaggatggtccagtttcctgggatcagacctgcttctctgctaggcagctggtggagatatttctacagaagggcctctcactcatttctaaggaggactttaagcaaatgagtccagggatcatccagcagctcctcagctgctcctgccacttacccaaggaccaacaagcaaagctgccacctaccactctggagaaatacggctacagcacggtggctgtcacccttctcacactgggctccatgctggggacagcgctggtccttttccatagctgtgaggagaactacaggcttatcttacagctgtttgtgggcttggccgtcgggacactgtctggggacgctctgctccaccttatccctcaggttcttggtttacataagcaggaagccccagaatttgggcatttccatgaaagcaaaggtcatatttggaaactgatgggattaattggaggcatccatggatttttcttgatagaaaaatgttttattcttcttgtatcaccaaatgacaagaaaagcccagaagattcacaggcagctgaaatgcctataggcagtatgacagcctccaacagaaaatgtaaagccattagcttgttagcaatcatgattctggttggggacagcctgcataattttgcagatggcctagccataggagcagccttctcatcatcatccgagtcaggagtgaccactacgattgctatcttgtgtcatgaaatcccacatgaaatgggagactttgccgtgctcttaagctctggactttctatgaagactgccatcctgatgaattttataagctccctaactgccttcatgggattatacattggcctttccgtgtcagctgatccatgtgttcaagactggatcttcacagtcactgctgggatgttcttatatttatccttggttgaaatgcttcctgaaatgactcatgttcaaacacaacgaccctggatgatgtttctcctgcaaaactttggattgatcctaggttggctttctctcctgctcttggctatatatgagcaaaatattaaaatataagtgaggatcttcaacatctttcaaaaatgcatttatatagtcttactttgtttctttcattgcactctataatgatttttaaattaagaattttttatcttaggcaaagtgtgtctctttcaattcattaacttattaattttataatgcagttttatttttggaaacatataaatatcagactgtccttaattgaaattttgtctttggtttccaacaccatgatgaagctcttgctttttaaaaagtagttagtaaattctgcatgaattttagtaaactttaaaaaatagattttttccctaagaaagaatgtttgtagaatttaaagtggacagatgcctgttggagtaaaatcaactgcaactttttgatgttaatttttttccctgtgcaattataaactataagcaagttaagtgacaagcaaatgtaataaagactagttttaata

SEQ ID NO: 184056 - DNA, 2461 bp, Homo sapiens
  Payload ID: 16261
  Gene Symbol: SLC39A12
  Gene Name: solute carrier family 39 (zinc transporter), member 12
  Uniprot ID: Q504Y0
  ENST ID: ENST00000539911
  CDS Start-End: 329-2002
ttgttaccttcagagcagctctctccatagcaactgaaaacttttctgggctgaaataatcctctctagctcccagtgcacagtcaaagaattttaaaaacagggaactttgtaactgtgaaatactctccaggatttaaaaggctgtggagctccagataaagaatcgtttatctttcttctgaagtgctttgaaccagatgcactattactaatagctggaggaaattttgaagatcagcttagagaagaagtggtccagagagtttctcttctccttctctattacattattcatcaggaagagatctgttcttcaaagctcaacatgagtaataaagagtataaattttacctacacagcctactgagcctcaggcaggatgaagattcctctttcctttcacagaatgagacagaagatatcttggctttcaccaggcagtactttgacacttctcaaagccagtgtatggaaaccaaaacgctgcagaaaaaatctggaatagtgagcagtgaaggtgctaatgaaagtacgcttcctcagttggcagccatgatcattactttgtccctccagggtgtttgtctgggacaaggaaacttgccttccccagactactttacagaatatattttcagttccttgaatcgtacgaataccctccgcctatcagaactagaccaactcctcaacactctctggaccagaagtacttgtatcaaaaatgagaaaatccatcaatttcaaaggaaacaaaacaacataataacccatgatcaggactattctaatttctcttcatccatggaaaaagagtctgaggatggtccagtttcctgggatcagacctgcttctctgctaggcagctggtggagatatttctacagaagggcctctcactcatttctaaggaggactttaagcaaatgagtccagggatcatccagcagctcctcagctgctcctgccacttacccaaggaccaacaagcaaagctgccacctaccactctggagaaatacggctacagcacggtggctgtcacccttctcacactgggctccatgctggggacagcgctggtccttttccatagctgtgaggagaactacaggcttatcttacagctgtttgtgggcttggccgtcgggacactgtctggggacgctctgctccaccttatccctcaggttcttggtttacataagcaggaagccccagaatttgggcatttccatgaaagcaaaggtcatatttggaaactgatgggattaattggaggcatccatggatttttcttgatagaaaaatgttttattcttcttgtatcaccaaatgacaagcagggcctgtcattggttaatgggcacgtgggtcattcccaccatcttgcactcaactctgaattaagtgaccaggcaggcagaggcaaatctgcttcaactatccagttgaaaagcccagaagattcacaggcagctgaaatgcctataggcagtatgacagcctccaacagaaaatgtaaagccattagcttgttagcaatcatgattctggttggggacagcctgcataattttgcagatggcctagccataggagcagccttctcatcatcatccgagtcaggagtgaccactacgattgctatcttgtgtcatgaaatcccacatgaaatgggagactttgccgtgctcttaagctctggactttctatgaagactgccatcctgatgaattttataagctccctaactgccttcatgggattatacattggcctttccgtgtcagctgatccatgtgttcaagactggatcttcacagtcactgctgggatgttcttatatttatccttggttgaaatgcttcctgaaatgactcatgttcaaacacaacgaccctggatgatgtttctcctgcaaaactttggattgatcctaggttggctttctctcctgctcttggctatatatgagcaaaatattaaaatataagtgaggatcttcaacatctttcaaaaatgcatttatatagtcttactttgtttctttcattgcactctataatgatttttaaattaagaattttttatcttaggcaaagtgtgtctctttcaattcattaacttattaattttataatgcagttttatttttggaaacatataaatatcagactgtccttaattgaaattttgtctttggtttccaacaccatgatgaagctcttgctttttaaaaagtagttagtaaattctgcatgaattttagtaaactttaaaaaatagattttttccctaagaaagaatgtttgtagaatttaaagtggacagatgcctgttggagtaaaatcaactgcaactttttgatgttaatttttttccctgtgcaattataaactataagcaagttaagtgacaagcaaatgtaataaagactagttttaatatggtg

SEQ ID NO: 184057 - DNA, 2289 bp, Homo sapiens
  Payload ID: 16262
  Gene Symbol: SLC39A13
  Gene Name: solute carrier family 39 (zinc transporter), member 13
  Uniprot ID: Q96H72
  ENST ID: ENST00000354884
  CDS Start-End: 62-1156
gccgcccggatcgccgccgccgccgccgcacggtggccttttgtgtttttcagtacgtggcatgcctggatgtccctgccctggctgtggcatggcgggcccaaggctcctcttcctcactgcccttgccctggagctcttggaaagggctgggggttcccagccggccctccggagccgggggactgcgacggcctgtcgcctggacaacaaggaaagcgagtcctggggggctctgctgagcggagagcggctggacacctggatctgctccctcctgggttccctcatggtggggctcagtggggtcttcccgttgcttgtcattcccctagagatggggaccatgctgcgctcagaagctggggcctggcgcctgaagcagctgctcagcttcgccctggggggactcttgggcaatgtgtttctgcatctgctgcccgaagcctgggcctacacgtgcagcgccagccctggtggtgaggggcagagcctgcagcagcagcaacagctggggctgtgggtcattgctggcatcctgaccttcctggcgttggagaagatgttcctggacagcaaggaggaggggaccagccaggcccccaacaaagaccccactgctgctgccgccgcgctcaatggaggccactgtctggcccagccggctgcagagcccggcctcggtgccgtggtccggagcatcaaagtcagcggctacctcaacctgctggccaacaccatcgataacttcacccacgggctggctgtggctgccagcttccttgtgagcaagaagatcgggctcctgacaaccatggccatcctcctgcatgagatcccccatgaggtgggcgactttgccatcctgctccgggccggctttgaccgatggagcgcagccaagctgcaactctcaacagcgctggggggcctactgggcgctggcttcgccatctgtacccagtcccccaagggagtagaggagacggcagcctgggtcctgcccttcacctctggcggctttctctacatcgccttggtgaacgtgctccctgacctcttggaagaagaggacccgtggcgctccctgcagcagctgcttctgctctgtgcgggcatcgtggtaatggtgctgttctcgctcttcgtggattaactttccctgatgccgacgcccctgccccctgcagcaataagatgctcggattcactctgtgaccgcatatgtgagaggcagagagggcgagtggctgcgagagagaatgagcctcccgccagacaggagggaggtgcgtgtggatgtatgtggtgtgcacatgtggccagaggtgtgtgcgcgagaccgacactgtgatccctgtgctgggtccggggcccagtgtagcgcctgtccccagccatgctgtggttacctctccttgccgccctgtcaccttcacctcccggagtaagcagcgaggaagagcagcactggtcccaagcagaggccttgccctgctgggaccccgggagtgagagcagcccaaggatccagggtgcagggaactccagagctgcccacctcccactgccccctcagcacacacacagtccccaggcggcctaggggccaaggctggggcggctttggtcccttttcctggcccttccttccccacttctaagccaaagaaaggagaggcaggtgctcctgtaccccagccccactcagcactgacagtccccagctcctagtagtgagctgggaggcgcttcctaagaccctttcctcagggctgccctgggagctcattcctggccaacacgccctggcagcaccagcagctcttgccacctccagctgccaaacagcagcctgccgggcagggagcagccccaggccagagaggcctcccggtccagctcagggatgctcctgccagcacaggggccagggactcctggagcaggcacatagtgagcccgggcagccctgcccagctcaggcccctttccttccccattgaggttggggtaggtgggggcggtgagggctccacgttgtcagcgctcaggaatgtgctccggcagagtgctgaagccataatccccaaccatttcccttggctgacgcccaggtactcagctggcccactccacagccaggcctggccctgcccttcaccgtggatgttttcagaagtggccatcgagaggtctggatggttttatagcaactttgctgtgattccgtttgtatctgtaaatatttgttctatagataagatacaaataaatattatccacata

SEQ ID NO: 184058 - DNA, 2296 bp, Homo sapiens
  Payload ID: 16262
  Gene Symbol: SLC39A13
  Gene Name: solute carrier family 39 (zinc transporter), member 13
  Uniprot ID: Q96H72
  ENST ID: ENST00000362021
  CDS Start-End: 43-1158
gggccgcccggatcgccgccgccgccgccgcacgtacgtggcatgcctggatgtccctgccctggctgtggcatggcgggcccaaggctcctcttcctcactgcccttgccctggagctcttggaaagggctgggggttcccagccggccctccggagccgggggactgcgacggcctgtcgcctggacaacaaggaaagcgagtcctggggggctctgctgagcggagagcggctggacacctggatctgctccctcctgggttccctcatggtggggctcagtggggtcttcccgttgcttgtcattcccctagagatggggaccatgctgcgctcagaagctggggcctggcgcctgaagcagctgctcagcttcgccctggggggactcttgggcaatgtgtttctgcatctgctgcccgaagcctgggcctacacgtgcagcgccagccctggtggtgaggggcagagcctgcagcagcagcaacagctggggctgtgggtcattgctggcatcctgaccttcctggcgttggagaagatgttcctggacagcaaggaggaggggaccagccaggcccccaacaaagaccccactgctgctgccgccgcgctcaatggaggccactgtctggcccagccggctgcagagcccggcctcggtgccgtggtccggagcatcaaagtcagcggctacctcaacctgctggccaacaccatcgataacttcacccacgggctggctgtggctgccagcttccttgtgagcaagaagatcgggctcctgacaaccatggccatcctcctgcatgagatcccccatgaggtgggcgactttgccatcctgctccgggccggctttgaccgatggagcgcagccaagctgcaactctcaacagcgctggggggcctactgggcgctggcttcgccatctgtacccagtcccccaagggagtagttgggtgttctcccgctgcagaggagacggcagcctgggtcctgcccttcacctctggcggctttctctacatcgccttggtgaacgtgctccctgacctcttggaagaagaggacccgtggcgctccctgcagcagctgcttctgctctgtgcgggcatcgtggtaatggtgctgttctcgctcttcgtggattaactttccctgatgccgacgcccctgccccctgcagcaataagatgctcggattcactctgtgaccgcatatgtgagaggcagagagggcgagtggctgcgagagagaatgagcctcccgccagacaggagggaggtgcgtgtggatgtatgtggtgtgcacatgtggccagaggtgtgtgcgcgagaccgacactgtgatccctgtgctgggtccggggcccagtgtagcgcctgtccccagccatgctgtggttacctctccttgccgccctgtcaccttcacctcccggagtaagcagcgaggaagagcagcactggtcccaagcagaggccttgccctgctgggaccccgggagtgagagcagcccaaggatccagggtgcagggaactccagagctgcccacctcccactgccccctcagcacacacacagtccccaggcggcctaggggccaaggctggggcggctttggtcccttttcctggcccttccttccccacttctaagccaaagaaaggagaggcaggtgctcctgtaccccagccccactcagcactgacagtccccagctcctagtagtgagctgggaggcgcttcctaagaccctttcctcagggctgccctgggagctcattcctggccaacacgccctggcagcaccagcagctcttgccacctccagctgccaaacagcagcctgccgggcagggagcagccccaggccagagaggcctcccggtccagctcagggatgctcctgccagcacaggggccagggactcctggagcaggcacatagtgagcccgggcagccctgcccagctcaggcccctttccttccccattgaggttggggtaggtgggggcggtgagggctccacgttgtcagcgctcaggaatgtgctccggcagagtgctgaagccataatccccaaccatttcccttggctgacgcccaggtactcagctggcccactccacagccaggcctggccctgcccttcaccgtggatgttttcagaagtggccatcgagaggtctggatggttttatagcaactttgctgtgattccgtttgtatctgtaaatatttgttctatagataagatacaaataaatattatccacatactggc

SEQ ID NO: 184059 - DNA, 785 bp, Homo sapiens
  Payload ID: 16262
  Gene Symbol: SLC39A13
  Gene Name: solute carrier family 39 (zinc transporter), member 13
  ENST ID: ENST00000531419
  CDS Start-End: 67-720
cgcggcaccgcagctggatggctggggccgcccggatcgccgccgccgccgccgcacgtacgtggcatgcctggatgtccctgccctggctgtggcatggcgggcccaaggctcctcttcctcactgcccttgccctggagctcttggaaagggctgggggttcccagccggccctccggagccgggggactgcgacggcctgtcgcctggacaacaaggaaagcgagtcctggggggctctgctgagcggagagcggctggacacctggatctgctccctcctgggttccctcatggtggggctcagtggggtcttcccgttgcttgtcattcccctagagatggggaccatgctgcgctcagaagctggggcctggcgcctgaagcagctgctcagcttcgccctggggggactcttgggcaatgtgtttctgcatctgctgcccgaagcctgggcctacacgtgcagcgccagccctggtggtgaggggcagagcctgcagcagcagcaacagctggggctgtgggtcattgctggcatcctgaccttcctggcgttggagaagatgttcctggacagcaaggaggaggggaccagccaggtcagcggctacctcaacctgctggccaacaccatcgataacttcacccacgggctggctgtggctgccagcttccttgtgagcaagaaggtgaggggcttggggccagtggggctctggcgattccagtggcagccatgtggattccacctgtgtctggagtctctgcttcttgcccctcc

SEQ ID NO: 184060 - DNA, 827 bp, Homo sapiens
  Payload ID: 16262
  Gene Symbol: SLC39A13
  Gene Name: solute carrier family 39 (zinc transporter), member 13
  ENST ID: ENST00000526614
  CDS Start-End: 82-827
ggggacattggtctcatgtcctaggaagaagcgtggatggtcttgccctggctcatctgctcagtttccccactacgtggcatgcctggatgtccctgccctggctgtggcatggcgggcccaaggctcctcttcctcactgcccttgccctggagctcttggaaagggctgggggttcccagccggccctccggagccgggggactgcgacggcctgtcgcctggacaacaaggaaagcgagtcctggggggctctgctgagcggagagcggctggacacctggatctgctccctcctgggttccctcatggtggggctcagtggggtcttcccgttgcttgtcattcccctagagatggggaccatgctgcgctcagaagctggggcctggcgcctgaagcagctgctcagcttcgccctggggggactcttgggcaatgtgtttctgcatctgctgcccgaagcctgggcctacacgtgcagcgccagccctggtggtgaggggcagagcctgcagcagcagcaacagctggggctgtgggtcattgctggcatcctgaccttcctggcgttggagaagatgttcctggacagcaaggaggaggggaccagccaggcccccaacaaagaccccactgctgctgccgccgcgctcaatggaggccactgtctggcccagccggctgcagagcccggcctcggtgccgtggtccggagcatcaaagtcagcggctacctcaacctgctggccaacaccatcgataacttcacccacgggctggctgtggctgccagcttccttgtgagcaagaaggtgaggggctt

SEQ ID NO: 184061 - DNA, 1805 bp, Homo sapiens
  Payload ID: 16262
  Gene Symbol: SLC39A13
  Gene Name: solute carrier family 39 (zinc transporter), member 13
  ENST ID: ENST00000533076
  CDS Start-End: 411-1388
ataagatggagcgcttttgcatacagggaggggggcattttagaagtcctagggcaggatccctgagtagcttttctttgccaagaaactaacccagggattccattttggaactcagggagggaacagaacgtcctggcagttgtatgggcccggtggggtgagatggacagaaagcttcagaagacaagctgggccaccagggagaagttggcggtctaaggaaggccaacagtgcaacatgaagtgggacaggcaccagaggcagccctgagagctgagtgtgctctcaagagccccagcagaggggaaagtgacagagtaaatggttggagctgccatgggaggctgatgagggtcagagacttaagagacctgtactcagtcgctatctctgcccaatacgtggcatgcctggatgtccctgccctggctgtggcatggcgggcccaaggctcctcttcctcactgcccttgccctggagctcttggaaagggctgggggttcccagccggccctccggagccgggggactgcgacggcctgtcgcctggacaacaaggaaagcgagtcctggggggctctgctgagcggagagcggctggacacctggatctgctccctcctgggttccctcatggtggggctcagtggggtcttcccgttgcttgtcattcccctagagatggggaccatgctgcgctcagaagctggggcctggcgcctgaagcagctgctcagcttcgccctggggggactcttgggcaatgtgtttctgcatctgctgcccgaagcctgggcctacacgtgcagcgccagccctggtggtgaggggcagagcctgcagcagcagcaacagctggggctgtgggtcattgctggcatcctgaccttcctggcgttggagaagatgttcctggacagcaaggaggaggggaccagccaggcccccaacaaagaccccactgctgctgccgccgcgctcaatggaggccactgtctggcccagccggctgcagagcccggcctcggtgccgtggtccggagcatcaaagtcagcggctacctcaacctgctggccaacaccatcgataacttcacccacgggctggctgtggctgccagcttccttgtgagcaagaagatcgggctcctgacaaccatggccatcctcctgcatgagatcccccatgaggtgggcgactttgccatcctgctccgggccggctttgaccgatggagcgcagccaagctgcaactctcaacagcgctggggggcctactgggcgctggcttcgccatctgtacccagtcccccaagggaaggagacggcagcctgggtcctgcccttcacctctggcggctttctctacatcgccttggtgaacgtgctccctgacctcttggaagaagaggacccgtggcgctccctgcagcagctgcttctgctctgtgcgggcatcgtggtaatggtgctgttctcgctcttcgtggattaactttccctgatgccgacgcccctgccccctgcagcaataagatgctcggattcactctgtgaccgcatatgtgagaggcagagagggcgagtggctgcgagagagaatgagcctcccgccagacaggagggaggtactcagctggcccactccacagccaggcctggccctgcccttcaccgtggatgttttcagaagtggccatcgagaggtctggatggttttatagcaactttgctgtgattccgtttgtatctgtaaatatttgttctatagataagatacaaataaatattatccacat

SEQ ID NO: 184062 - DNA, 846 bp, Homo sapiens
  Payload ID: 16262
  Gene Symbol: SLC39A13
  Gene Name: solute carrier family 39 (zinc transporter), member 13
  ENST ID: ENST00000531865
  CDS Start-End: 44-819
ggggccgcccggatcgccgccgccgccgccgcacgtacgtggcatgcctggatgtccctgccctggctgtggcatggcgggcccaaggctcctcttcctcactgcccttgccctggagctcttggaaagggctgggggttcccagccggccctccggagccgggggactgcgacggcctgtcgcctggacaacaaggaaagcgagtcctggggggctctgctgagcggagagcggctggacacctggatctgctccctcctgggttccctcatggtggggctcagtggggtcttcccgttgcttgtcattcccctagagatggggaccatgctgcgctcagaagctggggcctggcgcctgaagcagctgctcagcttcgccctggggggactcttgggcaatgtgtttctgcatctgctgcccgaagcctgggcctacacgtgcagcgccagccctggtggtgaggggcagagcctgcagcagcagcaacagctggggctgtgggtcattgctggcatcctgaccttcctggcgttggagaagatgttcctggacagcaaggaggaggggaccagccaggtcagcggctacctcaacctgctggccaacaccatcgataacttcacccacgggctggctgtggctgccagcttccttgtgagcaagaagatcgggctcctgacaaccatggccatcctcctgcatgagatcccccatgaggtgggcgactttgccatcctgctccgggccggctttgaccgatggagcgcagccaagctgcaactctcaacagcgctggggggcctactgggcgctggcttcgccatctgtacccagtcccccaa

SEQ ID NO: 184063 - DNA, 568 bp, Homo sapiens
  Payload ID: 16262
  Gene Symbol: SLC39A13
  Gene Name: solute carrier family 39 (zinc transporter), member 13
  ENST ID: ENST00000527091
  CDS Start-End: 154-568
attagggaaagtttagcctcaggcggaggtgctgacacagtctggagctgctcagaaggaaaaaatacgcagtgctcaggagtagggtgtggagacacagggccccattgctgtgcacccagcatttggatgctcagacgctctgtacgtggcatgcctggatgtccctgccctggctgtggcatggcgggcccaaggctcctcttcctcactgcccttgccctggagctcttggaaagggctgggggttcccagccggccctccggagccgggggactgcgacggcctgtcgcctggacaacaaggaaagcgagtcctggggggctctgctgagcggagagcggctggacacctggatctgctccctcctgggttccctcatggtggggctcagtggggtcttcccgttgcttgtcattcccctagagatggggaccatgctgcgctcagaagctggggcctggcgcctgaagcagctgctcagcttcgccctggggggactcttgggcaatgtgtttctgcatctgctgcccgaagcctgggcctacacgtgcagcgccagccctg

SEQ ID NO: 184064 - DNA, 856 bp, Homo sapiens
  Payload ID: 16262
  Gene Symbol: SLC39A13
  Gene Name: solute carrier family 39 (zinc transporter), member 13
  ENST ID: ENST00000531974
  CDS Start-End: 88-510
cggggcagagcctgggcggggcgcggcaccgcagctggatggctggggccgcccggatcgccgccgccgccgccgcacgtacgtggcatgcctggatgtccctgccctggctgtggcatggcgggcccaaggctcctcttcctcactgcccttgccctggagctcttggaaagggctgggggttcccagccggccctccggagccgggggactgcgacggcctgtcgcctggacaacaaggaaagcgagtcctggggggctctgctgagcggagagcggctggacacctggatctgctccctcctgggttccctcatggtggggctcagtggggtcttcccgttgcttgtcattcccctagagatggggaccatgctgcgctcagaagctggggcctggcgcctgaagcagctgctcagcttcgccctggggggactcttgggcaatgtgtttctgcatctgctgcccgaagcctgggcctacacgtgcagcgccagccctggtaagtgaggccacacgccaggggcaagacagtgccaggagtgggggcctggtgcccacgcccagggatggccaggatgaccaggagagggattctgggtttctggcaggagcttgcctgggagggagggagggtcattgtcctggtctctgggccctggtcccagtgggagttctgggccccagctgcccaacccacccttgtcactgccctggtgccctggatgagatcccattccaaatggccccctcctatggccctggcttggcttggcctggcctggcctggcattgccgccccctgcaggtggtgaggggcagagcctgcagcagcagcaacagctggggctgtggg

SEQ ID NO: 184065 - DNA, 3553 bp, Homo sapiens
  Payload ID: 16262
  Gene Symbol: SLC39A13
  Gene Name: solute carrier family 39 (zinc transporter), member 13
  ENST ID: ENST00000524928
  CDS Start-End: 11-976
agtacgtggcatgcctggatgtccctgccctggctgtggcatggcgggcccaaggctcctcttcctcactgcccttgccctggagctcttggaaagggctgggggttcccagccggccctccggagccgggggactgcgacggcctgtcgcctggacaacaaggaaagcgagtcctggggggctctgctgagcggagagcggctggacacctggatctgctccctcctgggttccctcatggtggggctcagtggggtcttcccgttgcttgtcattcccctagagatggggaccatgctgcgctcagaagctggggcctggcgcctgaagcagctgctcagcttcgccctggggggactcttgggcaatgtgtttctgcatctgctgcccgaagcctgggcctacacgtgcagcgccagccctggtggtgaggggcagagcctgcagcagcagcaacagctggggctgtgggtcattgctggcatcctgaccttcctggcgttggagaagatgttcctggacagcaaggaggaggggaccagccaggcccccaacaaagaccccactgctgctgccgccgcgctcaatggaggccactgtctggcccagccggctgcagagcccggcctcggtgccgtggtccggagcatcaaagtcagcggctacctcaacctgctggccaacaccatcgataacttcacccacgggctggctgtggctgccagcttccttgtgagcaagaaggtgaggggcttggggccagtggggctctggcgattccagtggcagccatgtggattccacctgtgtctggagtctctgcttcttgcccctccattgccagcgccctcatctaaggctctcatcccccatcctccctgctgctgtcctggccgccactgttctctgatcctgagcccctggtctgttcctgttcccagtactccttgttgggtgcctctgtcaagctgctaggcgtggcccctgcctgctcctagatgcttcttcctctacctcctccctctggcctctggcctctggcccagaggcagcctactctgcagctggccgagatctttcccacctcacactgttccccctgcctggaatgttctcccgcccacgcttcgagcggctgacgactcatccttggggcctcgacttacatggactcctccaccaggcctttgctgacctcctcatctaaatttggttcctgggcctgctcccctgggcactctatccatcctttccttcccagcgcctgtgagtgtgtgagtgagtcctgtctctcccctctataccgctagcttcgtgaaggcaggttccttgtcccctttagtcactgctgtatttccagtggccaacacagtgcccacccagagccagctcagagcagagtaaacctctgtggaatgagtgggcgagtggggtgctcagccctcaacacagaccccgcagccacggctcccctccctgcagatcgggctcctgacaaccatggccatcctcctgcatgagatcccccatgaggtgagcgcttgtagggcagcccccaggggcccaggcccccacagtgcccatgatcagcatgggtgtggagctcaggagggtgtggggctgggcctgtccagcatggcactctggggctgggctgtgagggctggagctcctcaccccagcagcctgcagctgccatctctgccatactcaggatgggggtcccaggggaagggtggggaagggcagggggctcagtgtgtatatcgtacctgagcactcagggcatcaggccccgctggggcgcagggtgaacctctggacctcccttcaggtgggcgactttgccatcctgctccgggccggctttgaccgatggagcgcagccaagctgcaactctcaacagcgctggggggcctactgggcgctggcttcgccatctgtacccagtcccccaagggagtaggtacgggcgtggcgggtggttgtggcgggtggcatcagcagaggggcaccagccaaagggtgtggctaccgcactgctggtccccaggcccgggaggtggggagcacacacagtgccttgggtacccagttgggtgttctcccgctgcagaggagacggcagcctgggtcctgcccttcacctctggcggctttctctacatcgccttggtgaacgtgctccctgacctcttggaagaagaggacccgtggtgagtgacctgttggaggaagaggactgccactcacagggcccttaggggctcaggagggaagggctcctggccgctgcctgctccccctgcccatgcctccaccgtgagccgttccctccccacaggcgctccctgcagcagctgcttctgctctgtgcgggcatcgtggtaatggtgctgttctcgctcttcgtggattaactttccctgatgccgacgcccctgccccctgcagcaataagatgctcggattcactctgtgaccgcatatgtgagaggcagagagggcgagtggctgcgagagagaatgagcctcccgccagacaggagggaggtgcgtgtggatgtatgtggtgtgcacatgtggccagaggtgtgtgcgcgagaccgacactgtgatccctgtgctgggtccggggcccagtgtagcgcctgtccccagccatgctgtggttacctctccttgccgccctgtcaccttcacctcccggagtaagcagcgaggaagagcagcactggtcccaagcagaggccttgccctgctgggaccccgggagtgagagcagcccaaggatccagggtgcagggaactccagagctgcccacctcccactgccccctcagcacacacacagtccccaggcggcctaggggccaaggctggggcggctttggtcccttttcctggcccttccttccccacttctaagccaaagaaaggagaggcaggtgctcctgtaccccagccccactcagcactgacagtccccagctcctagtagtgagctgggaggcgcttcctaagaccctttcctcagggctgccctgggagctcattcctggccaacacgccctggcagcaccagcagctcttgccacctccagctgccaaacagcagcctgccgggcagggagcagccccaggccagagaggcctcccggtccagctcagggatgctcctgccagcacaggggccagggactcctggagcaggcacatagtgagcccgggcagccctgcccagctcaggcccctttccttccccattgaggttggggtaggtgggggcggtgagggctccacgttgtcagcgctcaggaatgtgctccggcagagtgctgaagccataatccccaaccatttcccttggctgacgcccaggtactcagctggcccactccacagccaggcctggccctgcccttcaccgtggatgttttcagaagtggccatcgagaggtctggatggttttatagcaactttgctgtgattccgtttgtatctgtaaatatttgttctatagataagatacaaataaatattatccaca

SEQ ID NO: 184066 - DNA, 1708 bp, Homo sapiens
  Payload ID: 16263
  Gene Symbol: SLC39A14
  Gene Name: solute carrier family 39 (zinc transporter), member 14
  Uniprot ID: Q15043
  ENST ID: ENST00000240095
  CDS Start-End: 138-1583
cagtgaggggggtcggcgcgcgtgtctacgcggacgcaccggctaagctgcttctgccgccgccggccgcctgggaccttgcggtgaggctgcgcggggccgaggccgcctccgagcgccaggtttattcagtcaccatgaagctgctgctgctgcacccggccttccagagctgcctcctgctgaccctgcttggcttatggagaaccacccctgaggctcacgcttcatccctgggtgcaccagctatcagcgctgcctccttcctgcaggatctaatacatcggtatggcgagggtgacagcctcactctgcagcagctgaaggccctactcaaccacctggatgtgggagtgggccggggtaatgtcacccagcacgtgcaaggacacaggaacctctccacgtgctttagttctggagacctcttcactgcccacaatttcagcgagcagtcgcggattgggagcagcgagctccaggagttctgccccaccatcctccagcagctggattcccgggcctgcacctcggagaaccaggaaaacgaggagaatgagcagacggaggaggggcggccaagcgctgttgaagtgtggggatacggtctcctctgtgtgaccgtcatctccctctgctccctcctgggggccagcgtggtgcccttcatgaagaagaccttttacaagaggctgctgctctacttcatagctctggcgattggaaccctctactccaacgccctcttccagctcatcccggaggcatttggtttcaaccctctggaagattattatgtctccaagtctgcagtggtgtttgggggcttttatcttttctttttcacagagaagatcttgaagattcttcttaagcagaaaaatgagcatcatcatggacacagccattatgcctctgagtcgcttccctccaagaaggaccaggaggagggggtgatggagaagctgcagaacggggacctggaccacatgattcctcagcactgcagcagtgagctggacggcaaggcgcccatggtggacgagaaggtcattgtgggctcgctctctgtgcaggacctgcaggcttcccagagtgcttgctactggctgaaaggtgtccgctactctgatatcggcactctggcctggatgatcactctgagcgacggcctccataatttcatcgatggcctggccatcggtgcttccttcactgtgtcagttttccaaggcatcagcacctcggtggccatcctctgtgaggagttcccacatgagctaggagactttgtcatcctgctcaacgctgggatgagcatccaacaagctctcttcttcaacttcctttctgcctgctgctgctacctgggtctggcctttggcatcctggccggcagccacttctctgccaactggatttttgcgctagctggaggaatgttcttgtatatttctctggctgatatgatggagttttgctctgttgcccaggctggagtgcaatggtgccatctcagctcactgcaacctctgccgcttgggttgaagcgattatcctgtctaagcctcccgagtaactgagccagccatgtttgttaataaaaatggggacaatactgtatatatatggttatattttagctttttcacttttcagtatctcctgaggcttttctcatgtcattaaatatttttctaatttaaaa

SEQ ID NO: 184067 - DNA, 2137 bp, Homo sapiens
  Payload ID: 16263
  Gene Symbol: SLC39A14
  Gene Name: solute carrier family 39 (zinc transporter), member 14
  Uniprot ID: Q15043
  ENST ID: ENST00000289952
  CDS Start-End: 217-1695
cacacgcccggacggctgggtggaggctgcacctggccgtggtgccgcgctggcgaggggagaggtcaaggcgcggcctgtccgcctggagggtgcgggatgctagagccgcagaagggtgcccagagcgtgggtcgccgcgccgaaggctgagccaggctcccggattccccgcgcggacacggacgcagaacgcagacagtttattcagtcaccatgaagctgctgctgctgcacccggccttccagagctgcctcctgctgaccctgcttggcttatggagaaccacccctgaggctcacgcttcatccctgggtgcaccagctatcagcgctgcctccttcctgcaggatctaatacatcggtatggcgagggtgacagcctcactctgcagcagctgaaggccctactcaaccacctggatgtgggagtgggccggggtaatgtcacccagcacgtgcaaggacacaggaacctctccacgtgctttagttctggagacctcttcactgcccacaatttcagcgagcagtcgcggattgggagcagcgagctccaggagttctgccccaccatcctccagcagctggattcccgggcctgcacctcggagaaccaggaaaacgaggagaatgagcagacggaggaggggcggccaagcgctgttgaagtgtggggatacggtctcctctgtgtgaccgtcatctccctctgctccctcctgggggccagcgtggtgcccttcatgaagaagaccttttacaagaggctgctgctctacttcatagctctggcgattggaaccctctactccaacgccctcttccagctcatcccggaggcatttggtttcaaccctctggaagattattatgtctccaagtctgcagtggtgtttgggggcttttatcttttctttttcacagagaagatcttgaagattcttcttaagcagaaaaatgagcatcatcatggacacagccattatgcctctgagtcgcttccctccaagaaggaccaggaggagggggtgatggagaagctgcagaacggggacctggaccacatgattcctcagcactgcagcagtgagctggacggcaaggcgcccatggtggacgagaaggtcattgtgggctcgctctctgtgcaggacctgcaggcttcccagagtgcttgctactggctgaaaggtgtccgctactctgatatcggcactctggcctggatgatcactctgagcgacggcctccataatttcatcgatggcctggccatcggtgcttccttcactgtgtcagttttccaaggcatcagcacctcggtggccatcctctgtgaggagttcccacatgagctaggagactttgtcatcctgctcaacgctgggatgagcatccaacaagctctcttcttcaacttcctttctgcctgctgctgctacctgggtctggcctttggcatcctggccggcagccacttctctgccaactggatttttgcgctagctggaggaatgttcttgtatatttctctggctgatatgttccctgagatgaatgaggtctgtcaagaggatgaaaggaagggcagcatcttgattccatttatcatccagaacctgggcctcctgactggattcaccatcatggtggtcctcaccatgtattcaggacagatccagattgggtagggctctgccaagagcctgtgggactggaagtcgggccctgggctgcccgatcgccagcccgaggacttaccatccacaatgcaccacggaagaggccgttctatgaaaaactgacacagactgtattcctgcattcaaatgtcagccgtttgtaaaatgctgtatcctaggaataagctgccctggtaaccagtctctagctagtgcctcttgccctctcctcacctccttttctctcagtgactctggaacctgaatgcagcttacaagacaagcctgacttttttctctgattaccttggcctcctcttggaaccagtgctgaaaggttttgaatcctttacccaacaatgcaaaaatagagccaatggttataacttggctagaaatatcaagagttgaatccatagtgtggggcccatgactctagctgggcaccttg

SEQ ID NO: 184068 - DNA, 4641 bp, Homo sapiens
  Payload ID: 16263
  Gene Symbol: SLC39A14
  Gene Name: solute carrier family 39 (zinc transporter), member 14
  Uniprot ID: Q15043
  ENST ID: ENST00000359741
  CDS Start-End: 176-1654
atatagccgggcatgcgcgcggtgccggggcccggacgcagtgaggggggtcggcgcgcgtgtctacgcggacgcaccggctaagctgcttctgccgccgccggccgcctgggaccttgcggtgaggctgcgcggggccgaggccgcctccgagcgccaggtttattcagtcaccatgaagctgctgctgctgcacccggccttccagagctgcctcctgctgaccctgcttggcttatggagaaccacccctgaggctcacgcttcatccctgggtgcaccagctatcagcgctgcctccttcctgcaggatctaatacatcggtatggcgagggtgacagcctcactctgcagcagctgaaggccctactcaaccacctggatgtgggagtgggccggggtaatgtcacccagcacgtgcaaggacacaggaacctctccacgtgctttagttctggagacctcttcactgcccacaatttcagcgagcagtcgcggattgggagcagcgagctccaggagttctgccccaccatcctccagcagctggattcccgggcctgcacctcggagaaccaggaaaacgaggagaatgagcagacggaggaggggcggccaagcgctgttgaagtgtggggctttggttttctcagtgtctcactgattaacctggcctctctcctgggagtcctcgtcctgccctgcacagagaaagcgtttttcagccgtgtgctcacttacttcatcgccctgtccattggaacgctgctgtctaacgcgctattccagctcatcccagaggcatttggtttcaaccctctggaagattattatgtctccaagtctgcagtggtgtttgggggcttttatcttttctttttcacagagaagatcttgaagattcttcttaagcagaaaaatgagcatcatcatggacacagccattatgcctctgagtcgcttccctccaagaaggaccaggaggagggggtgatggagaagctgcagaacggggacctggaccacatgattcctcagcactgcagcagtgagctggacggcaaggcgcccatggtggacgagaaggtcattgtgggctcgctctctgtgcaggacctgcaggcttcccagagtgcttgctactggctgaaaggtgtccgctactctgatatcggcactctggcctggatgatcactctgagcgacggcctccataatttcatcgatggcctggccatcggtgcttccttcactgtgtcagttttccaaggcatcagcacctcggtggccatcctctgtgaggagttcccacatgagctaggagactttgtcatcctgctcaacgctgggatgagcatccaacaagctctcttcttcaacttcctttctgcctgctgctgctacctgggtctggcctttggcatcctggccggcagccacttctctgccaactggatttttgcgctagctggaggaatgttcttgtatatttctctggctgatatgttccctgagatgaatgaggtctgtcaagaggatgaaaggaagggcagcatcttgattccatttatcatccagaacctgggcctcctgactggattcaccatcatggtggtcctcaccatgtattcaggacagatccagattgggtagggctctgccaagagcctgtgggactggaagtcgggccctgggctgcccgatcgccagcccgaggacttaccatccacaatgcaccacggaagaggccgttctatgaaaaactgacacagactgtattcctgcattcaaatgtcagccgtttgtaaaatgctgtatcctaggaataagctgccctggtaaccagtctctagctagtgcctcttgccctctcctcacctccttttctctcagtgactctggaacctgaatgcagcttacaagacaagcctgacttttttctctgattaccttggcctcctcttggaaccagtgctgaaaggttttgaatcctttacccaacaatgcaaaaatagagccaatggttataacttggctagaaatatcaagagttgaatccatagtgtggggcccatgactctagctgggcaccttggacctccagctggccaatagaagagacaggagacaggaagccttcccattttttcaaagtctgtttaattgcctattacttctctcaaagagaacctgaagtcagaacacatgagcagggtgagaggtgaggcaaggttcatcctgaatgggagaggaagtcgaaccactgctgtgtgtcttgtcaggatgctcacttgttcctactgagatgctggatattgattttgtaacagcacctggtgtttcacggctgtccgagtgagctaacgtggcggtgtggctgcctggacctcctctttcaggttaacgctgacagaatggaggctcaggctgtctgcaagaaaacagttggtttggctgtgattttgacctcctcttccccactgccatcttctaagagactttgtagctgcctcctagaagcacattctgagcacatttgagacctctgtgttagaggggagactgcacaaactatcctcccccaggttgagacgtctgcagagtggcaagctgacttgtagaaatggggtgccatttatgctctacttagacaagggtaatcagaaatggaatcagtgcaggcaaaatttaggatttgccgcttccataaatcaaagcatgactaatagggggtctctgaaatgtaagggcacaaacttcacttagggcatcgcagatgtttgcagaatggttggcctaatgattatgctacagatgggttttaaatgacccgtctaggttactgcttccttgcaaaaaaagtcgaatcctgcattgaattgaatatgaatttctctaactctctccagaaaatggatggagataacttgtctttaaaactgtaggccagccttagccactgtggagcccttgcctccgagctctggcttcaaggggagctcttctccaggttcactaggtgaattgatttattattatcatattgataatgtgagattctttagccactttggggagcctgtctctccagaagcctttcttagtggtgcccacagttggagcccaggggccatgtttgcaaactgattcatgtgcatggctgacaggagtactggttcactaccaatgcctgagcttttctcttacatagaaaaactgtccgctctcagtaatcacaagcagcatccgttttgttttctcttcttgggagacatctgtcaaaccaggaatattcttgaaaagaacgtgagcaggaaaaactgctggtgatactttttttaagttttgtttttatcttgcctgttggcttcaatacatttgagaatacgctgaagagggaaaatttcagtgatggagattctagattaaatatcaggactgatttcctggtgggattatggtccagttttaccaaagaaccaattccttgaatgttggaatctaactttttatattgtcattattattgttgtttttaaacggttctttgtcttttctgttttatttttctcaagctgctttcaggagctagcagaaaataactcaaagttgaagactctggaagattttgctttaacctaactcgcattgatgtattaaatttataattttagcattcccaatagatcctatcattccttaaacataataccctttgtcttggagtagaatactaagttagagttagtggatttctagtttaggagaggagctcaaaactataatctttaacaaattgaaaaatgaaatagggtgttttccctttttgtgcacacctatattaccttaagaaatttccttccatagacagctgcctcaaagggaaatcctctttaaaccgtagttggcgcagaggtcagtcctagtcggagcttaggaggggcggagacgctcacatcgtctgacttgagtcgccactgattgtggcaacagctttgcctcatgagtcaaaaattggcaatttcttttgatttttagttgttgaatttgctgtttcaagcatttgtacatattagaagtctaaggagtagcaagtcagtgggaggactttttcacccctggcattagcagcttcgacctcattttccagatgcaccagctcctattaataagttagcaaggaaagtgtatgtcacgtgcaggaacagtgaggcagggacaggggttctgctccttctcacttcaccaccggcacacagcttgcccctgtctttgcccccaaaggtattttgtgtctagtgtcaaattggagctattcttcactggtccttaaccttgggttttaaaaagaaggcttctctgtttgggtagcgtaagagctgagtatagtaagtcctcttccaaagagatggcaatatgctgggcatctactttaaaacaaagttgtctgatttttgcaagagaggttaggattttattgttcttatttccctttacagttctgcagttccatcacagtatttttttaaataactcaggtgtatgagaagaaattagaaaagaaaattaacttatgtggactgtaaatgttttatttgtaagattctataaataaagctatattctgtaattgttgagaa

SEQ ID NO: 184069 - DNA, 4641 bp, Homo sapiens
  Payload ID: 16263
  Gene Symbol: SLC39A14
  Gene Name: solute carrier family 39 (zinc transporter), member 14
  Uniprot ID: Q15043
  ENST ID: ENST00000381237
  CDS Start-End: 120-1598
cgcgtgtctacgcggacgcaccggctaagctgcttctgccgccgccggccgcctgggaccttgcggtgaggctgcgcggggccgaggccgcctccgagcgccaggtttattcagtcaccatgaagctgctgctgctgcacccggccttccagagctgcctcctgctgaccctgcttggcttatggagaaccacccctgaggctcacgcttcatccctgggtgcaccagctatcagcgctgcctccttcctgcaggatctaatacatcggtatggcgagggtgacagcctcactctgcagcagctgaaggccctactcaaccacctggatgtgggagtgggccggggtaatgtcacccagcacgtgcaaggacacaggaacctctccacgtgctttagttctggagacctcttcactgcccacaatttcagcgagcagtcgcggattgggagcagcgagctccaggagttctgccccaccatcctccagcagctggattcccgggcctgcacctcggagaaccaggaaaacgaggagaatgagcagacggaggaggggcggccaagcgctgttgaagtgtggggatacggtctcctctgtgtgaccgtcatctccctctgctccctcctgggggccagcgtggtgcccttcatgaagaagaccttttacaagaggctgctgctctacttcatagctctggcgattggaaccctctactccaacgccctcttccagctcatcccggaggcatttggtttcaaccctctggaagattattatgtctccaagtctgcagtggtgtttgggggcttttatcttttctttttcacagagaagatcttgaagattcttcttaagcagaaaaatgagcatcatcatggacacagccattatgcctctgagtcgcttccctccaagaaggaccaggaggagggggtgatggagaagctgcagaacggggacctggaccacatgattcctcagcactgcagcagtgagctggacggcaaggcgcccatggtggacgagaaggtcattgtgggctcgctctctgtgcaggacctgcaggcttcccagagtgcttgctactggctgaaaggtgtccgctactctgatatcggcactctggcctggatgatcactctgagcgacggcctccataatttcatcgatggcctggccatcggtgcttccttcactgtgtcagttttccaaggcatcagcacctcggtggccatcctctgtgaggagttcccacatgagctaggagactttgtcatcctgctcaacgctgggatgagcatccaacaagctctcttcttcaacttcctttctgcctgctgctgctacctgggtctggcctttggcatcctggccggcagccacttctctgccaactggatttttgcgctagctggaggaatgttcttgtatatttctctggctgatatgttccctgagatgaatgaggtctgtcaagaggatgaaaggaagggcagcatcttgattccatttatcatccagaacctgggcctcctgactggattcaccatcatggtggtcctcaccatgtattcaggacagatccagattgggtagggctctgccaagagcctgtgggactggaagtcgggccctgggctgcccgatcgccagcccgaggacttaccatccacaatgcaccacggaagaggccgttctatgaaaaactgacacagactgtattcctgcattcaaatgtcagccgtttgtaaaatgctgtatcctaggaataagctgccctggtaaccagtctctagctagtgcctcttgccctctcctcacctccttttctctcagtgactctggaacctgaatgcagcttacaagacaagcctgacttttttctctgattaccttggcctcctcttggaaccagtgctgaaaggttttgaatcctttacccaacaatgcaaaaatagagccaatggttataacttggctagaaatatcaagagttgaatccatagtgtggggcccatgactctagctgggcaccttggacctccagctggccaatagaagagacaggagacaggaagccttcccattttttcaaagtctgtttaattgcctattacttctctcaaagagaacctgaagtcagaacacatgagcagggtgagaggtgaggcaaggttcatcctgaatgggagaggaagtcgaaccactgctgtgtgtcttgtcaggatgctcacttgttcctactgagatgctggatattgattttgtaacagcacctggtgtttcacggctgtccgagtgagctaacgtggcggtgtggctgcctggacctcctctttcaggttaacgctgacagaatggaggctcaggctgtctgcaagaaaacagttggtttggctgtgattttgacctcctcttccccactgccatcttctaagagactttgtagctgcctcctagaagcacattctgagcacatttgagacctctgtgttagaggggagactgcacaaactatcctcccccaggttgagacgtctgcagagtggcaagctgacttgtagaaatggggtgccatttatgctctacttagacaagggtaatcagaaatggaatcagtgcaggcaaaatttaggatttgccgcttccataaatcaaagcatgactaatagggggtctctgaaatgtaagggcacaaacttcacttagggcatcgcagatgtttgcagaatggttggcctaatgattatgctacagatgggttttaaatgacccgtctaggttactgcttccttgcaaaaaaagtcgaatcctgcattgaattgaatatgaatttctctaactctctccagaaaatggatggagataacttgtctttaaaactgtaggccagccttagccactgtggagcccttgcctccgagctctggcttcaaggggagctcttctccaggttcactaggtgaattgatttattattatcatattgataatgtgagattctttagccactttggggagcctgtctctccagaagcctttcttagtggtgcccacagttggagcccaggggccatgtttgcaaactgattcatgtgcatggctgacaggagtactggttcactaccaatgcctgagcttttctcttacatagaaaaactgtccgctctcagtaatcacaagcagcatccgttttgttttctcttcttgggagacatctgtcaaaccaggaatattcttgaaaagaacgtgagcaggaaaaactgctggtgatactttttttaagttttgtttttatcttgcctgttggcttcaatacatttgagaatacgctgaagagggaaaatttcagtgatggagattctagattaaatatcaggactgatttcctggtgggattatggtccagttttaccaaagaaccaattccttgaatgttggaatctaactttttatattgtcattattattgttgtttttaaacggttctttgtcttttctgttttatttttctcaagctgctttcaggagctagcagaaaataactcaaagttgaagactctggaagattttgctttaacctaactcgcattgatgtattaaatttataattttagcattcccaatagatcctatcattccttaaacataataccctttgtcttggagtagaatactaagttagagttagtggatttctagtttaggagaggagctcaaaactataatctttaacaaattgaaaaatgaaatagggtgttttccctttttgtgcacacctatattaccttaagaaatttccttccatagacagctgcctcaaagggaaatcctctttaaaccgtagttggcgcagaggtcagtcctagtcggagcttaggaggggcggagacgctcacatcgtctgacttgagtcgccactgattgtggcaacagctttgcctcatgagtcaaaaattggcaatttcttttgatttttagttgttgaatttgctgtttcaagcatttgtacatattagaagtctaaggagtagcaagtcagtgggaggactttttcacccctggcattagcagcttcgacctcattttccagatgcaccagctcctattaataagttagcaaggaaagtgtatgtcacgtgcaggaacagtgaggcagggacaggggttctgctccttctcacttcaccaccggcacacagcttgcccctgtctttgcccccaaaggtattttgtgtctagtgtcaaattggagctattcttcactggtccttaaccttgggttttaaaaagaaggcttctctgtttgggtagcgtaagagctgagtatagtaagtcctcttccaaagagatggcaatatgctgggcatctactttaaaacaaagttgtctgatttttgcaagagaggttaggattttattgttcttatttccctttacagttctgcagttccatcacagtatttttttaaataactcaggtgtatgagaagaaattagaaaagaaaattaacttatgtggactgtaaatgttttatttgtaagattctataaataaagctatattctgtaattgttgagaatcccacgggtgatcatttgcaataaatgtggatgtaatgaaggctgttgaacacaa

SEQ ID NO: 184070 - DNA, 839 bp, Homo sapiens
  Payload ID: 16263
  Gene Symbol: SLC39A14
  Gene Name: solute carrier family 39 (zinc transporter), member 14
  ENST ID: ENST00000517370
  CDS Start-End: 235-839
tctgatttttcttttttgttccgttaatatccaccaaacttttccttgcgacctccctatctgctccaccttcctcccgctaaatggtggttgctgtgcaatggggcatgtgccttctctccctgccctgggtggggctggccctccctccgcacggcagtgtggggatacggtctcctctgtgtgaccgtcatctccctctgctccctcctgggggccagcgtggtgcccttcatgaagaagaccttttacaagaggctgctgctctacttcatagctctggcgattggaaccctctactccaacgccctcttccagctcatcccggaggcatttggtttcaaccctctggaagattattatgtctccaagtctgcagtggtgtttgggggcttttatcttttctttttcacagagaagatcttgaagattcttcttaagcagaaaaatgagcatcatcatggacacagccattatgcctctgagtcgcttccctccaagaaggaccaggaggagggggtgatggagaagctgcagaacggggacctggaccacatgattcctcagcactgcagcagtgagctggacggcaaggcgcccatggtggacgagaaggtcattgtgggctcgctctctgtgcaggacctgcaggcttcccagagtgcttgctactggctgaaaggtgtccgctactctgatatcggcactctggcctggatgatcactctgagcgacggcctccataatttcatcgatggcctggccatcggtgcttccttcactgtgtcagttttccaaggcatcagcacctcggtggccatcctctgtgaggagttccc

SEQ ID NO: 184071 - DNA, 377 bp, Homo sapiens
  Payload ID: 16263
  Gene Symbol: SLC39A14
  Gene Name: solute carrier family 39 (zinc transporter), member 14
  ENST ID: ENST00000520644
  CDS Start-End: 108-377
gcccggacgcagtgaggggggtcggcgcgcgtgtctacgcggacgcaccggctaagctgcttctgccgccgccggccgcctgggaccttgcggtttattcagtcaccatgaagctgctgctgctgcacccggccttccagagctgcctcctgctgaccctgcttggcttatggagaaccacccctgaggctcacgcttcatccctgggtgcaccagctatcagcgctgcctccttcctgcaggatctaatacatcggtatggcgagggtgacagcctcactctgcagcagctgaaggccctactcaaccacctggatgtgggagtgggccggggtaatgtcacccagcacgtgcaaggacacaggaacctctccacg

SEQ ID NO: 184072 - DNA, 578 bp, Homo sapiens
  Payload ID: 16263
  Gene Symbol: SLC39A14
  Gene Name: solute carrier family 39 (zinc transporter), member 14
  ENST ID: ENST00000520832
  CDS Start-End: 419-578
acactcactccgcgctcagcgtggggctaaataagccattccctgtttgtctgtgccgctgcctggggccctgaccacccgtctctgcctcataacctcctcccacaggcgctggcacacacagtgggggctcagtaaatattagttggtgaacagcaggctcaaggttctaattttgttccctgcttctgggtcaccagagtttttattattatttttcttagttttcccatcctgcccctcccatcagcgcgaggtttcacaaggagagtgagtgggctccgctggccgccctcctgcactgtctggaaatttcccaccctgggtgcgctttgactgtgccaaggcttgaggcgaaggtcctgggagcaggagctggaggaagataatgcatcctttcagggtttattcagtcaccatgaagctgctgctgctgcacccggccttccagagctgcctcctgctgaccctgcttggcttatggagaaccacccctgaggctcacgcttcatccctgggtgcaccagctatcagcgctgcctccttcctgcaggatctaatacatcggtatggcgagg

SEQ ID NO: 184073 - DNA, 560 bp, Homo sapiens
  Payload ID: 16263
  Gene Symbol: SLC39A14
  Gene Name: solute carrier family 39 (zinc transporter), member 14
  ENST ID: ENST00000522881
  CDS Start-End: 95-560
gaacatcacagaagcgtctgtgcaggacagaagtgccgcttctaggcagagctacttctggaccaagtgaagggtgacggtttattcagtcaccatgaagctgctgctgctgcacccggccttccagagctgcctcctgctgaccctgcttggcttatggagaaccacccctgaggctcacgcttcatccctgggtgcaccagctatcagcgctgcctccttcctgcaggatctaatacatcggtatggcgagggtgacagcctcactctgcagcagctgaaggccctactcaaccacctggatgtgggagtgggccggggtaatgtcacccagcacgtgcaaggacacaggaacctctccacgtgctttagttctggagacctcttcactgcccacaatttcagcgagcagtcgcggattgggagcagcgagctccaggagttctgccccaccatcctccagcagctggattcccgggcctgcacctcggagaaccaggaaaacgaggagaatgagcagacggaggaggggcggccaagcgctgttgaagtgtggggct

SEQ ID NO: 184074 - DNA, 570 bp, Homo sapiens
  Payload ID: 16263
  Gene Symbol: SLC39A14
  Gene Name: solute carrier family 39 (zinc transporter), member 14
  ENST ID: ENST00000524285
  CDS Start-End: 304-570
acacgcccggacggctgggtggaggctgcacctggccgtggtgccgcgctggcgaggggagaggtcaaggcgcggcctgtccgcctggagggtgcgggatgctagagccgcagaagggtgcccagagcgtgggtcgccgcgccgaaggctgagccaggctcccggattccccgcgcggacacggacgcagaacgcagacagagagaaggcaagcttggctgctgtggaggctggggcccatcctcagaccatctgctcccctcatggtgacacagatctgaaaaccaggtttattcagtcaccatgaagctgctgctgctgcacccggccttccagagctgcctcctgctgaccctgcttggcttatggagaaccacccctgaggctcacgcttcatccctgggtgcaccagctatcagcgctgcctccttcctgcaggatctaatacatcggtatggcgagggtgacagcctcactctgcagcagctgaaggccctactcaaccacctggatgtgggagtgggccggggtaatgtcacccagcacgtgcaaggacacaggaacctctcc

SEQ ID NO: 184075 - DNA, 576 bp, Homo sapiens
  Payload ID: 16263
  Gene Symbol: SLC39A14
  Gene Name: solute carrier family 39 (zinc transporter), member 14
  ENST ID: ENST00000517552
  CDS Start-End: 195-576
attcgtttttattctgtgctttcaaaagaagggtttttctcaaaggctaattcaagaaggagcagagaagcagagactgagggatagtctcaacatgttcagtgtgtggcgggcgggcctggcgcagttgccggcacacagggagaggcctcagcttcacctgcctttttctctcacaggtttattcagtcaccatgaagctgctgctgctgcacccggccttccagagctgcctcctgctgaccctgcttggcttatggagaaccacccctgaggctcacgcttcatccctgggtgcaccagctatcagcgctgcctccttcctgcaggatctaatacatcggtatggcgagggtgacagcctcactctgcagcagctgaaggccctactcaaccacctggatgtgggagtgggccggggtaatgtcacccagcacgtgcaaggacacaggaacctctccacgtgctttagttctggagacctcttcactgcccacaatttcagcgagcagtcgcggattgggagcagcgagctccaggagttctgccccaccatcctccagcagctggattccc

SEQ ID NO: 184076 - DNA, 467 bp, Homo sapiens
  Payload ID: 16263
  Gene Symbol: SLC39A14
  Gene Name: solute carrier family 39 (zinc transporter), member 14
  ENST ID: ENST00000519960
  CDS Start-End: 100-467
aagtaaaatgcttaataaaaccccggtttagactgtcttcaaaccgaccgccaccccagagcctgcagctgactctgaccccgcgtttattcagtcaccatgaagctgctgctgctgcacccggccttccagagctgcctcctgctgaccctgcttggcttatggagaaccacccctgaggctcacgcttcatccctgggtgcaccagctatcagcgctgcctccttcctgcaggatctaatacatcggtatggcgagggtgacagcctcactctgcagcagctgaaggccctactcaaccacctggatgtgggagtgggccggggtaatgtcacccagcacgtgcaaggacacaggaacctctccacgtgctttagttctggagacctcttcactgcccacaatttcagcgagcagtcgcggattgggagcagcgagctccaggagttctgccccaccatcctcca

SEQ ID NO: 184077 - DNA, 1379 bp, Homo sapiens
  Payload ID: 16264
  Gene Symbol: SLC39A2
  Gene Name: solute carrier family 39 (zinc transporter), member 2
  Uniprot ID: Q9NP94
  ENST ID: ENST00000298681
  CDS Start-End: 158-1087
tgcagaagcagaagcaacacagaaagaagataccaacagcctcctgaaactcacgagagtggacactccagtgttgaccacctaagataccactcctgctccaaagattacagctcccttgtcattctgactcctgggcttaccctacaccccagagatggagcaactactaggaataaaacttggctgcctgtttgccctgttggctctcactctgggctgtggccttactcccatctgcttcaaatggttccagattgatgcagccagaggtcatcaccggctagtcctcagactcctgggctgtatttctgctggtgttttcctgggagcagggttcatgcatatgactgctgaagccctggaggaaattgaatcacagattcagaagttcatggtgcagaacagatcagcaagtgagagaaattcttctggtgatgctgattcagctcatatggagtatccctatggagagctcatcatctccctgggcttcttttttgtcttctttttggagtcgctggcattgcagtgctgtcctggggctgctggaggatcgacagtgcaggacgaagaatggggtggggctcatatcttcgaactccacagccatggacatttaccctcaccctcaaagggtcccctccgagcccttgtcctcttgctgtcactctcctttcactcagtgtttgaagggctagctgtggggctgcagccgacagtagcagctaccgtgcagctctgccttgctgtcctggctcataaggggcttgtggtgtttggtgtaggaatgcggctagtgcatttaggtaccagctcacgatgggcagtgttctccatactattattagctctcatgtcccccctgggcctagccgtagggctggctgtgactggaggggactctgaaggagggcggggcttagcccaggctgtgttagagggtgtggcagctggtaccttcctgtatgtcaccttcctagaaattcttccacgggagctagctagtcctgaggcccctctagctaagtggagctgtgtagccgctggttttgccttcatggcctttattgccttgtgggcctgagagattcctggcttttctgatggacctatttaggacaacctctctatccccagggagacctcccaaatggctttgaccctcagacatttctttactcagactaaatagcattcagtaggactggactggaccccaggtttcctttacatgagatcccatttctcaccctggactaagacaaagatatttaggttgagcagctattaattggagaattggtacagagacgctccagattttattcttatcccatttatgctactgtgtgtaataaaatgcccattttaccctc

SEQ ID NO: 184078 - DNA, 1259 bp, Homo sapiens
  Payload ID: 16264
  Gene Symbol: SLC39A2
  Gene Name: solute carrier family 39 (zinc transporter), member 2
  Uniprot ID: Q9NP94
  ENST ID: ENST00000554422
  CDS Start-End: 193-450
agaagctggggcaggatctgtcagctctgcaatgctgcagaagcagaagcaacacagaaagaagataccaacagcctcctgaaactcacgagagtggacactccagtgttgaccacctaagataccactcctgctccaaagattacagctcccttgtcattctgactcctgggcttaccctacaccccagagatggagcaactactaggaataaaacttggctgcctgtttgccctgttggctctcactctgggctgtggccttactcccatctgcttcaaatggttccagattgatgcagccagaggtcatcaccggctagtcctcagactcctgggctgtatttctgctggtgttttcctgggagcagggttcatgcatatgactgctgaagccctggaggaaattgaatcacagattcagaagttcatggtgcagatcagcaagtgagagaaattcttctggtgatgctgattcagctcatatggagtatccctatggagagctcatcatctccctgggcttcttttttgtcttctttttggagtcgctggcattgcagtgctgtcctggggctgctggaggatcgacagtgcaggacgaagaatggggtggggctcatatcttcgaactccacagccatggacatttaccctcaccctcaaagggtcccctccgagcccttgtcctcttgctgtcactctcctttcactcagtgtttgaagggctagctgtggggctgcagccgacagtagcagctaccgtgcagctctgccttgctgtcctggctcataaggggcttgtggtgtttggtgtaggaatgcggctagtgcatttaggtaccagctcacgatgggcagtgttctccatactattattagctctcatgtcccccctgggcctagccgtagggctggctgtgactggaggggactctgaaggagggcggggcttagcccaggctgtgttagagggtgtggcagctggtaccttcctgtatgtcaccttcctagaaattcttccacgggagctagctagtcctgaggcccctctagctaagtggagctgtgtagccgctggttttgccttcatggcctttattgccttgtgggcctgagagattcctggcttttctgatggacctatttaggacaacctctctatccccagggagacctcccaaatggctttgaccctcagacatttctttactcagactaaatagcattcagtaggactggactggaccccaggtttcc

SEQ ID NO: 184079 - DNA, 1502 bp, Homo sapiens
  Payload ID: 16265
  Gene Symbol: SLC39A3
  Gene Name: solute carrier family 39 (zinc transporter), member 3
  Uniprot ID: Q9BRY0
  ENST ID: ENST00000269740
  CDS Start-End: 331-1275
tggagtcgcatatgagtggcaggtttcgcagccaatagtatggaaagttctgccagcgggtctcggggaggccaatgggcaggggcgtgggcggggcgtggaccagccgcgccgagcggggcctctccgggccgcgtctgtggggtcgagactgcgcggccgttgggcgtgcagcggcgccagtcggcggacgaggggcccccgggagttgctggactgagacatgagcctccaactgtgtggttgggctcggtagcacatcgtgggacttgggtgtgcgcccacagatggtttggccctgcagtgaccagagcagcccaagccgccaccatggtgaaattgctagtggccaaaatcctgtgcatggtgggcgtgttcttcttcatgctgctcggctccctgctccccgtgaagatcatcgagacagattttgagaaggcccatcgctcgaaaaagatcctctctctctgcaacacctttggaggaggggtgtttctggccacgtgcttcaacgctctgctgcccgctgtgagggaaaagctccagaaggtcctgagcctcggccacatcagcaccgactacccgctggccgaaaccatcctcctgctgggcttcttcatgaccgtcttcctggagcagctgatcctgaccttccgcaaggagaagccgtccttcatcgacctggagaccttcaacgccggatcggacgtgggcagcgactcggagtatgagagccccttcatggggggcgcgcggggccacgcgctgtacgtggagccccacggccacggccccagcctgagcgtgcagggcctctcgcgcgccagccccgtgcgcctgctcagcctggccttcgcgctgtcggcccactcggtctttgagggcctggccctgggcctgcaggaggagggggagaaagtggtgagcctgttcgtgggggtggccgtccacgagacactggtggccgtggccctgggcatcagcatggcccggagtgccatgcccctgcgggacgcggccaagctggcggtcaccgtaagcgccatgatccccctgggcatcggcctgggcctgggcattgagagcgcccagggcgtgccgggcagcgtggcgtccgtgctgctgcagggcctggcgggcggcaccttcctcttcatcaccttcctggagatcctggccaaggagctggaggagaagagtgaccgtctgctcaaggtcctcttcctggtgctgggctacaccgtcctggccgggatggtcttcctcaagtggtgagcggcctcgccattgtccctgccgccggagcccgccgggagccccgggccggacacaggccgcgtcccccggccgcgcgtcccccaagagcgagcactgtggccctgggccaccacctgtgcacaaggggcctcccgggaccaggctgtgcccccgatcctacaccctgagcctcagagcactgctactttttaaaatacttctttctcttaaaagtctttaccaaa

SEQ ID NO: 184080 - DNA, 2940 bp, Homo sapiens
  Payload ID: 16265
  Gene Symbol: SLC39A3
  Gene Name: solute carrier family 39 (zinc transporter), member 3
  Uniprot ID: Q9BRY0
  ENST ID: ENST00000455372
  CDS Start-End: 207-524
ctccgggccgcgtctgtggggtcgagactgcgcggccgttgggcgtgcagcggcgccagtcggcggacgaggggcccccgggagttgctggactgagacatgagcctccaactgtgtggttgggctcggtagcacatcgtgggacttgggtgtgcgcccacagatggtttggccctgcagtgaccagagcagcccaagccgccaccatggtgaaattgctagtggccaaaatcctgtgcatggtgggcgtgttcttcttcatgctgctcggctccctgctccccgtgaagatcatcgagacagattttgagaaggcccatcgctcgaaaaagatcctctctctctgcaacacctttggaggaggggtgtttctggccacgtgcttcaacgctctgctgcccgctgtgagggaaaaggtaagggctccctgggcactagcagcagcccttggcaccttatggccaagggactctgatgcattttcaacactgatgccaagttcagtgaaggccttgatgctgtaagggtgacggaaagtaggaagtgaatttgctgtgtgattgtgaactggttactttctgtctctgtgctctaccggccaaacaaggggtttggaccagacctgggattcccaacaggtggacttgtcggttgtcacctgataatcagaccagactacccacctaggtagggcacactctgtcctgaagctggaaagcatggcctctcttcggttcctatatcagtcagctactgttgcgtaacaaattatagcaaactgagcaccttaggactacagacgtttatcatctcacagtttctgtgagtcaggggtctgggcactgcttcaggagctcacaaggcagcagtcacagtgtctcctgggctgtggtctcatctcaacgttcaaccggggatgggtcggcctctaagctcatgtggttgtaagccaggttcagttcctcattggttgtcagaccgaaggtgtctgtttgtcagtgtctgttggctggggcagccctcagagcctggccacgtggacctccccagcatgatcagttccttcatcagcaaatggagaagatggccatgactctgtgtaagacagagggcacagtcccatgtcatgcagaggtgacagggtatcccttcccctctgccccagtgtcctgctggttagaagcaagttcaagtccttcccatactcaagtggccaggacctcacagggtatggctgtcaagaggcaggggcttctggggccatcttggagtctgtccaccccaactcctgacagcatcatcctctgctgacctgttccttgagctcccccatatcagcagcccagagtgtgggtcccctgtcaggccacagtgtgaccagccctggccatgcttgctgggtgaccctgggtgagtggcttcctctctctgggccagtgccagatgtgacattgaatttgtgttggttacatacttggtggagatatgaggaccccctgttcttcctcccaacgaaagcatggaagccctaagcttatcccccaacccctggccctgcttttcctcgtgcctagtgtccagaaaggaggagaagggctgttgtctgggattaaatcatctgagcctgttagtgtggcagagtagagttccagggtggctccctgagcttccagcccctgctccgcacgccccatgctcttccctcccctcgagtgtgggtagggctgggactgccgtgcgtgtcactcctgccattatgtcagaatcccagcagaggggatgttgcagctgtgatgaccgccccagatcggttagcgctgagttcatcaaaagggagggggtgggcctggcctaatcaggtgagccactcaccctcctgctggccttggagaagcaaaaagccagggtgtgccaggagaagggcatgaagcgaggacccgagggcagcctctcggtgccaagagccatccccgccaacagccagccaggacacggggcctcagtccacagccaccaggaggtggactcttccgacctccagtgagcttggaagaggaccctgggtgtcagtgagatctcagccctgatgacaccctgcgagacctggagcgtagggcccagctagcccgcacctggatttccaccgttcagagccgagacaccgcattcctgctgttccgcgtggctgagtctgcattcgttcgttacgcggtgtgtgaagactgacatctgcactgcgaggatggagatcttggtcatctctgacatctcctgcatcgcagaggccactgccagccccccttttcccccatggtcatggtgtcacccccgtcaccctctgactgcaggcctgggcgactgcggggagcttgctcttccctccccctcatcacagtggccttctcatggcacccaaacctttcccgccgttctcctgtcctcgggctggtcaggcggatgaggtccctactcccgagcccccagcctcacccactgcagggccaggctctcagtcacccctggaaaatggtgcctggttcacagctcccgtgcatctgcctcatctctcctgatcaacgtctgtctcttgggagtagctagagttcctcatgagcttgtcctcaagcgaggcatgcatgaggcctccagccggtggtcagtgagggagttaagtggcttctccgtggaaacacagccttctgctgcagcagaggctcacccagcgtgaactgcccccagggaacactgggcgatgcctggggacattgtggttgtcacgatggggggtgctcctggcctggagtgggtggaggccagagacactgctcagcagcaccctgcagtgcccaggacggccccgtcccagagaacaatccagccccgaatgtcagcaccttccccctacccgagttgtgaaaataaaaaatgtttccagacatt

SEQ ID NO: 184081 - DNA, 1219 bp, Homo sapiens
  Payload ID: 16265
  Gene Symbol: SLC39A3
  Gene Name: solute carrier family 39 (zinc transporter), member 3
  ENST ID: ENST00000545664
  CDS Start-End: 196-1167
gtctgtggggtcgagactgcgcggccgttgggcgtgcagcggcgccagtcggcggacgaggggcccccgggagttgctggactgagacatgagcctccaactgtgtggttgggctcggtagcacatcgtgggacttgggtgtgcgcccacagatggtttggccctgcagtgaccagagcagcccaagccgccaccatggtgaaattgctagtggccaaaatcctgtgcatggtgggcgtgttcttcttcatgctgctcggctccctgctccccgtgaagatcatcgagacagattttgagaaggcccatcgctcgaaaaagatcctctctctctgcaacacctttggaggaggggtgtttctggccacgtgcttcaacgctctgctgcccgctgtgagggaaaagctccagaaggtcctgagcctcggccacatcagcaccgactacccgctggccgaaaccatcctcctgctgggcttcttcatgaccgtcttcctggagcagctgatcctgaccttccgcaaggagaagccgtccttcatcgacctggagaccttcaacgccggatcggacgtgggcagcgactcggagtatgagagccccttcatggggggcgcgcggggccacgcgctgtacgtggagccccacggccacggccccagcctgagcgtgcagggcctctcgcgcgccagccccgtgcgcctgctcagcctggccttcgcgctgtcggcccactcggtctttgagggcctggccctgggcctgcaggaggagggggagaaagtggtgagcctgttcgtgggggtggccgtccacgagacactggtggccgtggccctgggcatcagcatggcccggagtgccatgcccctgcgggacgcggccaagctggcggtcaccgtaagcgccatgatccccctgggcatcggcctgggcctgggcattgagagcgcccagggcgtgccgggcagcgtggcgtccgtgctgctgcagggcctggcgggcggcaccttcctcttcatcaccttcctggagatcctggccaaggagctggaggagaagagtgaccgtctgctcaaggtcctcttcctggtgctgggctacaccgtcctggccgggatggtcttcctcaagtggatctcgccgcccgagccccgagtgtcttgaggcttattagaggttggagtcactgcgatgggacagccgggctccgtccctc

SEQ ID NO: 184082 - DNA, 524 bp, Homo sapiens
  Payload ID: 16265
  Gene Symbol: SLC39A3
  Gene Name: solute carrier family 39 (zinc transporter), member 3
  ENST ID: ENST00000589363
  CDS Start-End: 117-524
gtctgtggggtcgagactgcgcggccgttgggcgtgcagcggcgccagtcggcggacgaggggcccccgggagatggtttggccctgcagtgaccagagcagcccaagccgccaccatggtgaaattgctagtggccaaaatcctgtgcatggtgggcgtgttcttcttcatgctgctcggctccctgctccccgtgaagatcatcgagacagattttgagaaggcccatcgctcgaaaaagatcctctctctctgcaacacctttggaggaggggtgtttctggccacgtgcttcaacgctctgctgcccgctgtgagggaaaagctccagaaggtcctgagcctcggccacatcagcaccgactacccgctggccgaaaccatcctcctgctgggcttcttcatgaccgtcttcctggagcagctgatcctgaccttccgcaaggagaagccgtccttcatcgacctggagaccttcaacgccggatcggacgtgggcagcgactcggagtatgagagcccc

SEQ ID NO: 184083 - DNA, 491 bp, Homo sapiens
  Payload ID: 16265
  Gene Symbol: SLC39A3
  Gene Name: solute carrier family 39 (zinc transporter), member 3
  ENST ID: ENST00000589166
  CDS Start-End: 169-491
gagtggagacatctgagcagtgacccgaagacctgaatgcagtgagttgctggactgagacatgagcctccaactgtgtggttgggctcggtagcacatcgtgggacttgggtgtgcgcccacagatggtttggccctgcagtgaccagagcagcccaagccgccaccatggtgaaattgctagtggccaaaatcctgtgcatggtgggcgtgttcttcttcatgctgctcggctccctgctccccgtgaagatcatcgagacagattttgagaaggcccatcgctcgaaaaagatcctctctctctgcaacacctttggaggaggggtgtttctggccacgtgcttcaacgctctgctgcccgctgtgagggaaaagctccagaaggtcctgagcctcggccacatcagcaccgactacccgctggccgaaaccatcctcctgctgggcttcttcatgaccgtcttcctggagcagctgatcctgacctt

SEQ ID NO: 184084 - DNA, 2297 bp, Homo sapiens
  Payload ID: 16266
  Gene Symbol: SLC39A4
  Gene Name: solute carrier family 39 (zinc transporter), member 4
  ENST ID: ENST00000276833
  CDS Start-End: 305-2173
aaactccaggaggcggaggaggctagtggcagtacctgggcaccctgaccctccccacaggccagagcccaccctcctgctcatgagggcagacaggcctttccagggacacagtccctcttctccccaggaccccagggccaactccccctgccggccctctgccatcaaattggcagtggctccaggggagtcccctggggatgggggaccactgttggggacccctctgcgtgcacccctgtagttggggaagcaggacaggggcctggggagacggaagggcgccaggggttgagagaggatggtggacgttgttggacttgaaagggaaacaggccctcggggaagcccctggccaggcctgcctctcccctccctggtgggcccagcgcccctgctcacttgtctctgcccacagtgcctgtctgtggaggacgccctgggcctgggcgagcctgaggggtcagggctgcccccgggcccggtcctggaggccaggtacgtcgcccgcctcagtgccgccgccgtcctgtacctcagcaaccccgagggcacctgtgaggacgctcgggctggcctctgggcctctcatgcagaccacctcctggccctgctcgagagccccaaggccctgaccccgggcctgagctggctgctgcagaggatgcaggcccgggctgccggccagacccccaagatggcctgcgtagatatccctcagctgctggaggaggcggtgggggcgggggctccgggcagtgctggcggcgtcctggctgccctgctggaccatgtcaggagcgggtcttgcttccacgccttgccgagccctcagtacttcgtggactttgtgttccagcagcacagcagcgaggtccctatgacgctggccgagctgtcagccttgatgcagcgcctgggggtgggcagggaggcccacagtgaccacagtcatcggcacaggggagccagcagccgggaccctgtgcccctcatcagctccagcaacagctccagtgtgtgggacacggtatgcctgagtgccagggacgtgatggctgcatatggactgtcggaacaggctggggtgaccccggaggcctgggcccaactgagccctgccctgctccaacagcagctgagtggagcctgcacctcccagtccaggccccccgtccaggaccagctcagccagtcagagaggtatctgtacggctccctggccacgctgctcatctgcctctgcgcggtctttggcctcctgctgctgacctgcactggctgcaggggggtcacccactacatcctgcagaccttcctgagcctggcagtgggtgcagtcactggggacgctgtcctgcatctgacgcccaaggtgctggggctgcatacacacagcgaagagggcctcagcccacagcccacctggcgcctcctggctatgctggccgggctctacgccttcttcctgtttgagaacctcttcaatctcctgctgcccagggacccggaggacctggaggacgggccctgcggccacagcagccatagccacgggggccacagccacggtgtgtccctgcagctggcacccagcgagctccggcagcccaagcccccccacgagggctcccgcgcagacctggtggcggaggagagcccggagctgctgaaccctgagcccaggagactgagcccagagttgaggctactgccctatatgatcactctgggcgacgccgtgcacaacttcgccgacgggctggccgtgggcgccgccttcgcgtcctcctggaagaccgggctggccacctcgctggccgtgttctgccacgagttgccacacgagctgggggacttcgccgccttgctgcacgcggggctgtccgtgcgccaagcactgctgctgaacctggcctccgcgctcacggccttcgctggtctctacgtggcactcgcggttggagtcagcgaggagagcgaggcctggatcctggcagtggccaccggcctgttcctctacgtagcactctgcgacatgctcccggcgatgttgaaagtacgggacccgcggccctggctcctcttcctgctgcacaacgtgggcctgctgggcggctggaccgtcctgctgctgctgtccctgtacgaggatgacatcaccttctgataccctgccctagtcccccacctttgacttaagatcccacacctcacaaacctacagcccagaaaccagaagcccctatagaggccccagtcccaactccagtaaagacactcttgtccttgga

SEQ ID NO: 184085 - DNA, 2174 bp, Homo sapiens
  Payload ID: 16266
  Gene Symbol: SLC39A4
  Gene Name: solute carrier family 39 (zinc transporter), member 4
  Uniprot ID: Q6P5W5
  ENST ID: ENST00000301305
  CDS Start-End: 107-2050
agccccagtctggccctggacaaccccagcaaagccgccctcagccagcccagaagcactgggccttggccacagcaacacccactgagcacgctgggagctgagtatggcgtccctggtctcgctggagctggggctgcttctggctgtgctggtggtgacggcgacggcgtccccgcctgctggtctgctgagcctgctcacctctggccagggcgctctggatcaagaggctctgggcggcctgttaaatacgctggcggaccgtgtgcactgcgccaacgggccgtgtggaaagtgcctgtctgtggaggacgccctgggcctgggcgagcctgaggggtcagggctgcccccgggcccggtcctggaggccaggtacgtcgcccgcctcagtgccgccgccgtcctgtacctcagcaaccccgagggcacctgtgaggacgctcgggctggcctctgggcctctcatgcagaccacctcctggccctgctcgagagccccaaggccctgaccccgggcctgagctggctgctgcagaggatgcaggcccgggctgccggccagacccccaagatggcctgcgtagatatccctcagctgctggaggaggcggtgggggcgggggctccgggcagtgctggcggcgtcctggctgccctgctggaccatgtcaggagcgggtcttgcttccacgccttgccgagccctcagtacttcgtggactttgtgttccagcagcacagcagcgaggtccctatgacgctggccgagctgtcagccttgatgcagcgcctgggggtgggcagggaggcccacagtgaccacagtcatcggcacaggggagccagcagccgggaccctgtgcccctcatcagctccagcaacagctccagtgtgtgggacacggtatgcctgagtgccagggacgtgatggctgcatatggactgtcggaacaggctggggtgaccccggaggcctgggcccaactgagccctgccctgctccaacagcagctgagtggagcctgcacctcccagtccaggccccccgtccaggaccagctcagccagtcagagaggtatctgtacggctccctggccacgctgctcatctgcctctgcgcggtctttggcctcctgctgctgacctgcactggctgcaggggggtcacccactacatcctgcagaccttcctgagcctggcagtgggtgcagtcactggggacgctgtcctgcatctgacgcccaaggtgctggggctgcatacacacagcgaagagggcctcagcccacagcccacctggcgcctcctggctatgctggccgggctctacgccttcttcctgtttgagaacctcttcaatctcctgctgcccagggacccggaggacctggaggacgggccctgcggccacagcagccatagccacgggggccacagccacggtgtgtccctgcagctggcacccagcgagctccggcagcccaagcccccccacgagggctcccgcgcagacctggtggcggaggagagcccggagctgctgaaccctgagcccaggagactgagcccagagttgaggctactgccctatatgatcactctgggcgacgccgtgcacaacttcgccgacgggctggccgtgggcgccgccttcgcgtcctcctggaagaccgggctggccacctcgctggccgtgttctgccacgagttgccacacgagctgggggacttcgccgccttgctgcacgcggggctgtccgtgcgccaagcactgctgctgaacctggcctccgcgctcacggccttcgctggtctctacgtggcactcgcggttggagtcagcgaggagagcgaggcctggatcctggcagtggccaccggcctgttcctctacgtagcactctgcgacatgctcccggcgatgttgaaagtacgggacccgcggccctggctcctcttcctgctgcacaacgtgggcctgctgggcggctggaccgtcctgctgctgctgtccctgtacgaggatgacatcaccttctgataccctgccctagtcccccacctttgacttaagatcccacacctcacaaacctacagcccagaaaccagaagcccctatagaggccccagtcccaactccagtaaagacactcttgtccttgga

SEQ ID NO: 184086 - DNA, 583 bp, Homo sapiens
  Payload ID: 16266
  Gene Symbol: SLC39A4
  Gene Name: solute carrier family 39 (zinc transporter), member 4
  ENST ID: ENST00000526658
  CDS Start-End: 31-583
aacacccactgagcacgctgggagctgagtatggcgtccctggtctcgctggagctggggctgcttctggctgtgctggtggtgacggcgacggcgtccccgcctgctggtctgctgagcctgctcacctctggccagggcgctctggatcaagaggctctgggcggcctgttaaatacgctggcggaccgtgtgcactgcgccaacgggccgtgtggaaaggcctgcgtagatatccctcagctgctggaggaggcggtgggggcgggggctccgggcagtgctggcggcgtcctggctgccctgctggaccatgtcaggagcgggtcttgcttccacgccttgccgagccctcagtacttcgtggactttgtgttccagcagcacagcagcgaggtccctatgacgctggccgagctgtcagccttgatgcagcgcctgggggtgggcagggaggcccacagtgaccacagtcatcggcacaggggagccagcagccgggaccctgtgcccctcatcagctccagcaacagctccagtgtgtgggacacggtatgcctgagtgccagggacgtgatggctg

SEQ ID NO: 184087 - DNA, 2031 bp, Homo sapiens
  Payload ID: 16267
  Gene Symbol: SLC39A5
  Gene Name: solute carrier family 39 (zinc transporter), member 5
  Uniprot ID: Q6ZMH5
  ENST ID: ENST00000266980
  CDS Start-End: 294-1916
agtgaaccattaactcctctcttatgtgagccttcacacactggccccacccctgaccccgccccaaggcaggtgggctaggagggggtgcatgtccatctcagccttctatgtgacgtggcctccgatccacctggacacctggaggctaagcctggattcccccttccctgactcaggaactgcttaacgtctacagcaaggcctaataggggacctgagggcacagtcctcaggatgtttcggggagaataggagccagaacctgagcccctaagctattcccctcaccaatgatggggtccccagtgagtcatctgctggccggcttctgtgtgtgggtcgtcttgggctgggtagggggctcagtccccaacctgggccctgctgagcaggagcagaaccattacctggcccagctgtttggcctgtacggcgagaatgggacgctgactgcagggggcttggcgcggcttctccacagcctggggctaggccgagttcaggggcttcgcctgggacagcatgggcctctgactggacgggctgcatccccagctgcagacaattccacacacaggccacagaaccctgagctgagtgtggatgtctgggcagggatgcctctgggtccctcagggtggggtgacctggaagagtcaaaggcccctcacctaccccgtgggccagccccctcgggcctggacctccttcacaggcttctgttgctggaccactcattggctgaccacctgaatgaggattgtctgaacggctcccagctgctggtcaattttggcttgagccccgctgctcctctgacccctcgtcagtttgctctgctgtgcccagccctgctttatcagatcgacagccgcgtctgcatcggcgctccggcccctgcacccccaggggatctactatctgccctgcttcagagtgccctggcagtcctgttgctcagcctcccttctcccctatccctgctgctgctgcggctcctgggacctcgtctactacggcccttgctgggcttcctgggggccctggcggtgggcactctttgtggggatgcactgctacatctgctaccgcatgcacaagaagggcggcacgcaggacctggcggactaccagagaaggacctgggcccggggctgtcagtgctcggaggcctcttcctgctctttgtgctggagaacatgctggggcttttgcggcaccgagggctcaggccaagatgctgcaggcgaaaacgaaggaatctcgaaacacgcaacttggatccggagaatggcagtgggatggcccttcagcccctacaggcagctccagagccaggggctcagggccagagggagaagaacagccagcacccaccagctctggcccctcctgggcaccaaggccacagtcatgggcaccagggtggcactgatatcacgtggatggtcctcctgggagatggtctacacaacctcactgatgggctggccataggtgctgccttctctgatggcttctccagcggcctcagtaccaccttagcggtcttctgccatgagctgccccacgaactgggtgactttgccatgctgctccagtcagggctgtcctttcggcggctgctgctgctgagcctcgtgtctggagccctgggattggggggtgcagtcctgggggtggggctcagcctgggccctgtccccctcactccctgggtgtttggggtcactgctggggtcttcctctatgtggcccttgtggacatgctaccagccctgcttcgtcctccggagcccctgcctacgccccatgtgctcctgcaggggctggggctgctgctggggggcggcctcatgcttgccataaccctgctggaggagcggctactgcccgtgaccactgagggctgatggggccagtggaaaggggtcgggttgcccttccttccccccaaccacaggaatggaggcgggacacagggccagtaggagcaataggattttaataaacagaacccatcccaaa

SEQ ID NO: 184088 - DNA, 871 bp, Homo sapiens
  Payload ID: 16267
  Gene Symbol: SLC39A5
  Gene Name: solute carrier family 39 (zinc transporter), member 5
  ENST ID: ENST00000436633
  CDS Start-End: 155-871
tgtcccccttcctctgggtgtccttgtctcctgctatcaggaactgcttaacgtctacagcaaggcctaataggggacctgagggcacagtcctcaggatgtttcggggagaataggagccagaacctgagcccctaagctattcccctcaccaatgatggggtccccagagcagaaccattacctggcccagctgtttggcctgtacggcgagaatgggacgctgactgcagggggcttggcgcggcttctccacagcctggggctaggccgagttcaggggcttcgcctgggacagcatgggcctctgactggacgggctgcatccccagctgcagacaattccacacacaggccacagaaccctgagctgagtgtggatgtctgggcagggatgcctctgggtccctcagggtggggtgacctggaagagtcaaaggcccctcacctaccccgtgggccagccccctcgggcctggacctccttcacaggcttctgttgctggaccactcattggctgaccacctgaatgaggattgtctgaacggctcccagctgctggtcaattttggcttgagccccgctgctcctctgacccctcgtcagtttgctctgctgtgcccagccctgctttatcagatcgacagccgcgtctgcatcggcgctccggcccctgcacccccaggggatctactatctgccctgcttcagagtgccctggcagtcctgttgctcagcctcccttctcccctatccctgctgctgctgcggctcctgggacctcgtctactacggcccttgctgggcttcctgggggccctggcggtgggcactctttgtggggatgcactgctacatctgctaccgcat

SEQ ID NO: 184089 - DNA, 613 bp, Homo sapiens
  Payload ID: 16267
  Gene Symbol: SLC39A5
  Gene Name: solute carrier family 39 (zinc transporter), member 5
  ENST ID: ENST00000419753
  CDS Start-End: 146-613
ctgcctgcccccccagctggaaccaagaaggttgtgtcccccttcctctgggtgtccttgtctcctgctatcagggcacagtcctcaggatgtttcggggagaataggagccagaacctgagcccctaagctattcccctcaccaatgatggggtccccagtgagtcatctgctggccggcttctgtgtgtgggtcgtcttgggctgggtagggggctcagtccccaacctgggccctgctgagcaggagcagaaccattacctggcccagctgtttggcctgtacggcgagaatgggacgctgactgcagggggcttggcgcggcttctccacagcctggggctaggccgagttcaggggcttcgcctgggacagcatgggcctctgactggacgggctgcatccccagctgcagacaattccacacacaggccacagaaccctgagctgagtgtggatgtctgggcagggatgcctctgggtccctcagggtggggtgacctggaagagtcaaaggcccctcacctaccccgtgggccagccccctcgggcctggacctccttcacaggcttctgttgctggaccactcattggctgaccacctgaatgag

SEQ ID NO: 184090 - DNA, 559 bp, Homo sapiens
  Payload ID: 16267
  Gene Symbol: SLC39A5
  Gene Name: solute carrier family 39 (zinc transporter), member 5
  ENST ID: ENST00000424625
  CDS Start-End: 189-559
ctgcctgcccccccagctggaaccaagaaggttgtgtcccccttcctctgggtgtccttgtctcctgctatcaggaactgcttaacgtctacagcaaggcctaataggggacctgagggcacagtcctcaggatgtttcggggagaataggagccagaacctgagcccctaagctattcccctcaccaatgatggggtccccagtgagtcatctgctggccggcttctgtgtgtgggtcgtcttgggctgggtagggggctcagtccccaacctgggccctgctgagcaggagcagaaccattacctggcccagctgtttggcctgtacggcgagaatgggacgctgactgcagggggcttggcgcggcttctccacagcctggggctaggccgagttcaggggcttcgcctgggacagcatgggcctctgactggacgggctgcatccccagctgcagacaattccacacacaggccacagaaccctgagctgagtgtggatgtctgggcagggatgcctctgggtccctcagggtggggtgacctggaagagtcaaa

SEQ ID NO: 184091 - DNA, 1968 bp, Homo sapiens
  Payload ID: 16267
  Gene Symbol: SLC39A5
  Gene Name: solute carrier family 39 (zinc transporter), member 5
  Uniprot ID: Q6ZMH5
  ENST ID: ENST00000454355
  CDS Start-End: 231-1853
agctggaaccaagaaggttgtgtcccccttcctctgggtgtccttgtctcctgctatcagggcttcccctttcttggtcatcgatccctagagctctggctctttctcttcttggggaactgcttaacgtctacagcaaggcctaataggggacctgagggcacagtcctcaggatgtttcggggagaataggagccagaacctgagcccctaagctattcccctcaccaatgatggggtccccagtgagtcatctgctggccggcttctgtgtgtgggtcgtcttgggctgggtagggggctcagtccccaacctgggccctgctgagcaggagcagaaccattacctggcccagctgtttggcctgtacggcgagaatgggacgctgactgcagggggcttggcgcggcttctccacagcctggggctaggccgagttcaggggcttcgcctgggacagcatgggcctctgactggacgggctgcatccccagctgcagacaattccacacacaggccacagaaccctgagctgagtgtggatgtctgggcagggatgcctctgggtccctcagggtggggtgacctggaagagtcaaaggcccctcacctaccccgtgggccagccccctcgggcctggacctccttcacaggcttctgttgctggaccactcattggctgaccacctgaatgaggattgtctgaacggctcccagctgctggtcaattttggcttgagccccgctgctcctctgacccctcgtcagtttgctctgctgtgcccagccctgctttatcagatcgacagccgcgtctgcatcggcgctccggcccctgcacccccaggggatctactatctgccctgcttcagagtgccctggcagtcctgttgctcagcctcccttctcccctatccctgctgctgctgcggctcctgggacctcgtctactacggcccttgctgggcttcctgggggccctggcggtgggcactctttgtggggatgcactgctacatctgctaccgcatgcacaagaagggcggcacgcaggacctggcggactaccagagaaggacctgggcccggggctgtcagtgctcggaggcctcttcctgctctttgtgctggagaacatgctggggcttttgcggcaccgagggctcaggccaagatgctgcaggcgaaaacgaaggaatctcgaaacacgcaacttggatccggagaatggcagtgggatggcccttcagcccctacaggcagctccagagccaggggctcagggccagagggagaagaacagccagcacccaccagctctggcccctcctgggcaccaaggccacagtcatgggcaccagggtggcactgatatcacgtggatggtcctcctgggagatggtctacacaacctcactgatgggctggccataggtgctgccttctctgatggcttctccagcggcctcagtaccaccttagcggtcttctgccatgagctgccccacgaactgggtgactttgccatgctgctccagtcagggctgtcctttcggcggctgctgctgctgagcctcgtgtctggagccctgggattggggggtgcagtcctgggggtggggctcagcctgggccctgtccccctcactccctgggtgtttggggtcactgctggggtcttcctctatgtggcccttgtggacatgctaccagccctgcttcgtcctccggagcccctgcctacgccccatgtgctcctgcaggggctggggctgctgctggggggcggcctcatgcttgccataaccctgctggaggagcggctactgcccgtgaccactgagggctgatggggccagtggaaaggggtcgggttgcccttccttccccccaaccacaggaatggaggcgggacacagggccagtaggagcaataggattttaataaacagaacccatcccaaa

SEQ ID NO: 184092 - DNA, 588 bp, Homo sapiens
  Payload ID: 16267
  Gene Symbol: SLC39A5
  Gene Name: solute carrier family 39 (zinc transporter), member 5
  ENST ID: ENST00000437277
  CDS Start-End: 211-588
atgtgacgtggcctccgatccacctggacacctggaggctaagcctggattcccccttccctgactcaggaactgcttaacgtctacagcaaggcctaataggggacctgaggtgacagctcttatgttgccagtagggggcacagtcctcaggatgtttcggggagaataggagccagaacctgagcccctaagctattcccctcaccaatgatggggtccccagtgagtcatctgctggccggcttctgtgtgtgggtcgtcttgggctgggtagggggctcagtccccaacctgggccctgctgagcaggagcagaaccattacctggcccagctgtttggcctgtacggcgagaatgggacgctgactgcagggggcttggcgcggcttctccacagcctggggctaggccgagttcaggggcttcgcctgggacagcatgggcctctgactggacgggctgcatccccagctgcagacaattccacacacaggccacagaaccctgagctgagtgtggatgtctgggcagggatgcctctgggtccctcagggtggggtgacctggaagagtcaaaggcccct

SEQ ID NO: 184093 - DNA, 569 bp, Homo sapiens
  Payload ID: 16267
  Gene Symbol: SLC39A5
  Gene Name: solute carrier family 39 (zinc transporter), member 5
  ENST ID: ENST00000417965
  CDS Start-End: 184-569
ggaaccaagaaggttgtgtcccccttcctctgggtgtccttgtctcctgctatcagggcttcccctttcttggtcatcgatccctagagctctggctctttctcttcttgggggcacagtcctcaggatgtttcggggagaataggagccagaacctgagcccctaagctattcccctcaccaatgatggggtccccagtgagtcatctgctggccggcttctgtgtgtgggtcgtcttgggctgggtagggggctcagtccccaacctgggccctgctgagcaggagcagaaccattacctggcccagctgtttggcctgtacggcgagaatgggacgctgactgcagggggcttggcgcggcttctccacagcctggggctaggccgagttcaggggcttcgcctgggacagcatgggcctctgactggacgggctgcatccccagctgcagacaattccacacacaggccacagaaccctgagctgagtgtggatgtctgggcagggatgcctctgggtccctcagggtggggtgacctggaagagtcaaaggcccctcacctacc

SEQ ID NO: 184094 - DNA, 3543 bp, Homo sapiens
  Payload ID: 16268
  Gene Symbol: SLC39A6
  Gene Name: solute carrier family 39 (zinc transporter), member 6
  Uniprot ID: Q13433
  ENST ID: ENST00000269187
  CDS Start-End: 215-2482
gaaggctaggggcgcggctgccgggtggctgcgcggcgctgcccccggaccgaggggcagccaacccaatgaaaccaccgcgtgttcgcgcctggtagagatttctcgaagacaccagtgggcccgttccgagccctctggaccgcccgtgtggaaccaaacctgcgcgcgtggccgggccgtgggacaacgaggccgcggagacgaaggcgcaatggcgaggaagttatctgtaatcttgatcctgacctttgccctctctgtcacaaatccccttcatgaactaaaagcagctgctttcccccagaccactgagaaaattagtccgaattgggaatctggcattaatgttgacttggcaatttccacacggcaatatcatctacaacagcttttctaccgctatggagaaaataattctttgtcagttgaagggttcagaaaattacttcaaaatataggcatagataagattaaaagaatccatatacaccatgaccacgaccatcactcagaccacgagcatcactcagaccatgagcgtcactcagaccatgagcatcactcagagcacgagcatcactctgaccatgatcatcactctcaccataatcatgctgcttctggtaaaaataagcgaaaagctctttgcccagaccatgactcagatagttcaggtaaagatcctagaaacagccaggggaaaggagctcaccgaccagaacatgccagtggtagaaggaatgtcaaggacagtgttagtgctagtgaagtgacctcaactgtgtacaacactgtctctgaaggaactcactttctagagacaatagagactccaagacctggaaaactcttccccaaagatgtaagcagctccactccacccagtgtcacatcaaagagccgggtgagccggctggctggtaggaaaacaaatgaatctgtgagtgagccccgaaaaggctttatgtattccagaaacacaaatgaaaatcctcaggagtgtttcaatgcatcaaagctactgacatctcatggcatgggcatccaggttccgctgaatgcaacagagttcaactatctctgtccagccatcatcaaccaaattgatgctagatcttgtctgattcatacaagtgaaaagaaggctgaaatccctccaaagacctattcattacaaatagcctgggttggtggttttatagccatttccatcatcagtttcctgtctctgctgggggttatcttagtgcctctcatgaatcgggtgtttttcaaatttctcctgagtttccttgtggcactggccgttgggactttgagtggtgatgcttttttacaccttcttccacattctcatgcaagtcaccaccatagtcatagccatgaagaaccagcaatggaaatgaaaagaggaccacttttcagtcatctgtcttctcaaaacatagaagaaagtgcctattttgattccacgtggaagggtctaacagctctaggaggcctgtatttcatgtttcttgttgaacatgtcctcacattgatcaaacaatttaaagataagaagaaaaagaatcagaagaaacctgaaaatgatgatgatgtggagattaagaagcagttgtccaagtatgaatctcaactttcaacaaatgaggagaaagtagatacagatgatcgaactgaaggctatttacgagcagactcacaagagccctcccactttgattctcagcagcctgcagtcttggaagaagaagaggtcatgatagctcatgctcatccacaggaagtctacaatgaatatgtacccagagggtgcaagaataaatgccattcacatttccacgatacactcggccagtcagacgatctcattcaccaccatcatgactaccatcatattctccatcatcaccaccaccaaaaccaccatcctcacagtcacagccagcgctactctcgggaggagctgaaagatgccggcgtcgccactctggcctggatggtgataatgggtgatggcctgcacaatttcagcgatggcctagcaattggtgctgcttttactgaaggcttatcaagtggtttaagtacttctgttgctgtgttctgtcatgagttgcctcatgaattaggtgactttgctgttctactaaaggctggcatgaccgttaagcaggctgtcctttataatgcattgtcagccatgctggcgtatcttggaatggcaacaggaattttcattggtcattatgctgaaaatgtttctatgtggatatttgcacttactgctggcttattcatgtatgttgctctggttgatatggtacctgaaatgctgcacaatgatgctagtgaccatggatgtagccgctgggggtatttctttttacagaatgctgggatgcttttgggttttggaattatgttacttatttccatatttgaacataaaatcgtgtttcgtataaatttctagttaaggtttaaatgctagagtagcttaaaaagttgtcatagtttcagtaggtcatagggagatgagtttgtatgctgtactatgcagcgtttaaagttagtgggttttgtgatttttgtattgaatattgctgtctgttacaaagtcagttaaaggtacgttttaatatttaagttattctatcttggagataaaatctgtatgtgcaattcaccggtattaccagtttattatgtaaacaagagatttggcatgacatgttctgtatgtttcagggaaaaatgtctttaatgctttttcaagaactaacacagttattcctatactggattttaggtctctgaagaactgctggtgtttaggaataagaatgtgcatgaagcctaaaataccaagaaagcttatactgaatttaagcaaagaaataaaggagaaaagagaagaatctgagaattggggaggcatagattcttataaaaatcacaaaatttgttgtaaattagaggggagaaatttagaattaagtataaaaaggcagaattagtatagagtacattcattaaacatttttgtcaggattatttcccgtaaaaacgtagtgagcacttttcatatactaatttagttgtacatttaactttgtataatacagaaatctaaatatatttaatgaattcaagcaatatatcacttgaccaagaaattggaatttcaaaatgttcgtgcgggtatataccagatgagtacagtgagtagttttatgtatcaccagactgggttattgccaagttatatatcaccaaaagctgtatgactggatgttctggttacctggtttacaaaattatcagagtagtaaaactttgatatatatgaggatattaaaactacactaagtatcatttgattcgattcagaaagtactttgatatctctcagtgcttcagtgctatcattgtgagcaattgtcttttatatacggtactgtagccatactaggcctgtctgtggcattctctagatgtttcttttttacacaataaattccttatatcagcttg

SEQ ID NO: 184095 - DNA, 1657 bp, Homo sapiens
  Payload ID: 16268
  Gene Symbol: SLC39A6
  Gene Name: solute carrier family 39 (zinc transporter), member 6
  Uniprot ID: Q13433
  ENST ID: ENST00000440549
  CDS Start-End: 309-1610
cgaagggggcggtggttccccgcggcgctgcgcgcggcggtaattagtgattgtcttccagcttcgcgaaggctaggggcgcggctgccgggtggctgcgcggcgctgcccccggaccgaggggcagccaacccaatgaaaccaccgcgtgttcgcgcctggtagagatttctcgaagacaccagtgggcccgttccgagccctctggaccgcccgtgtggaaccaaacctgcgcgcgtggccgggccgtgggacaacgaggccgcggagactgtttcaatgcatcaaagctactgacatctcatggcatgggcatccaggttccgctgaatgcaacagagttcaactatctctgtccagccatcatcaaccaaattgatgctagatcttgtctgattcatacaagtgaaaagaaggctgaaatccctccaaagacctattcattacaaatagcctgggttggtggttttatagccatttccatcatcagtttcctgtctctgctgggggttatcttagtgcctctcatgaatcgggtgtttttcaaatttctcctgagtttccttgtggcactggccgttgggactttgagtggtgatgcttttttacaccttcttccacattctcatgcaagtcaccaccatagtcatagccatgaagaaccagcaatggaaatgaaaagaggaccacttttcagtcatctgtcttctcaaaacatagaagaaagtgcctattttgattccacgtggaagggtctaacagctctaggaggcctgtatttcatgtttcttgttgaacatgtcctcacattgatcaaacaatttaaagataagaagaaaaagaatcagaagaaacctgaaaatgatgatgatgtggagattaagaagcagttgtccaagtatgaatctcaactttcaacaaatgaggagaaagtagatacagatgatcgaactgaaggctatttacgagcagactcacaagagccctcccactttgattctcagcagcctgcagtcttggaagaagaagaggtcatgatagctcatgctcatccacaggaagtctacaatgaatatgtacccagagggtgcaagaataaatgccattcacatttccacgatacactcggccagtcagacgatctcattcaccaccatcatgactaccatcatattctccatcatcaccaccaccaaaaccaccatcctcacagtcacagccagcgctactctcgggaggagctgaaagatgccggcgtcgccactctggcctggatggtgataatgggtgatggcctgcacaatttcagcgatggcctagcaattggtgctgcttttactgaaggcttatcaagtggtttaagtacttctgttgctgtgttctgtcatgagttgcctcatgaattaggtgactttgctgttctactaaaggctggcatgaccgttaagcaggctgtcctttataatgcattgtcagccatgctggcgtatcttggaatggcaacaggaattttcattggtcattatgctgaaaatgtttctatgtggatatttgcacttactgctggcttattcatgtatgttgctctggttgatatggtaagtttttaagaagtcttattacattattgaccaacaataaaatagagaaaatattc

SEQ ID NO: 184096 - DNA, 3003 bp, Homo sapiens
  Payload ID: 16268
  Gene Symbol: SLC39A6
  Gene Name: solute carrier family 39 (zinc transporter), member 6
  Uniprot ID: Q13433
  ENST ID: ENST00000590986
  CDS Start-End: 291-2558
gggggcggtggttccccgcggcgctgcgcgcggcggtaattagtgattgtcttccagcttcgcgaaggctaggggcgcggctgccgggtggctgcgcggcgctgcccccggaccgaggggcagccaacccaatgaaaccaccgcgtgttcgcgcctggtagagatttctcgaagacaccagtgggcccgttccgagccctctggaccgcccgtgtggaaccaaacctgcgcgcgtggccgggccgtgggacaacgaggccgcggagacgtgagtctttcaggaaggcgcaatggcgaggaagttatctgtaatcttgatcctgacctttgccctctctgtcacaaatccccttcatgaactaaaagcagctgctttcccccagaccactgagaaaattagtccgaattgggaatctggcattaatgttgacttggcaatttccacacggcaatatcatctacaacagcttttctaccgctatggagaaaataattctttgtcagttgaagggttcagaaaattacttcaaaatataggcatagataagattaaaagaatccatatacaccatgaccacgaccatcactcagaccacgagcatcactcagaccatgagcgtcactcagaccatgagcatcactcagagcacgagcatcactctgaccatgatcatcactctcaccataatcatgctgcttctggtaaaaataagcgaaaagctctttgcccagaccatgactcagatagttcaggtaaagatcctagaaacagccaggggaaaggagctcaccgaccagaacatgccagtggtagaaggaatgtcaaggacagtgttagtgctagtgaagtgacctcaactgtgtacaacactgtctctgaaggaactcactttctagagacaatagagactccaagacctggaaaactcttccccaaagatgtaagcagctccactccacccagtgtcacatcaaagagccgggtgagccggctggctggtaggaaaacaaatgaatctgtgagtgagccccgaaaaggctttatgtattccagaaacacaaatgaaaatcctcaggagtgtttcaatgcatcaaagctactgacatctcatggcatgggcatccaggttccgctgaatgcaacagagttcaactatctctgtccagccatcatcaaccaaattgatgctagatcttgtctgattcatacaagtgaaaagaaggctgaaatccctccaaagacctattcattacaaatagcctgggttggtggttttatagccatttccatcatcagtttcctgtctctgctgggggttatcttagtgcctctcatgaatcgggtgtttttcaaatttctcctgagtttccttgtggcactggccgttgggactttgagtggtgatgcttttttacaccttcttccacattctcatgcaagtcaccaccatagtcatagccatgaagaaccagcaatggaaatgaaaagaggaccacttttcagtcatctgtcttctcaaaacatagaagaaagtgcctattttgattccacgtggaagggtctaacagctctaggaggcctgtatttcatgtttcttgttgaacatgtcctcacattgatcaaacaatttaaagataagaagaaaaagaatcagaagaaacctgaaaatgatgatgatgtggagattaagaagcagttgtccaagtatgaatctcaactttcaacaaatgaggagaaagtagatacagatgatcgaactgaaggctatttacgagcagactcacaagagccctcccactttgattctcagcagcctgcagtcttggaagaagaagaggtcatgatagctcatgctcatccacaggaagtctacaatgaatatgtacccagagggtgcaagaataaatgccattcacatttccacgatacactcggccagtcagacgatctcattcaccaccatcatgactaccatcatattctccatcatcaccaccaccaaaaccaccatcctcacagtcacagccagcgctactctcgggaggagctgaaagatgccggcgtcgccactctggcctggatggtgataatgggtgatggcctgcacaatttcagcgatggcctagcaattggtgctgcttttactgaaggcttatcaagtggtttaagtacttctgttgctgtgttctgtcatgagttgcctcatgaattaggtgactttgctgttctactaaaggctggcatgaccgttaagcaggctgtcctttataatgcattgtcagccatgctggcgtatcttggaatggcaacaggaattttcattggtcattatgctgaaaatgtttctatgtggatatttgcacttactgctggcttattcatgtatgttgctctggttgatatggtacctgaaatgctgcacaatgatgctagtgaccatggatgtagccgctgggggtatttctttttacagaatgctgggatgcttttgggttttggaattatgttacttatttccatatttgaacataaaatcgtgtttcgtataaatttctagttaaggtttaaatgctagagtagcttaaaaagttgtcatagtttcagtaggtcatagggagatgagtttgtatgctgtactatgcagcgtttaaagttagtgggttttgtgatttttgtattgaatattgctgtctgttacaaagtcagttaaaggtacgttttaatatttaagttattctatcttggagataaaatctgtatgtgcaattcaccggtattaccagtttattatgtaaacaagagatttggcatgacatgttctgtatgtttcagggaaaaatgtctttaatgctttttcaagaactaacacagttattcctatactggattttaggtctctgaagaactgctggtgtttaggaataagaatgtgcatgaagcctaaaataccaagaaagcttatactgaatttaagcaaagaaataaaggagaaaagagaagaa

SEQ ID NO: 184097 - DNA, 823 bp, Homo sapiens
  Payload ID: 16268
  Gene Symbol: SLC39A6
  Gene Name: solute carrier family 39 (zinc transporter), member 6
  ENST ID: ENST00000586829
  CDS Start-End: 5-823
tttcatgtttcttgttgaacatgtcctcacattgatcaaacaatttaaagataagaagaaaaagaatcagaagaaacctgaaaatgatgatgatgtggagattaagaagcagttgtccaagtatgaatctcaactttcaacaaatgaggagaaagtagatacagatgatcgaactgaaggctatttacgagcagactcacaagagccctcccactttgattctcagcagcctgcagtcttggaagaagaagaggtcatgatagctcatgctcatccacaggaagtctacaatgaatatgtacccagagggtgcaagaataaatgccattcacatttccacgatacactcggccagtcagacgatctcattcaccaccatcatgactaccatcatattctccatcatcaccaccaccaaaaccaccatcctcacagtcacagccagcgctactctcgggaggagctgaaagatgccggcgtcgccactctggcctggatggtgataatgggtgatggcctgcacaatttcagcgatggcctagcaattggtgctgcttttactgaaggcttatcaagtggtttaagtacttctgttgctgtgttctgtcatgagttgcctcatgaattaggtgactttgctgttctactaaaggctggcatgaccgttaagcaggctgtcctttataatgcattgtcagccatgctggcgtatcttggaatggcaacaggaattttcattggtcattatgctgaaaatgtttctatgtggatatttgcacttactgctggcttattcatgtatgttgctctggttgatatggta

SEQ ID NO: 184098 - DNA, 2153 bp, Homo sapiens
  Payload ID: 16269
  Gene Symbol: SLC39A7
  Gene Name: solute carrier family 39 (zinc transporter), member 7
  Uniprot ID: Q92504
  ENST ID: ENST00000374675
  CDS Start-End: 118-1527
atattggtaaaggcattagggcgaaggtggaacggaacttcctgttctcgcgggatctaaaggcgggactgccacgtccaagcaaaccgggaaaggagaggatcccggagccgcgtgatggccagaggcctgggggccccccactgggtggccgtgggactgctgacctgggcgaccttggggcttctggtggctggactcgggggtcatgacgacctgcacgacgatctgcaagaggacttccatggccacagccacaggcactcacatgaagatttccaccatggccacagccatgcccatggccatggccacactcacgagagcatctggcatggacatacccacgatcacgaccatggacattcacatgaggatttacaccatggccatagccatggctactcccatgagagcctctaccacagaggacatggacatgaccatgagcatagccatggaggctatggggagtctggggctccaggcatcaagcaggacctggatgctgtcactctctgggcttatgcactgggggccacagtgctgatctcagcagctccattttttgtcctcttccttatccccgtggagtcgaactctccccggcatcgctctctacttcagatcttgctcagttttgcttccggtgggctcctgggagatgctttcctgcacctcattcctcatgctcttgaacctcattctcaccacactctggagcaacccggacatggacactcccacagtggccagggccccattctgtctgtgggactgtgggttctcagtggaattgttgcctttcttgtcgtggagaaatttgtgagacatgtgaaaggaggacatggtcacagtcatggacatggacacgctcacagtcatacacgtggaagtcatggacatggaagacaagagcgttctaccaaggagaagcagagctcagaggaagaagaaaaggaaacaagaggggttcagaagaggcgaggagggagcacagtacccaaagatgggccagtgagacctcagaacgctgaagaagaaaaaagaggcttagacctgcgtgtgtcggggtacctgaatctggctgctgacttggcacacaacttcactgatggtctggccattggggcttcctttcgagggggccggggactagggatcctgaccacaatgactgtcctgctacatgaagtgccccacgaggtcggagactttgccatcttggtccagtctggctgcagcaaaaagcaggcgatgcgtctgcaactactgacagcagtaggggcactggcaggcacagcctgtgcccttctcactgaaggaggagcagtgggcagtgaaattgcaggtggtgcaggtcctggctgggtcctgccatttactgcaggtggctttatctacgtagcaacagtgtctgtgttgcccgagctgctgagggaggcatcaccattgcaatcacttctggaggtgctggggctgctggggggagttatcatgatggtgctgattgcccaccttgagtgaggggtggataaactacccctgccccaaacctctacccctaactccaggtcaggggtgcgtagaggttgggggccctggccagggacatctgccaaaggaaggaactgtagcctgggagaatggttactttggcattagggccttcaagggctggcagtcttacagaggctggagcggtgagaatgagaggccagagggaccatagtgttgggcactgtctgaccatgttgcatttggaaggctaaatggggccatgaagaaggctggaagggacagggggtgatggcagcctacctggtgtcccctaccccacctgttctcggagaaccaagttgctacacaggaagttctccaaggtccagtttcctttctcccaccagttggtggaggcttcagggaagaccagagtcctggacagagagggtaacaggaggagtcggggataaacatcaaacatcaatcgtgtgtcctgatttgggagtgattggggggatggggtgggagagggttagttggtattctcatggcctgattttttttgtttctattccttttatatcactgtgtttgaatcgagggggaggggtggtaaccggaaataaagacctccgatcttccgccccaca

SEQ ID NO: 184099 - DNA, 2409 bp, Homo sapiens
  Payload ID: 16269
  Gene Symbol: SLC39A7
  Gene Name: solute carrier family 39 (zinc transporter), member 7
  Uniprot ID: Q92504
  ENST ID: ENST00000374677
  CDS Start-End: 374-1783
tcgcgggatctaaaggcgggactgccacgtccaagcaaaccgggaaaggagaggatcccggagccggtgagaattctctgttttttctctaccatcctttccaggccttttcctcacctaatgagtcgtagagacgagggcccagagagtctgtaaagtggctggtgaaagattagtgtcccagggccctacatccgggaggtggttcgggataaagagaactagtcttgggaacaatgtaggtgggaacttaagggaatgggagagcggcccatagaggtggacggagggcgcgattggagtaaagcggaccctgtgtaggtatagagttgagtcaagtggagtcactgcctctgtccctctggtcagcgtgatggccagaggcctgggggccccccactgggtggccgtgggactgctgacctgggcgaccttggggcttctggtggctggactcgggggtcatgacgacctgcacgacgatctgcaagaggacttccatggccacagccacaggcactcacatgaagatttccaccatggccacagccatgcccatggccatggccacactcacgagagcatctggcatggacatacccacgatcacgaccatggacattcacatgaggatttacaccatggccatagccatggctactcccatgagagcctctaccacagaggacatggacatgaccatgagcatagccatggaggctatggggagtctggggctccaggcatcaagcaggacctggatgctgtcactctctgggcttatgcactgggggccacagtgctgatctcagcagctccattttttgtcctcttccttatccccgtggagtcgaactctccccggcatcgctctctacttcagatcttgctcagttttgcttccggtgggctcctgggagatgctttcctgcacctcattcctcatgctcttgaacctcattctcaccacactctggagcaacccggacatggacactcccacagtggccagggccccattctgtctgtgggactgtgggttctcagtggaattgttgcctttcttgtcgtggagaaatttgtgagacatgtgaaaggaggacatggtcacagtcatggacatggacacgctcacagtcatacacgtggaagtcatggacatggaagacaagagcgttctaccaaggagaagcagagctcagaggaagaagaaaaggaaacaagaggggttcagaagaggcgaggagggagcacagtacccaaagatgggccagtgagacctcagaacgctgaagaagaaaaaagaggcttagacctgcgtgtgtcggggtacctgaatctggctgctgacttggcacacaacttcactgatggtctggccattggggcttcctttcgagggggccggggactagggatcctgaccacaatgactgtcctgctacatgaagtgccccacgaggtcggagactttgccatcttggtccagtctggctgcagcaaaaagcaggcgatgcgtctgcaactactgacagcagtaggggcactggcaggcacagcctgtgcccttctcactgaaggaggagcagtgggcagtgaaattgcaggtggtgcaggtcctggctgggtcctgccatttactgcaggtggctttatctacgtagcaacagtgtctgtgttgcccgagctgctgagggaggcatcaccattgcaatcacttctggaggtgctggggctgctggggggagttatcatgatggtgctgattgcccaccttgagtgaggggtggataaactacccctgccccaaacctctacccctaactccaggtcaggggtgcgtagaggttgggggccctggccagggacatctgccaaaggaaggaactgtagcctgggagaatggttactttggcattagggccttcaagggctggcagtcttacagaggctggagcggtgagaatgagaggccagagggaccatagtgttgggcactgtctgaccatgttgcatttggaaggctaaatggggccatgaagaaggctggaagggacagggggtgatggcagcctacctggtgtcccctaccccacctgttctcggagaaccaagttgctacacaggaagttctccaaggtccagtttcctttctcccaccagttggtggaggcttcagggaagaccagagtcctggacagagagggtaacaggaggagtcggggataaacatcaaacatcaatcgtgtgtcctgatttgggagtgattggggggatggggtgggagagggttagttggtattctcatggcctgattttttttgtttctattccttttatatcactgtgtttgaatcgagggggaggggtggtaaccggaaataaagacctccgatcttccgccccaca

SEQ ID NO: 184100 - DNA, 2409 bp, Homo sapiens; identical to SEQ ID NO: 184099
  Payload ID: 16269
  Gene Symbol: SLC39A7
  Gene Name: solute carrier family 39 (zinc transporter), member 7
  Uniprot ID: Q92504
  ENST ID: ENST00000383213
  CDS Start-End: 374-1783

SEQ ID NO: 184101 - DNA, 2153 bp, Homo sapiens; identical to SEQ ID NO: 184098
  Payload ID: 16269
  Gene Symbol: SLC39A7
  Gene Name: solute carrier family 39 (zinc transporter), member 7
  Uniprot ID: Q92504
  ENST ID: ENST00000383214
  CDS Start-End: 118-1527

SEQ ID NO: 184102 - DNA, 2153 bp, Homo sapiens; identical to SEQ ID NO: 184098
  Payload ID: 16269
  Gene Symbol: SLC39A7
  Gene Name: solute carrier family 39 (zinc transporter), member 7
  Uniprot ID: Q92504
  ENST ID: ENST00000423043
  CDS Start-End: 118-1527

SEQ ID NO: 184103 - DNA, 1015 bp, Homo sapiens
  Payload ID: 16269
  Gene Symbol: SLC39A7
  Gene Name: solute carrier family 39 (zinc transporter), member 7
  ENST ID: ENST00000414757
  CDS Start-End: 354-1015
gggaggaagggcgggcgagcggcccaagacatgatccctggctgagagtagggataccgaagaggtcccagggattcccaaggattgatcggaggattagctgagcacgaggaagcccctgagagaaagactctggcctggattgggtcgaattaagcccgtcgctctgctcagtaccaaaatgacagcgccaatgtggcagccatctttgtacagacgggaagtctcggcgcgagttcccgccccctcgtctagttggaaaccgaggaggcggtctcctccggcctgttagcccgcctcgcccaccctcccctcaaatcacctccacactcgcgcatgcgtgtcagtgcaggatggattcgtcgctaccggagtgccgccatattggtaaaggcattagggcgaaggtggaacggaacttcctgttctcgcgggatctaaaggcgggactgccacgtccaagcaaaccgggaaaggagaggatcccggagccggcactgggggccacagtgctgatctcagcagctccattttttgtcctcttccttatccccgtggagtcgaactctccccggcatcgctctctacttcagatcttgctcagttttgcttccggtgggctcctgggagatgctttcctgcacctcattcctcatgctcttgaacctcattctcaccacactctggagcaacccggacatggacactcccacagtggccagggccccattctgtctgtgggactgtgggttctcagtggaattgttgcctttcttgtcgtggagaaatttgtgagacatgtgaaaggaggacatggtcacagtcatggacatggacacgctcacagtcatacacgtggaagtcatggacatggaagacaagagcgttctaccaaggagaagcagagctcagaggaagaagaaaaggaaacaagaggggttcagaagaggcgaggagggagcacagtacccaaagatgggccagtgagacctcagaacgctgaagaagaaaaaag

SEQ ID NO: 184104 - DNA, 2409 bp, Homo sapiens; identical to SEQ ID NO: 184099
  Payload ID: 16269
  Gene Symbol: SLC39A7
  Gene Name: solute carrier family 39 (zinc transporter), member 7
  Uniprot ID: Q92504
  ENST ID: ENST00000441854
  CDS Start-End: 374-1783

SEQ ID NO: 184105 - DNA, 1015 bp, Homo sapiens; identical to SEQ ID NO: 184103
  Payload ID: 16269
  Gene Symbol: SLC39A7
  Gene Name: solute carrier family 39 (zinc transporter), member 7
  ENST ID: ENST00000444757
  CDS Start-End: 354-1015

SEQ ID NO: 184106 - DNA, 2153 bp, Homo sapiens; identical to SEQ ID NO: 184098
  Payload ID: 16269
  Gene Symbol: SLC39A7
  Gene Name: solute carrier family 39 (zinc transporter), member 7
  Uniprot ID: Q92504
  ENST ID: ENST00000416369
  CDS Start-End: 118-1527

SEQ ID NO: 184107 - DNA, 1015 bp, Homo sapiens; identical to SEQ ID NO: 184103
  Payload ID: 16269
  Gene Symbol: SLC39A7
  Gene Name: solute carrier family 39 (zinc transporter), member 7
  ENST ID: ENST00000454420
  CDS Start-End: 354-1015

SEQ ID NO: 184108 - DNA, 1015 bp, Homo sapiens; identical to SEQ ID NO: 184103
  Payload ID: 16269
  Gene Symbol: SLC39A7
  Gene Name: solute carrier family 39 (zinc transporter), member 7
  ENST ID: ENST00000429042
  CDS Start-End: 354-1015

SEQ ID NO: 184109 - DNA, 2153 bp, Homo sapiens; identical to SEQ ID NO: 184098
  Payload ID: 16269
  Gene Symbol: SLC39A7
  Gene Name: solute carrier family 39 (zinc transporter), member 7
  Uniprot ID: Q92504
  ENST ID: ENST00000443773
  CDS Start-End: 118-1527

SEQ ID NO: 184110 - DNA, 2409 bp, Homo sapiens; identical to SEQ ID NO: 184099
  Payload ID: 16269
  Gene Symbol: SLC39A7
  Gene Name: solute carrier family 39 (zinc transporter), member 7
  Uniprot ID: Q92504
  ENST ID: ENST00000431735
  CDS Start-End: 374-1783

SEQ ID NO: 184111 - DNA, 1015 bp, Homo sapiens; identical to SEQ ID NO: 184103
  Payload ID: 16269
  Gene Symbol: SLC39A7
  Gene Name: solute carrier family 39 (zinc transporter), member 7
  ENST ID: ENST00000425069
  CDS Start-End: 354-1015

SEQ ID NO: 184112 - DNA, 2153 bp, Homo sapiens; identical to SEQ ID NO: 184098
  Payload ID: 16269
  Gene Symbol: SLC39A7
  Gene Name: solute carrier family 39 (zinc transporter), member 7
  Uniprot ID: Q92504
  ENST ID: ENST00000441953
  CDS Start-End: 118-1527

SEQ ID NO: 184113 - DNA, 2409 bp, Homo sapiens; identical to SEQ ID NO: 184099
  Payload ID: 16269
  Gene Symbol: SLC39A7
  Gene Name: solute carrier family 39 (zinc transporter), member 7
  Uniprot ID: Q92504
  ENST ID: ENST00000456261
  CDS Start-End: 374-1783

SEQ ID NO: 184114 - DNA, 2409 bp, Homo sapiens; identical to SEQ ID NO: 184099
  Payload ID: 16269
  Gene Symbol: SLC39A7
  Gene Name: solute carrier family 39 (zinc transporter), member 7
  Uniprot ID: Q92504
  ENST ID: ENST00000418477
  CDS Start-End: 374-1783

SEQ ID NO: 184115 - DNA, 1015 bp, Homo sapiens; identical to SEQ ID NO: 184103
  Payload ID: 16269
  Gene Symbol: SLC39A7
  Gene Name: solute carrier family 39 (zinc transporter), member 7
  ENST ID: ENST00000414916
  CDS Start-End: 354-1015

SEQ ID NO: 184116 - DNA, 2317 bp, Homo sapiens
  Payload ID: 16269
  Gene Symbol: SLC39A7
  Gene Name: solute carrier family 39 (zinc transporter), member 7
  ENST ID: ENST00000612440
  CDS Start-End: 286-1575
ctaccatcctttccaggccttttcctcacctaatgagtcgtagagacgagggcccagagagtctgtaaagtggctggtgaaagattagtgtcccagggccctacatccgggaggtggttcgggataaagagaactagtcttgggaacaatgtaggtgggaacttaagggaatgggagagcggcccatagaggtggacggagggcgcgattggagtaaagcggaccctgtgtaggtatagagttgagtcaagtggagtcactgcctctgtccctctggtcagcgtgatggccagaggcctgggggccccccactgggtggccgtgggactgctgacctgggcgaccttggggcttctggtggctggactcgggggtcatgacgacctgcacgacgatctgcaagaggacttccatggccacagccacaggcactcacatgaagatttccaccatggccacagccatgcccatggccatggccacactcacgagagcatctggcatggacatacccacgatcacgaccatggacattcacatgaggatttacaccatggccatagccatggctactcccatgagagcctctaccacagaggacatggacatgaccatgagcatagccatggaggctatggggagtctggggctccaggcatcaagcaggacctggatgctgtcactctctgggcttatgcactgggggccacagtgctgatctcagcagctccattttttgtcctcttccttatccccgtggagtcgaactctccccggcatcgctctctacttcagatcttgctcagttttgcttccggtgggctcctgggagatgctttcctgcacctcattcctcatgctcttgaacctcattctcaccacactctggagcaacccggacatggacactcccacagtggccagggccccattctgtctgtgggactgtgggttctcagtggaattgttgcctttcttgtcgtggagaaatttgtgagacatgtgaaaggaggacatggtcacagtcatggacatggacacgctcacagtcatacacgtggaagtcatggacatggaagacaagagcgttctaccaaggagaagcagagctcagaggaagaagaaaaggaaacaagaggggttcagaagaggcgaggagggagcacagtacccaaagatgggccagtgagacctcagaacgctgaagaagaaaaaagaggcttagacctgcgtgtgtcggggtacctgaatctggctgctgacttggcacacaacttcactgatggtctggccattggggcttcctttcgagggggccggggactagggatcctgaccacaatgactgtcctgctacatgaagtgccccacgaggtcggagactttgccatcttggtccagtctggctgcagcaaaaagcaggcgatgcgtctgcaactactgacagcagtaggggcactggcaggcacagccgtgcccttctcactgaaggaggagcagtgggcagtgaaattgcaggtggtgcaggtcctggctgggtcctgccatttactgcaggtggctttatctacgtagcaacagtgtctgtgttgcccgagctgctgagggaggcatcaccattgcaatcacttctggaggtgctggggctgctggggggagttatcatgatggtgctgattgcccaccttgagtgaggggtggataaactacccctgccccaaacctctacccctaactccaggtcaggggtgcgtagaggttgggggccctggccagggacatctgccaaaggaaggaactgtagcctgggagaatggttactttggcattagggccttcaagggctggcagtcttacagaggctggagcggtgagaatgagaggccagagggaccatagtgttgggcactgtctgaccatgttgcatttggaaggctaaatggggccatgaagaaggctggaagggacagggggtgatggcagcctacctggtgtcccctaccccacctgttctcggagaaccaagttgctacacaggaagttctccaaggtccagtttcctttctcccaccagttggtggaggcttcagggaagaccagagtcctggacagagagggtaacaggaggagtcggggataaacatcaaacatcaatcgtgtgtcctgatttgggagtgattggggggatggggtgggagagggttagttggtattctcatggcctgattttttttgtttctattccttttatatcactgtgtttgaatcgagggggaggggtggtaaccggaaataaagacctccgatcttccgcccc

SEQ ID NO: 184117 - DNA, 2317 bp, Homo sapiens; identical to SEQ ID NO: 184116
  Payload ID: 16269
  Gene Symbol: SLC39A7
  Gene Name: solute carrier family 39 (zinc transporter), member 7
  ENST ID: ENST00000617885
  CDS Start-End: 286-1575

SEQ ID NO: 184118 - DNA, 2317 bp, Homo sapiens; identical to SEQ ID NO: 184116
  Payload ID: 16269
  Gene Symbol: SLC39A7
  Gene Name: solute carrier family 39 (zinc transporter), member 7
  ENST ID: ENST00000617579
  CDS Start-End: 286-1575

SEQ ID NO: 184119 - DNA, 2317 bp, Homo sapiens; identical to SEQ ID NO: 184116
  Payload ID: 16269
  Gene Symbol: SLC39A7
  Gene Name: solute carrier family 39 (zinc transporter), member 7
  ENST ID: ENST00000616353
  CDS Start-End: 286-1575

SEQ ID NO: 184120 - DNA, 2317 bp, Homo sapiens; identical to SEQ ID NO: 184116
  Payload ID: 16269
  Gene Symbol: SLC39A7
  Gene Name: solute carrier family 39 (zinc transporter), member 7
  ENST ID: ENST00000612544
  CDS Start-End: 286-1575

SEQ ID NO: 184121 - DNA, 2317 bp, Homo sapiens; identical to SEQ ID NO: 184116
  Payload ID: 16269
  Gene Symbol: SLC39A7
  Gene Name: solute carrier family 39 (zinc transporter), member 7
  ENST ID: ENST00000619171
  CDS Start-End: 286-1575

SEQ ID NO: 184122 - DNA, 3144 bp, Homo sapiens
  Payload ID: 16270
  Gene Symbol: SLC39A8
  Gene Name: solute carrier family 39 (zinc transporter), member 8
  Uniprot ID: Q9C0K1
  ENST ID: ENST00000356736
  CDS Start-End: 384-1766
ccgcggacctgtcagagatacagaggttgtgggggcgggagacagaaagagagagagatccagagaccgagtcttacgttgacacgcagagagaaagacgcagagacagacaaacaaacagataggagaggctctccaggaggccggggggcccactccgcctatcgctcccctcggctacgctgccacttcaatgccccgcaggtcgcgagctgctgttctttcgaaggcgtcggagaaccaggggcgtcccgcgccacctctgactcggagcagcgccgagcactgacgctcccgcccttgggcaaggacgccagtgcgcccgcgcgcgtccctctgcgcggcagcccgtcgcgggccctcaaggggaagcccaggccaggatggccccgggtcgcgcggtggccgggctcctgttgctggcggccgccggcctcggaggagtggcggaggggccagggctagccttcagcgaggatgtgctgagcgtgttcggcgcgaatctgagcctgtcggcggcgcagctccagcacttgctggagcagatgggagccgcctcccgcgtgggcgtcccggagcctggccagctgcacttcaaccagtgtttaactgctgaagagatcttttcccttcatggcttttcaaatgctacccaaataaccagctccaaattctctgtcatctgtccagcagtcttacagcaattgaactttcacccatgtgaggatcggcccaagcacaaaacaagaccaagtcattcagaagtttggggatatggattcctgtcagtgacgattattaatctggcatctctcctcggattgattttgactccactgataaagaaatcttatttcccaaagattttgaccttttttgtggggctggctattgggactcttttttcaaatgcaattttccaacttattccagaggcatttggatttgatcccaaagtcgacagttatgttgagaaggcagttgctgtgtttggtggattttacctacttttcttttttgaaagaatgctaaagatgttattaaagacatatggtcagaatggtcatacccactttggaaatgataactttggtcctcaagaaaaaactcatcaacctaaagcattacctgccatcaatggtgtgacatgctatgcaaatcctgctgtcacagaagctaatggacatatccattttgataatgtcagtgtggtatctctacaggatggaaaaaaagagccaagttcatgtacctgtttgaaggggcccaaactgtcagaaatagggacgattgcctggatgataacgctctgcgatgccctccacaatttcatcgatggcctggcgattggggcttcctgcaccttgtctctccttcagggactcagtacttccatagcaatcctatgtgaggagtttccccacgagttaggagactttgtgatcctactcaatgcagggatgagcactcgacaagccttgctattcaacttcctttctgcatgttcctgctatgttgggctagcttttggcattttggtgggcaacaatttcgctccaaatattatatttgcacttgctggaggcatgttcctctatatttctctggcagatatgtttccagagatgaatgatatgctgagagaaaaggtaactggaagaaaaaccgatttcaccttcttcatgattcagaatgctggaatgttaactggattcacagccattctactcattaccttgtatgcaggagaaatcgaattggagtaatagaaaatggaagatggtgttgttaataaaggcatttaatagataaaaacatctccaaaaaggattttgaagctgatcctatttagttaaaaagataattttgctttcaactgtaggtccagaaaactaattattggcatcagtctgtgaaatagtccattatttgttgttaaaaatgcttcaaaaggttttcagtgtcagtctgagatgcctggtatataggagcctttgggaaatacctatttttcagtattccatgcatattagatatcaccatgaagcaagagacatgcattctataatcatgtagacactcagactcaggggaaaatacaagttatatcctgaaagcctttaaaactctatggtaggatcaaagattcaaatggtttcagagaggttttatttcaattaatttgttctagtgctttcaagagcaagtacatcaaaatgtagaaggtaaaatgtatgcaacactaatataaattattccaagtctttaaggagccaaagaaaaaaaagatttctcacagctttttgttctgttttgtatttcaattaggaacttgcagtattattttgaaaaccattctaaaataataggagttaggaaataaataaagttttgctagccctgctaagttcaggcttagaggcttatcgctaagtataaacttcaccagattccacgaaaagctggatagctttttttctgacttatgttgtggttgcacccctcacaaatggcagaacagtatgtaaagctggtaacacctcggtttcagtgcaccatgtgtttgctttgtgaaggtgaagaatatgttggtttagagaaagaaattggatgtaattttatgcaatttacttttaaagacaaacataactatttagcagagaatattttaataaatgcaaaacaacagctggactgctgtacatcaaggacagattaactggaaaacatatgttccttatgtgtgatcgagagccattcagaaaagacttcctttgtgttcagcctatacttttccatatggtataccttgaaaaaaattagcacaccatggttatttttctaccttttataaaagacagagcctgtttactcatttagaagatagagaaaattggtctaaaattgaacatcctagattcacactcccaagtcacttaaggtgatttgatggtgaggaaaatgattgacaaagcccaacaatgatctcaggaattacattttccaacagaccaaaaaatgttttcatgtagcagcaatgcagatttggtgaatatttaatatatattttagtatgtatttcactttatgactgacaattaaaaaatattgtttggccaaatagtaaacacccttttgaaacca

SEQ ID NO: 184123 - DNA, 3238 bp, Homo sapiens
  Payload ID: 16270
  Gene Symbol: SLC39A8
  Gene Name: solute carrier family 39 (zinc transporter), member 8
  Uniprot ID: Q9C0K1
  ENST ID: ENST00000394833
  CDS Start-End: 478-1860
agtgtggttttagtttttcctaagaagtggcgtggtttggggctttatatccgggaggagcatatgtacgcaaatcctggggcgtttgcaaacccggatccggggcgtctggccccatgcccggccgggcgtttgagggctactgccacgcagcgtttctggagcctgccggctggtgccctggtggcctttatctctgtccccctttgtcctctttatctcaggctctccaggaggccggggggcccactccgcctatcgctcccctcggctacgctgccacttcaatgccccgcaggtcgcgagctgctgttctttcgaaggcgtcggagaaccaggggcgtcccgcgccacctctgactcggagcagcgccgagcactgacgctcccgcccttgggcaaggacgccagtgcgcccgcgcgcgtccctctgcgcggcagcccgtcgcgggccctcaaggggaagcccaggccaggatggccccgggtcgcgcggtggccgggctcctgttgctggcggccgccggcctcggaggagtggcggaggggccagggctagccttcagcgaggatgtgctgagcgtgttcggcgcgaatctgagcctgtcggcggcgcagctccagcacttgctggagcagatgggagccgcctcccgcgtgggcgtcccggagcctggccagctgcacttcaaccagtgtttaactgctgaagagatcttttcccttcatggcttttcaaatgctacccaaataaccagctccaaattctctgtcatctgtccagcagtcttacagcaattgaactttcacccatgtgaggatcggcccaagcacaaaacaagaccaagtcattcagaagtttggggatatggattcctgtcagtgacgattattaatctggcatctctcctcggattgattttgactccactgataaagaaatcttatttcccaaagattttgaccttttttgtggggctggctattgggactcttttttcaaatgcaattttccaacttattccagaggcatttggatttgatcccaaagtcgacagttatgttgagaaggcagttgctgtgtttggtggattttacctacttttcttttttgaaagaatgctaaagatgttattaaagacatatggtcagaatggtcatacccactttggaaatgataactttggtcctcaagaaaaaactcatcaacctaaagcattacctgccatcaatggtgtgacatgctatgcaaatcctgctgtcacagaagctaatggacatatccattttgataatgtcagtgtggtatctctacaggatggaaaaaaagagccaagttcatgtacctgtttgaaggggcccaaactgtcagaaatagggacgattgcctggatgataacgctctgcgatgccctccacaatttcatcgatggcctggcgattggggcttcctgcaccttgtctctccttcagggactcagtacttccatagcaatcctatgtgaggagtttccccacgagttaggagactttgtgatcctactcaatgcagggatgagcactcgacaagccttgctattcaacttcctttctgcatgttcctgctatgttgggctagcttttggcattttggtgggcaacaatttcgctccaaatattatatttgcacttgctggaggcatgttcctctatatttctctggcagatatgtttccagagatgaatgatatgctgagagaaaaggtaactggaagaaaaaccgatttcaccttcttcatgattcagaatgctggaatgttaactggattcacagccattctactcattaccttgtatgcaggagaaatcgaattggagtaatagaaaatggaagatggtgttgttaataaaggcatttaatagataaaaacatctccaaaaaggattttgaagctgatcctatttagttaaaaagataattttgctttcaactgtaggtccagaaaactaattattggcatcagtctgtgaaatagtccattatttgttgttaaaaatgcttcaaaaggttttcagtgtcagtctgagatgcctggtatataggagcctttgggaaatacctatttttcagtattccatgcatattagatatcaccatgaagcaagagacatgcattctataatcatgtagacactcagactcaggggaaaatacaagttatatcctgaaagcctttaaaactctatggtaggatcaaagattcaaatggtttcagagaggttttatttcaattaatttgttctagtgctttcaagagcaagtacatcaaaatgtagaaggtaaaatgtatgcaacactaatataaattattccaagtctttaaggagccaaagaaaaaaaagatttctcacagctttttgttctgttttgtatttcaattaggaacttgcagtattattttgaaaaccattctaaaataataggagttaggaaataaataaagttttgctagccctgctaagttcaggcttagaggcttatcgctaagtataaacttcaccagattccacgaaaagctggatagctttttttctgacttatgttgtggttgcacccctcacaaatggcagaacagtatgtaaagctggtaacacctcggtttcagtgcaccatgtgtttgctttgtgaaggtgaagaatatgttggtttagagaaagaaattggatgtaattttatgcaatttacttttaaagacaaacataactatttagcagagaatattttaataaatgcaaaacaacagctggactgctgtacatcaaggacagattaactggaaaacatatgttccttatgtgtgatcgagagccattcagaaaagacttcctttgtgttcagcctatacttttccatatggtataccttgaaaaaaattagcacaccatggttatttttctaccttttataaaagacagagcctgtttactcatttagaagatagagaaaattggtctaaaattgaacatcctagattcacactcccaagtcacttaaggtgatttgatggtgaggaaaatgattgacaaagcccaacaatgatctcaggaattacattttccaacagaccaaaaaatgttttcatgtagcagcaatgcagatttggtgaatatttaatatatattttagtatgtatttcactttatgactgacaattaaaaaatattgtttggccaaatagtaaacacccttttgaaacca

SEQ ID NO: 184124 - DNA, 4032 bp, Homo sapiens
  Payload ID: 16270
  Gene Symbol: SLC39A8
  Gene Name: solute carrier family 39 (zinc transporter), member 8
  Uniprot ID: Q9C0K1
  ENST ID: ENST00000424970
  CDS Start-End: 317-1651
acttctaagtttgcggcggagagaataaagcagaaagacaggaagaggaggtggagttctacagctctccaggaggccggggggcccactccgcctatcgctcccctcggctacgctgccacttcaatgccccgcaggtcgcgagctgctgttctttcgaaggcgtcggagaaccaggggcgtcccgcgccacctctgactcggagcagcgccgagcactgacgctcccgcccttgggcaaggacgccagtgcgcccgcgcgcgtccctctgcgcggcagcccgtcgcgggccctcaaggggaagcccaggccaggatggccccgggtcgcgcggtggccgggctcctgttgctggcggccgccggcctcggaggagtggcggaggggccagggctagccttcagcgaggatgtgctgagcgtgttcggcgcgaatctgagcctgtcggcggcgcagctccagcacttgctggagcagatgggagccgcctcccgcgtgggcgtcccggagcctggccagctgcacttcaaccagtgtttaactgctgaagagatcttttcccttcatggcttttcaaatgctacccaaataaccagctccaaattctctgtcatctgtccagcagtcttacagcaattgaactttcacccatgtgaggatcggcccaagcacaaaacaagaccaagtcattcagaagtttggggatatggattcctgtcagtgacgattattaatctggcatctctcctcggattgattttgactccactgataaagaaatcttatttcccaaagattttgaccttttttgtggggctggctattgggactcttttttcaaatgcaattttccaacttattccagaggcatttggatttgatcccaaagtcgacagttatgttgagaaggcagttgctgtgtttggtggattttacctacttttcttttttgaaagaatgctaaagatgttattaaagacatatggtcagaatggtcatacccactttggaaatgataactttggtcctcaagaaaaaactcatcaacctaaagcattacctgccatcaatggtgtgacatgctatgcaaatcctgctgtcacagaagctaatggacatatccattttgataatgtcagtgtggtatctctacaggatggaaaaaaagagccaagttcatgtacctgtttgaaggggcccaaactgtcagaaatagggacgattgcctggatgataacgctctgcgatgccctccacaatttcatcgatggcctggcgattggggcttcctgcaccttgtctctccttcagggactcagtacttccatagcaatcctatgtgaggagtttccccacgagttaggagactttgtgatcctactcaatgcagggatgagcactcgacaagccttgctattcaacttcctttctgcatgttcctgctatgttgggctagcttttggcattttggtgggcaacaatttcgctccaaatattatatttgcacttgctggaggcatgttcctctatatttctctggcagatatgtttccagagatgaatgatatgctgagagaaaagataatcaaatgggctactgatgacatcaaatctcaacttcatttactttggatatatacggcaaggtagtaatttcattatctggagtatttcacctccacatctctgcaataccagcaccttcaacagtgattggttagaggttggcatatgacatagttatgaccattgagacgtgatgctgtgtgtgctgtgaagtttctcaaaaggagtaaggaagatacagcctcttctttctagggactttgtttgtaggtgtgacacctggagcagccattttgctactgttttgtttctaattgtgttccccgccgccctccccgctcgccccgaaaaacgacatgtttgagttctaatccccagtatttcagaatgtgaccttatttggaaatagagtcattgcaaatgtaatttgttaagatgagctcatactggagtagagtgggttcctgatctagtatgactggtattcttattaaaaagagaaatttgaatactagctacaccatgtaaagatgaaggcagagatcgtggtgatgcatctacaatgtcaacaattgccagcaaatcatcagaatctgggagagaggtatggaatgaattctctctcgcagccctaagaaggaaccaatcctgtgcacacctgaatcttggacttccagcctccacaactgtgagacaatacatttttgttatttaagctacccagttgtggcactttattactgcagttctagccgactaatacagctaccttgagaggaaatagcatggggatgaaggtgatgtgctgaagaagcacagcagaaagtggaaagatggtccatgaggacatccttagccactgaattgacaagcctcttccctggagtccctcttccttgggattttttttggtgtgtgtaataatcacttttcctaatggtgcaaaccattgtgagttgctctttgactgctagtaattaaagcaaactaaccaagtcagccctccccagtgttcctttttgcaatctaaattctgatgtccaactcctccctgggccactccctgtccccagatgtctctttgtatatctaaagaagaaaaagaaggataaatcctttttctcccaagagatctccctgcttttgtgaaaagcacaaagaagggcattatctaacttttctcatcattagaagtcaagcctggccgtgactcccgttatgacattttgatggccacattttatgagaaaagcccaaacagacagacctgtctgtaaattctttcatcctttgcattctttctttgactgtaccttagagagtgtttgattattgcaggggagatggaaaagaagcaggttctggcctatgctctagttcctcactttctggagttatcttttgggcctggagtctcttggagtgaggaaaggaagccatttttatactttacttatggtagagttaaacttcgtactcttaggaggctacatgcaatctccaagaggaagagagtgaagaggttaagaattatgccatcaaaatgtgctgctctggcatattgactatttgaattacagatattttaaaaacatcagatatgaagaggtcactctgatcttaattctgtgtcttaacagcaggagatgaaattcccacatgggagatggcctccctgtcacagaaggaataccattctccctatcaatgatgagaaattggaactgagagaattctgtatagaccttgttcaagtaattcttctattttaaacctccccacataatttagctgccttttcaaaactactgtcctttgtgcaaccagtatagaagcgattgactctcactgcatccttgggtcttcttttccctatatgggctcttttcccatatgggctcttatgtcctgtaaaacatgtattaaataaatttgtatgcttttctcccgttaacctgtcttacatcaatttaattcttgggcccaggtaggaccctaagaggacagaggtcgagttttgccacctctgcaagagaaaagagagatgcccagaccaccaggcctgggaaatctttgatttcccaggctttgaagtgggcactgtgtctgaacctggccctctgaaacttcctgttcctggacatcccagctgctaatgtgagttgcccttgcactggctcagggctgggacattaaaggaatttcccttttgttgacataacagtaggatggctatagctaacaataatatattatttagtttcaagtagctagaaggaacatatgaatgttcccaacacaaagaaatgacaactatttgagatgatggatatgctaataaccttaatctgattcctatacattatatgcatcacatatacatacattatatgtataacatcactatgtaccccataaatatgtgcaattattgtcaattaaacaaataaatttaaacaaacatt

SEQ ID NO: 184125 - DNA, 2737 bp, Homo sapiens
  Payload ID: 16271
  Gene Symbol: SLC39A11
  Gene Name: solute carrier family 39, member 11
  Uniprot ID: Q8N1S5
  ENST ID: ENST00000255559
  CDS Start-End: 95-1102
gaagtgactgcgggagtggagccggcgagagagtggcagcgggggctgatggaagtgcagtgggggctggagagggcaccctactgtatccagcatgctccaaggccacagctctgtgttccaggccttgctggggaccttcttcacctgggggatgacagcagctggggcagctctcgtgttcgtattctctagtggacagaggcggatcttagatggaagtcttggctttgctgcaggggtcatgttggcagcttcctattggtctcttctggccccagcagttgagatggccacgtcctctgggggcttcggtgcctttgccttcttccctgtggctgttggcttcacccttggagcggcttttgtctacttggctgacctcctgatgcctcacttgggtgcagcagaagacccccagacgaccctggcactgaacttcggctctacgttgatgaagaagaagtctgatcctgagggtcccgcgctgctcttccctgagagtgaactttccatccggatagacaagagtgagaatggtgaggcatatcagagaaagaaggcggcagccactggccttccagagggtcctgctgtccctgtgccttctcgagggaatctggcacagcccggcggcagcagctggaggaggatcgcactgctcatcttggccatcactatacacaacgttccagagggtctcgctgttggagttggatttggggctatagaaaagacggcatctgctacctttgagagtgccaggaatttggccattggaatcgggatccagaatttccccgagggcctggctgtcagccttcccttgcgaggggcaggcttctccacctggagagctttctggtatgggcagctgagcggcatggtggagcccctggccggggtctttggtgcctttgccgtggtgctggctgagcccatcctgccctacgctctggcctttgctgccggtgccatggtctacgtggtcatggacgacatcatccccgaagcccagatcagtggtaatgggaaactggcatcctgggcctccatcctgggatttgtagtgatgatgtcactggacgttggcctgggctagggctgagacgcttcggaccccgggaaaggccatacgaagaaacagcagtggttggcttctatgggacaacaagcttctttcttcacattaaaacttttttccttcctctcttcttcatctcattatcctgattgactctgattataatagaaccatttttactttgctttgagggagatttttgatttaatggggaattttaaggtgtcatggaaatacagattctttgttttggccactgaatggactctctcttcagtgggattatcaaggaacttcagatcagggaaatctccacttcgggaccttctatctgcctcccaactcctcaaggtcacctatagaagcgagctaccaaaagacgtctcctaagcattttggtggcctagtgactcagggcagagtggccagcacacctctcatccgcccctcctgctccatcactgctgagcctctccccatctagaatgttggaactggagcatcataaagatagcaagctaccttccaaggccgagccagcccagagaggagcatgtcttcctttacctccccctaaggagatactacatgggagggggacacagaaaaagggaaggaaattggctagtctggctttttttttttttttttttaaaggcaaagattgacattattgaaggaaaggggatgaggacaactgtgaactcacagtgagccctgtggaaagaagagacagacagagtgtgggtttgttcggaggcctctgctgtcaatggattccaggagcaaggccatttgtcgcgctttccaaatttcttaggcatttattttgataagtttatagccatcatgtttctaagagacttggagacaccagcaaactgctagaactcaaactcttcaattactcaaagaaggagccatttcagttaactcaagtgaatgaaagagttttggaatctgctgtgggtccttccctgttgaccatttggtaacttataatctgacaaaaactcttgagctgcaacaggccttgccagagggctcaggatgggaaaggaagaaggggataggaaaagaagaggtaattttacatttcccctttaaagtaaattttagccaactcatcattctgaaatgtccctataaagaatgagtcgaactagaccagaagccagcctactccttcttacatagcttctccaacaggggtagcaatgacctgtccacttcaaacacagataaggcctgccatcctcattggttaaaggcacacgtgagactttcagtgggctctgctgagaaggaaggcagcccaggagtcaggtatgcaggcattgcattgtcagtgtctgctctcagagtttacacattcaattgcttccaagggtgaatctcctgctctgtgaatgctatcagaccccaaaggccaaccttgggctgggtctatgtacgttcttccgaagcactgatgatcaaaattgaagacacattcagaggtttgattggttgagattaactggtgtggtggttggtgtatgtatgttttatttttatgtctttgtatgtagttctacataatgcaaattgtgctttctgatggacaagacctcataactgtgattaatatcaataaaaaggggatgttgtgga

SEQ ID NO: 184126 - DNA, 2752 bp, Homo sapiens
  Payload ID: 16271
  Gene Symbol: SLC39A11
  Gene Name: solute carrier family 39, member 11
  Uniprot ID: Q8N1S5
  ENST ID: ENST00000542342
  CDS Start-End: 90-1118
gactgcgggagtggagccggcgagagagtggcagcgggggctgatggaagtgcagtgggggctggagagggcaccctactgtatccagcatgctccaaggccacagctctgtgttccaggccttgctggggaccttcttcacctgggggatgacagcagctggggcagctctcgtgttcgtattctctagtggacagaggcggatcttagatggaagtcttggctttgctgcaggggtcatgttggcagcttcctattggtctcttctggccccagcagttgagatggccacgtcctctgggggcttcggtgcctttgccttcttccctgtggctgttggcttcacccttggagcggcttttgtctacttggctgacctcctgatgcctcacttgggtgcagcagaagacccccagacgaccctggcactgaacttcggctctacgttgatgaagaagaagtctgatcctgagggtcccgcgctgctcttccctgagagtgaactttccatccggataggtagagctgggcttctttcagacaagagtgagaatggtgaggcatatcagagaaagaaggcggcagccactggccttccagagggtcctgctgtccctgtgccttctcgagggaatctggcacagcccggcggcagcagctggaggaggatcgcactgctcatcttggccatcactatacacaacgttccagagggtctcgctgttggagttggatttggggctatagaaaagacggcatctgctacctttgagagtgccaggaatttggccattggaatcgggatccagaatttccccgagggcctggctgtcagccttcccttgcgaggggcaggcttctccacctggagagctttctggtatgggcagctgagcggcatggtggagcccctggccggggtctttggtgcctttgccgtggtgctggctgagcccatcctgccctacgctctggcctttgctgccggtgccatggtctacgtggtcatggacgacatcatccccgaagcccagatcagtggtaatgggaaactggcatcctgggcctccatcctgggatttgtagtgatgatgtcactggacgttggcctgggctagggctgagacgcttcggaccccgggaaaggccatacgaagaaacagcagtggttggcttctatgggacaacaagcttctttcttcacattaaaacttttttccttcctctcttcttcatctcattatcctgattgactctgattataatagaaccatttttactttgctttgagggagatttttgatttaatggggaattttaaggtgtcatggaaatacagattctttgttttggccactgaatggactctctcttcagtgggattatcaaggaacttcagatcagggaaatctccacttcgggaccttctatctgcctcccaactcctcaaggtcacctatagaagcgagctaccaaaagacgtctcctaagcattttggtggcctagtgactcagggcagagtggccagcacacctctcatccgcccctcctgctccatcactgctgagcctctccccatctagaatgttggaactggagcatcataaagatagcaagctaccttccaaggccgagccagcccagagaggagcatgtcttcctttacctccccctaaggagatactacatgggagggggacacagaaaaagggaaggaaattggctagtctggctttttttttttttttttttaaaggcaaagattgacattattgaaggaaaggggatgaggacaactgtgaactcacagtgagccctgtggaaagaagagacagacagagtgtgggtttgttcggaggcctctgctgtcaatggattccaggagcaaggccatttgtcgcgctttccaaatttcttaggcatttattttgataagtttatagccatcatgtttctaagagacttggagacaccagcaaactgctagaactcaaactcttcaattactcaaagaaggagccatttcagttaactcaagtgaatgaaagagttttggaatctgctgtgggtccttccctgttgaccatttggtaacttataatctgacaaaaactcttgagctgcaacaggccttgccagagggctcaggatgggaaaggaagaaggggataggaaaagaagaggtaattttacatttcccctttaaagtaaattttagccaactcatcattctgaaatgtccctataaagaatgagtcgaactagaccagaagccagcctactccttcttacatagcttctccaacaggggtagcaatgacctgtccacttcaaacacagataaggcctgccatcctcattggttaaaggcacacgtgagactttcagtgggctctgctgagaaggaaggcagcccaggagtcaggtatgcaggcattgcattgtcagtgtctgctctcagagtttacacattcaattgcttccaagggtgaatctcctgctctgtgaatgctatcagaccccaaaggccaaccttgggctgggtctatgtacgttcttccgaagcactgatgatcaaaattgaagacacattcagaggtttgattggttgagattaactggtgtggtggttggtgtatgtatgttttatttttatgtctttgtatgtagttctacataatgcaaattgtgctttctgatggacaagacctcataactgtgattaatatcaataaaaaggggatgttgtgg

SEQ ID NO: 184127 - DNA, 574 bp, Homo sapiens
  Payload ID: 16271
  Gene Symbol: SLC39A11
  Gene Name: solute carrier family 39, member 11
  ENST ID: ENST00000578620
  CDS Start-End: 498-574
actgcgggagtggagccggcgagagagtggcagcgggggctgatggaagtgcagtgggggctggagagggcaccctagtgagttggcttttctctccttcggtgcctttggttgggctcgaggcccggggtcggaggccatcaggacaagagtgtgggacttggaagggcagccacctggagcttggaagggggttgggtggtccgcggaccacgctttgagtagcgaggcattagagaacttttccacagtcctctccgcccagacctgaatccttctgctggattccccctcgtggagttagggcatgtgtgtgcagctccactaaggcccagcagccctagtgctgtttccacttctgcaacttcaccagcctcttgaactgactcttggaagcggaacaacaggtttaaaagggggagaaaggaaataaagaaaacaaacctgtatcaatcagccgggaatgcccatgtgctgctgtggcagctgtatccagcatgctccaaggccacagctctgtgttccaggccttgctggggaccttcttcacctgggggatgacagcagctggggc

SEQ ID NO: 184128 - DNA, 794 bp, Homo sapiens
  Payload ID: 16271
  Gene Symbol: SLC39A11
  Gene Name: solute carrier family 39, member 11
  ENST ID: ENST00000580557
  CDS Start-End: 194-794
ggagccggcgagagagtggcagcgggggctgatggaagtgcagtgggggctggagagggcaccctagtgagttggcttttctctccttcggtgcctttggttgggctcgaggcccggggtcggaggccatcaggacaagagtgtgggacttggaagggcagccacctggagcttggaaggggctgtatccagcatgctccaaggccacagctctgtgttccaggccttgctggggaccttcttcacctgggggatgacagcagctggggcagctctcgtgttcgtattctctagtggacagaggcggatcttagatggaagtcttggctttgctgcaggggtcatgttggcagcttcctattggtctcttctggccccagcagttgagatggccacgtcctctgggggcttcggtgcctttgccttcttccctgtggctgttggcttcacccttggagcggcttttgtctacttggctgacctcctgatgcctcacttgggtgcagcagaagacccccagacgaccctggcactgaacttcggctctacgttgatgaagaagaagtctgatcctgagggtcccgcgctgctcttccctgagagtgaactttccatccggatagacaagagtgagaatggtgaggcatatcagagaaagaaggcggcagccactggccttccagagggtcctgctgtccctgtgccttctcgagggaatctggcacagcccggcggcagcagctggaggaggatcgcactgctcatcttggccatcactatacacaacgttccag

SEQ ID NO: 184129 - DNA, 589 bp, Homo sapiens
  Payload ID: 16271
  Gene Symbol: SLC39A11
  Gene Name: solute carrier family 39, member 11
  ENST ID: ENST00000583715
  CDS Start-End: 1-374
acaagagtgagaatggtgaggcatatcagagaaagaaggcggcagccactggccttccagagggtcctgctgtccctgtgccttctcgagggaatctggcacagcccggcggcagcagctggaggaggatcgcactgctcatcttggccatcactatacacaacgttccagctgcagcttgcacatcaggagacctgcttgccagaaggtggacctgtttggaccctcagtgtacaccaatggcttggtctcccacaggggaatggacccagggaagaggactatgcaggccctgtcagtggagtggggattccactactttggatggagaattccagagggctgggtatccagagtgtggtcacatcccatgacctgtgatccttgcctcatgagaaggggcccgtctgtgaggcctggcctcggagtcccttttgcctcagtctgagggagatactgagtttctcagatgaaaacatcaccaggactgtctttcttgagttgaacttgatcttttaaattcattcctttgagttgtacttagctaaaatgtggatatccctatacattatattgttttgacctctaa

SEQ ID NO: 184130 - DNA, 526 bp, Homo sapiens
  Payload ID: 16271
  Gene Symbol: SLC39A11
  Gene Name: solute carrier family 39, member 11
  ENST ID: ENST00000579018
  CDS Start-End: 407-526
gtgtgcgggagggaagcaggaagtgactgcgggagtggagccggcgagagagtggcagcgggggctgatggaagtgcagtgggggctggagagggcaccctagttgggtggtccgcggaccacgctttgagtagcgaggcattagagaacttttccacagtcctctccgcccagacctgaatccttctgctggattccccctcgtggagttagggcatgtgtgtgcagctccactaaggcccagcagccctagtgctgtttccacttctgcaacttcaccagcctcttgaactgactcttggaagcggaacaacaggtttaaaagggggagaaaggaaataaagaaaacaaacctgtatcaatcagccgggaatgcccatgtgctgctgtggcagctgtatccagcatgctccaaggccacagctctgtgttccaggccttgctggggaccttcttcacctgggggatgacagcagctggggcagctctcgtgttcgtattctctagtggacagaggcggatctta

SEQ ID NO: 184131 - DNA, 386 bp, Homo sapiens
  Payload ID: 16271
  Gene Symbol: SLC39A11
  Gene Name: solute carrier family 39, member 11
  ENST ID: ENST00000581581
  CDS Start-End: 1-189
gcacagcccggcggcagcagctggaggaggatcgcactgctcatcttggccatcactatacacaacgttccagagggtctcgctgttggagttggatttggggctatagaaaagacggcatctgctacctttgagagtgccagggtcttgaacttggtttcctgccctggacttaacctgccttcctgacaccgactgacttcacctctccccatgccctcatgtcatgtcttatctgttcctattgtggatccgggattccttggcctgtcccttggcctgctgctgatcatatctccactctgacccacaatatagattttcaaggtaaaaatttttttaaaaaatgtttcactctgttgtctagtaaaatacatgaatgtgta

SEQ ID NO: 184132 - DNA, 532 bp, Homo sapiens
  Payload ID: 16271
  Gene Symbol: SLC39A11
  Gene Name: solute carrier family 39, member 11
  ENST ID: ENST00000583146
  CDS Start-End: 63-532
acattccattcctgggtccttttgcttgtccttgctgactgtcctgtgcagctgtatccagcatgctccaaggccacagctctgtgttccaggccttgctggggaccttcttcacctgggggatgacagcagctggggcagctctcgtgttcgtattctctagtggacagaggcggatcttagatggaagtcttggctttgctgcaggggtcatgttggcagcttcctattggtctcttctggccccagcagttgagatggccacgtcctctgggggcttcggtgcctttgccttcttccctgtggctgttggcttcacccttggagcggcttttgtctacttggctgacctcctgatgcctcacttgggtgcagcagaagacccccagacgaccctggcactgaacttcggctctacgttgatgaagaagaagtctgatcctgagggtcccgcgctgctcttccctgagagtgaactttccatccggataggtagagctgggcttctttcagacaagagtgagaatggtga

SEQ ID NO: 184133 - DNA, 567 bp, Homo sapiens
  Payload ID: 16271
  Gene Symbol: SLC39A11
  Gene Name: solute carrier family 39, member 11
  ENST ID: ENST00000582769
  CDS Start-End: 11-567
gctttctgccatgactgtgaggcctccccagccatgtggaactggtgcagcagaagacccccagacgaccctggcactgaacttcggctctacgttgatgaagaagaagtctgatcctgagggtcccgcgctgctcttccctgagagtgaactttccatccggataggtagagctgggcttctttcagacaagagtgagaatggtgaggcatatcagagaaagaaggcggcagccactggccttccagagggtcctgctgtccctgtgccttctcgagggaatctggcacagcccggcggcagcagctggaggaggatcgcactgctcatcttggccatcactatacacaacgttccagagggtctcgctgttggagttggatttggggctatagaaaagacggcatctgctacctttgagagtgccaggaatttggccattggaatcgggatccagaatttccccgagggcctggctgtcagccttcccttgcgaggggcaggcttctccacctggagagctttctggtatgggcagctgagcggcatggtggagcccctggccgg

SEQ ID NO: 184134 - DNA, 439 bp, Homo sapiens
  Payload ID: 16271
  Gene Symbol: SLC39A11
  Gene Name: solute carrier family 39, member 11
  ENST ID: ENST00000579319
  CDS Start-End: 1-205
gagaaagaaggcggcagccactggccttccagagggtcctgctgtccctgtgccttctcgagggaatctggcacagcccggcggcagcagctggaggaggatcgcactgctcatcttggccatcactatacacaacgttccaggacgtgtttgcttcaccttctgccatgattgtaagtttcctgaggcctccccagctgtgtgaaactagggtctcgctgttggagttggatttggggctatagaaaagacggcatctgctacctttgagagtgccagggtcttgaacttggtttcctgccctggacttaacctgccttcctgacaccgactgacttcacctctccccatgccctcatgtcatgtcttatctgttcctattgtggatccgggattccttggcctgtcccttggcctgctgctgatcatatctccactc

SEQ ID NO: 184135 - DNA, 747 bp, Homo sapiens
  Payload ID: 16271
  Gene Symbol: SLC39A11
  Gene Name: solute carrier family 39, member 11
  ENST ID: ENST00000584129
  CDS Start-End: 10-255
ctttctgccatgactgtgaggcctccccagccatgtggaactggtgcagcagaagacccccagacgaccctggcactgaacttcggctctacgttgatgaagaagaagtctgatcctgagggtcccgcgctgctcttccctgagagtgaactttccatccggataggtagagctgggcttctttcaggcaagctctttgctgcagacactgagctgagtcaggcaatatggacgtgggggctggtggtaggatgaatagtgagagaaatgccagcactgtcctatccctccgaatcactcaccctactactgcatggagctaaactggcatctggcccagcaccttcatttctcatttgttgtccaaaccacatgcttagtctacagaagacaagagtgagaatggtgaggcatatcagagaaagaaggcggcagccactggccttccagagggtcctgctgtccctgtgccttctcgagggaatctggcacagcccggcggcagcagctggaggaggatcgcactgctcatcttggccatcactatacacaacgttccaggtttccatttagctgcaagaaacagcactgtatttttcaaagcactagaaaattctgtggccagtccagaaagacaaaacatagcaccagtgtggcaagaagtggagctaatgcagcattaatgatcctggatgtttctgcactttcttattagaatttaccattcacctctaagcttcagctctg

SEQ ID NO: 184136 - DNA, 1004 bp, Homo sapiens
  Payload ID: 16271
  Gene Symbol: SLC39A11
  Gene Name: solute carrier family 39, member 11
  ENST ID: ENST00000579732
  CDS Start-End: 83-766
ggagtggagccggcgagagagtggcagcgggggctgatggaagtgcagtgggggctggagagggcaccctactgtatccagcatgctccaaggccacagctctgtgttccaggccttgctggggaccttcttcacctgggggatgacagcagctggggcagctctcgtgttcgtattctctagtggacagaggcggatcttagatggaagtcttggctttgctgcaggggtcatgttggcagcttcctattggtctcttctggccccagcagttgagatggccacgtcctctgggggcttcggtgcctttgccttcttccctgtggctgttggcttcacccttggagcggcttttgtctacttggctgacctcctgatgcctcacttgggtgcagcagaagacccccagacgaccctggcactgaacttcggctctacgttgatgaagaagaagtctgatcctgagggtcccgcgctgctcttccctgagagtgaactttccatccggatagacaagagtgagaatggtgaggcatatcagagaaagaaggcggcagccactggccttccagagggtcctgctgtccctgtgccttctcgagggaatctggcacagcccggcggcagcagctggaggaggatcgcactgctcatcttggccatcactatacacaacgttccagtagagacaagggtgttgctgtgttggccagggtggcctcgaactgctggcctcaagagaacctcctgcttcagcctcccatagtgctgagattataggtgtaagccactgtacccaacctaccactattcctgaatactctcatcaccctgtaaagaaaccccacactctttgagcagtacctctgaggaaaaaaagaaactgcatgcttattagcagtcactccccattcctccctccctccagcccctgcactaatctactttgtctctacagtttccctaaccgggactgactttcatttaaacggtatcatgtaata

SEQ ID NO: 184137 - DNA, 73 bp, Homo sapiens
  Payload ID: 16271
  Gene Symbol: SLC39A11
  Gene Name: solute carrier family 39, member 11
  ENST ID: ENST00000632138
  CDS Start-End: 1-73
gcacagcccggcggcagcagctggaggaggatcgcactgctcatcttggccatcactatacacaacgttccag

SEQ ID NO: 184138 - DNA, 171 bp, Homo sapiens
  Payload ID: 16271
  Gene Symbol: SLC39A11
  Gene Name: solute carrier family 39, member 11
  ENST ID: ENST00000633145
  CDS Start-End: 1-171
acaagagtgagaatggtgaggcatatcagagaaagaaggcggcagccactggccttccagagggtcctgctgtccctgtgccttctcgagggaatctggcacagcccggcggcagcagctggaggaggatcgcactgctcatcttggccatcactatacacaacgttccag

SEQ ID NO: 184139 - DNA, 171 bp, Homo sapiens; identical to SEQ ID NO: 184138
  Payload ID: 16271
  Gene Symbol: SLC39A11
  Gene Name: solute carrier family 39, member 11
  ENST ID: ENST00000633890
  CDS Start-End: 1-171

SEQ ID NO: 184140 - DNA, 171 bp, Homo sapiens; identical to SEQ ID NO: 184138
  Payload ID: 16271
  Gene Symbol: SLC39A11
  Gene Name: solute carrier family 39, member 11
  ENST ID: ENST00000632745
  CDS Start-End: 1-171

SEQ ID NO: 184141 - DNA, 492 bp, Homo sapiens
  Payload ID: 16271
  Gene Symbol: SLC39A11
  Gene Name: solute carrier family 39, member 11
  ENST ID: ENST00000633986
  CDS Start-End: 1-254
acaagagtgagaatggtgaggcatatcagagaaagaaggcggcagccactggccttccagagggtcctgctgtccctgtgccttctcgagggaatctggcacagcccggcggcagcagctggaggaggatcgcactgctcatcttggccatcactatacacaacgttccagtagagacaagggtgttgctgtgttggccagggtggcctcgaactgctggcctcaagagaacctcctgcttcagcctcccatagtgctgagattataggtgtaagccactgtacccaacctaccactattcctgaatactctcatcaccctgtaaagaaaccccacactctttgagcagtacctctgaggaaaaaaagaaactgcatgcttattagcagtcactccccattcctccctccctccagcccctgcactaatctactttgtctctacagtttccctaaccgggactgactttcatttaaacggtatcatgtaata

SEQ ID NO: 184142 - DNA, 143 bp, Homo sapiens
  Payload ID: 16271
  Gene Symbol: SLC39A11
  Gene Name: solute carrier family 39, member 11
  ENST ID: ENST00000632060
  CDS Start-End: 1-143
gagaaagaaggcggcagccactggccttccagagggtcctgctgtccctgtgccttctcgagggaatctggcacagcccggcggcagcagctggaggaggatcgcactgctcatcttggccatcactatacacaacgttccag

SEQ ID NO: 184143 - DNA, 171 bp, Homo sapiens; identical to SEQ ID NO: 184138
  Payload ID: 16271
  Gene Symbol: SLC39A11
  Gene Name: solute carrier family 39, member 11
  ENST ID: ENST00000632654
  CDS Start-End: 1-171

SEQ ID NO: 184144 - DNA, 19 bp, Homo sapiens
  Payload ID: 16271
  Gene Symbol: SLC39A11
  Gene Name: solute carrier family 39, member 11
  ENST ID: ENST00000632054
  CDS Start-End: 1-19
acaagagtgagaatggtga

SEQ ID NO: 184145 - DNA, 171 bp, Homo sapiens; identical to SEQ ID NO: 184138
  Payload ID: 16271
  Gene Symbol: SLC39A11
  Gene Name: solute carrier family 39, member 11
  ENST ID: ENST00000632080
  CDS Start-End: 1-171

SEQ ID NO: 184146 - DNA, 3560 bp, Homo sapiens
  Payload ID: 16272
  Gene Symbol: SLC39A9
  Gene Name: solute carrier family 39, member 9
  Uniprot ID: Q9NUM3
  ENST ID: ENST00000336643
  CDS Start-End: 679-1602
gaagagatgccacttggcggccatggcagctgtagtatcggcgactccgggtcaaggcccggtcgagtgcagtaccatgggcagcaccgggtatagggcagagacagctttgtgtcaactttgctgctgaacccctaggacccatcgttagagacctgcaggactcctttcctcatcccaggctcggaggagagtttgctgggactggtgggctggtttcctgctctggggggcggatcaccttcggggccgcctcttggagacaggggcgcctagggaacgaacaggttcgcttgagtcacttacccgccgccgcctaagacattgtgccaccctcaatccgacaatcgaagaaatcgatcattcgcacattttccccattgacttttcccatctctgttaacccacgagaatctaatgactggcatctgagaacccagagcctgggaccttagattgctgtaagctttctctggtgctaatatcagcaaaaagggtctgttgccgggtacgttcaagaggaaggtgcctcgtgaacacatctgctggtgggaaggcctaaagaactggaaagcccactctcttggaaccaccacacctgtttaaagaacctaagcaccatttaaagccactggaaatttgttgtctagtggttgtgggtgaataaaggagggcagaatggatgatttcatctccattagcctgctgtctctggctatgttggtgggatgttacgtggccggaatcattcccttggctgttaatttctcagaggaacgactgaagctggtgactgttttgggtgctggccttctctgtggaactgctctggcagtcatcgtgcctgaaggagtacatgccctttatgaagatattcttgagggaaaacaccaccaagcaagtgaaacacataatgtgattgcatcagacaaagcagcagaaaaatcagttgtccatgaacatgagcacagccacgaccacacacagctgcatgcctatattggtgtttccctcgttctgggcttcgttttcatgttgctggtggaccagattggtaactcccatgtgcattctactgacgatccagaagcagcaaggtctagcaattccaaaatcaccaccacgctgggtctggttgtccatgctgcagctgatggtgttgctttgggagcagcagcatctacttcacagaccagtgtccagttaattgtgtttgtggcaatcatgctacataaggcaccagctgcttttggactggtttccttcttgatgcatgctggcttagagcggaatcgaatcagaaagcacttgctggtctttgcattggcagcaccagttatgtccatggtgacatacttaggactgagtaagagcagtaaagaagccctttcagaggtgaacgccacgggagtggccatgcttttctctgccgggacatttctttatgttgccacagtacatgtcctccctgaggtgggcggaatagggcacagccacaagcccgatgccacgggagggagaggcctcagccgcctggaagtggcagccctggttctgggttgcctcatccctctcatcctgtcagtaggacaccagcattaaatgttcaaggtccagccttggtccagggccgtttgccatccagtgagaacagccggcacgtgacagctactcacttcctcagtctcttgtctcaccttgcgcatctctacatgtattcctagagtccagaggggaggtgaggttaaaacctgagtaatggaaaagcttttagagtagaaacacatttacgttgcagttagctatagacatcccattgtgttatcttttaaaaggcccttgacattttgcgttttaatatttctcttaaccctattctcagggaagatggaatttagttttaaggaaaagaggagaacttcatactcacaatgaaatagtgattatgaaaatacagtgttctgtaattaagctatgtctctttcttcttagtttagaggctctgctactttatccattgatttttaacatggttcccaccatgtaagactggtgctttagcatctatgccacatgcgttgatggaaggtcatagcacccactcacttagatgctaaaggtgattctagttaatctgggattagggtcaggaaaatgatagcaagacacattgaaagctctctttatactcaaaagagatatccattgaaaagggatgtctagagggatttaaacagctcctttggcacgtgcctctctgaatccagcctgccattccatcaaatggagcaggagaggtgggaggagcttctaaagaggtgactggtattttgtagcattccttgtcaagttctcctttgcagaatacctgtctccacattcctagagaggagccaagttctagtagtttcagttctaggctttccttcaagaacagtcagatcacaaagtgtctttggaaattaagggatattaaattttaagtgatttttggatggttattgatatctttgtagtagctttttttaaaagactaccaaaatgtatggttgtcctttttttttgttttttttttttttaattatttctcttagcagatcagcaatccctctagggacctaaatactaggtcagctttggcgacactgtgtcttctcacataaccacctgtagcaagatggatcataaatgagaagtgtttgcctattgatttaaagcttattggaatcatgtctcttgtctcttcgtcttttctttgcttttcttctaacttttccctctagcctctcctcgccacaatttgctgcttactgctggtgttaatatttgtgtgggatgaattcttatcaggacaaccacttctcgaactgtaataatgaagataataatatctttattctttatcccccttcaaagaaattacctttgtgtcaaatgccgctttgttgagcccttaaaataccacctcctcatgtgtaaattgacacaatcactaatctggtaatttaaacaattgagatagcaaaagtgtttaacagactaggataatttttttttcatatttgccaaaatttttgtaaaccctgtcttgtcaaataagtgtataatattgtattattaatttatttttactttctataccatttcaaaacacattacactaagggggaaccaagactagtttcttcagggcagtggacgtagtagtttgtaaaaacgttttctatgacgcataagctagcatgcctatgatttatttccttcatgaatttgtcactggatcagcagctgtggaaataaagcttgtgagccctctgctggccacagtgaggaaagtagcacaaataggatacagttgtatgtagtcattggcaacaattgcatacaattttactaccaagagaaggtatagtatggaaagtccaaatgacttccttgattggatgttaacagctgactggtgtgagacttgaggtttcatctagtccttcaaaactatatggttgcctagattctctctggaaactgactttgtcaaataaatagcagattgtagtgtc

SEQ ID NO: 184147 - DNA, 2377 bp, Homo sapiens
  Payload ID: 16272
  Gene Symbol: SLC39A9
  Gene Name: solute carrier family 39, member 9
  Uniprot ID: Q9NUM3
  ENST ID: ENST00000555840
  CDS Start-End: 633-1556
ccgggtcaaggcccggtcgagtgcagtaccatgggcagcaccgggtatagggcagagacagctttgtgtcaactttgctgctgaacccctaggacccatcgttagagacctgcaggactcctttcctcatcccaggctcggaggagagtttgctgggactggtgggctggtttcctgctctggggggcggatcaccttcggggccgcctcttggagacaggggcgcctagggaacgaacaggttcgcttgagtcacttacccgccgccgcctaagacattgtgccaccctcaatccgacaatcgaagaaatcgatcattcgcacattttccccattgacttttcccatctctgttaacccacgagaatctaatgactggcatctgagaacccagagcctgggaccttagattgctgtaagctttctctggtgctaatatcagcaaaaagggtctgttgccgggtacgttcaagaggaaggtgcctcgtgaacacatctgctggtgggaaggcctaaagaactggaaagcccactctcttggaaccaccacacctgtttaaagaacctaagcaccatttaaagccactggaaatttgttgtctagtggttgtgggtgaataaaggagggcagaatggatgatttcatctccattagcctgctgtctctggctatgttggtgggatgttacgtggccggaatcattcccttggctgttaatttctcagaggaacgactgaagctggtgactgttttgggtgctggccttctctgtggaactgctctggcagtcatcgtgcctgaaggagtacatgccctttatgaagatattcttgagggaaaacaccaccaagcaagtgaaacacataatgtgattgcatcagacaaagcagcagaaaaatcagttgtccatgaacatgagcacagccacgaccacacacagctgcatgcctatattggtgtttccctcgttctgggcttcgttttcatgttgctggtggaccagattggtaactcccatgtgcattctactgacgatccagaagcagcaaggtctagcaattccaaaatcaccaccacgctgggtctggttgtccatgctgcagctgatggtgttgctttgggagcagcagcatctacttcacagaccagtgtccagttaattgtgtttgtggcaatcatgctacataaggcaccagctgcttttggactggtttccttcttgatgcatgctggcttagagcggaatcgaatcagaaagcacttgctggtctttgcattggcagcaccagttatgtccatggtgacatacttaggactgagtaagagcagtaaagaagccctttcagaggtgaacgccacgggagtggccatgcttttctctgccgggacatttctttatgttgccacagtacatgtcctccctgaggtgggcggaatagggcacagccacaagcccgatgccacgggagggagaggcctcagccgcctggaagtggcagccctggttctgggttgcctcatccctctcatcctgtcagtaggacaccagcattaaatgttcaaggtccagccttggtccagggccgtttgccatccagtgagaacagccggcacgtgacagctactcacttcctcagtctcttgtctcaccttgcgcatctctacatgtattcctagagtccagaggggaggattagaactaagaggacacaccagcatcggagtgtattaagcccctgaaacacatggtagctagggactgaacacaggaaccgtatgacagcagcacaaacccccaaaggatgttcctgccttgtgggcccctgagccccttgggagactgagaatcatgaccagattcatccagaactgctgcagtgttaagtgaaaatcctctgtagttgttctgcagaggaaccttccttccattagaaaatttctgctcaatacagaatggtccacatcacccaaagtgcactgttggagatgctgtgaaattaaaacctctttgtacctgagacatctagattcacctcaggaggcctgaaggaaatgtgtaacttgtgggaaagaactagacaaccatttaggaattctctagatatactcagcctaacccagtggcttaacacaaggagattggctttgatctttttttcttgtggcatcttccagcaagttagaagtctcatgggataagactgcagttcccctggttcaatagctggaacagtgattttaaatgtccctttttctggatcccttgtaaacatgaaatcattccatggatggctgccttataattttgtctctttccactttaattgtgaatggttaaaaaaatgctgttttctgatattaaatttttattagtgc

SEQ ID NO: 184148 - DNA, 855 bp, Homo sapiens
  Payload ID: 16272
  Gene Symbol: SLC39A9
  Gene Name: solute carrier family 39, member 9
  Uniprot ID: Q9NUM3
  ENST ID: ENST00000557046
  CDS Start-End: 1-855
atggatgatttcatctccattagcctgctgtctctggctatgttggtgggatgttacgtggccggaatcattcccttggctgttaatttctcagaggaacgactgaagctggtgactgttttgggtgctggccttctctgtggaactgctctggcagtcatcgtgcctgaaggagtacatgccctttatgaagatattcttgagggaaaacaccaccaagcaagtgaaacacataatgtgattgcatcagacaaagcagcagaaaaatcagttgtccatgaacatgagcacagccacgaccacacacagctgcatgcctatattggtgtttccctcgttctgggcttcgttttcatgttgctggtggaccagattggtaactcccatgtgcattctactgacgctgatggtgttgctttgggagcagcagcatctacttcacagaccagtgtccagttaattgtgtttgtggcaatcatgctacataaggcaccagctgcttttggactggtttccttcttgatgcatgctggcttagagcggaatcgaatcagaaagcacttgctggtctttgcattggcagcaccagttatgtccatggtgacatacttaggactgagtaagagcagtaaagaagccctttcagaggtgaacgccacgggagtggccatgcttttctctgccgggacatttctttatgttgccacagtacatgtcctccctgaggtgggcggaatagggcacagccacaagcccgatgccacgggagggagaggcctcagccgcctggaagtggcagccctggttctgggttgcctcatccctctcatcctgtcagtaggacaccagcattaa

SEQ ID NO: 184149 - DNA, 2065 bp, Homo sapiens
  Payload ID: 16272
  Gene Symbol: SLC39A9
  Gene Name: solute carrier family 39, member 9
  Uniprot ID: Q9NUM3
  ENST ID: ENST00000556605
  CDS Start-End: 681-1379
atgaagagatgccacttggcggccatggcagctgtagtatcggcgactccgggtcaaggcccggtcgagtgcagtaccatgggcagcaccgggtatagggcagagacagctttgtgtcaactttgctgctgaacccctaggacccatcgttagagacctgcaggactcctttcctcatcccaggctcggaggagagtttgctgggactggtgggctggtttcctgctctggggggcggatcaccttcggggccgcctcttggagacaggggcgcctagggaacgaacaggttcgcttgagtcacttacccgccgccgcctaagacattgtgccaccctcaatccgacaatcgaagaaatcgatcattcgcacattttccccattgacttttcccatctctgttaacccacgagaatctaatgactggcatctgagaacccagagcctgggaccttagattgctgtaagctttctctggtgctaatatcagcaaaaagggtctgttgccgggtacgttcaagaggaaggtgcctcgtgaacacatctgctggtgggaaggcctaaagaactggaaagcccactctcttggaaccaccacacctgtttaaagaacctaagcaccatttaaagccactggaaatttgttgtctagtggttgtgggtgaataaaggagggcagaatggatgatttcatctccattagcctgctgtctctggctatgttggtgggatgttacgtggccggaatcattcccttggctgttaatttctcagaggaacgactgaagctggtgactgttttgggtgctggccttctctgtggaactgctctggcagtcatcgtgcctgaaggagtacatgccctttatgaagatattcttgagggaaaacaccaccaagcaagtgaaacacataatgtgattgcatcagacaaagcagcagaaaaatcagttgtccatgaacatgagcacagccacgaccacacacagctgcatgcctatattggtgtttccctcgttctgggcttcgttttcatgttgctggtggaccagattggtaactcccatgtgcattctactgacgatccagaagcagcaaggtctagcaattccaaaatcaccaccacgctgggtctggttgtccatgctgcagctgatggtgttgctttgggagcagcagcatctacttcacagaccagtgtccagttaattgtgtttgtggcaatcatgctacataaggcaccagctgcttttggactggtttccttcttgatgcatgctggcttagagcggaatcgaatcagaaagcacttgctggtctttgcattggcagcaccagttatgtccatggtgacatacttaggactgagtaaggattagaactaagaggacacaccagcatcggagtgtattaagcccctgaaacacatggtagctagggactgaacacaggaaccgtatgacagcagcacaaacccccaaaggatgttcctgccttgtgggcccctgagccccttgggagactgagaatcatgaccagattcatccagaactgctgcagtgttaagtgaaaatcctctgtagttgttctgcagaggaaccttccttccattagaaaatttctgctcaatacagaatggtccacatcacccaaagtgcactgttggagatgctgtgaaattaaaacctctttgtacctgagacatctagattcacctcaggaggcctgaaggaaatgtgtaacttgtgggaaagaactagacaaccatttaggaattctctagatatactcagcctaacccagtggcttaacacaaggagattggctttgatctttttttcttgtggcatcttccagcaagttagaagtctcatgggataagactgcagttcccctggttcaatagctggaacagtgattttaaatgtccctttttctggatcccttgtaaacatgaaatcattccatggatggctgccttataattttgtctctttccactttaattgtgaatggttaaaaaaatgctgttttctgatattaaatttttattagtgcatacctt

SEQ ID NO: 184150 - DNA, 5192 bp, Homo sapiens
  Payload ID: 16272
  Gene Symbol: SLC39A9
  Gene Name: solute carrier family 39, member 9
  ENST ID: ENST00000031146
  CDS Start-End: 679-1404
gaagagatgccacttggcggccatggcagctgtagtatcggcgactccgggtcaaggcccggtcgagtgcagtaccatgggcagcaccgggtatagggcagagacagctttgtgtcaactttgctgctgaacccctaggacccatcgttagagacctgcaggactcctttcctcatcccaggctcggaggagagtttgctgggactggtgggctggtttcctgctctggggggcggatcaccttcggggccgcctcttggagacaggggcgcctagggaacgaacaggttcgcttgagtcacttacccgccgccgcctaagacattgtgccaccctcaatccgacaatcgaagaaatcgatcattcgcacattttccccattgacttttcccatctctgttaacccacgagaatctaatgactggcatctgagaacccagagcctgggaccttagattgctgtaagctttctctggtgctaatatcagcaaaaagggtctgttgccgggtacgttcaagaggaaggtgcctcgtgaacacatctgctggtgggaaggcctaaagaactggaaagcccactctcttggaaccaccacacctgtttaaagaacctaagcaccatttaaagccactggaaatttgttgtctagtggttgtgggtgaataaaggagggcagaatggatgatttcatctccattagcctgctgtctctggctatgttggtgggatgttacgtggccggaatcattcccttggctgttaatttctcagaggaacgactgaagctggtgactgttttgggtgctggccttctctgtggaactgctctggcagtcatcgtgcctgaaggagtacatgccctttatgaagatattcttgaggatccagaagcagcaaggtctagcaattccaaaatcaccaccacgctgggtctggttgtccatgctgcagctgatggtgttgctttgggagcagcagcatctacttcacagaccagtgtccagttaattgtgtttgtggcaatcatgctacataaggcaccagctgcttttggactggtttccttcttgatgcatgctggcttagagcggaatcgaatcagaaagcacttgctggtctttgcattggcagcaccagttatgtccatggtgacatacttaggactgagtaagagcagtaaagaagccctttcagaggtgaacgccacgggagtggccatgcttttctctgccgggacatttctttatgttgccacagtacatgtcctccctgaggtgggcggaatagggcacagccacaagcccgatgccacgggagggagaggcctcagccgcctggaagtggcagccctggttctgggttgcctcatccctctcatcctgtcagtaggacaccagcattaaatgttcaaggtccagccttggtccagggccgtttgccatccagtgagaacagccggcacgtgacagctactcacttcctcagtctcttgtctcaccttgcgcatctctacatgtattcctagagtccagaggggaggtgaggttaaaacctgagtaatggaaaagcttttagagtagaaacacatttacgttgcagttagctatagacatcccattgtgttatcttttaaaaggcccttgacattttgcgttttaatatttctcttaaccctattctcagggaagatggaatttagttttaaggaaaagaggagaacttcatactcacaatgaaatagtgattatgaaaatacagtgttctgtaattaagctatgtctctttcttcttagtttagaggctctgctactttatccattgatttttaacatggttcccaccatgtaagactggtgctttagcatctatgccacatgcgttgatggaaggtcatagcacccactcacttagatgctaaaggtgattctagttaatctgggattagggtcaggaaaatgatagcaagacacattgaaagctctctttatactcaaaagagatatccattgaaaagggatgtctagagggatttaaacagctcctttggcacgtgcctctctgaatccagcctgccattccatcaaatggagcaggagaggtgggaggagcttctaaagaggtgactggtattttgtagcattccttgtcaagttctcctttgcagaatacctgtctccacattcctagagaggagccaagttctagtagtttcagttctaggctttccttcaagaacagtcagatcacaaagtgtctttggaaattaagggatattaaattttaagtgatttttggatggttattgatatctttgtagtagctttttttaaaagactaccaaaatgtatggttgtcctttttttttgttttttttttttttaattatttctcttagcagatcagcaatccctctagggacctaaatactaggtcagctttggcgacactgtgtcttctcacataaccacctgtagcaagatggatcataaatgagaagtgtttgcctattgatttaaagcttattggaatcatgtctcttgtctcttcgtcttttctttgcttttcttctaacttttccctctagcctctcctcgccacaatttgctgcttactgctggtgttaatatttgtgtgggatgaattcttatcaggacaaccacttctcgaactgtaataatgaagataataatatctttattctttatcccccttcaaagaaattacctttgtgtcaaatgccgctttgttgagcccttaaaataccacctcctcatgtgtaaattgacacaatcactaatctggtaatttaaacaattgagatagcaaaagtgtttaacagactaggataatttttttttcatatttgccaaaatttttgtaaaccctgtcttgtcaaataagtgtataatattgtattattaatttatttttactttctataccatttcaaaacacattacactaagggggaaccaagactagtttcttcagggcagtggacgtagtagtttgtaaaaacgttttctatgacgcataagctagcatgcctatgatttatttccttcatgaatttgtcactggatcagcagctgtggaaataaagcttgtgagccctctgctggccacagtgaggaaagtagcacaaataggatacagttgtatgtagtcattggcaacaattgcatacaattttactaccaagagaaggtatagtatggaaagtccaaatgacttccttgattggatgttaacagctgactggtgtgagacttgaggtttcatctagtccttcaaaactatatggttgcctagattctctctggaaactgactttgtcaaataaatagcagattgtagtgtctggtttggtttggacagtagtgctttctatcatattgttgtgtgcaatggtaatttgttctactggccaaagcctctttcagcagtgccttgccatcatgcttaaaagtttggctagtatatcttgctggatggagccttgaactccggcaaggattgaaccatctgacttccaaatttgccttcccctctggacctcactattaacaagcaaacctttcagggccctcttagctctcagaagctatgtatgggctttcccagattttaaagctgctgcctcgagaactactcatttctctcctggtcagcagacagaaatagccatactaatctcatagggctcaaatgcatcttcaggcagcagggaaccaagcagcgtggcacaggccttcttgactggaggaagagcttgctggcatggtgggcagtattccaggagaggccatgtccgtgttcacttcttggcacatttcagttccgttttcctcttgtttaaaactgcctctttagatgtggatgccttaatgctgtaacacatttgaaaacattggcaatacttaagttgctgccatgattacagatggaattattggctaccaaagagacgcaattgatgatgagaagcatgattcttgcttccatataaccaaagttaatcttaattgcaatttgactccgtttccttggtagggatagactttcttcagattccaagtgctctcttaaatggcaaattaagttaaagaatactactgctccattcccctcacttattctccagttaattgcttgtcagttccatttcaagaaagcagtgatgttccaggtttgattcagttttcctgtgcacactattgccaaatttttttttagcaaagattctgcactggaacgtagacagttggaaacagtactacctacctagaggttatgtgttttctctttctccccgctttcacctctttctttcccaattcaaaacagccaagtgagccctgttctggtattttgaatcattagagaaaagaaagggagtggctgttttgagttgtcctttctttgcagaaaggagaaaatgtgattgtgttttttttttaccagcctacttctaagtgtcactgcctggtttttctctttttcaaggattagaactaagaggacacaccagcatcggagtgtattaagcccctgaaacacatggtagctagggactgaacacaggaaccgtatgacagcagcacaaacccccaaaggatgttcctgccttgtgggcccctgagccccttgggagactgagaatcatgaccagattcatccagaactgctgcagtgttaagtgaaaatcctctgtagttgttctgcagaggaaccttccttccattagaaaatttctgctcaatacagaatggtccacatcacccaaagtgcactgttggagatgctgtgaaattaaaacctctttgtacctgagacatctagattcacctcaggaggcctgaaggaaatgtgtaacttgtgggaaagaactagacaaccatttaggaattctctagatatactcagcctaacccagtggcttaacacaaggagattggctttgatctttttttcttgtggcatcttccagcaagttagaagtctcatgggataagactgcagttcccctggttcaatagctggaacagtgattttaaatgtccctttttctggatcccttgtaaacatgaaatcattccatggatggctgccttataattttgtctctttccactttaattgtgaatggttaaaaaaatgctgttttctgatattaaatttttattagtgc

SEQ ID NO: 184151 - DNA, 3701 bp, Homo sapiens
  Payload ID: 16272
  Gene Symbol: SLC39A9
  Gene Name: solute carrier family 39, member 9
  ENST ID: ENST00000628474
  CDS Start-End: 679-957
gaagagatgccacttggcggccatggcagctgtagtatcggcgactccgggtcaaggcccggtcgagtgcagtaccatgggcagcaccgggtatagggcagagacagctttgtgtcaactttgctgctgaacccctaggacccatcgttagagacctgcaggactcctttcctcatcccaggctcggaggagagtttgctgggactggtgggctggtttcctgctctggggggcggatcaccttcggggccgcctcttggagacaggggcgcctagggaacgaacaggttcgcttgagtcacttacccgccgccgcctaagacattgtgccaccctcaatccgacaatcgaagaaatcgatcattcgcacattttccccattgacttttcccatctctgttaacccacgagaatctaatgactggcatctgagaacccagagcctgggaccttagattgctgtaagctttctctggtgctaatatcagcaaaaagggtctgttgccgggtacgttcaagaggaaggtgcctcgtgaacacatctgctggtgggaaggcctaaagaactggaaagcccactctcttggaaccaccacacctgtttaaagaacctaagcaccatttaaagccactggaaatttgttgtctagtggttgtgggtgaataaaggagggcagaatggatgatttcatctccattagcctgctgtctctggctatgttggtgggatgttacgtggccggaatcattcccttggctgttaatttctcagaggaacgactgaagctggtgactgttttgggtgctggccttctctgtggaactgctctggcagtcatcgtgcctgaaggagtacatgccctttatgaagatattcttgagggtgttgagaataataggcagtcagaaggtctgcatgccaaaggcagaagacatttgggaattttttcatcatgaactttaagttgaaggagttaatgattggctggattacaatataaaaagtggatgtctttacagtaaagaaaacaccaccaagcaagtgaaacacataatgtgattgcatcagacaaagcagcagaaaaatcagttgtccatgaacatgagcacagccacgaccacacacagctgcatgcctatattggtgtttccctcgttctgggcttcgttttcatgttgctggtggaccagattggtaactcccatgtgcattctactgacgatccagaagcagcaaggtctagcaattccaaaatcaccaccacgctgggtctggttgtccatgctgcagctgatggtgttgctttgggagcagcagcatctacttcacagaccagtgtccagttaattgtgtttgtggcaatcatgctacataaggcaccagctgcttttggactggtttccttcttgatgcatgctggcttagagcggaatcgaatcagaaagcacttgctggtctttgcattggcagcaccagttatgtccatggtgacatacttaggactgagtaagagcagtaaagaagccctttcagaggtgaacgccacgggagtggccatgcttttctctgccgggacatttctttatgttgccacagtacatgtcctccctgaggtgggcggaatagggcacagccacaagcccgatgccacgggagggagaggcctcagccgcctggaagtggcagccctggttctgggttgcctcatccctctcatcctgtcagtaggacaccagcattaaatgttcaaggtccagccttggtccagggccgtttgccatccagtgagaacagccggcacgtgacagctactcacttcctcagtctcttgtctcaccttgcgcatctctacatgtattcctagagtccagaggggaggtgaggttaaaacctgagtaatggaaaagcttttagagtagaaacacatttacgttgcagttagctatagacatcccattgtgttatcttttaaaaggcccttgacattttgcgttttaatatttctcttaaccctattctcagggaagatggaatttagttttaaggaaaagaggagaacttcatactcacaatgaaatagtgattatgaaaatacagtgttctgtaattaagctatgtctctttcttcttagtttagaggctctgctactttatccattgatttttaacatggttcccaccatgtaagactggtgctttagcatctatgccacatgcgttgatggaaggtcatagcacccactcacttagatgctaaaggtgattctagttaatctgggattagggtcaggaaaatgatagcaagacacattgaaagctctctttatactcaaaagagatatccattgaaaagggatgtctagagggatttaaacagctcctttggcacgtgcctctctgaatccagcctgccattccatcaaatggagcaggagaggtgggaggagcttctaaagaggtgactggtattttgtagcattccttgtcaagttctcctttgcagaatacctgtctccacattcctagagaggagccaagttctagtagtttcagttctaggctttccttcaagaacagtcagatcacaaagtgtctttggaaattaagggatattaaattttaagtgatttttggatggttattgatatctttgtagtagctttttttaaaagactaccaaaatgtatggttgtcctttttttttgttttttttttttttaattatttctcttagcagatcagcaatccctctagggacctaaatactaggtcagctttggcgacactgtgtcttctcacataaccacctgtagcaagatggatcataaatgagaagtgtttgcctattgatttaaagcttattggaatcatgtctcttgtctcttcgtcttttctttgcttttcttctaacttttccctctagcctctcctcgccacaatttgctgcttactgctggtgttaatatttgtgtgggatgaattcttatcaggacaaccacttctcgaactgtaataatgaagataataatatctttattctttatcccccttcaaagaaattacctttgtgtcaaatgccgctttgttgagcccttaaaataccacctcctcatgtgtaaattgacacaatcactaatctggtaatttaaacaattgagatagcaaaagtgtttaacagactaggataatttttttttcatatttgccaaaatttttgtaaaccctgtcttgtcaaataagtgtataatattgtattattaatttatttttactttctataccatttcaaaacacattacactaagggggaaccaagactagtttcttcagggcagtggacgtagtagtttgtaaaaacgttttctatgacgcataagctagcatgcctatgatttatttccttcatgaatttgtcactggatcagcagctgtggaaataaagcttgtgagccctctgctggccacagtgaggaaagtagcacaaataggatacagttgtatgtagtcattggcaacaattgcatacaattttactaccaagagaaggtatagtatggaaagtccaaatgacttccttgattggatgttaacagctgactggtgtgagacttgaggtttcatctagtccttcaaaactatatggttgcctagattctctctggaaactgactttgtcaaataaatagcagattgtagtgtc

SEQ ID NO: 184152 - DNA, 4965 bp, Homo sapiens
  Payload ID: 16273
  Gene Symbol: SLC4A1
  Gene Name: solute carrier family 4 (anion exchanger), member 1 (Diego blood group)
  Uniprot ID: P02730
  ENST ID: ENST00000262418
  CDS Start-End: 157-2892
gctgtcagaacgagtgggaacgtagctggtcgcagagggcaccagcggctgcaggacttcaccaagggaccctgaggctcgtgagcagggacccgcggtgcgggttatgctgggggctcagatcaccgtagacaactggacactcaggaccacgccatggaggagctgcaggatgattatgaagacatgatggaggagaatctggagcaggaggaatatgaagacccagacatccccgagtcccagatggaggagccggcagctcacgacaccgaggcaacagccacagactaccacaccacatcacacccgggtacccacaaggtctatgtggagctgcaggagctggtgatggacgaaaagaaccaggagctgagatggatggaggcggcgcgctgggtgcaactggaggagaacctgggggagaatggggcctggggccgcccgcacctctctcacctcaccttctggagcctcctagagctgcgtagagtcttcaccaagggtactgtcctcctagacctgcaagagacctccctggctggagtggccaaccaactgctagacaggtttatctttgaagaccagatccggcctcaggaccgagaggagctgctccgggccctgctgcttaaacacagccacgctggagagctggaggccctggggggtgtgaagcctgcagtcctgacacgctctggggatccttcacagcctctgctcccccaacactcctcactggagacacagctcttctgtgagcagggagatgggggcacagaagggcactcaccatctggaattctggaaaagattcccccggattcagaggccacgttggtgctagtgggccgcgccgacttcctggagcagccggtgctgggcttcgtgaggctgcaggaggcagcggagctggaggcggtggagctgccggtgcctatacgcttcctctttgtgttgctgggacctgaggccccccacatcgattacacccagcttggccgggctgctgccaccctcatgtcagagagggtgttccgcatagatgcctacatggctcagagccgaggggagctgctgcactccctagagggcttcctggactgcagcctagtgctgcctcccaccgatgccccctccgagcaggcactgctcagtctggtgcctgtgcagagggagctacttcgaaggcgctatcagtccagccctgccaagccagactccagcttctacaagggcctagacttaaatgggggcccagatgaccctctgcagcagacaggccagctcttcgggggcctggtgcgtgatatccggcgccgctacccctattacctgagtgacatcacagatgcattcagcccccaggtcctggctgccgtcatcttcatctactttgctgcactgtcacccgccatcaccttcggcggcctcctgggagaaaagacccggaaccagatgggagtgtcggagctgctgatctccactgcagtgcagggcattctcttcgccctgctgggggctcagcccctgcttgtggtcggcttctcaggacccctgctggtgtttgaggaagccttcttctcgttctgcgagaccaacggtctagagtacatcgtgggccgcgtgtggatcggcttctggctcatcctgctggtggtgttggtggtggccttcgagggtagcttcctggtccgcttcatctcccgctatacccaggagatcttctccttcctcatttccctcatcttcatctatgagactttctccaagctgatcaagatcttccaggaccacccactacagaagacttataactacaacgtgttgatggtgcccaaacctcagggccccctgcccaacacagccctcctctcccttgtgctcatggccggtaccttcttctttgccatgatgctgcgcaagttcaagaacagctcctatttccctggcaagctgcgtcgggtcatcggggacttcggggtccccatctccatcctgatcatggtcctggtggatttcttcattcaggatacctacacccagaaactctcggtgcctgatggcttcaaggtgtccaactcctcagcccggggctgggtcatccacccactgggcttgcgttccgagtttcccatctggatgatgtttgcctccgccctgcctgctctgctggtcttcatcctcatattcctggagtctcagatcaccacgctgattgtcagcaaacctgagcgcaagatggtcaagggctccggcttccacctggacctgctgctggtagtaggcatgggtggggtggccgccctctttgggatgccctggctcagtgccaccaccgtgcgttccgtcacccatgccaacgccctcactgtcatgggcaaagccagcaccccaggggctgcagcccagatccaggaggtcaaagagcagcggatcagtggactcctggtcgctgtgcttgtgggcctgtccatcctcatggagcccatcctgtcccgcatccccctggctgtactgtttggcatcttcctctacatgggggtcacgtcgctcagcggcatccagctctttgaccgcatcttgcttctgttcaagccacccaagtatcacccagatgtgccctacgtcaagcgggtgaagacctggcgcatgcacttattcacgggcatccagatcatctgcctggcagtgctgtgggtggtgaagtccacgccggcctccctggccctgcccttcgtcctcatcctcactgtgccgctgcggcgcgtcctgctgccgctcatcttcaggaacgtggagcttcagtgtctggatgctgatgatgccaaggcaacctttgatgaggaggaaggtcgggatgaatacgacgaagtggccatgcctgtgtgaggggcgggcccaggccctagaccctcccccaccattccacatccccaccttccaaggaaaagcagaagttcatgggcacctcatggactccaggatcctcctggagcagcagctgaggccccagggctgtgggtggggaaggaaggcgtgtccaggagaccttccacaaagggtagcctggcttttctggctggggatggccgatggggcccacattagggggtttgttgcacagtccctcctgttgccacactttcactggggatcccgtgctggaagacttagatctgagccctccctcttcccagcacaggcaggggtagaagcaaaggcaggaggtgggtgagcgggtggggtgcttgctgtgtgaccttgggcaagtcccttgacctttccagcctatatttcctcttctgtaaaatgggtatattgatgataatacccacattacaggatggttactgaggaccaaagatacatgtaaaatagggctttgtaaactccacagggactgttctatagcagtcatcatttgtctttgaacgtacccaaggtcacatagctgggatttgaactgagccgtgcagctgggatttgaaccaggccttctgatttcaaggtccgagctctgtcctctgtcagtcatgcgtccactttcccttcccctgtgactcctcccttccccactctgctcccagcccctaccttgagaccctcttctctgggcccagagagaggcgtcctggtgaggacaaggtacaggcaaggatgatccagggattgggcctgggactcaggcctcctaagtgtttggttcctccctccaaacactcattagttcactcattcattcattccacaaacatttactgagggccccggaatcagtggactccgaggggactgagacaagccctgccctggggtgggggtggggggcaaggtacagttgattctacatttggatagggagtgggggagggtgggaaggtaggggcgggagagtgagggggtttgtaatttattaattgcgtattttctaagagttttcaacatagtttggcttcacacacaacttcaggcccctcatttgagagccattatcctcaactccatctaaactgaatcttggggagaacccagatctgaccaattggggtaggagacagcaggctctccaagaacatgggcaaatttatttttttataaaacaaaaagataaaaagagttgaaagacgtgaaagtggtgagagatggaggaaacagaatcaggaagtggtagaaaagagaggaggtggctgggcgcagtggctcacgtttgtaatcccagcactttgggaggccaagttgggcggatcatttgaggtcaggagtttgagaccagcctggccaacatggtgaaaccccgttactactaaaaatacaaaaattagctgggtgtctcgtggcaggcacctgtaatcccagctacttagaaggctgaggcaagagaatcacctgaacccaggaggtggaggttgcagtgagccaagattgcaccactgcactccagcctgggcaacagagcgagaccctgtctcaaaaaaaaaaaaaaaaaaaaaaaaaaaacggaaggaaacatcagccttgggggccacagactcaacatgtgtgtgtggtggggttccagcccaacatagagtaacattatttgtacctcccaggctagctcagtccatgggaggctctcctgtccctgaaagctgacacccacctttcaccacttcgcccatgctacagttcagtttcctcgtctgtaaaatggggatgataatggtacctaccttgcagtgttgttataaggattaaaggagacagtgcaagaaaaggccttggttggtgaagagcccaacctcggaggggagctgctgggatcctccttatcttgactgggatgtccctgtctccccctccccttgctccttgaacatggccaaggaaagtgaaaaacaaaaattattcactctgctagcacccttccccttgatgcctgggaataggttttgccaataaacgtatctgtgttggagtggc

SEQ ID NO: 184153 - DNA, 3855 bp, Homo sapiens
  Payload ID: 16273
  Gene Symbol: SLC4A1
  Gene Name: solute carrier family 4 (anion exchanger), member 1 (Diego blood group)
  ENST ID: ENST00000399246
  CDS Start-End: 150-1787
gaacgagtgggaacgtagctggtcgcagagggcaccagcggctgcaggacttcaccaagggaccctgaggctcgtgagcagggacccgcggtgcgggttatgctgggggctcagatcaccgtagacaactggacactcaggaccacgccatggaggagctgcaggatgattatgaagacatgatggaggagaatctggagcaggaggaatatgaagacccagacatccccgagtcccagatggaggagccggcagctcacgacaccgaggcaacagccacagactaccacaccacatcacacccgggtacccacaaggtctatgtggagctgcaggagctggtgatggacgaaaagaaccaggagctgagatggatggaggcggcgcgctgggtgcaactggaggagaacctgggggagaatggggcctggggccgcccgcacctctctcacctcaccttctggagcctcctagagctgcgtagagtcttcaccaagggtactgtcctcctagacctgcaagagacctccctggctggagtggccaaccaactgctagacaggtttatctttgaagaccagatccggcctcaggaccgagaggagctgctccgggccctgctgcttaaacacagccacgctggagagctggaggccctggggggtgtgaagcctgcagtcctgacacgctctggggatccttcacagcctctgctcccccaacactcctcactggagacacagctcttctgtgagcagggagatgggggcacagaagggcactcaccatctggaattctggaaaagattcccccggattcagaggccacgttggtgctagtgggccgcgccgacttcctggagcagccggtgctgggcttcgtgaggctgcaggaggcagcggagctggaggcggtggagctgccggatacctacacccagaaactctcggtgcctgatggcttcaaggtgtccaactcctcagcccggggctgggtcatccacccactgggcttgcgttccgagtttcccatctggatgatgtttgcctccgccctgcctgctctgctggtcttcatcctcatattcctggagtctcagatcaccacgctgattgtcagcaaacctgagcgcaagatggtcaagggctccggcttccacctggacctgctgctggtagtaggcatgggtggggtggccgccctctttgggatgccctggctcagtgccaccaccgtgcgttccgtcacccatgccaacgccctcactgtcatgggcaaagccagcaccccaggggctgcagcccagatccaggaggtcaaagagcagcggatcagtggactcctggtcgctgtgcttgtgggcctgtccatcctcatggagcccatcctgtcccgcatccccctggctgtactgtttggcatcttcctctacatgggggtcacgtcgctcagcggcatccagctctttgaccgcatcttgcttctgttcaagccacccaagtatcacccagatgtgccctacgtcaagcgggtgaagacctggcgcatgcacttattcacgggcatccagatcatctgcctggcagtgctgtgggtggtgaagtccacgccggcctccctggccctgcccttcgtcctcatcctcactgtgccgctgcggcgcgtcctgctgccgctcatcttcaggaacgtggagcttcagtgtctggatgctgatgatgccaaggcaacctttgatgaggaggaaggtcgggatgaatacgacgaagtggccatgcctgtgtgaggggcgggcccaggccctagaccctcccccaccattccacatccccaccttccaaggaaaagcagaagttcatgggcacctcatggactccaggatcctcctggagcagcagctgaggccccagggctgtgggtggggaaggaaggcgtgtccaggagaccttccacaaagggtagcctggcttttctggctggggatggccgatggggcccacattagggggtttgttgcacagtccctcctgttgccacactttcactggggatcccgtgctggaagacttagatctgagccctccctcttcccagcacaggcaggggtagaagcaaaggcaggaggtgggtgagcgggtggggtgcttgctgtgtgaccttgggcaagtcccttgacctttccagcctatatttcctcttctgtaaaatgggtatattgatgataatacccacattacaggatggttactgaggaccaaagatacatgtaaaatagggctttgtaaactccacagggactgttctatagcagtcatcatttgtctttgaacgtacccaaggtcacatagctgggatttgaactgagccgtgcagctgggatttgaaccaggccttctgatttcaaggtccgagctctgtcctctgtcagtcatgcgtccactttcccttcccctgtgactcctcccttccccactctgctcccagcccctaccttgagaccctcttctctgggcccagagagaggcgtcctggtgaggacaaggtacaggcaaggatgatccagggattgggcctgggactcaggcctcctaagtgtttggttcctccctccaaacactcattagttcactcattcattcattccacaaacatttactgagggccccggaatcagtggactccgaggggactgagacaagccctgccctggggtgggggtggggggcaaggtacagttgattctacatttggatagggagtgggggagggtgggaaggtaggggcgggagagtgagggggtttgtaatttattaattgcgtattttctaagagttttcaacatagtttggcttcacacacaacttcaggcccctcatttgagagccattatcctcaactccatctaaactgaatcttggggagaacccagatctgaccaattggggtaggagacagcaggctctccaagaacatgggcaaatttatttttttataaaacaaaaagataaaaagagttgaaagacgtgaaagtggtgagagatggaggaaacagaatcaggaagtggtagaaaagagaggaggtggctgggcgcagtggctcacgtttgtaatcccagcactttgggaggccaagttgggcggatcatttgaggtcaggagtttgagaccagcctggccaacatggtgaaaccccgttactactaaaaatacaaaaattagctgggtgtctcgtggcaggcacctgtaatcccagctacttagaaggctgaggcaagagaatcacctgaacccaggaggtggaggttgcagtgagccaagattgcaccactgcactccagcctgggcaacagagcgagaccctgtctcaaaaaaaaaaaaaaaaaaaaaaaaaaaacggaaggaaacatcagccttgggggccacagactcaacatgtgtgtgtggtggggttccagcccaacatagagtaacattatttgtacctcccaggctagctcagtccatgggaggctctcctgtccctgaaagctgacacccacctttcaccacttcgcccatgctacagttcagtttcctcgtctgtaaaatggggatgataatggtacctaccttgcagtgttgttataaggattaaaggagacagtgcaagaaaaggccttggttggtgaagagcccaacctcggaggggagctgctgggatcctccttatcttgactgggatgtccctgtctccccctccccttgctccttgaacatggccaaggaaagtgaaaaacaaaaattattcactctgctagcacccttccccttgatgcctgggaataggttttgccaataaacgtatctgtgttgga

SEQ ID NO: 184154 - DNA, 1433 bp, Homo sapiens
  Payload ID: 16273
  Gene Symbol: SLC4A1
  Gene Name: solute carrier family 4 (anion exchanger), member 1 (Diego blood group)
  ENST ID: ENST00000631130
  CDS Start-End: 619-729
gggatttgaaccaggccttctgatttcaaggtccgagctctgtcctctgtcagtcatgcgtccactttcccttcccctgtgactcctcccttccccactctgctcccagcccctaccttgagaccctcttctctgggcccagagagaggcgtcctggtgaggacaaggtacaggcaaggatgatccagggattgggcctgggactcaggcctcctaagtgtttggttcctccctccaaacactcattagttcactcattcattcattccacaaacatttactgagggccccggaatcagtggactccgaggggactgagacaagccctgccctggggtgggggtggggggcaaggtacagttgattctacatttggatagggagtgggggagggtgggaaggtaggggcgggagagtgagggggtttgtaatttattaattttcaggcccctcatttgagagccattatcctcaactccatctaaactgaatcttggggagaacccagatctgaccaattggggtaggagacagcaggctctccaagaacatgggcaaatttatttttttataaaacaaaaagataaaaagagttgaaagacgtgaaagtggtgagagatggaggaaacagaatcaggaagtggtagaaaagagaggaggtggctgggcgcagtggctcacgtttgtaatcccagcactttgggaggccaagttgggcggatcatttgaggtcaggagtttgagaccagcctggccaacatggtgaaaccccgttactactaaaaatacaaaaattagctgggtgtctcgtggcaggcacctgtaatcccagctacttagaaggctgaggcaagagaatcacctgaacccaggaggtggaggttgcagtgagccaagattgcaccactgcactccagcctgggcaacagagcgagaccctgtctcaaaaaaaaaaaaaaaaaaaaaaaaaaaacggaaggaaacatcagccttgggggccacagactcaacatgtgtgtgtggtggggttccagcccaacatagagtaacattatttgtacctcccaggctagctcagtccatgggaggctctcctgtccctgaaagctgacacccacctttcaccacttcgcccatgctacagttcagtttcctcgtctgtaaaatggggatgataatggtacctaccttgcagtgttgttataaggattaaaggagacagtgcaagaaaaggccttggttggtgaagagcccaacctcggaggggagctgctgggatcctccttatcttgactgggatgtccctgtctccccctccccttgctccttgaacatggccaaggaaagtgaaaaacaaaaattattcactctgctagcacccttccccttgatgcctgggaataggttttgccaataaacgtatctgtgttgga

SEQ ID NO: 184155 - DNA, 2959 bp, Homo sapiens
  Payload ID: 16274
  Gene Symbol: SLC4A1AP
  Gene Name: solute carrier family 4 (anion exchanger), member 1, adaptor protein
  Uniprot ID: Q9BWU0
  ENST ID: ENST00000326019
  CDS Start-End: 283-2673
aggtctggacctgaaccgagacaaggaggtaccacactattcactgctgcgtcgcagagcgggctgggcggctgtctggacctcgagaggcctgaggcaaggatcgcgtcagaccccgaaagctggtttgttgattagtgatctaagaccgccggaagcgcttcttctcaatcaagctatgcaacaggaagtcattacgatcccgttgtaacctctaaatatgtccccgttctgcacagcatcccgataaccgttttgtttttctcatattatgaccttctcatgttagcaccacttcgcaacgctccaggtcgtgaaggagcaacttcaccatcgccgcctacagacgccactgggagcttgggagagtgggacgtggacaggaacgtaaagaccgaagggtgggtttcgaaggagcggatttcgaagttgcaccggttgaggatggctgacattctctctcagtcagagaccctggcgtcgcaagacctcagtggggacttcaagaagccagctctgccggtgtccccagcggcgcggagtaaggccccggccagcagttcttcaaaccctgaggaggtacagaaggaagggcccactgcgttgcaggactccaattctggggagcccgacatccctcctcctcagccggactgcggtgattttaggagtctacaggaggagcagtcgcgccccccgacagcggtttcttcccctggcggtccagcccgggctcccccctaccaagagcctccatggggtggccctgccacagccccctacagcttagagaccctgaagggcggcactatccttggcacccgtagcttgaaagggacgagttactgccttttcgggaggctgtctggctgcgacgtgtgcctggagcacccttcggtgtctcggtaccacgcagtgctgcagcacagggcgtccggccctgacggagaatgcgacagcaacgggccgggcttctacctctacgatctgggaagcacccatggcacttttctcaacaaaactcgcatcccacctcgcacctactgtcgagtccacgttgggcatgttgttcgctttggaggcagcacccggctctttatcctgcagggaccagaggaagaccgagaggcagaatccgagttaacagtaacacagttgaaggaattgcgcaagcagcagcaaatattgttggagaagaagatgctaggagaagactcagatgaagaagaggaaatggatacctctgaaaggaagataaatgctggtagccaagatgatgagatgggttgcacctggggaatgggagaagatgcagtagaggatgatgctgaagagaaccctattgtcttagagtttcagcaggaaagggaggccttttatataaaggatcccaaaaaggctctccaaggcttttttgaccgagaaggagaagaattagaatatgaatttgatgaacagggacatagcacttggctctgcagggtgagattacctgtggacgattcaactggaaaacaactggtggctgaggccattcactcaggaaagaaaaaagaagcaatgatccagtgctcattggaagcttgtcggattcttgacactttgggattgcttcggcaggaagcagtatctcggaaaaggaaagccaagaactgggaagatgaagacttttatgatagtgatgatgacacatttcttgataggactggcctgattgagaagaagcgtctgaacagaatgaagaaggctggcaagattgatgagaagccagagacctttgaatcattggttgcaaaattaaatgatgctgaaagggaactttctgaaatttctgagagattgaaagcctcaagccaagttctatcagagtctccatctcaggattctttagatgcgttcatgtcagaaatgaaatcaggcagtacattagatggtgtgtcccggaagaaacttcacctgagaacttttgaactgaggaaagaacaacagagacttaaagggttaataaaaattgtaaagccagcagagattccagaactaaaaaagactgaaactcagactacaggtgcagaaaacaaagctaaaaagcttacattgcctctatttggtgccatgaaaggaggaagcaaattcaaattaaaaactggaacagtagggaagttaccccccaagcgtccagaactccctccaactctaatgagaatgaaagatgagcctgaagtagaagaggaggaggaagaggaagaggaagaagagaaagaaaaggaggagcatgaaaagaaaaaactggaggatggaagcctcagtaggccacagccagagatagagccagaagcagcagtgcaggaaatgaggcctcccacagatctcacacattttaaagaaacccaaacccatgaaaacatgtctcaacttagcgaggaagaacagaataaagattatcaagactgtagcaaaaccacttcattgtgcgcaggaccctcagcatcaaagaatgaatatgagaaaagcagaggtgaattgaagaaaaagaaaacacctggtccaggcaaacttccaccaacactttcttccaaatatcctgaagatgacccagactactgtgtgtgggtcccacctgaaggtcaaagtggagatggcagaacccatcttaatgacaagtatggctattgattgcttcagaatcccaaaagaaaaccttgtggaccatgtgacatggaatatttgggataatgtatcaaattgaatggccagagaagtttagatgattatttgtaagatctggtgactggcttttcgttctgtgttcttggcttcctaaatttatctgcccatatgattctcatgcatttgatatttatgtttaaaagtgtttatatatgtatgtaaaaagggaaccatatgttttgagaatttgtaaagtgagagacatgatcctattaaaataagaaggcaaaaa

SEQ ID NO: 184156 - DNA, 906 bp, Homo sapiens
  Payload ID: 16274
  Gene Symbol: SLC4A1AP
  Gene Name: solute carrier family 4 (anion exchanger), member 1, adaptor protein
  ENST ID: ENST00000427424
  CDS Start-End: 1-474
acccatggcacttttctcaacaaaactcgcatcccacctcgcacctactgtcgagtccacgttgggcatgttgttcgctttggaggcagcacccggctctttatcctgcagggaccagaggaagaccgagaggcagaatccgagttaacagtaacacagttgaaggaattgcgcaagcagcagcaaatattgttggagaagaagatgctaggagaagactcagatgaagaagaggaaatggatacctctgaaaggaagataaatgctggtagccaagatgatgagatgggttgcacctggggaatgggagaagatgcagtagaggatgatgctgaagagaaccctattgtcttagagtttcagcaggaaagggaggccttttatataaaggatcccaaaaaggctctccaaggcttttttgaccgagaagatggggttttgccatgttgcacagactggtttcgcgctccttaactcaagctgtcatcccgcctcagcctcccaaagtgttaggattacaggcgtgagccactgctaggaacttgagaagaattagaatatgaatttgatgaacagggacatagcacttggctctgcagggtgagattacctgtggacgattcaactggaaaacaactggtggctgaggccattcactcaggaaagaaaaaagaagcaatgatccagtgctcattggaagcttgtcggattcttgacactttgggattgcttcggcaggaagcagtatctcggaaaaggaaagccaagaactgggaagatgaagacttttatgatagtgatgatgacacatttcttgataggactggcctgattgagaagaagcgtctgaacagaatgaagaaggctggcaagattgatgagaagccagagacctttgaatcattg

SEQ ID NO: 184157 - DNA, 2966 bp, Homo sapiens
  Payload ID: 16274
  Gene Symbol: SLC4A1AP
  Gene Name: solute carrier family 4 (anion exchanger), member 1, adaptor protein
  Uniprot ID: Q9BWU0
  ENST ID: ENST00000613058
  CDS Start-End: 283-2673
aggtctggacctgaaccgagacaaggaggtaccacactattcactgctgcgtcgcagagcgggctgggcggctgtctggacctcgagaggcctgaggcaaggatcgcgtcagaccccgaaagctggtttgttgattagtgatctaagaccgccggaagcgcttcttctcaatcaagctatgcaacaggaagtcattacgatcccgttgtaacctctaaatatgtccccgttctgcacagcatcccgataaccgttttgtttttctcatattatgaccttctcatgttagcaccacttcgcaacgctccaggtcgtgaaggagcaacttcaccatcgccgcctacagacgccactgggagcttgggagagtgggacgtggacaggaacgtaaagaccgaagggtgggtttcgaaggagcggatttcgaagttgcaccggttgaggatggctgacattctctctcagtcagagaccctggcgtcgcaagacctcagtggggacttcaagaagccagctctgccggtgtccccagcggcgcggagtaaggccccggccagcagttcttcaaaccctgaggaggtacagaaggaagggcccactgcgttgcaggactccaattctggggagcccgacatccctcctcctcagccggactgcggtgattttaggagtctacaggaggagcagtcgcgccccccgacagcggtttcttcccctggcggtccagcccgggctcccccctaccaagagcctccatggggtggccctgccacagccccctacagcttagagaccctgaagggcggcactatccttggcacccgtagcttgaaagggacgagttactgccttttcgggaggctgtctggctgcgacgtgtgcctggagcacccttcggtgtctcggtaccacgcagtgctgcagcacagggcgtccggccctgacggagaatgcgacagcaacgggccgggcttctacctctacgatctgggaagcacccatggcacttttctcaacaaaactcgcatcccacctcgcacctactgtcgagtccacgttgggcatgttgttcgctttggaggcagcacccggctctttatcctgcagggaccagaggaagaccgagaggcagaatccgagttaacagtaacacagttgaaggaattgcgcaagcagcagcaaatattgttggagaagaagatgctaggagaagactcagatgaagaagaggaaatggatacctctgaaaggaagataaatgctggtagccaagatgatgagatgggttgcacctggggaatgggagaagatgcagtagaggatgatgctgaagagaaccctattgtcttagagtttcagcaggaaagggaggccttttatataaaggatcccaaaaaggctctccaaggcttttttgaccgagaaggagaagaattagaatatgaatttgatgaacagggacatagcacttggctctgcagggtgagattacctgtggacgattcaactggaaaacaactggtggctgaggccattcactcaggaaagaaaaaagaagcaatgatccagtgctcattggaagcttgtcggattcttgacactttgggattgcttcggcaggaagcagtatctcggaaaaggaaagccaagaactgggaagatgaagacttttatgatagtgatgatgacacatttcttgataggactggcctgattgagaagaagcgtctgaacagaatgaagaaggctggcaagattgatgagaagccagagacctttgaatcattggttgcaaaattaaatgatgctgaaagggaactttctgaaatttctgagagattgaaagcctcaagccaagttctatcagagtctccatctcaggattctttagatgcgttcatgtcagaaatgaaatcaggcagtacattagatggtgtgtcccggaagaaacttcacctgagaacttttgaactgaggaaagaacaacagagacttaaagggttaataaaaattgtaaagccagcagagattccagaactaaaaaagactgaaactcagactacaggtgcagaaaacaaagctaaaaagcttacattgcctctatttggtgccatgaaaggaggaagcaaattcaaattaaaaactggaacagtagggaagttaccccccaagcgtccagaactccctccaactctaatgagaatgaaagatgagcctgaagtagaagaggaggaggaagaggaagaggaagaagagaaagaaaaggaggagcatgaaaagaaaaaactggaggatggaagcctcagtaggccacagccagagatagagccagaagcagcagtgcaggaaatgaggcctcccacagatctcacacattttaaagaaacccaaacccatgaaaacatgtctcaacttagcgaggaagaacagaataaagattatcaagactgtagcaaaaccacttcattgtgcgcaggaccctcagcatcaaagaatgaatatgagaaaagcagaggtgaattgaagaaaaagaaaacacctggtccaggcaaacttccaccaacactttcttccaaatatcctgaagatgacccagactactgtgtgtgggtcccacctgaaggtcaaagtggagatggcagaacccatcttaatgacaagtatggctattgattgcttcagaatcccaaaagaaaaccttgtggaccatgtgacatggaatatttgggataatgtatcaaattgaatggccagagaagtttagatgattatttgtaagatctggtgactggcttttcgttctgtgttcttggcttcctaaatttatctgcccatatgattctcatgcatttgatatttatgtttaaaagtgtttatatatgtatgtaaaaagggaaccatatgttttgagaatttgtaaagtgagagacatgatcctattaaaataagaaggcaaaaatgttcct

SEQ ID NO: 184158 - DNA, 819 bp, Homo sapiens
  Payload ID: 16274
  Gene Symbol: SLC4A1AP
  Gene Name: solute carrier family 4 (anion exchanger), member 1, adaptor protein
  ENST ID: ENST00000613517
  CDS Start-End: 1-819
atggctgacattctctctcagtcagagaccctggcgtcgcaagacctcagtggggacttcaagaagccagctctgccggtgtccccagcggcgcggagtaaggccccggccagcagttcttcaaaccctgaggagggaccagaggaagaccgagaggcagaatccgagttaacagtaacacagttgaaggaattgcgcaagcagcagcaaatattgttggagaagaagatgctaggagaagactcagatgaagaagaggaaatggatacctctgaaaggaagataaatgctggtagccaagatgatgagatgggttgcacctggggaatgggagaagatgcagtagaggatgatgctgaagagaaccctattgtcttagagtttcagcaggaaagggaggccttttatataaaggatcccaaaaaggctctccaaggcttttttgaccgagaaggagaagaattagaatatgaatttgatgaacagggacatagcacttggctctgcagggtgagattacctgtggacgattcaactggaaaacaactggtggctgaggccattcactcaggaaagaaaaaagaagcaatgatccagtgctcattggaagcttgtcggattcttgacactttgggattgcttcggcaggaagcagtatctcggaaaaggaaagccaagaactgggaagatgaagacttttatgatagtgatgatgacacatttcttgataggactggcctgattgagaagaagcgtctgaacagaatgaagaaggctggcaagattgatgagaagccagagacctttgaatcattggtt

SEQ ID NO: 184159 - DNA, 2544 bp, Homo sapiens
  Payload ID: 16274
  Gene Symbol: SLC4A1AP
  Gene Name: solute carrier family 4 (anion exchanger), member 1, adaptor protein
  ENST ID: ENST00000618046
  CDS Start-End: 27-2255
ggatttcgaagttgcaccggttgaggatggctgacattctctctcagtcagagaccctggcgtcgcaagacctcagtggggacttcaagaagccagctctgccggtgtccccagcggcgcggagtaaggccccggccagcagttcttcaaaccctgaggaggtacagaaggaagggcccactgcgttgcaggactccaattctggggagcccgacatccctcctcctcagccggactgcggtgattttaggagtctacaggaggagcagtcgcgccccccgacagcggtttcttcccctggcggtccagcccgggctcccccctaccaagagcctccatggggtggccctgccacagccccctacagcttagagaccctgaagggcggcactatccttggcacccgtagcttgaaagggacgagttactgccttttcgggaggctgtctggctgcgacgtgtgcctggagcacccttcggtgtctcggtaccacgcagtgctgcagcacagggcgtccggccctgacggagaatgcgacagcaacgggccgggcttctacctctacgatctgggaagcacccatggcacttttctcaacaaaactcgcatcccacctcgcacctactgtcgagtccacgttgggcatgttgttcgctttggaggcagcacccggctctttatcctgcagggaccagaggaagaccgagaggcagaatccgagttaacagtaacacagttgaaggaattgcgcaagcagcagcaaatattgttggagaagaagatgctaggagaagactcagatgaagaagaggaaatggatacctctgaaaggaagataaatgctggtagccaagatgatgagatgggttgcacctggggaatgggagaagatgcagtagaggatgatgctgaagagaaccctattgtcttagagtttcagcaggaaagggaggccttttatataaaggatcccaaaaaggctctccaaggcttttttgaccgagaaggagaagaattagaatatgaatttgatgaacagggacatagcacttggctctgcagggtgagattacctgtggacgattcaactggaaaacaactggtggctgaggccattcactcaggaaagaaaaaagaagcaatgatccagtgctcattggaagcttgtcggattcttgacactttgggattgcttcggcaggaagcagtatctcggaaaaggaaagccaagaactgggaagatgaagacttttatgatagtgatgatgacacatttcttgataggactggcctgattgagaagaagcgtctgaacagaatgaagaaggctggcaagattgatgagaagccagagacctttgaatcattggttgcaaaattaaatgatgctgaaagggaactttctgaaatttctgagagattgaaagcctcaagccaagttctatcagagtctccatctcaggattctttagatgcgttcatgtcagaaatgaaatcaggcagtacattagatggtgtgtcccggaagaaacttcacctgagaacttttgaactgaggaaagaacaacagagacttaaagggttaataaaaattgtaaagccagcagagattccagaactaaaaaagactgaaactcagactacaggtgcagaaaacaaagctaaaaagcttacattgcctctatttggtgccatgaaaggaggaagcaaattcaaattaaaaactggaacagtagggaagttaccccccaagcgtccagaactccctccaactctaatgagaatgaaagatgagcctgaagtagaagaggaggaggaagaggaagaggaagaagagaaagaaaaggaggagcatgaaaagaaaaaactggaggatggaagcctcagtaggccacagccagagatagagccagaagcagcagtgcaggaaatgaggcctcccacagatctcacacattttaaagaaacccaaacccatgaaaacatgtctcaacttagcgaggaagaacagaataaagattatcaagactgtagcaaaaccacttcattgtgcgcaggaccctcagcatcaaagaatgaatatgagaaaagcagaggtgaattgaagaaaaagaaaacacctggtccaggcaaacttccaccaacactttcttccaaatatcctgaagatgacccagactactgtgtgtgggtcccacctgaaggtcaaagtggagatggcagaacccatcttaatgacaagtatggctattgattgcttcagaatcccaaaagaaaaccttgtggaccatgtgacatggaatatttgggataatgtatcaaattgaatggccagagaagtttagatgattatttgtaagatctggtgactggcttttcgttctgtgttcttggcttcctaaatttatctgcccatatgattctcatgcatttgatatttatgtttaaaagtgtttatatatgtatgtaaaaagggaaccatatgttttgagaatttgtaaagtgagagacatgatcctattaaaataagaaggcaaaaatgt

SEQ ID NO: 184160 - DNA, 3969 bp, Homo sapiens
  Payload ID: 16275
  Gene Symbol: SLC4A2
  Gene Name: solute carrier family 4 (anion exchanger), member 2
  ENST ID: ENST00000310317
  CDS Start-End: 335-3814
gccttcctctctctcagtgagtgagtggagttgagctcctgccctccacccagccagcctgcttccctcctgccggtccccaaggacctgggggagggaagcctcctgccggcctgtactggggagggggcaccccctccctgcaggggcatcttgggctctctccagagttcttccattcgtctgcttcctgtctcggcagcccggccccggctccacggggtgtctcaccctccccaccacaccctctctggtctcaggcccacctctggttatgcctccgcctcgttgccctgaaagccgcagcgacagcgaaaagggctaagattcggccatgagcagcgcccctcggcgccccgccaagggcgcagattctttctgtacgccagggccaggacggaagcctcgaaggcgcccgggagcctccccgactggagaaaccccgaccattgaggagggggaggaagatgaggatgaggccagcgaggctgagggggcccgggctctcactcagccgtcccctgtctccacaccctcctcggtgcagttctttctccaagaggatgacagtgctgaccggaaggcagagaggaccagtccatcttcccctgcaccactgccccaccaggaggcgactcctcgggcctccaaaggggcccaggctggaacccaggtggaggaggcggaggcggaggcggtggcggtggccagtggcactgcagggggtgacgacgggggtgcctcggggcgccccctgcccaaagcccagcctgggcaccgcagctacaaccttcaggagaggaggcgcatcgggagcatgactggggctgagcaggcactgctgccccgggtccccacggatgagattgaggcccagacgctggccacggccgacctagacctcatgaagagtcaccggtttgaggacgttcctggggtgcggcggcacttggtgcggaagaatgccaaaggttccacacagagtggccgagaagggcgggagcctggccccacacctcgggcccgaccccgggccccccacaagccccatgaggtgtttgtggagctgaatgagttgctcctggacaaaaaccaggagccccagtggcgggagacagctcgctggatcaaatttgaagaggacgtggaggaggagactgagcgctgggggaagccccacgtggcctccctctccttccgcagtctcctggagctccgcaggaccctggcccatggggctgtgctcttggatctggaccagcagaccctgcccggagtggcccaccaggtggtggagcagatggtcatctctgaccagatcaaggccgaggacagggccaacgtgctgcgggctctgctgttgaaacacagccacccaagtgatgagaaggacttctccttcccccgcaacatctcagctggctccctgggctccctgctggggcatcaccatggtcagggggctgagagtgacccccacgtcaccgagcctctcatgggaggtgttcctgagacccggctggaggtggagcgagagcgtgagctgccgcctccagcaccaccagctggcatcacccgctccaagtccaagcacgagctgaaactgctggagaagattcctgagaatgccgaggccacggtggtccttgtgggctgcgtggagttcctctcccgccccaccatggcctttgtgcggctccgggaggctgtggagttggacgcagtgttggaggtgccggtgcctgtgcgtttcctcttcctgctgctgggcccgagtagtgccaacatggactaccacgagatcggccgctccatctccaccctcatgtcagacaagcaattccacgaggcagcctacctggctgacgagcgggaggacctgctgacggccatcaacgccttcctggactgcagcgtggtgctgccgccttcagaagtgcagggcgaggagctgctgcgctctgtggcccacttccagcgccagatgctcaagaagcgagaggagcagggccggctgctacctacaggggctgggctggagcccaaatctgcccaagataaggcgctcctgcagatggtagaggcggcaggggcagctgaagatgatccccttcggcggacggggcggccctttggggggctgatccgagatgtgcggcgccgctatccccactacctgagtgacttccgagatgcacttgaccctcagtgcctggccgcagtcatcttcatctactttgccgccctgtctcctgccatcacctttggggggctgctgggagagaagacgcaggacctgataggggtgtcggagctgattatgtccacagcgctccagggcgtggtcttctgcctgctgggtgcccagcccctgttggtgatcggcttctcagggcccctgctggtctttgaggaggccttcttctcgttctgtagcagcaaccacctggagtacctggtgggccgtgtgtggatcggcttctggctggtgttcctggccctgctcatggtggccctggaggggagcttcctggtccgcttcgtctcccgcttcacccaggagatcttcgccttcttgatctcactcatcttcatctatgagaccttctacaagctggtgaagatcttccaggagcaccccctgcatggctgctcagcctccaacagctcagaggtggacggcggtgagaacatgacatgggccggggcaagacccacgctggggccgggcaacaggagcttggctgggcagtctgggcaggggaagccccggggccagcccaacacggccctgctgtcgctggtgctcatggccggcaccttcttcatcgccttcttcctgcgcaaattcaagaacagccggttctttcctggccggatccggcgggtgattggggactttggggtgcccatcgccatcctcatcatggtgcttgtggattacagtattgaggacacctatacccagaagctgagcgttcccagtggattctcggtgactgccccagaaaagaggggctgggtcatcaaccccctgggagagaagagccccttccctgtgtggatgatggttgccagcctgctgcccgccatcctggtcttcattctcatcttcatggagacacagatcaccacgctcatcatctccaagaaggagcgcatgctgcagaagggctccggcttccacctggacctgctgctcatcgtggccatgggcggcatctgtgccctctttggcctgccctggttggctgctgccactgtccgctctgtcactcacgccaacgcgctcactgtcatgagcaaggctgtggcacctggggacaagcccaagattcaggaagtcaaggagcagcgggtgacggggctgctggttgccctgcttgtgggcctctccatagttatcggggatctgctccggcagatccccctggccgtgctctttggaattttcctgtacatgggagtcacctcccttaacgggatccagttctatgagcggctgcatctgctgctcatgccgcccaaacaccacccagatgtcacttacgtcaagaaggtccggaccctccgtatgcacctgttcacggccctgcagctgctctgcctggccctgctctgggccgtcatgtccacagctgcctccctggccttccccttcatcctcatcctcacagtgccgctccgcatggtggtgctcacccgtatcttcaccgaccgagagatgaaatgtctggatgctaacgaggcagagccggtgtttgatgagcgggagggtgtggacgagtacaatgagatgcccatgcctgtgtagccgccaccgagggacagccgagggaccgatggacgaggggacaggctggtgggatggggttccccctcccatgcccctccctcctttttatttaagtgaataatttaaagtcttctcctcccccactgcccctgcagtaaagtgctttggccccc

SEQ ID NO: 184161 - DNA, 3947 bp, Homo sapiens
  Payload ID: 16275
  Gene Symbol: SLC4A2
  Gene Name: solute carrier family 4 (anion exchanger), member 2
  Uniprot ID: P04920
  ENST ID: ENST00000392826
  CDS Start-End: 94-3792
gctattggtcacactggcccagaggggcacgtgactgggaaggggcacaggctggtcccctccccctccttctcaggttcacccctgccggccatggacttcctcctgcggcctcagccagagccagagagcttgggccctgggacgcctgggttccccgagcaggaggaagacgaacttcaccgcaccctgggcgtggagcggtttgaggagatcctacaggaggccgggtctcgtggaggggaggagccaggccgcagctatggggaggaagactttgagtaccaccgccagtcctcccaccacatccatcacccactgtccacccacctgcctccggatgcacgccgccgcaagacaccccagggcccaggacggaagcctcgaaggcgcccgggagcctccccgactggagaaaccccgaccattgaggagggggaggaagatgaggatgaggccagcgaggctgagggggcccgggctctcactcagccgtcccctgtctccacaccctcctcggtgcagttctttctccaagaggatgacagtgctgaccggaaggcagagaggaccagtccatcttcccctgcaccactgccccaccaggaggcgactcctcgggcctccaaaggggcccaggctggaacccaggtggaggaggcggaggcggaggcggtggcggtggccagtggcactgcagggggtgacgacgggggtgcctcggggcgccccctgcccaaagcccagcctgggcaccgcagctacaaccttcaggagaggaggcgcatcgggagcatgactggggctgagcaggcactgctgccccgggtccccacggatgagattgaggcccagacgctggccacggccgacctagacctcatgaagagtcaccggtttgaggacgttcctggggtgcggcggcacttggtgcggaagaatgccaaaggttccacacagagtggccgagaagggcgggagcctggccccacacctcgggcccgaccccgggccccccacaagccccatgaggtgtttgtggagctgaatgagttgctcctggacaaaaaccaggagccccagtggcgggagacagctcgctggatcaaatttgaagaggacgtggaggaggagactgagcgctgggggaagccccacgtggcctccctctccttccgcagtctcctggagctccgcaggaccctggcccatggggctgtgctcttggatctggaccagcagaccctgcccggagtggcccaccaggtggtggagcagatggtcatctctgaccagatcaaggccgaggacagggccaacgtgctgcgggctctgctgttgaaacacagccacccaagtgatgagaaggacttctccttcccccgcaacatctcagctggctccctgggctccctgctggggcatcaccatggtcagggggctgagagtgacccccacgtcaccgagcctctcatgggaggtgttcctgagacccggctggaggtggagcgagagcgtgagctgccgcctccagcaccaccagctggcatcacccgctccaagtccaagcacgagctgaaactgctggagaagattcctgagaatgccgaggccacggtggtccttgtgggctgcgtggagttcctctcccgccccaccatggcctttgtgcggctccgggaggctgtggagttggacgcagtgttggaggtgccggtgcctgtgcgtttcctcttcctgctgctgggcccgagtagtgccaacatggactaccacgagatcggccgctccatctccaccctcatgtcagacaagcaattccacgaggcagcctacctggctgacgagcgggaggacctgctgacggccatcaacgccttcctggactgcagcgtggtgctgccgccttcagaagtgcagggcgaggagctgctgcgctctgtggcccacttccagcgccagatgctcaagaagcgagaggagcagggccggctgctacctacaggggctgggctggagcccaaatctgcccaagataaggcgctcctgcagatggtagaggcggcaggggcagctgaagatgatccccttcggcggacggggcggccctttggggggctgatccgagatgtgcggcgccgctatccccactacctgagtgacttccgagatgcacttgaccctcagtgcctggccgcagtcatcttcatctactttgccgccctgtctcctgccatcacctttggggggctgctgggagagaagacgcaggacctgataggggtgtcggagctgattatgtccacagcgctccagggcgtggtcttctgcctgctgggtgcccagcccctgttggtgatcggcttctcagggcccctgctggtctttgaggaggccttcttctcgttctgtagcagcaaccacctggagtacctggtgggccgtgtgtggatcggcttctggctggtgttcctggccctgctcatggtggccctggaggggagcttcctggtccgcttcgtctcccgcttcacccaggagatcttcgccttcttgatctcactcatcttcatctatgagaccttctacaagctggtgaagatcttccaggagcaccccctgcatggctgctcagcctccaacagctcagaggtggacggcggtgagaacatgacatgggccggggcaagacccacgctggggccgggcaacaggagcttggctgggcagtctgggcaggggaagccccggggccagcccaacacggccctgctgtcgctggtgctcatggccggcaccttcttcatcgccttcttcctgcgcaaattcaagaacagccggttctttcctggccggatccggcgggtgattggggactttggggtgcccatcgccatcctcatcatggtgcttgtggattacagtattgaggacacctatacccagaagctgagcgttcccagtggattctcggtgactgccccagaaaagaggggctgggtcatcaaccccctgggagagaagagccccttccctgtgtggatgatggttgccagcctgctgcccgccatcctggtcttcattctcatcttcatggagacacagatcaccacgctcatcatctccaagaaggagcgcatgctgcagaagggctccggcttccacctggacctgctgctcatcgtggccatgggcggcatctgtgccctctttggcctgccctggttggctgctgccactgtccgctctgtcactcacgccaacgcgctcactgtcatgagcaaggctgtggcacctggggacaagcccaagattcaggaagtcaaggagcagcgggtgacggggctgctggttgccctgcttgtgggcctctccatagttatcggggatctgctccggcagatccccctggccgtgctctttggaattttcctgtacatgggagtcacctcccttaacgggatccagttctatgagcggctgcatctgctgctcatgccgcccaaacaccacccagatgtcacttacgtcaagaaggtccggaccctccgtatgcacctgttcacggccctgcagctgctctgcctggccctgctctgggccgtcatgtccacagctgcctccctggccttccccttcatcctcatcctcacagtgccgctccgcatggtggtgctcacccgtatcttcaccgaccgagagatgaaatgtctggatgctaacgaggcagagccggtgtttgatgagcgggagggtgtggacgagtacaatgagatgcccatgcctgtgtagccgccaccgagggacagccgagggaccgatggacgaggggacaggctggtgggatggggttccccctcccatgcccctccctcctttttatttaagtgaataatttaaagtcttctcctcccccactgcccctgcagtaaagtgctttggccccc

SEQ ID NO: 184162 - DNA, 4142 bp, Homo sapiens
  Payload ID: 16275
  Gene Symbol: SLC4A2
  Gene Name: solute carrier family 4 (anion exchanger), member 2
  Uniprot ID: P04920
  ENST ID: ENST00000413384
  CDS Start-End: 257-3982
acggtgcgccggggggcgcgcacgcagggggctggcctgcccgcggcgcgggggaaagttgagttgggagaagttgggagcggcgggggcgcgccccggggtgggcacggggcagtcgtcgggagcgcgcgagtgcgccggaggacggggagagaccccgagacccccggggcacgaagtccagagcgagcgggttatgcctccgcctcgttgccctgaaagccgcagcgacagcgaaaagggctaagattcggccatgagcagcgcccctcggcgccccgccaagggcgcagattctttctgtacgccagagccagagagcttgggccctgggacgcctgggttccccgagcaggaggaagacgaacttcaccgcaccctgggcgtggagcggtttgaggagatcctacaggaggccgggtctcgtggaggggaggagccaggccgcagctatggggaggaagactttgagtaccaccgccagtcctcccaccacatccatcacccactgtccacccacctgcctccggatgcacgccgccgcaagacaccccagggcccaggacggaagcctcgaaggcgcccgggagcctccccgactggagaaaccccgaccattgaggagggggaggaagatgaggatgaggccagcgaggctgagggggcccgggctctcactcagccgtcccctgtctccacaccctcctcggtgcagttctttctccaagaggatgacagtgctgaccggaaggcagagaggaccagtccatcttcccctgcaccactgccccaccaggaggcgactcctcgggcctccaaaggggcccaggctggaacccaggtggaggaggcggaggcggaggcggtggcggtggccagtggcactgcagggggtgacgacgggggtgcctcggggcgccccctgcccaaagcccagcctgggcaccgcagctacaaccttcaggagaggaggcgcatcgggagcatgactggggctgagcaggcactgctgccccgggtccccacggatgagattgaggcccagacgctggccacggccgacctagacctcatgaagagtcaccggtttgaggacgttcctggggtgcggcggcacttggtgcggaagaatgccaaaggttccacacagagtggccgagaagggcgggagcctggccccacacctcgggcccgaccccgggccccccacaagccccatgaggtgtttgtggagctgaatgagttgctcctggacaaaaaccaggagccccagtggcgggagacagctcgctggatcaaatttgaagaggacgtggaggaggagactgagcgctgggggaagccccacgtggcctccctctccttccgcagtctcctggagctccgcaggaccctggcccatggggctgtgctcttggatctggaccagcagaccctgcccggagtggcccaccaggtggtggagcagatggtcatctctgaccagatcaaggccgaggacagggccaacgtgctgcgggctctgctgttgaaacacagccacccaagtgatgagaaggacttctccttcccccgcaacatctcagctggctccctgggctccctgctggggcatcaccatggtcagggggctgagagtgacccccacgtcaccgagcctctcatgggaggtgttcctgagacccggctggaggtggagcgagagcgtgagctgccgcctccagcaccaccagctggcatcacccgctccaagtccaagcacgagctgaaactgctggagaagattcctgagaatgccgaggccacggtggtccttgtgggctgcgtggagttcctctcccgccccaccatggcctttgtgcggctccgggaggctgtggagttggacgcagtgttggaggtgccggtgcctgtgcgtttcctcttcctgctgctgggcccgagtagtgccaacatggactaccacgagatcggccgctccatctccaccctcatgtcagacaagcaattccacgaggcagcctacctggctgacgagcgggaggacctgctgacggccatcaacgccttcctggactgcagcgtggtgctgccgccttcagaagtgcagggcgaggagctgctgcgctctgtggcccacttccagcgccagatgctcaagaagcgagaggagcagggccggctgctacctacaggggctgggctggagcccaaatctgcccaagataaggcgctcctgcagatggtagaggcggcaggggcagctgaagatgatccccttcggcggacggggcggccctttggggggctgatccgagatgtgcggcgccgctatccccactacctgagtgacttccgagatgcacttgaccctcagtgcctggccgcagtcatcttcatctactttgccgccctgtctcctgccatcacctttggggggctgctgggagagaagacgcaggacctgataggggtgtcggagctgattatgtccacagcgctccagggcgtggtcttctgcctgctgggtgcccagcccctgttggtgatcggcttctcagggcccctgctggtctttgaggaggccttcttctcgttctgtagcagcaaccacctggagtacctggtgggccgtgtgtggatcggcttctggctggtgttcctggccctgctcatggtggccctggaggggagcttcctggtccgcttcgtctcccgcttcacccaggagatcttcgccttcttgatctcactcatcttcatctatgagaccttctacaagctggtgaagatcttccaggagcaccccctgcatggctgctcagcctccaacagctcagaggtggacggcggtgagaacatgacatgggccggggcaagacccacgctggggccgggcaacaggagcttggctgggcagtctgggcaggggaagccccggggccagcccaacacggccctgctgtcgctggtgctcatggccggcaccttcttcatcgccttcttcctgcgcaaattcaagaacagccggttctttcctggccggatccggcgggtgattggggactttggggtgcccatcgccatcctcatcatggtgcttgtggattacagtattgaggacacctatacccagaagctgagcgttcccagtggattctcggtgactgccccagaaaagaggggctgggtcatcaaccccctgggagagaagagccccttccctgtgtggatgatggttgccagcctgctgcccgccatcctggtcttcattctcatcttcatggagacacagatcaccacgctcatcatctccaagaaggagcgcatgctgcagaagggctccggcttccacctggacctgctgctcatcgtggccatgggcggcatctgtgccctctttggcctgccctggttggctgctgccactgtccgctctgtcactcacgccaacgcgctcactgtcatgagcaaggctgtggcacctggggacaagcccaagattcaggaagtcaaggagcagcgggtgacggggctgctggttgccctgcttgtgggcctctccatagttatcggggatctgctccggcagatccccctggccgtgctctttggaattttcctgtacatgggagtcacctcccttaacgggatccagttctatgagcggctgcatctgctgctcatgccgcccaaacaccacccagatgtcacttacgtcaagaaggtccggaccctccgtatgcacctgttcacggccctgcagctgctctgcctggccctgctctgggccgtcatgtccacagctgcctccctggccttccccttcatcctcatcctcacagtgccgctccgcatggtggtgctcacccgtatcttcaccgaccgagagatgaaatgtctggatgctaacgaggcagagccggtgtttgatgagcgggagggtgtggacgagtacaatgagatgcccatgcctgtgtagccgccaccgagggacagccgagggaccgatggacgaggggacaggctggtgggatggggttccccctcccatgcccctccctcctttttatttaagtgaataatttaaagtcttctcctcccccactgcccctgcagtaaagtgctttggcccccaccta

SEQ ID NO: 184163 - DNA, 610 bp, Homo sapiens
  Payload ID: 16275
  Gene Symbol: SLC4A2
  Gene Name: solute carrier family 4 (anion exchanger), member 2
  ENST ID: ENST00000488420
  CDS Start-End: 400-610
attatcactccctccctcatctttgttgctttctctccgggcctgggccttgactcctttctccctcatttttcttgcggcctttcccacctcctctctcctcctccctctactcagcctctcggcccttttcggcccccctcgcctcagtcctctcctgtctccttgttcttctcttttcttcctataaataactctcctctgtgctgtggctgccgctaagggccactctgaggcccttcatactccaggaggatccccagcagcgcagcctgcgcgtggtggctcctgccctcccagggctctcgatggtgatcaggcctctcccccatccaggttatgcctccgcctcgttgccctgaaagccgcagcgacagcgaaaagggctaagattcggccatgagcagcgcccctcggcgccccgccaagggcgcagattctttctgtacgccagagccagagagcttgggccctgggacgcctgggttccccgagcaggaggaagacgaacttcaccgcaccctgggcgtggagcggtttgaggagatcctacaggaggccgggtctcgtggaggggaggagccaggccgcagctatggggaggaagact

SEQ ID NO: 184164 - DNA, 571 bp, Homo sapiens
  Payload ID: 16275
  Gene Symbol: SLC4A2
  Gene Name: solute carrier family 4 (anion exchanger), member 2
  ENST ID: ENST00000483786
  CDS Start-End: 136-571
aagccaggaaatgcctcctgagagaggtgaaggcagcgtctcagtatgcaagggaagggattcagggtgaaggttatgcctccgcctcgttgccctgaaagccgcagcgacagcgaaaagggctaagattcggccatgagcagcgcccctcggcgccccgccaagggcgcagattctttctgtacgccagagccagagagcttgggccctgggacgcctgggttccccgagcaggaggaagacgaacttcaccgcaccctgggcgtggagcggtttgaggagatcctacaggaggccgggtctcgtggaggggaggagccaggccgcagctatggggaggaagactttgagtaccaccgccagtcctcccaccacatccatcacccactgtccacccacctgcctccggatgcacgccgccgcaagacaccccagggcccaggacggaagcctcgaaggcgcccgggagcctccccgactggagaaaccccgaccattgaggagggggaggaagatgaggatgaggccagcgaggctgagggggcccgggctctcactcagccgtcccctg

SEQ ID NO: 184165 - DNA, 702 bp, Homo sapiens
  Payload ID: 16275
  Gene Symbol: SLC4A2
  Gene Name: solute carrier family 4 (anion exchanger), member 2
  ENST ID: ENST00000490898
  CDS Start-End: 196-702
agaccacccctcccctccggcccccccgcatagtccttcagtcccgtccggggcgcccagactgggggttgcccggggcccccatccccaatctccgggttgagaggcgaagccaggaaaggcgggtggcgggttatgcctccgcctcgttgccctgaaagccgcagcgacagcgaaaagggctaagattcggccatgagcagcgcccctcggcgccccgccaagggcgcagattctttctgtacgccagagccagagagcttgggccctgggacgcctgggttccccgagcaggaggaagacgaacttcaccgcaccctgggcgtggagcggtttgaggagatcctacaggaggccgggtctcgtggaggggaggagccaggccgcagctatggggaggaagactttgagtaccaccgccagtcctcccaccacatccatcacccactgtccacccacctgcctccggatgcacgccgccgcaagacaccccagggcccaggacggaagcctcgaaggcgcccgggagcctccccgactggagaaaccccgaccattgaggagggggaggaagatgaggatgaggccagcgaggctgagggggcccgggctctcactcagccgtcccctgtctccacaccctcctcggtgcagttctttctccaagaggatgacagtgctgaccggaaggcagagaggacc

SEQ ID NO: 184166 - DNA, 793 bp, Homo sapiens
  Payload ID: 16275
  Gene Symbol: SLC4A2
  Gene Name: solute carrier family 4 (anion exchanger), member 2
  ENST ID: ENST00000463414
  CDS Start-End: 342-793
cttctgtgccttcctctctctcagtgagtgagtggagttgagctcctgccctccacccagccagcctgcttccctcctgccggtccccaaggacctgggggagggaagcctcctgccggcctgtactggggagggggcaccccctccctgcaggggcatcttgggctctctccagagttcttccattcgtctgcttcctgtctcggcagcccggccccggctccacggggtgtctcaccctccccaccacaccctctctggtctcaggcccacctctggttatgcctccgcctcgttgccctgaaagccgcagcgacagcgaaaagggctaagattcggccatgagcagcgcccctcggcgccccgccaagggcgcagattctttctgtacgccagagccagagagcttgggccctgggacgcctgggttccccgagcaggaggaagacgaacttcaccgcaccctgggcgtggagcggtttgaggagatcctacaggaggccgggtctcgtggaggggaggagccaggccgcagctatggggaggaagactttgagtaccaccgccagtcctcccaccacatccatcacccactgtccacccacctgcctccggatgcacgccgccgcaagacaccccagggcccaggacggaagcctcgaaggcgcccgggagcctccccgactggagaaaccccgaccattgaggagggggaggaagatgaggatgaggccagcgaggctgagggggcccgggctctcactcagccgtcccctgtctccacaccctcctc

SEQ ID NO: 184167 - DNA, 4387 bp, Homo sapiens
  Payload ID: 16275
  Gene Symbol: SLC4A2
  Gene Name: solute carrier family 4 (anion exchanger), member 2
  Uniprot ID: P04920
  ENST ID: ENST00000461735
  CDS Start-End: 548-4231
ccggccatggacttcctcctgcggcctcaggtgcgaggggtctgcgaccctctctccccatggcggcaagctccctgcgcctctccccgtcccctcgtcccacggggctgcttctggtgggagtggggctgggcgcttaggggagccaggagatggacaggagccttcctcacagaggggagaagccagccccctggcccgctcaccttctcttatccggtgttctgccagtcccagctgctccagtccccacctcgcccctaagacccgcccttcaccccagccctccccgcgctcttccttgttctggctgctggcaccgctatggagggggctgcatacccccgcccttggagatcccgatgcccttcaggtccagaagctcttgagcaaatatttggcggcgcctggagctgagaccgtgggtgggtggggggctggaccaaggctgcctggccaggcggctgccgcttagctgggctgagctcttacaagcgccgcattccctgccggctgtgccggccggccgctgctccgcgcccgcaggatgactcagccagagccagagagcttgggccctgggacgcctgggttccccgagcaggaggaagacgaacttcaccgcaccctgggcgtggagcggtttgaggagatcctacaggaggccgggtctcgtggaggggaggagccaggccgcagctatggggaggaagactttgagtaccaccgccagtcctcccaccacatccatcacccactgtccacccacctgcctccggatgcacgccgccgcaagacaccccagggcccaggacggaagcctcgaaggcgcccgggagcctccccgactggagaaaccccgaccattgaggagggggaggaagatgaggatgaggccagcgaggctgagggggcccgggctctcactcagccgtcccctgtctccacaccctcctcggtgcagttctttctccaagaggatgacagtgctgaccggaaggcagagaggaccagtccatcttcccctgcaccactgccccaccaggaggcgactcctcgggcctccaaaggggcccaggctggaacccaggtggaggaggcggaggcggaggcggtggcggtggccagtggcactgcagggggtgacgacgggggtgcctcggggcgccccctgcccaaagcccagcctgggcaccgcagctacaaccttcaggagaggaggcgcatcgggagcatgactggggctgagcaggcactgctgccccgggtccccacggatgagattgaggcccagacgctggccacggccgacctagacctcatgaagagtcaccggtttgaggacgttcctggggtgcggcggcacttggtgcggaagaatgccaaaggttccacacagagtggccgagaagggcgggagcctggccccacacctcgggcccgaccccgggccccccacaagccccatgaggtgtttgtggagctgaatgagttgctcctggacaaaaaccaggagccccagtggcgggagacagctcgctggatcaaatttgaagaggacgtggaggaggagactgagcgctgggggaagccccacgtggcctccctctccttccgcagtctcctggagctccgcaggaccctggcccatggggctgtgctcttggatctggaccagcagaccctgcccggagtggcccaccaggtggtggagcagatggtcatctctgaccagatcaaggccgaggacagggccaacgtgctgcgggctctgctgttgaaacacagccacccaagtgatgagaaggacttctccttcccccgcaacatctcagctggctccctgggctccctgctggggcatcaccatggtcagggggctgagagtgacccccacgtcaccgagcctctcatgggaggtgttcctgagacccggctggaggtggagcgagagcgtgagctgccgcctccagcaccaccagctggcatcacccgctccaagtccaagcacgagctgaaactgctggagaagattcctgagaatgccgaggccacggtggtccttgtgggctgcgtggagttcctctcccgccccaccatggcctttgtgcggctccgggaggctgtggagttggacgcagtgttggaggtgccggtgcctgtgcgtttcctcttcctgctgctgggcccgagtagtgccaacatggactaccacgagatcggccgctccatctccaccctcatgtcagacaagcaattccacgaggcagcctacctggctgacgagcgggaggacctgctgacggccatcaacgccttcctggactgcagcgtggtgctgccgccttcagaagtgcagggcgaggagctgctgcgctctgtggcccacttccagcgccagatgctcaagaagcgagaggagcagggccggctgctacctacaggggctgggctggagcccaaatctgcccaagataaggcgctcctgcagatggtagaggcggcaggggcagctgaagatgatccccttcggcggacggggcggccctttggggggctgatccgagatgtgcggcgccgctatccccactacctgagtgacttccgagatgcacttgaccctcagtgcctggccgcagtcatcttcatctactttgccgccctgtctcctgccatcacctttggggggctgctgggagagaagacgcaggacctgataggggtgtcggagctgattatgtccacagcgctccagggcgtggtcttctgcctgctgggtgcccagcccctgttggtgatcggcttctcagggcccctgctggtctttgaggaggccttcttctcgttctgtagcagcaaccacctggagtacctggtgggccgtgtgtggatcggcttctggctggtgttcctggccctgctcatggtggccctggaggggagcttcctggtccgcttcgtctcccgcttcacccaggagatcttcgccttcttgatctcactcatcttcatctatgagaccttctacaagctggtgaagatcttccaggagcaccccctgcatggctgctcagcctccaacagctcagaggtggacggcggtgagaacatgacatgggccggggcaagacccacgctggggccgggcaacaggagcttggctgggcagtctgggcaggggaagccccggggccagcccaacacggccctgctgtcgctggtgctcatggccggcaccttcttcatcgccttcttcctgcgcaaattcaagaacagccggttctttcctggccggatccggcgggtgattggggactttggggtgcccatcgccatcctcatcatggtgcttgtggattacagtattgaggacacctatacccagaagctgagcgttcccagtggattctcggtgactgccccagaaaagaggggctgggtcatcaaccccctgggagagaagagccccttccctgtgtggatgatggttgccagcctgctgcccgccatcctggtcttcattctcatcttcatggagacacagatcaccacgctcatcatctccaagaaggagcgcatgctgcagaagggctccggcttccacctggacctgctgctcatcgtggccatgggcggcatctgtgccctctttggcctgccctggttggctgctgccactgtccgctctgtcactcacgccaacgcgctcactgtcatgagcaaggctgtggcacctggggacaagcccaagattcaggaagtcaaggagcagcgggtgacggggctgctggttgccctgcttgtgggcctctccatagttatcggggatctgctccggcagatccccctggccgtgctctttggaattttcctgtacatgggagtcacctcccttaacgggatccagttctatgagcggctgcatctgctgctcatgccgcccaaacaccacccagatgtcacttacgtcaagaaggtccggaccctccgtatgcacctgttcacggccctgcagctgctctgcctggccctgctctgggccgtcatgtccacagctgcctccctggccttccccttcatcctcatcctcacagtgccgctccgcatggtggtgctcacccgtatcttcaccgaccgagagatgaaatgtctggatgctaacgaggcagagccggtgtttgatgagcgggagggtgtggacgagtacaatgagatgcccatgcctgtgtagccgccaccgagggacagccgagggaccgatggacgaggggacaggctggtgggatggggttccccctcccatgcccctccctcctttttatttaagtgaataatttaaagtcttctcctcccccactgcccctgcagtaaagtgctttggccccca

SEQ ID NO: 184168 - DNA, 500 bp, Homo sapiens
  Payload ID: 16275
  Gene Symbol: SLC4A2
  Gene Name: solute carrier family 4 (anion exchanger), member 2
  ENST ID: ENST00000482950
  CDS Start-End: 118-500
ataaagctctgcccagcccatgcccaccttctgtgccttcctctctctcagtgagttatgcctccgcctcgttgccctgaaagccgcagcgacagcgaaaagggctaagattcggccatgagcagcgcccctcggcgccccgccaagggcgcagattctttctgtacgccagagccagagagcttgggccctgggacgcctgggttccccgagcaggaggaagacgaacttcaccgcaccctgggcgtggagcggtttgaggagatcctacaggaggccgggtctcgtggaggggaggagccaggccgcagctatggggaggaagactttgagtaccaccgccagtcctcccaccacatccatcacccactgtccacccacctgcctccggatgcacgccgccgcaagacaccccagggcccaggacggaagcctcgaaggcgcccgggagcctccccgactggagaaaccccgaccattgaggagggggaggaagatga

SEQ ID NO: 184169 - DNA, 4925 bp, Homo sapiens
  Payload ID: 16275
  Gene Symbol: SLC4A2
  Gene Name: solute carrier family 4 (anion exchanger), member 2
  Uniprot ID: P04920
  ENST ID: ENST00000485713
  CDS Start-End: 1041-4766
cccagccctcttgaaaagggccgctccgggactacgcgttccagaatgcagcggaaatgggggcggagcgctctcggttaggggtttggggtttggcggcctagatcccgggcactggcggcccagcgctgacctggttggtggcattgtgttcccaacggcctcttgacgacctcagcacgggtttccacctctccccaagccacctagtgaccccagaattgactggggaatgcctgtgagcgatgatgacctcacagggaacagctgaccgcagggctgggagaacagctgtgccccttcgaggctggattttagtggagggacacacgccaaagaccccctctctgctgagccccgtttgttgtctcggagcccacccgactctagccgctgaactctgacatgctgaggaaaactgggtggagccctgggggtccccctcagaccccagtctccggaacagggcccactggagtcagccagggtgtggcaggcaggttggttaaccccctccacagacaagaccacagaccgatgctcaacttgcagcagcctctgcctcaccccttaaaggagctgattatagattcccttacgctgcctctctaattgtctcatgattgcattcttgagggctatggaccgagggaaaaggatcccaaacagcactcctcagcaccggaaccagagttgctgctaaacacgtgttaattaactcgtttctatctgaatgcttttgcatacacaagggaaaagaagcaaaaagtgtattccttatctggaagactttgtgatttcgttgggcaaaaaagaactacacacaaaggtcttgaatgataagtgatggctctgcctagggttcggttcagtgtggaggttccattcaagaggaaggaggccagcacagcgaatctctgtccctctctggaagtggagagcctctaacaagttaccctctcccagatcagctcagggttatgcctccgcctcgttgccctgaaagccgcagcgacagcgaaaagggctaagattcggccatgagcagcgcccctcggcgccccgccaagggcgcagattctttctgtacgccagagccagagagcttgggccctgggacgcctgggttccccgagcaggaggaagacgaacttcaccgcaccctgggcgtggagcggtttgaggagatcctacaggaggccgggtctcgtggaggggaggagccaggccgcagctatggggaggaagactttgagtaccaccgccagtcctcccaccacatccatcacccactgtccacccacctgcctccggatgcacgccgccgcaagacaccccagggcccaggacggaagcctcgaaggcgcccgggagcctccccgactggagaaaccccgaccattgaggagggggaggaagatgaggatgaggccagcgaggctgagggggcccgggctctcactcagccgtcccctgtctccacaccctcctcggtgcagttctttctccaagaggatgacagtgctgaccggaaggcagagaggaccagtccatcttcccctgcaccactgccccaccaggaggcgactcctcgggcctccaaaggggcccaggctggaacccaggtggaggaggcggaggcggaggcggtggcggtggccagtggcactgcagggggtgacgacgggggtgcctcggggcgccccctgcccaaagcccagcctgggcaccgcagctacaaccttcaggagaggaggcgcatcgggagcatgactggggctgagcaggcactgctgccccgggtccccacggatgagattgaggcccagacgctggccacggccgacctagacctcatgaagagtcaccggtttgaggacgttcctggggtgcggcggcacttggtgcggaagaatgccaaaggttccacacagagtggccgagaagggcgggagcctggccccacacctcgggcccgaccccgggccccccacaagccccatgaggtgtttgtggagctgaatgagttgctcctggacaaaaaccaggagccccagtggcgggagacagctcgctggatcaaatttgaagaggacgtggaggaggagactgagcgctgggggaagccccacgtggcctccctctccttccgcagtctcctggagctccgcaggaccctggcccatggggctgtgctcttggatctggaccagcagaccctgcccggagtggcccaccaggtggtggagcagatggtcatctctgaccagatcaaggccgaggacagggccaacgtgctgcgggctctgctgttgaaacacagccacccaagtgatgagaaggacttctccttcccccgcaacatctcagctggctccctgggctccctgctggggcatcaccatggtcagggggctgagagtgacccccacgtcaccgagcctctcatgggaggtgttcctgagacccggctggaggtggagcgagagcgtgagctgccgcctccagcaccaccagctggcatcacccgctccaagtccaagcacgagctgaaactgctggagaagattcctgagaatgccgaggccacggtggtccttgtgggctgcgtggagttcctctcccgccccaccatggcctttgtgcggctccgggaggctgtggagttggacgcagtgttggaggtgccggtgcctgtgcgtttcctcttcctgctgctgggcccgagtagtgccaacatggactaccacgagatcggccgctccatctccaccctcatgtcagacaagcaattccacgaggcagcctacctggctgacgagcgggaggacctgctgacggccatcaacgccttcctggactgcagcgtggtgctgccgccttcagaagtgcagggcgaggagctgctgcgctctgtggcccacttccagcgccagatgctcaagaagcgagaggagcagggccggctgctacctacaggggctgggctggagcccaaatctgcccaagataaggcgctcctgcagatggtagaggcggcaggggcagctgaagatgatccccttcggcggacggggcggccctttggggggctgatccgagatgtgcggcgccgctatccccactacctgagtgacttccgagatgcacttgaccctcagtgcctggccgcagtcatcttcatctactttgccgccctgtctcctgccatcacctttggggggctgctgggagagaagacgcaggacctgataggggtgtcggagctgattatgtccacagcgctccagggcgtggtcttctgcctgctgggtgcccagcccctgttggtgatcggcttctcagggcccctgctggtctttgaggaggccttcttctcgttctgtagcagcaaccacctggagtacctggtgggccgtgtgtggatcggcttctggctggtgttcctggccctgctcatggtggccctggaggggagcttcctggtccgcttcgtctcccgcttcacccaggagatcttcgccttcttgatctcactcatcttcatctatgagaccttctacaagctggtgaagatcttccaggagcaccccctgcatggctgctcagcctccaacagctcagaggtggacggcggtgagaacatgacatgggccggggcaagacccacgctggggccgggcaacaggagcttggctgggcagtctgggcaggggaagccccggggccagcccaacacggccctgctgtcgctggtgctcatggccggcaccttcttcatcgccttcttcctgcgcaaattcaagaacagccggttctttcctggccggatccggcgggtgattggggactttggggtgcccatcgccatcctcatcatggtgcttgtggattacagtattgaggacacctatacccagaagctgagcgttcccagtggattctcggtgactgccccagaaaagaggggctgggtcatcaaccccctgggagagaagagccccttccctgtgtggatgatggttgccagcctgctgcccgccatcctggtcttcattctcatcttcatggagacacagatcaccacgctcatcatctccaagaaggagcgcatgctgcagaagggctccggcttccacctggacctgctgctcatcgtggccatgggcggcatctgtgccctctttggcctgccctggttggctgctgccactgtccgctctgtcactcacgccaacgcgctcactgtcatgagcaaggctgtggcacctggggacaagcccaagattcaggaagtcaaggagcagcgggtgacggggctgctggttgccctgcttgtgggcctctccatagttatcggggatctgctccggcagatccccctggccgtgctctttggaattttcctgtacatgggagtcacctcccttaacgggatccagttctatgagcggctgcatctgctgctcatgccgcccaaacaccacccagatgtcacttacgtcaagaaggtccggaccctccgtatgcacctgttcacggccctgcagctgctctgcctggccctgctctgggccgtcatgtccacagctgcctccctggccttccccttcatcctcatcctcacagtgccgctccgcatggtggtgctcacccgtatcttcaccgaccgagagatgaaatgtctggatgctaacgaggcagagccggtgtttgatgagcgggagggtgtggacgagtacaatgagatgcccatgcctgtgtagccgccaccgagggacagccgagggaccgatggacgaggggacaggctggtgggatggggttccccctcccatgcccctccctcctttttatttaagtgaataatttaaagtcttctcctcccccactgcccctgcagtaaagtgctttggcccccacct

SEQ ID NO: 184170 - DNA, 4246 bp, Homo sapiens
  Payload ID: 16276
  Gene Symbol: SLC4A3
  Gene Name: solute carrier family 4 (anion exchanger), member 3
  Uniprot ID: P48751
  ENST ID: ENST00000273063
  CDS Start-End: 215-3994
gcggagcggagcgcgaggaggtggagccgcgggctgcgggctccggcgcctgcgtccgcccggccagcccggctctgcgctgcgagaggccggacggcagtcgcggctgcgctcgggagagagcgcgggggacatggggcgcggcggcccgcctgggcctcgcaggctccggagccccgagtgagcgagagcgtccccagccgcctacctggccatggccaacggagtgatcccgccgcccgggggcgcctcccccctaccccaggtccgggtgcccttggaggagccccctctaagtccagacgtggaggaggaggacgatgacttgggcaagaccttggctgtgagcaggtttggggacctcatcagcaagcccccggcctgggaccccgagaagcccagccgcagctacagcgagcgggactttgagtttcaccggcacacatcccaccacacccaccacccgctctcagcgcgcctgcctccaccccacaagctgcggcggctgccccccacctctgcccggcacaccaggagaaagaggaagaaggagaaaacctctgctcctccctccgaggggacccctcccatccaggaggaggggggagctggagtggatgaggaagaggaggaagaggaggaagaggaaggagaatctgaggcagaacctgtggagcccccccactcagggaccccacagaaggcaaagttctccattggaagtgacgaggatgacagtccaggcctccctgggagggctgctgtcaccaagcccctgccctcggtgggcccacacactgacaagagcccccagcactccagcaggccgtgctctgagctgagggacggtgatggaaccaccgacctggccctgtcaagtccaaggctgctgtgttgcctccccagctcccccagcccccgggcccgggcctcccgactcgctggggagaaaagccggccctggagcccatcggccagttatgacctgcgggagcgactgtgcccaggcagtgccctgggcaacccaggtggtccagagcagcaggtgcccacagatgaggcggaggcccagatgctgggttctgcagacctggacgacatgaagagtcaccgactggaggacaaccctggtgtgcggcgacacttagtgaaaaagccctcccggacgcagggcgggaggggcagtcccagcggcctggcccccatccttcgcaggaagaagaagaagaaaaagctggaccggaggcctcatgaggtgttcgtggagctgaacgagctgatgctggaccgcagccaggagccccactggcgggagacggcccgctggatcaagtttgaggaggacgtggaggaggagacggagcgctgggggaagccccatgttgcctcgctctccttccgtagccttctggagctcaggaggaccatcgcccatggagctgccctcctggacctggagcaaaccaccctgccaggcattgcacacctcgtggtggagaccatgattgtgtctgaccagatccggccggaggacagggccagcgtcctacgtaccctgctactgaagcacagccatcccaacgatgacaaggacagtggcttctttccccgaaacccatcgagctccagcatgaactcggttctggggaatcatcacccaactcccagccatggccctgatggggcggtgcctaccatggctgatgacctgggggagccagccccactctggccacatgaccctgacgccaaggagaagcccctccacatgcctgggggagatggtcaccgggggaaaagcctgaagctgctggagaagatccctgaagatgctgaggccacggttgtgcttgtgggttgtgtgcctttcttggagcagcctgcagcagccttcgtgcgtctgaatgaggctgtactcctggagtctgtgcttgaggtccctgtcccggtccgcttcctcttcgtgatgctggggcccagccacaccagcactgactatcacgagcttgggcgctccattgccacccttatgtctgacaagctgtttcatgaggctgcctaccaggcagatgaccggcaagacctcctaagtgccatcagcgagttcctggatggcagcattgtgatccccccgtccgaggtggagggccgtgacctgctgcgctccgtggctgctttccagcgagagctgcttaggaagcggcgagagcgtgaacagaccaaagtcgagatgaccacacggggtggctacacggcccctgggaaagaactgtctttggagttggggggctctgaggcaacccctgaagatgaccccttgctgcggacgggctcggtatttggggggcttgtgcgggatgtgaggcgccggtacccgcactaccccagtgacctgcgagatgcgctgcactcccagtgtgtggccgctgtgctcttcatctacttcgcagccctcagccctgccatcaccttcggggggctgctgggagagaagaccgaggggctgatgggcgtgtccgagctgatcgtgtccaccgctgtgctcggcgtcctcttctctctgctgggagctcagccgctgcttgtggttggcttctctgggccgctgcttgtgtttgaggaagccttcttcaagttctgccgagcccaggacctggagtacctcactggccgggtgtgggttggtctctggctggtggtcttcgtccttgccctggtggccgccgaaggcagcttcctggtccgctacatctcgcctttcacccaggagatctttgcctttctcatctcactcattttcatctacgagaccttctacaagctctacaaggtgttcacagagcacccactgctgccgttctacccccctgagggggccctggaggggtccctggatgctggtctggagccaaatggcagtgccctgccccccaccgagggcccccccagcccgaggaaccagcccaatacggcactgctctcactcatcctcatgctcgggaccttcttcatagccttcttcctgcgcaagttcaggaacagccgcttcctggggggcaaggctcgtcgcatcatcggggactttggcatccccatctccatcctggtgatggtcctggtggattactccatcacagacacctacacgcagaagctgacagtgcctacagggctctcagtgacctctcccgataagcgctcgtggttcatcccacccctgggcagtgcccgtcctttcccgccgtggatgatggtggcagccgctgttcccgccctcctcgtcctcatcctgatcttcatggagacacagatcacggcgcttatcgtcagccagaaggcgcggaggctgctcaagggctccggtttccacctggacctgctcctcattggctccctgggggggctctgtgggctgtttgggttgccctggctcacggctgccacggtccgctccgtcacccatgtcaatgcgttgacagtgatgcgtactgccatcgcgcctggtgacaagccccagatccaggaggtgcgggagcagcgggtcactggtgtgctcatcgccagcctcgtgggcctgtccatcgtcatgggggctgtgctgcgtcggatcccattggctgtgctctttgggatcttcctgtacatgggggtcacgtccctgtctggtatccagctgtcccagcgtttgttgctcatcctcatgccggcaaaacaccatcctgagcagccctatgtgaccaaggtgaagacgtggcggatgcatctgttcacctgcatccagctgggctgcatcgcactgctctgggtggtcaagtccacggcggcctcactcgcctttcccttcctgctgctgctcacggtgcctctgaggcattgccttctgccccggctcttccaggacagggagctgcaggcgctggactcggaagatgctgaaccaaacttcgatgaggatggccaggatgagtacaatgagctgcacatgccagtgtgacccttgaagacagtgcccctcagagaccccaagaccttagggattgacacctgggcctcaggcagagcccagccctgggctggggggctcctcaggacccagagatgtgcctggaaccactcctgatgccatggctagagtggcccccctgacttctgcccggggtgttgacctcgcctcacctttcacagaccagaccggcacaggctttgagctcattataaccacactccttgtctcgtgtctgcctca

SEQ ID NO: 184171 - DNA, 4069 bp, Homo sapiens
  Payload ID: 16276
  Gene Symbol: SLC4A3
  Gene Name: solute carrier family 4 (anion exchanger), member 3
  Uniprot ID: P48751
  ENST ID: ENST00000317151
  CDS Start-End: 119-3817
gcagtcgcggctgcgctcgggagagagcgcgggggacatggggcgcggcggcccgcctgggcctcgcaggctccggagccccgagtgagcgagagcgtccccagccgcctacctggccatggccaacggagtgatcccgccgcccgggggcgcctcccccctaccccaggtccgggtgcccttggaggagccccctctaagtccagacgtggaggaggaggacgatgacttgggcaagaccttggctgtgagcaggtttggggacctcatcagcaagcccccggcctgggaccccgagaagcccagccgcagctacagcgagcgggactttgagtttcaccggcacacatcccaccacacccaccacccgctctcagcgcgcctgcctccaccccacaagctgcggcggctgccccccacctctgcccggcacaccaggagaaagaggaagaaggagaaaacctctgctcctccctccgaggggacccctcccatccaggaggaggggggagctggagtggatgaggaagaggaggaagaggaggaagaggaaggagaatctgaggcagaacctgtggagcccccccactcagggaccccacagaaggcaaagttctccattggaagtgacgaggatgacagtccaggcctccctgggagggctgctgtcaccaagcccctgccctcggtgggcccacacactgacaagagcccccagcactccagcagctcccccagcccccgggcccgggcctcccgactcgctggggagaaaagccggccctggagcccatcggccagttatgacctgcgggagcgactgtgcccaggcagtgccctgggcaacccaggtggtccagagcagcaggtgcccacagatgaggcggaggcccagatgctgggttctgcagacctggacgacatgaagagtcaccgactggaggacaaccctggtgtgcggcgacacttagtgaaaaagccctcccggacgcagggcgggaggggcagtcccagcggcctggcccccatccttcgcaggaagaagaagaagaaaaagctggaccggaggcctcatgaggtgttcgtggagctgaacgagctgatgctggaccgcagccaggagccccactggcgggagacggcccgctggatcaagtttgaggaggacgtggaggaggagacggagcgctgggggaagccccatgttgcctcgctctccttccgtagccttctggagctcaggaggaccatcgcccatggagctgccctcctggacctggagcaaaccaccctgccaggcattgcacacctcgtggtggagaccatgattgtgtctgaccagatccggccggaggacagggccagcgtcctacgtaccctgctactgaagcacagccatcccaacgatgacaaggacagtggcttctttccccgaaacccatcgagctccagcatgaactcggttctggggaatcatcacccaactcccagccatggccctgatggggcggtgcctaccatggctgatgacctgggggagccagccccactctggccacatgaccctgacgccaaggagaagcccctccacatgcctgggggagatggtcaccgggggaaaagcctgaagctgctggagaagatccctgaagatgctgaggccacggttgtgcttgtgggttgtgtgcctttcttggagcagcctgcagcagccttcgtgcgtctgaatgaggctgtactcctggagtctgtgcttgaggtccctgtcccggtccgcttcctcttcgtgatgctggggcccagccacaccagcactgactatcacgagcttgggcgctccattgccacccttatgtctgacaagctgtttcatgaggctgcctaccaggcagatgaccggcaagacctcctaagtgccatcagcgagttcctggatggcagcattgtgatccccccgtccgaggtggagggccgtgacctgctgcgctccgtggctgctttccagcgagagctgcttaggaagcggcgagagcgtgaacagaccaaagtcgagatgaccacacggggtggctacacggcccctgggaaagaactgtctttggagttggggggctctgaggcaacccctgaagatgaccccttgctgcggacgggctcggtatttggggggcttgtgcgggatgtgaggcgccggtacccgcactaccccagtgacctgcgagatgcgctgcactcccagtgtgtggccgctgtgctcttcatctacttcgcagccctcagccctgccatcaccttcggggggctgctgggagagaagaccgaggggctgatgggcgtgtccgagctgatcgtgtccaccgctgtgctcggcgtcctcttctctctgctgggagctcagccgctgcttgtggttggcttctctgggccgctgcttgtgtttgaggaagccttcttcaagttctgccgagcccaggacctggagtacctcactggccgggtgtgggttggtctctggctggtggtcttcgtccttgccctggtggccgccgaaggcagcttcctggtccgctacatctcgcctttcacccaggagatctttgcctttctcatctcactcattttcatctacgagaccttctacaagctctacaaggtgttcacagagcacccactgctgccgttctacccccctgagggggccctggaggggtccctggatgctggtctggagccaaatggcagtgccctgccccccaccgagggcccccccagcccgaggaaccagcccaatacggcactgctctcactcatcctcatgctcgggaccttcttcatagccttcttcctgcgcaagttcaggaacagccgcttcctggggggcaaggctcgtcgcatcatcggggactttggcatccccatctccatcctggtgatggtcctggtggattactccatcacagacacctacacgcagaagctgacagtgcctacagggctctcagtgacctctcccgataagcgctcgtggttcatcccacccctgggcagtgcccgtcctttcccgccgtggatgatggtggcagccgctgttcccgccctcctcgtcctcatcctgatcttcatggagacacagatcacggcgcttatcgtcagccagaaggcgcggaggctgctcaagggctccggtttccacctggacctgctcctcattggctccctgggggggctctgtgggctgtttgggttgccctggctcacggctgccacggtccgctccgtcacccatgtcaatgcgttgacagtgatgcgtactgccatcgcgcctggtgacaagccccagatccaggaggtgcgggagcagcgggtcactggtgtgctcatcgccagcctcgtgggcctgtccatcgtcatgggggctgtgctgcgtcggatcccattggctgtgctctttgggatcttcctgtacatgggggtcacgtccctgtctggtatccagctgtcccagcgtttgttgctcatcctcatgccggcaaaacaccatcctgagcagccctatgtgaccaaggtgaagacgtggcggatgcatctgttcacctgcatccagctgggctgcatcgcactgctctgggtggtcaagtccacggcggcctcactcgcctttcccttcctgctgctgctcacggtgcctctgaggcattgccttctgccccggctcttccaggacagggagctgcaggcgctggactcggaagatgctgaaccaaacttcgatgaggatggccaggatgagtacaatgagctgcacatgccagtgtgacccttgaagacagtgcccctcagagaccccaagaccttagggattgacacctgggcctcaggcagagcccagccctgggctggggggctcctcaggacccagagatgtgcctggaaccactcctgatgccatggctagagtggcccccctgacttctgcccggggtgttgacctcgcctcacctttcacagaccagaccggcacaggctttgagctcattataaccacactccttgtctcgtgtctgcctca

SEQ ID NO: 184172 - DNA, 4454 bp, Homo sapiens
  Payload ID: 16276
  Gene Symbol: SLC4A3
  Gene Name: solute carrier family 4 (anion exchanger), member 3
  Uniprot ID: P48751
  ENST ID: ENST00000358055
  CDS Start-End: 513-4211
ggggaggggaggctaaaagcagggttggggagcgaatctgggggattgtgggaatatcgggccgcgccccagcccccagcgatgcgtggggcgcctggagaaggggcgcacgggcaggtggggtgctgcggggcccgcgcgtgggggccgcgccggccggggcggggtgagtcacggcccgcccgctcccattgtgcggcccggcggcggcggcggcggcggcggcggcggcggaggtgcggagcggagcgcgaggaggtggagccgcgggctgcgggctccggcgcctgcgtccgcccggccagcccggctctgcgctgcgagaggccggacggcagtcgcggctgcgctcgggagagagcgcgggggacatggggcgcggcggcccgcctgggcctcgcaggctccggagccccgagggctccccgctaggccccctcagtggcccctccttctcacctgggtctcgggtcccctagtgagcgagagcgtccccagccgcctacctggccatggccaacggagtgatcccgccgcccgggggcgcctcccccctaccccaggtccgggtgcccttggaggagccccctctaagtccagacgtggaggaggaggacgatgacttgggcaagaccttggctgtgagcaggtttggggacctcatcagcaagcccccggcctgggaccccgagaagcccagccgcagctacagcgagcgggactttgagtttcaccggcacacatcccaccacacccaccacccgctctcagcgcgcctgcctccaccccacaagctgcggcggctgccccccacctctgcccggcacaccaggagaaagaggaagaaggagaaaacctctgctcctccctccgaggggacccctcccatccaggaggaggggggagctggagtggatgaggaagaggaggaagaggaggaagaggaaggagaatctgaggcagaacctgtggagcccccccactcagggaccccacagaaggcaaagttctccattggaagtgacgaggatgacagtccaggcctccctgggagggctgctgtcaccaagcccctgccctcggtgggcccacacactgacaagagcccccagcactccagcagctcccccagcccccgggcccgggcctcccgactcgctggggagaaaagccggccctggagcccatcggccagttatgacctgcgggagcgactgtgcccaggcagtgccctgggcaacccaggtggtccagagcagcaggtgcccacagatgaggcggaggcccagatgctgggttctgcagacctggacgacatgaagagtcaccgactggaggacaaccctggtgtgcggcgacacttagtgaaaaagccctcccggacgcagggcgggaggggcagtcccagcggcctggcccccatccttcgcaggaagaagaagaagaaaaagctggaccggaggcctcatgaggtgttcgtggagctgaacgagctgatgctggaccgcagccaggagccccactggcgggagacggcccgctggatcaagtttgaggaggacgtggaggaggagacggagcgctgggggaagccccatgttgcctcgctctccttccgtagccttctggagctcaggaggaccatcgcccatggagctgccctcctggacctggagcaaaccaccctgccaggcattgcacacctcgtggtggagaccatgattgtgtctgaccagatccggccggaggacagggccagcgtcctacgtaccctgctactgaagcacagccatcccaacgatgacaaggacagtggcttctttccccgaaacccatcgagctccagcatgaactcggttctggggaatcatcacccaactcccagccatggccctgatggggcggtgcctaccatggctgatgacctgggggagccagccccactctggccacatgaccctgacgccaaggagaagcccctccacatgcctgggggagatggtcaccgggggaaaagcctgaagctgctggagaagatccctgaagatgctgaggccacggttgtgcttgtgggttgtgtgcctttcttggagcagcctgcagcagccttcgtgcgtctgaatgaggctgtactcctggagtctgtgcttgaggtccctgtcccggtccgcttcctcttcgtgatgctggggcccagccacaccagcactgactatcacgagcttgggcgctccattgccacccttatgtctgacaagctgtttcatgaggctgcctaccaggcagatgaccggcaagacctcctaagtgccatcagcgagttcctggatggcagcattgtgatccccccgtccgaggtggagggccgtgacctgctgcgctccgtggctgctttccagcgagagctgcttaggaagcggcgagagcgtgaacagaccaaagtcgagatgaccacacggggtggctacacggcccctgggaaagaactgtctttggagttggggggctctgaggcaacccctgaagatgaccccttgctgcggacgggctcggtatttggggggcttgtgcgggatgtgaggcgccggtacccgcactaccccagtgacctgcgagatgcgctgcactcccagtgtgtggccgctgtgctcttcatctacttcgcagccctcagccctgccatcaccttcggggggctgctgggagagaagaccgaggggctgatgggcgtgtccgagctgatcgtgtccaccgctgtgctcggcgtcctcttctctctgctgggagctcagccgctgcttgtggttggcttctctgggccgctgcttgtgtttgaggaagccttcttcaagttctgccgagcccaggacctggagtacctcactggccgggtgtgggttggtctctggctggtggtcttcgtccttgccctggtggccgccgaaggcagcttcctggtccgctacatctcgcctttcacccaggagatctttgcctttctcatctcactcattttcatctacgagaccttctacaagctctacaaggtgttcacagagcacccactgctgccgttctacccccctgagggggccctggaggggtccctggatgctggtctggagccaaatggcagtgccctgccccccaccgagggcccccccagcccgaggaaccagcccaatacggcactgctctcactcatcctcatgctcgggaccttcttcatagccttcttcctgcgcaagttcaggaacagccgcttcctggggggcaaggctcgtcgcatcatcggggactttggcatccccatctccatcctggtgatggtcctggtggattactccatcacagacacctacacgcagaagctgacagtgcctacagggctctcagtgacctctcccgataagcgctcgtggttcatcccacccctgggcagtgcccgtcctttcccgccgtggatgatggtggcagccgctgttcccgccctcctcgtcctcatcctgatcttcatggagacacagatcacggcgcttatcgtcagccagaaggcgcggaggctgctcaagggctccggtttccacctggacctgctcctcattggctccctgggggggctctgtgggctgtttgggttgccctggctcacggctgccacggtccgctccgtcacccatgtcaatgcgttgacagtgatgcgtactgccatcgcgcctggtgacaagccccagatccaggaggtgcgggagcagcgggtcactggtgtgctcatcgccagcctcgtgggcctgtccatcgtcatgggggctgtgctgcgtcggatcccattggctgtgctctttgggatcttcctgtacatgggggtcacgtccctgtctggtatccagctgtcccagcgtttgttgctcatcctcatgccggcaaaacaccatcctgagcagccctatgtgaccaaggtgaagacgtggcggatgcatctgttcacctgcatccagctgggctgcatcgcactgctctgggtggtcaagtccacggcggcctcactcgcctttcccttcctgctgctgctcacggtgcctctgaggcattgccttctgccccggctcttccaggacagggagctgcaggcgctggactcggaagatgctgaaccaaacttcgatgaggatggccaggatgagtacaatgagctgcacatgccagtgtgacccttgaagacagtgcccctcagagaccccaagaccttagggattgacacctgggcctcaggcagagcccagccctgggctggggggctcctcaggacccagagatgtgcctggaaccactcctgatgccatggctagagtggcccccctgacttctgcccggggtgttgacctcgcctcacctttcacagaccagaccggcacaggctttgagctcattataaccacactccttgtctcgtg

SEQ ID NO: 184173 - DNA, 4134 bp, Homo sapiens
  Payload ID: 16276
  Gene Symbol: SLC4A3
  Gene Name: solute carrier family 4 (anion exchanger), member 3
  Uniprot ID: P48751
  ENST ID: ENST00000373760
  CDS Start-End: 193-3891
cccagcccccagcgatgcgtggggcgcctggagaaggggcgcacgggcaggtggggtgctgcggggcccgcgcgtgggggccgcgccggccggggcgggggctccccgctaggccccctcagtggcccctccttctcacctgggtctcgggtcccctagtgagcgagagcgtccccagccgcctacctggccatggccaacggagtgatcccgccgcccgggggcgcctcccccctaccccaggtccgggtgcccttggaggagccccctctaagtccagacgtggaggaggaggacgatgacttgggcaagaccttggctgtgagcaggtttggggacctcatcagcaagcccccggcctgggaccccgagaagcccagccgcagctacagcgagcgggactttgagtttcaccggcacacatcccaccacacccaccacccgctctcagcgcgcctgcctccaccccacaagctgcggcggctgccccccacctctgcccggcacaccaggagaaagaggaagaaggagaaaacctctgctcctccctccgaggggacccctcccatccaggaggaggggggagctggagtggatgaggaagaggaggaagaggaggaagaggaaggagaatctgaggcagaacctgtggagcccccccactcagggaccccacagaaggcaaagttctccattggaagtgacgaggatgacagtccaggcctccctgggagggctgctgtcaccaagcccctgccctcggtgggcccacacactgacaagagcccccagcactccagcagctcccccagcccccgggcccgggcctcccgactcgctggggagaaaagccggccctggagcccatcggccagttatgacctgcgggagcgactgtgcccaggcagtgccctgggcaacccaggtggtccagagcagcaggtgcccacagatgaggcggaggcccagatgctgggttctgcagacctggacgacatgaagagtcaccgactggaggacaaccctggtgtgcggcgacacttagtgaaaaagccctcccggacgcagggcgggaggggcagtcccagcggcctggcccccatccttcgcaggaagaagaagaagaaaaagctggaccggaggcctcatgaggtgttcgtggagctgaacgagctgatgctggaccgcagccaggagccccactggcgggagacggcccgctggatcaagtttgaggaggacgtggaggaggagacggagcgctgggggaagccccatgttgcctcgctctccttccgtagccttctggagctcaggaggaccatcgcccatggagctgccctcctggacctggagcaaaccaccctgccaggcattgcacacctcgtggtggagaccatgattgtgtctgaccagatccggccggaggacagggccagcgtcctacgtaccctgctactgaagcacagccatcccaacgatgacaaggacagtggcttctttccccgaaacccatcgagctccagcatgaactcggttctggggaatcatcacccaactcccagccatggccctgatggggcggtgcctaccatggctgatgacctgggggagccagccccactctggccacatgaccctgacgccaaggagaagcccctccacatgcctgggggagatggtcaccgggggaaaagcctgaagctgctggagaagatccctgaagatgctgaggccacggttgtgcttgtgggttgtgtgcctttcttggagcagcctgcagcagccttcgtgcgtctgaatgaggctgtactcctggagtctgtgcttgaggtccctgtcccggtccgcttcctcttcgtgatgctggggcccagccacaccagcactgactatcacgagcttgggcgctccattgccacccttatgtctgacaagctgtttcatgaggctgcctaccaggcagatgaccggcaagacctcctaagtgccatcagcgagttcctggatggcagcattgtgatccccccgtccgaggtggagggccgtgacctgctgcgctccgtggctgctttccagcgagagctgcttaggaagcggcgagagcgtgaacagaccaaagtcgagatgaccacacggggtggctacacggcccctgggaaagaactgtctttggagttggggggctctgaggcaacccctgaagatgaccccttgctgcggacgggctcggtatttggggggcttgtgcgggatgtgaggcgccggtacccgcactaccccagtgacctgcgagatgcgctgcactcccagtgtgtggccgctgtgctcttcatctacttcgcagccctcagccctgccatcaccttcggggggctgctgggagagaagaccgaggggctgatgggcgtgtccgagctgatcgtgtccaccgctgtgctcggcgtcctcttctctctgctgggagctcagccgctgcttgtggttggcttctctgggccgctgcttgtgtttgaggaagccttcttcaagttctgccgagcccaggacctggagtacctcactggccgggtgtgggttggtctctggctggtggtcttcgtccttgccctggtggccgccgaaggcagcttcctggtccgctacatctcgcctttcacccaggagatctttgcctttctcatctcactcattttcatctacgagaccttctacaagctctacaaggtgttcacagagcacccactgctgccgttctacccccctgagggggccctggaggggtccctggatgctggtctggagccaaatggcagtgccctgccccccaccgagggcccccccagcccgaggaaccagcccaatacggcactgctctcactcatcctcatgctcgggaccttcttcatagccttcttcctgcgcaagttcaggaacagccgcttcctggggggcaaggctcgtcgcatcatcggggactttggcatccccatctccatcctggtgatggtcctggtggattactccatcacagacacctacacgcagaagctgacagtgcctacagggctctcagtgacctctcccgataagcgctcgtggttcatcccacccctgggcagtgcccgtcctttcccgccgtggatgatggtggcagccgctgttcccgccctcctcgtcctcatcctgatcttcatggagacacagatcacggcgcttatcgtcagccagaaggcgcggaggctgctcaagggctccggtttccacctggacctgctcctcattggctccctgggggggctctgtgggctgtttgggttgccctggctcacggctgccacggtccgctccgtcacccatgtcaatgcgttgacagtgatgcgtactgccatcgcgcctggtgacaagccccagatccaggaggtgcgggagcagcgggtcactggtgtgctcatcgccagcctcgtgggcctgtccatcgtcatgggggctgtgctgcgtcggatcccattggctgtgctctttgggatcttcctgtacatgggggtcacgtccctgtctggtatccagctgtcccagcgtttgttgctcatcctcatgccggcaaaacaccatcctgagcagccctatgtgaccaaggtgaagacgtggcggatgcatctgttcacctgcatccagctgggctgcatcgcactgctctgggtggtcaagtccacggcggcctcactcgcctttcccttcctgctgctgctcacggtgcctctgaggcattgccttctgccccggctcttccaggacagggagctgcaggcgctggactcggaagatgctgaaccaaacttcgatgaggatggccaggatgagtacaatgagctgcacatgccagtgtgacccttgaagacagtgcccctcagagaccccaagaccttagggattgacacctgggcctcaggcagagcccagccctgggctggggggctcctcaggacccagagatgtgcctggaaccactcctgatgccatggctagagtggcccccctgacttctgcccggggtgttgacctcgcctcacctttcacagaccagaccggcacaggctttgagctcattataaccacactccttgtctcgtg

SEQ ID NO: 184174 - DNA, 3936 bp, Homo sapiens
  Payload ID: 16276
  Gene Symbol: SLC4A3
  Gene Name: solute carrier family 4 (anion exchanger), member 3
  ENST ID: ENST00000425141
  CDS Start-End: 213-1769
gccagcccggctctgcgctgcgagaggccggacggcagtcgcggctgcgctcgggagagagcgcgggggacatggggcgcggcggcccgcctgggcctcgcaggctccggagccccgagggctccccgctaggccccctcagtggcccctccttctcacctgggtctcgggtcccctagtgagcgagagcgtccccagccgcctacctggccatggccaacggagtgatcccgccgcccgggggcgcctcccccctaccccaggtccgggtgcccttggaggagccccctctaagtccagacgtggaggaggaggacgatgacttgggcaagaccttggctgtgagcaggtttggggacctcatcagcaagcccccggcctgggaccccgagaagcccagccgcagctacagcgagcgggactttgagtttcaccggcacacatcccaccacacccaccacccgctctcagcgcgcctgcctccaccccacaagctgcggcggctgccccccacctctgcccggcacaccaggagaaagaggaagaaggagaaaacctctgctcctccctccgaggggacccctcccatccaggaggaggggggagctggagtggatgaggaagaggaggaagaggaggaagaggaaggagaatctgaggcagaacctgtggagcccccccactcagggaccccacagaaggcaaagttctccattggaagtgacgaggatgacagtccaggcctccctgggagggctgctgtcaccaagcccctgccctcggtgggcccacacactgacaagagcccccagcactccagcagctcccccagcccccgggcccgggcctcccgactcgctggggagaaaagccggccctggagcccatcggccagttatgacctgcgggagcgactgtgcccaggcagtgccctgggcaacccaggtggtccagagcagcaggtgcccacagatgaggcggaggcccagatgctgggttctgcagacctggacgacatgaagagtcaccgactggaggacaaccctggtgtgcggcgacacttagtgaaaaagccctcccggacgcagggcgggaggggcagtcccagcggcctggcccccatccttcgcaggaagaagaagaagaaaaagctggaccggaggcctcatgaggtgttcgtggagctgaacgagctgatgctggaccgcagccaggagccccactggcgggagacggcccgctggatcaagtttgaggaggacgtggaggaggagacggagcgctgggggaagccccatgttgcctcgctctccttccgtagccttctggagctcaggaggaccatcgcccatggagctgccctcctggacctggagcaaaccaccctgccaggcattgcacacctcgtggtggagaccatgattgtgtctgaccagatccggccggaggacagggccagcgtcctacgtaccctgctactgaagcacagccatcccaacgatgacaaggacagtggcttctttccccgaaacccatcgagctccagcatgaactcggttctggggaatcatcacccaactcccagccatggccctgatggggcggtgcctaccatggctgatgacctgggggagccagccccactctggccacatgaccctgacgccaaggagccctattccagttctgcgtcctcagaagcccctccacatgcctgggggagatggtcaccgggggaaaagcctgaagctgctggagaagatccctgaagatgctgaggccacggttgtgcttgtgggttgtgtgcctttcttggagcagcctgcagcagccttcgtgcgtctgaatgaggctgtactcctggagtctgtgcttgaggtccctgtcccggtccgcttcctcttcgtgatgctggggcccagccacaccagcactgactatcacgagcttgggcgctccattgccacccttatgtctgacaagctgtttcatgaggctgcctaccaggcagatgaccggcaagacctcctaagtgccatcagcgagttcctggatggcagcattgtgatccccccgtccgaggtggagggccgtgacctgctgcgctccgtggctgctttccagcgagagctgcttaggaagcggcgagagcgtgaacagaccaaagtcgagatgaccacacggggtggctacacggcccctgggaaagaactgtctttggagttggggggctctgaggcaacccctgaagatgaccccttgctgcggacgggctcggtatttggggggcttgtgcgggatgtgaggcgccggtacccgcactaccccagtgacctgcgagatgcgctgcactcccagtgtgtggccgctgtgctcttcatctacttcgcagccctcagccctgccatcaccttcggggggctgctgggagagaagaccgaggggctgatgggcgtgtccgagctgatcgtgtccaccgctgtgctcggcgtcctcttctctctgctgggagctcagccgctgcttgtggttggcttctctgggccgctgcttgtgtttgaggaagccttcttcaagttctgccgagcccaggacctggagtacctcactggccgggtgtgggttggtctctggctggtggtcttcgtccttgccctggtggccgccgaaggcagcttcctggtccgctacatctcgcctttcacccaggagatctttgcctttctcatctcactcattttcatctacgagaccttctacaagctctacaaggtgttcacagagcacccactgctgccgttctacccccctgagggggccctggaggggtccctggatgctggtctggagccaaatggcagtgccctgccccccaccgagggcccccccagcccgaggaaccagcccaatacggcactgctctcactcatcctcatgctcgggaccttcttcatagccttcttcctgcgcaagttcaggaacagccgcttcctggggggcaaggctcgtcgcatcatcggggactttggcatccccatctccatcctggtgatggtcctggtggattactccatcacagacacctacacgcagaagctgacagtgcctacagggctctcagtgacctctcccgataagcgctcgtggttcatcccacccctgggcagtgcccgtcctttcccgccgtggatgatggtggcagccgctgttcccgccctcctcgtcctcatcctgatcttcatggagacacagatcacggcgcttatcgtcagccagaaggcgcggaggctgctcaagggctccggtttccacctggacctgctcctcattggctccctgggggggctctgtgggctgtttgggttgccctggctcacggctgccacggtccgctccgtcacccatgtcaatgcgttgacagtgatgcgtactgccatcgcgcctggtgacaagccccagatccaggaggtgcgggagcagcgggtcactggtgtgctcatcgccagcctcgtgggcctgtccatcgtcatgggggctgtgctgcgtcggatcccattggctgtgctctttgggatcttcctgtacatgggggtcacgtccctgtctggtatccagctgtcccagcgtttgttgctcatcctcatgccggcaaaacaccatcctgagcagccctatgtgaccaaggtgaagacgtggcggatgcatctgttcacctgcatccagctgggctgcatcgcactgctctgggtggtcaagtccacggcggcctcactcgcctttcccttcctgctgctgctcacggtgcctctgaggcattgccttctgccccggctcttccaggacagggagctgcaggcgctggactcggaagatgctgaaccaaacttcgatgaggatggccaggatgagtacaatgagctgcacatgccagtgtga

SEQ ID NO: 184175 - DNA, 547 bp, Homo sapiens
  Payload ID: 16276
  Gene Symbol: SLC4A3
  Gene Name: solute carrier family 4 (anion exchanger), member 3
  ENST ID: ENST00000444906
  CDS Start-End: 1-223
ggggaatcatcacccaactcccagccatggccctgatggggcggtgcctaccatggctgatgacctgggggagccagccccactctggccacatgaccctgacgccaaggagaagcccctccacatgcctgggggagatggtcaccgggggaaaagcctgaagctgctggagaagatccctgaagatgctgaggccacggttgtgcttgtggctgtttcatgaggctgcctaccaggcagatgaccggcaagacctcctaagtgccatcagcgagttcctggatggcagcattgtgatccccccgtccgaggtggagggccgtgacctgctgcgctccgtggctgctttccagcgagagctgcttaggaagcggcgagagcgtgaacagaccaaagtcgagatgaccacacggggtggctacacggcccctgggaaagaactgtctttggagttggggggctctgaggcaacccctgaagatgaccccttgctgcggacgggctcggtatttggggggcttgtgcgggatgtgaggcgccggtaccc

SEQ ID NO: 184176 - DNA, 1862 bp, Homo sapiens
  Payload ID: 16276
  Gene Symbol: SLC4A3
  Gene Name: solute carrier family 4 (anion exchanger), member 3
  ENST ID: ENST00000416910
  CDS Start-End: 1-622
ggcccccatccttcgcaggaagaagaagaagaaaaagctggaccggaggcctcatgaggtgttcgtggagctgaacgagctgatgctggaccgcagccaggagccccactggcgggagacggcccgctggatcaagtttgaggaggacgtggaggaggagacggagcgctgggggaagccccatgttgcctcgctctccttccgtagccttctggagctcaggaggaccatcgcccatggagctgccctcctggacctggagcaaaccaccctgccaggcattgcacacctcgtggtggagaccatgattgtgtctgaccagatccggccggaggacagggccagcgtcctacgtaccctgctactgaagcacagccatcccaacgatgacaaggacagtggcttctttccccgaaacccatcgagctccagcatgaactcggttctggggaatcatcacccaactcccagccatggccctgatggggcggtgcctaccatggctgatgacctgggggagccagccccactctggccacatgaccctgacgccaaggagttctgcgtcctcagaagcccctccacatgcctgggggagatggtcaccgggggaaaagcctgaagctgctggagaagatccctgaagatgctgaggccacggttgtgcttgtgggttgtgtgcctttcttggagcagcctgcagcagccttcgtgcgtctgaatgaggctgtactcctggagtctgtgcttgaggtccctgtcccggtccgcttcctcttcgtgatgctggggcccagccacaccagcactgactatcacgagcttgggcgctccattgccacccttatgtctgacaagctgtttcatgaggctgcctaccaggcagatgaccggcaagacctcctaagtgccatcagcgagttcctggatggcagcattgtgatccccccgtccgaggtggagggccgtgacctgctgcgctccgtggctgctttccagcgagagctgcttaggaagcggcgagagcgtgaacagaccaaagtcgagatgaccacacggggtggctacacggcccctgggaaagaactgtctttggagttggggggctctgaggcaacccctgaagatgaccccttgctgcggacgggctcggtatttggggggcttgtgcgggatgtgaggcgccggtacccgcactaccccagtgacctgcgagatgcgctgcactcccagtgtgtggccgctgtgctcttcatctacttcgcagccctcagccctgccatcaccttcggggggctgctgggagagaagaccgaggggctgatgggcgtgtccgagctgatcgtgtccaccgctgtgctcggcgtcctcttctctctgctgggagctcagccgctgcttgtggttggcttctctgggccgctgcttgtgtttgaggaagccttcttcaagttctgccgagcccaggacctggagtacctcactggccgggtgtgggttggtctctggctggtggtcttcgtccttgccctggtggccgccgaaggcagcttcctggtccgctacatctcgcctttcacccaggagatctttgcctttctcatctcactcattttcatctacgagaccttctacaagctctacaaggtgttcacagagcacccactgctgccgttctacccccctgagggggccctggaggggtccctggatgctggtctggagccaaatggcagtgccctgccccccaccgagggcccccccagcccgaggaaccagcccaatacggcactgctctcactcatcctcatgctcgggaccttcttcatagccttcttcctgcgcaagttcaggaacagccg

SEQ ID NO: 184177 - DNA, 792 bp, Homo sapiens
  Payload ID: 16276
  Gene Symbol: SLC4A3
  Gene Name: solute carrier family 4 (anion exchanger), member 3
  ENST ID: ENST00000413743
  CDS Start-End: 110-792
ccaccttcagctctggttggacagaagccaccccgtccaggctcccaccttgtaggagagccgaggggtctggtagggagcggaggccgaggtctcggccaccgggagaatgacgagcccactggagaaggaccctgagcccaatggggcactgagccctgggcctggggataccaatagctggggctttgggagggatccagcccccagtcctcgagactcactggccccggaagacttagagatgtttgtgctggactttgaggatggtgacctgtgggagtccatcaggggccagctgggccccatggcagggccaccaacttgtcaccgactggaggacaaccctggtgtgcggcgacacttagtgaaaaagccctcccggacgcagggcgggaggggcagtcccagcggcctggcccccatccttcgcaggaagaagaagaagaaaaagctggaccggaggcctcatgaggtgttcgtggagctgaacgagctgatgctggaccgcagccaggagccccactggcgggagacggcccgctggatcaagtttgaggaggacgtggaggaggagacggagcgctgggggaagccccatgttgcctcgctctccttccgtagccttctggagctcaggaggaccatcgcccatggagctgccctcctggacctggagcaaaccaccctgccaggcattgcacacctcgtggtggagaccatgattgtgtctgaccagatccggccggaggacagggccagcgtcctacgtaccctgctactgaagcacag

SEQ ID NO: 184178 - DNA, 5323 bp, Homo sapiens
  Payload ID: 16277
  Gene Symbol: SLC4A4
  Gene Name: solute carrier family 4 (sodium bicarbonate cotransporter), member 4
  Uniprot ID: Q9Y6R1
  ENST ID: ENST00000264485
  CDS Start-End: 118-3357
gcggcggcggccgcggtggcagcgaaggcggcggcggcggcggcagtggcagtggccgctgcagccccacactccgccgccaaactggaggagcgacggaagccagaccccaggaggatggaggatgaagctgtcctggacagaggggcttccttcctcaagcatgtgtgtgatgaagaagaagtagaaggccaccataccatttacatcggagtccatgtgccgaagagttacaggagaaggagacgtcacaagagaaagacagggcacaaagaaaagaaggaaaaggagagaatctctgagaactactctgacaaatcagatattgaaaatgctgatgaatccagcagcagcatcctaaaacctctcatctctcctgctgcagaacgcatccgattcatcttgggagaggaggatgacagcccagctccccctcagctcttcacggaactggatgagctgctggccgtggatgggcaggagatggagtggaaggaaacagccaggtggatcaagtttgaagaaaaagtggaacagggtggggaaagatggagcaagccccatgtggccacattgtcccttcatagtttatttgagctgaggacatgtatggagaaaggatccatcatgcttgatcgggaggcttcttctctcccacagttggtggagatgattgttgaccatcagattgagacaggcctattgaaacctgaacttaaggataaggtgacctatactttgctccggaagcaccggcatcaaaccaagaaatccaaccttcggtccctggctgacattgggaagacagtctccagtgcaagtaggatgtttaccaaccctgataatggtagcccagccatgacccataggaatctgacttcctccagtctgaatgacatttctgataaaccggagaaggaccagctgaagaataagttcatgaaaaaattgccacgtgatgcagaagcttccaacgtgcttgttggggaggttgactttttggatactcctttcattgcctttgttaggctacagcaggctgtcatgctgggtgccctgactgaagttcctgtgcccacaaggttcttgttcattctcttaggtcctaaggggaaagccaagtcctaccacgagattggcagagccattgccaccctgatgtctgatgaggtgttccatgacattgcttataaagcaaaagacaggcacgacctgattgctggtattgatgagttcctagatgaagtcatcgtccttccacctggggaatgggatccagcaattaggatagagcctcctaagagtcttccatcctctgacaaaagaaagaatatgtactcaggtggagagaatgttcagatgaatggggatacgccccatgatggaggtcacggaggaggaggacatggggattgtgaagaattgcagcgaactggacggttctgtggtggactaattaaagacataaagaggaaagcgccattttttgccagtgatttttatgatgctttaaatattcaagctctttcggcaattctcttcatttatctggcaactgtaactaatgctatcacttttggaggactgcttggggatgccactgacaacatgcagggcgtgttggagagtttcctgggcactgctgtctctggagccatcttttgcctttttgctggtcaaccactcactattctgagcagcaccggacctgtcctagtttttgagaggcttctatttaatttcagcaaggacaataattttgactatttggagtttcgcctttggattggcctgtggtccgccttcctatgtctcattttggtagccactgatgccagcttcttggttcaatacttcacacgtttcacggaggagggcttttcctctctgattagcttcatctttatctatgatgctttcaagaagatgatcaagcttgcagattactaccccatcaactccaacttcaaagtgggctacaacactctcttttcctgtacctgtgtgccacctgacccagctaatatctcaatatctaatgacaccacactggccccagagtatttgccaactatgtcttctactgacatgtaccataatactacctttgactgggcatttttgtcgaagaaggagtgttcaaaatacggaggaaacctcgtcgggaacaactgtaattttgttcctgatatcacactcatgtcttttatcctcttcttgggaacctacacctcttccatggctctgaaaaaattcaaaactagtccttattttccaaccacagcaagaaaactgatcagtgattttgccattatcttgtccattctcatcttttgtgtaatagatgccctagtaggcgtggacaccccaaaactaattgtgccaagtgagttcaagccaacaagtccaaaccgaggttggttcgttccaccgtttggagaaaacccctggtgggtgtgccttgctgctgctatcccggctttgttggtcactatactgattttcatggaccaacaaattacagctgtgattgtaaacaggaaagaacataaactcaagaaaggagcagggtatcacttggatctcttttgggtggccatcctcatggttatatgctccctcatggctcttccgtggtatgtagctgctacggtcatctccattgctcacatcgacagtttgaagatggagacagagacttctgcacctggagaacaaccaaagtttctaggagtgagggaacaaagagtcactggaacccttgtgtttattctgactggtctgtcagtctttatggctcccatcttgaagtttatacccatgcctgtactctatggtgtgttcctgtatatgggagtagcatcccttaatggtgtgcagttcatggatcgtctgaagctgcttctgatgcctctgaagcatcagcctgacttcatctacctgcgtcatgttcctctgcgcagagtccacctgttcactttcctgcaggtgttgtgtctggccctgctttggatcctcaagtcaacggtggctgctatcatttttccagtaatgatcttggcacttgtagctgtcagaaaaggcatggactacctcttctcccagcacgacctcagcttcctggatgatgtcattccagaaaaggacaagaaaaagaaggaggatgagaagaaaaagaaaaagaagaagggaagtctggacagtgacaatgatgattctgactgcccatactcagaaaaagttccaagtattaaaattccaatggacatcatggaacagcaacctttcctaagcgatagcaaaccttctgacagagaaagatcaccaacattccttgaacgccacacatcatgctgataaaattcctttccttcagtcactcggtatgccaagtcctcctagaactccagtaaaagttgtgcctcaaattagaatagaacttgaacctgaagacaatgattatttctggaggagcaagggaacagaaactacattgtaacctgtttgtctttcttaaaactgacatttgttgttaatgtcatttgtttttgtttggctgtttgtttattttttaacttttatttcgtctcagtttttggtcacaggccaaataatacagcgctctctctgcttctctcttgcatagacacaatcaagacaatagtgcaccgttccttaaaaacagcatctgaggaatcccccttttgttcttaaactttcagatgtgtcctttgataaccaaattctgtcactcaagacacagacacgcacagaccctgtcctttgcctctattaagcagaggatggaagtattaaggattttgtaacaccttttatgaaaatgttgaaggaacttaaaactttagctttggagctgtgcttactggcttgtctttgtctggtagaacaaaccttgacctccagacagagtcccttctcacttatagagctctccaggactggaaaaagtgctgctattttaacttgctcttgcttgtaaatcctaatcttagagttatcaaaagaagaaaaaactgaaggtactttactccctatagagaaaccattgccatcattgtagcaagtgctggaatgtcccttttttcctatgcaactttttttaaccctttaatgaacttatctgttgagtacattgaagaatatttttcttcctagattttgttgtttaaattatggggcctaacctgccacttattttttgtcaatttttaaaacttttttttaattactgtaaagaaaatgaattttttcctgcagcaggaaacatagttttgagtagttctacctcttatttgtagctgccaggctttctgtaaaaattgtattgtatataatgtgatttttacacatacatacacacacaaatacacaatctctagggtaagccagaaggcaagatcagattaaaaacaccatgtttctaagcatccatttttccctttctttaaaagaaacttaactgttctatgaaggagattgagggagaagagacaaactcctatgtcatgagaataaccgatgttctgataatagtagcatctaggtacagatgctggttgtattaccacgtcaatgtcctatgcagtattgttagacattttctcattttgaaatatttgtgtgtttgtgtatgtgctctgtgccatggctggtgtatatatgtgcaatgttagaaggcaaaagagtgatggtaggcagagggcaaagtcattgaatctcttatgccagttttcataaaacccaaaccacatatgaaaaaatccattaagggtccaagaagtctgtccatatgaaaatgagggtaaatatagtttatttcccaggtatcagtcattataattgatataatagctctaacatgcaatataaaattcataggagtattaatagcccatttacacatctataaaatgtaatgggattgcagagctgcagagtacagtgtaacagtactctcatgcaatttttttcaggatgcaaaggcaattattctttgtaagcgggacatttagaatatatttgtgtacatattatatgtatgtatatttcaaagtaccacactgaaaattagacatttattaaccaaatttaacgtggtatttaaaggtaatatttttaatatgatacattacatattgtgaatgtatactaaaaaaacattttaaatgttaaaattataatttcagattcatataaccacaactgtgatatatcctaactataaccagttgttgaggggtatactagaagcagaatgaaaccacattttttggtttgataatatgcacttattgactcccac

SEQ ID NO: 184179 - DNA, 3771 bp, Homo sapiens
  Payload ID: 16277
  Gene Symbol: SLC4A4
  Gene Name: solute carrier family 4 (sodium bicarbonate cotransporter), member 4
  Uniprot ID: Q9Y6R1
  ENST ID: ENST00000351898
  CDS Start-End: 77-3064
ggcagtggcagtggccgctgcagccccacactccgccgccaaactggaggagcgacggaagccagaccccaggaggatggaggatgaagctgtcctggacagaggggcttccttcctcaagcatgtgtgtgatgaagaagaagtagaaggccaccataccatttacatcggagtccatgtgccgaagagttacaggagaaggagacgtcacaagagaaagacagggcacaaagaaaagaaggaaaaggagagaatctctgagaactactctgacaaatcagatattgaaaatgctgatgaatccagcagcagcatcctaaaacctctcatctctcctgctgcagaacgcatccgattcatcttgggagaggaggatgacagcccagctccccctcagctcttcacggaactggatgagctgctggccgtggatgggcaggagatggagtggaaggaaacagccaggtggatcaagtttgaagaaaaagtggaacagggtggggaaagatggagcaagccccatgtggccacattgtcccttcatagtttatttgagctgaggacatgtatggagaaaggatccatcatgcttgatcgggaggcttcttctctcccacagttggtggagatgattgttgaccatcagattgagacaggcctattgaaacctgaacttaaggataaggtgacctatactttgctccggaagcaccggcatcaaaccaagaaatccaaccttcggtccctggctgacattgggaagacagtctccagtgcaagtaggatgtttaccaaccctgataatggtagcccagccatgacccataggaatctgacttcctccagtctgaatgacatttctgataaaccggagaaggaccagctgaagaataagttcatgaaaaaattgccacgtgatgcagaagcttccaacgtgcttgttggggaggttgactttttggatactcctttcattgcctttgttaggctacagcaggctgtcatgctgggtgccctgactgaagttcctgtgcccacaaggttcttgttcattctcttaggtcctaaggggaaagccaagtcctaccacgagattggcagagccattgccaccctgatgtctgatgaggtgttccatgacattgcttataaagcaaaagacaggcacgacctgattgctggtattgatgagttcctagatgaagtcatcgtccttccacctggggaatgggatccagcaattaggatagagcctcctaagagtcttccatcctctgacaaaagaaagaatatgtactcaggtggagagaatgttcagatgaatggggatacgccccatgatggaggtcacggaggaggaggacatggggattgtgaagaattgcagcgaactggacggttctgtggtggactaattaaagacataaagaggaaagcgccattttttgccagtgatttttatgatgctttaaatattcaagctctttcggcaattctcttcatttatctggcaactgtaactaatgctatcacttttggaggactgcttggggatgccactgacaacatgcagggcgtgttggagagtttcctgggcactgctgtctctggagccatcttttgcctttttgctggtcaaccactcactattctgagcagcaccggacctgtcctagtttttgagaggcttctatttaatttcagcaaggacaataattttgactatttggagtttcgcctttggattggcctgtggtccgccttcctatgtctcattttggtagccactgatgccagcttcttggttcaatacttcacacgtttcacggaggagggcttttcctctctgattagcttcatctttatctatgatgctttcaagaagatgatcaagcttgcagattactaccccatcaactccaacttcaaagtgggctacaacactctcttttcctgtacctgtgtgccacctgacccagctaatatctcaatatctaatgacaccacactggccccagagtatttgccaactatgtcttctactgacatgtaccataatactacctttgactgggcatttttgtcgaagaaggagtgttcaaaatacggaggaaacctcgtcgggaacaactgtaattttgttcctgatatcacactcatgtcttttatcctcttcttgggaacctacacctcttccatggctctgaaaaaattcaaaactagtccttattttccaaccacagcaagaaaactgatcagtgattttgccattatcttgtccattctcatcttttgtgtaatagatgccctagtaggcgtggacaccccaaaactaattgtgccaagtgagttcaagccaacaagtccaaaccgaggttggttcgttccaccgtttggagaaaacccctggtgggtgtgccttgctgctgctatcccggctttgttggtcactatactgattttcatggaccaacaaattacagctgtgattgtaaacaggaaagaacataaactcaagtttatacccatgcctgtactctatggtgtgttcctgtatatgggagtagcatcccttaatggtgtgcagttcatggatcgtctgaagctgcttctgatgcctctgaagcatcagcctgacttcatctacctgcgtcatgttcctctgcgcagagtccacctgttcactttcctgcaggtgttgtgtctggccctgctttggatcctcaagtcaacggtggctgctatcatttttccagtaatgatcttggcacttgtagctgtcagaaaaggcatggactacctcttctcccagcacgacctcagcttcctggatgatgtcattccagaaaaggacaagaaaaagaaggaggatgagaagaaaaagaaaaagaagaagggaagtctggacagtgacaatgatgattctgactgcccatactcagaaaaagttccaagtattaaaattccaatggacatcatggaacagcaacctttcctaagcgatagcaaaccttctgacagagaaagatcaccaacattccttgaacgccacacatcatgctgataaaattcctttccttcagtcactcggtatgccaagtcctcctagaactccagtaaaagttgtgcctcaaattagaatagaacttgaacctgaagacaatgattatttctggaggagcaagggaacagaaactacattgtaacctgtttgtctttcttaaaactgacatttgttgttaatgtcatttgtttttgtttggctgtttgtttattttttaacttttatttcgtctcagtttttggtcacaggccaaataatacagcgctctctctgcttctctcttgcatagacacaatcaagacaatagtgcaccgttccttaaaaacagcatctgaggaatcccccttttgttcttaaactttcagatgtgtcctttgataaccaaattctgtcactcaagacacagacacgcacagaccctgtcctttgcctctattaagcagaggatggaagtattaaggattttgtaacaccttttatgaaaatgttgaaggaacttaaaactttagctttggagctgtgcttactggcttgtctttgtctggtagaacaaaccttgacctccagacagagtcccttctcacttatagagctctccaggactggaaaaagtgctgctattttaacttgctcttgcttgtaaatcctaatcttagagttatcaaaagaagaaaaaactgaaggtactttactccctatagagaaac

SEQ ID NO: 184180 - DNA, 7640 bp, Homo sapiens
  Payload ID: 16277
  Gene Symbol: SLC4A4
  Gene Name: solute carrier family 4 (sodium bicarbonate cotransporter), member 4
  Uniprot ID: Q9Y6R1
  ENST ID: ENST00000340595
  CDS Start-End: 197-3304
aggaggggaagtgagtggttagacctcagctcatctgagggctaaaggttctttgtgacacatcacacagaattggagtgctgtccttctggagagtggtggagaaccaagatacagttcagaaccaaaggaatagagaagggctttgatttctttttggctttagattggggatttgggaggcttagcaggaaagatgtccactgaaaatgtggaagggaagcccagtaaccttggggagagaggaagagcccggagctccactttcctcagggttgtccagccaatgtttaaccacagtattttcacttctgcagtctctcctgctgcagaacgcatccgattcatcttgggagaggaggatgacagcccagctccccctcagctcttcacggaactggatgagctgctggccgtggatgggcaggagatggagtggaaggaaacagccaggtggatcaagtttgaagaaaaagtggaacagggtggggaaagatggagcaagccccatgtggccacattgtcccttcatagtttatttgagctgaggacatgtatggagaaaggatccatcatgcttgatcgggaggcttcttctctcccacagttggtggagatgattgttgaccatcagattgagacaggcctattgaaacctgaacttaaggataaggtgacctatactttgctccggaagcaccggcatcaaaccaagaaatccaaccttcggtccctggctgacattgggaagacagtctccagtgcaagtaggatgtttaccaaccctgataatggtagcccagccatgacccataggaatctgacttcctccagtctgaatgacatttctgataaaccggagaaggaccagctgaagaataagttcatgaaaaaattgccacgtgatgcagaagcttccaacgtgcttgttggggaggttgactttttggatactcctttcattgcctttgttaggctacagcaggctgtcatgctgggtgccctgactgaagttcctgtgcccacaaggttcttgttcattctcttaggtcctaaggggaaagccaagtcctaccacgagattggcagagccattgccaccctgatgtctgatgaggtgttccatgacattgcttataaagcaaaagacaggcacgacctgattgctggtattgatgagttcctagatgaagtcatcgtccttccacctggggaatgggatccagcaattaggatagagcctcctaagagtcttccatcctctgacaaaagaaagaatatgtactcaggtggagagaatgttcagatgaatggggatacgccccatgatggaggtcacggaggaggaggacatggggattgtgaagaattgcagcgaactggacggttctgtggtggactaattaaagacataaagaggaaagcgccattttttgccagtgatttttatgatgctttaaatattcaagctctttcggcaattctcttcatttatctggcaactgtaactaatgctatcacttttggaggactgcttggggatgccactgacaacatgcagggcgtgttggagagtttcctgggcactgctgtctctggagccatcttttgcctttttgctggtcaaccactcactattctgagcagcaccggacctgtcctagtttttgagaggcttctatttaatttcagcaaggacaataattttgactatttggagtttcgcctttggattggcctgtggtccgccttcctatgtctcattttggtagccactgatgccagcttcttggttcaatacttcacacgtttcacggaggagggcttttcctctctgattagcttcatctttatctatgatgctttcaagaagatgatcaagcttgcagattactaccccatcaactccaacttcaaagtgggctacaacactctcttttcctgtacctgtgtgccacctgacccagctaatatctcaatatctaatgacaccacactggccccagagtatttgccaactatgtcttctactgacatgtaccataatactacctttgactgggcatttttgtcgaagaaggagtgttcaaaatacggaggaaacctcgtcgggaacaactgtaattttgttcctgatatcacactcatgtcttttatcctcttcttgggaacctacacctcttccatggctctgaaaaaattcaaaactagtccttattttccaaccacagcaagaaaactgatcagtgattttgccattatcttgtccattctcatcttttgtgtaatagatgccctagtaggcgtggacaccccaaaactaattgtgccaagtgagttcaagccaacaagtccaaaccgaggttggttcgttccaccgtttggagaaaacccctggtgggtgtgccttgctgctgctatcccggctttgttggtcactatactgattttcatggaccaacaaattacagctgtgattgtaaacaggaaagaacataaactcaagaaaggagcagggtatcacttggatctcttttgggtggccatcctcatggttatatgctccctcatggctcttccgtggtatgtagctgctacggtcatctccattgctcacatcgacagtttgaagatggagacagagacttctgcacctggagaacaaccaaagtttctaggagtgagggaacaaagagtcactggaacccttgtgtttattctgactggtctgtcagtctttatggctcccatcttgaagtttatacccatgcctgtactctatggtgtgttcctgtatatgggagtagcatcccttaatggtgtgcagttcatggatcgtctgaagctgcttctgatgcctctgaagcatcagcctgacttcatctacctgcgtcatgttcctctgcgcagagtccacctgttcactttcctgcaggtgttgtgtctggccctgctttggatcctcaagtcaacggtggctgctatcatttttccagtaatgatcttggcacttgtagctgtcagaaaaggcatggactacctcttctcccagcacgacctcagcttcctggatgatgtcattccagaaaaggacaagaaaaagaaggaggatgagaagaaaaagaaaaagaagaagggaagtctggacagtgacaatgatgattctgactgcccatactcagaaaaagttccaagtattaaaattccaatggacatcatggaacagcaacctttcctaagcgatagcaaaccttctgacagagaaagatcaccaacattccttgaacgccacacatcatgctgataaaattcctttccttcagtcactcggtatgccaagtcctcctagaactccagtaaaagttgtgcctcaaattagaatagaacttgaacctgaagacaatgattatttctggaggagcaagggaacagaaactacattgtaacctgtttgtctttcttaaaactgacatttgttgttaatgtcatttgtttttgtttggctgtttgtttattttttaacttttatttcgtctcagtttttggtcacaggccaaataatacagcgctctctctgcttctctcttgcatagacacaatcaagacaatagtgcaccgttccttaaaaacagcatctgaggaatcccccttttgttcttaaactttcagatgtgtcctttgataaccaaattctgtcactcaagacacagacacgcacagaccctgtcctttgcctctattaagcagaggatggaagtattaaggattttgtaacaccttttatgaaaatgttgaaggaacttaaaactttagctttggagctgtgcttactggcttgtctttgtctggtagaacaaaccttgacctccagacagagtcccttctcacttatagagctctccaggactggaaaaagtgctgctattttaacttgctcttgcttgtaaatcctaatcttagagttatcaaaagaagaaaaaactgaaggtactttactccctatagagaaaccattgccatcattgtagcaagtgctggaatgtcccttttttcctatgcaactttttttaaccctttaatgaacttatctgttgagtacattgaagaatatttttcttcctagattttgttgtttaaattatggggcctaacctgccacttattttttgtcaatttttaaaacttttttttaattactgtaaagaaaatgaattttttcctgcagcaggaaacatagttttgagtagttctacctcttatttgtagctgccaggctttctgtaaaaattgtattgtatataatgtgatttttacacatacatacacacacaaatacacaatctctagggtaagccagaaggcaagatcagattaaaaacaccatgtttctaagcatccatttttccctttctttaaaagaaacttaactgttctatgaaggagattgagggagaagagacaaactcctatgtcatgagaataaccgatgttctgataatagtagcatctaggtacagatgctggttgtattaccacgtcaatgtcctatgcagtattgttagacattttctcattttgaaatatttgtgtgtttgtgtatgtgctctgtgccatggctggtgtatatatgtgcaatgttagaaggcaaaagagtgatggtaggcagagggcaaagtcattgaatctcttatgccagttttcataaaacccaaaccacatatgaaaaaatccattaagggtccaagaagtctgtccatatgaaaatgagggtaaatatagtttatttcccaggtatcagtcattataattgatataatagctctaacatgcaatataaaattcataggagtattaatagcccatttacacatctataaaatgtaatgggattgcagagctgcagagtacagtgtaacagtactctcatgcaatttttttcaggatgcaaaggcaattattctttgtaagcgggacatttagaatatatttgtgtacatattatatgtatgtatatttcaaagtaccacactgaaaattagacatttattaaccaaatttaacgtggtatttaaaggtaatatttttaatatgatacattacatattgtgaatgtatactaaaaaaacattttaaatgttaaaattataatttcagattcatataaccacaactgtgatatatcctaactataaccagttgttgaggggtatactagaagcagaatgaaaccacattttttggtttgataatatgcacttattgactcccactcattgttatgttaattaagttattattctgtctccttgtaattttgattacaaaaattttattatcctgagttagctgttacttttacagtacctgatactcctaaaacttttaacttatacaaattagtcaataatgaccccaattttttcattaaaataatagtggtgaattatatgttattgtgttaaaacctcacttgccaaattctggcttcacatttgtatttagggctatccttaaaatgatgagtctatattatctagctttctattaccctaatataaactggtataagaagactttccttttttctttatgcatggaagcatcaataaattgtttaaaaaccatgtatagtaaattcagcttaacccgtgatcttcttaagttaaaggtacttttgttttataaaagctctagataaaactttcttttctgatcatgaatcaagtatctgtggtttcatgcccctctctatacctttcaaagaactcctgaagcaacttaactcatcatttcagcctctgagtagaggtaaaacctatgtgtacttctgtttatgatccatattgatatttatgacatgaacacagaatagtaccttacatttgctaaacagacagttaatatcaaatcctttcaatattctgggaacccagggaagtttttaaaaatgtcattactttcaaaggaacagaagtagttaaccaaactaacaagcaaaacctgaggtttacctagtgacaccaaattatcggtattttaactgaatttacccattgactaagaatgaaccagatttggtggtggttttgtttctatgcaaactggacacaaattacaacagtaaatttttttataagtgcttctcccttctccatgatgtgacttccggagataaaggattcaaaagataaagacaaagtacgctcagagttgttaaccagaaagtcctggctgtggttgcagaaacactgttggaagaaaagagatgactaagtcaagtgtctgccttatcaaaagagcaaaaatgcctctggttttgtgtttgggagaaaagtatcttggacgcactgttttccttgataaaagtcatcttctctactgtgtgaaatgaatacttggaattctaattgttttgtgtgccaggggcagtaatgtccctgcctcttctcccaatcaaggttgaggagtggggctggggagaggacttaactgacttaagaagtaggaaaacaaaaacctctctcctcagccttccacctccaagagaggaggaaaaacagttgtctgctgtctgtaattcagtttgcgtgtattttatgctcatgcaccaacccatacagagtaaatcttttatcaactgtatactggtgtttaatagagaatgattgtcttccgagttttttggttccttttttaactgtgttaaagtacttgaaatgtattgactgctgactatattttaaaaacaaaatgaaataatttgagttgtattacagaggttgacattgttcagggatgggacaaagccttcttcaatccttttcatactacttaatgattttggtgcaggaacctgagattttctgatttatatttcatgatatttcacatttgctcttcacagcatgagcatgaagcccagtggcaccaaatggctgggtacaatcaagtgatattttgtagcacctcactatctgaaaggccatgagttttcagatgatttcattgagcttcattgcagcctgaaattttaaaaaagttgtgtaatacgccaaccagtcaagttgtgttttggccagagatttagatatgtccaatttcctggctcatttcattgtgctctatgggtacgtataaaaagcaagaattctgtttcctaggcaaacattgcaactcagggctaaagtcatccagtgaaacttttagagccagaagtaactttgtcccagtcctacaatgtgaaaagagtgaatagttgcctctttttagccattttcatggctggtacatattcgtacgcattacttttcagaatcaatacgcactttcagatattcttatttttattctcttaagtctttattaactttggagagagaaatgatgcatctttttattttaaatgaagtagatcaacatggtggaacaaaatgataaagaacagaaaacatttcaatatattactaataactttttccaatataaatcctaaaattcctataacatagtattttacagttttatgaagctttctattgtgacttttatggaattaagagatgaagaagatgagatattttagcatttatatttttcaaaattatatgtatacttaaaaataaagtaactttatgcattta

SEQ ID NO: 184181 - DNA, 7596 bp, Homo sapiens
  Payload ID: 16277
  Gene Symbol: SLC4A4
  Gene Name: solute carrier family 4 (sodium bicarbonate cotransporter), member 4
  Uniprot ID: Q9Y6R1
  ENST ID: ENST00000425175
  CDS Start-End: 118-3402
gcggcggcggccgcggtggcagcgaaggcggcggcggcggcggcagtggcagtggccgctgcagccccacactccgccgccaaactggaggagcgacggaagccagaccccaggaggatggaggatgaagctgtcctggacagaggggcttccttcctcaagcatgtgtgtgatgaagaagaagtagaaggccaccataccatttacatcggagtccatgtgccgaagagttacaggagaaggagacgtcacaagagaaagacagggcacaaagaaaagaaggaaaaggagagaatctctgagaactactctgacaaatcagatattgaaaatgctgatgaatccagcagcagcatcctaaaacctctcatctctcctgctgcagaacgcatccgattcatcttgggagaggaggatgacagcccagctccccctcagctcttcacggaactggatgagctgctggccgtggatgggcaggagatggagtggaaggaaacagccaggtggatcaagtttgaagaaaaagtggaacagggtggggaaagatggagcaagccccatgtggccacattgtcccttcatagtttatttgagctgaggacatgtatggagaaaggatccatcatgcttgatcgggaggcttcttctctcccacagttggtggagatgattgttgaccatcagattgagacaggcctattgaaacctgaacttaaggataaggtgacctatactttgctccggaagcaccggcatcaaaccaagaaatccaaccttcggtccctggctgacattgggaagacagtctccagtgcaagtaggatgtttaccaaccctgataatggtagcccagccatgacccataggaatctgacttcctccagtctgaatgacatttctgataaaccggagaaggaccagctgaagaataagttcatgaaaaaattgccacgtgatgcagaagcttccaacgtgcttgttggggaggttgactttttggatactcctttcattgcctttgttaggctacagcaggctgtcatgctgggtgccctgactgaagttcctgtgcccacaaggttcttgttcattctcttaggtcctaaggggaaagccaagtcctaccacgagattggcagagccattgccaccctgatgtctgatgaggtgttccatgacattgcttataaagcaaaagacaggcacgacctgattgctggtattgatgagttcctagatgaagtcatcgtccttccacctggggaatgggatccagcaattaggatagagcctcctaagagtcttccatcctctgacaaaagaaagaatatgtactcaggtggagagaatgttcagatgaatggggatacgccccatgatggaggtcacggaggaggaggacatggggattgtgaagaattgcagcgaactggacggttctgtggtggactaattaaagacataaagaggaaagcgccattttttgccagtgatttttatgatgctttaaatattcaagctctttcggcaattctcttcatttatctggcaactgtaactaatgctatcacttttggaggactgcttggggatgccactgacaacatgcagggcgtgttggagagtttcctgggcactgctgtctctggagccatcttttgcctttttgctggtcaaccactcactattctgagcagcaccggacctgtcctagtttttgagaggcttctatttaatttcagcaaggacaataattttgactatttggagtttcgcctttggattggcctgtggtccgccttcctatgtctcattttggtagccactgatgccagcttcttggttcaatacttcacacgtttcacggaggagggcttttcctctctgattagcttcatctttatctatgatgctttcaagaagatgatcaagcttgcagattactaccccatcaactccaacttcaaagtgggctacaacactctcttttcctgtacctgtgtgccacctgacccagctaatatctcaatatctaatgacaccacactggccccagagtatttgccaactatgtcttctactgacatgtaccataatactacctttgactgggcatttttgtcgaagaaggagtgttcaaaatacggaggaaacctcgtcgggaacaactgtaattttgttcctgatatcacactcatgtcttttatcctcttcttgggaacctacacctcttccatggctctgaaaaaattcaaaactagtccttattttccaaccacagcaagaaaactgatcagtgattttgccattatcttgtccattctcatcttttgtgtaatagatgccctagtaggcgtggacaccccaaaactaattgtgccaagtgagttcaagccaacaagtccaaaccgaggttggttcgttccaccgtttggagaaaacccctggtgggtgtgccttgctgctgctatcccggctttgttggtcactatactgattttcatggaccaacaaattacagctgtgattgtaaacaggaaagaacataaactcaagaaaggagcagggtatcacttggatctcttttgggtggccatcctcatggttatatgctccctcatggctcttccgtggtatgtagctgctacggtcatctccattgctcacatcgacagtttgaagatggagacagagacttctgcacctggagaacaaccaaagtttctaggagtgagggaacaaagagtcactggaacccttgtgtttattctgactggtctgtcagtctttatggctcccatcttgaagtttatacccatgcctgtactctatggtgtgttcctgtatatgggagtagcatcccttaatggtgtgcagttcatggatcgtctgaagctgcttctgatgcctctgaagcatcagcctgacttcatctacctgcgtcatgttcctctgcgcagagtccacctgttcactttcctgcaggtgttgtgtctggccctgctttggatcctcaagtcaacggtggctgctatcatttttccagtaatgatcttggcacttgtagctgtcagaaaaggcatggactacctcttctcccagcacgacctcagcttcctggatgatgtcattccagaaaaggacaagaaaaagaaggaggatgagaagaaaaagaaaaagaagaagggaagtctggacagtgacaatgatgatgagaaagatcaccaacattccttgaacgccacacatcatgctgataaaattcctttccttcagtcactcggtatgccaagtcctcctagaactccagtaaaagttgtgcctcaaattagaatagaacttgaacctgaagacaatgattatttctggaggagcaagggaacagaaactacattgtaacctgtttgtctttcttaaaactgacatttgttgttaatgtcatttgtttttgtttggctgtttgtttattttttaacttttatttcgtctcagtttttggtcacaggccaaataatacagcgctctctctgcttctctcttgcatagacacaatcaagacaatagtgcaccgttccttaaaaacagcatctgaggaatcccccttttgttcttaaactttcagatgtgtcctttgataaccaaattctgtcactcaagacacagacacgcacagaccctgtcctttgcctctattaagcagaggatggaagtattaaggattttgtaacaccttttatgaaaatgttgaaggaacttaaaactttagctttggagctgtgcttactggcttgtctttgtctggtagaacaaaccttgacctccagacagagtcccttctcacttatagagctctccaggactggaaaaagtgctgctattttaacttgctcttgcttgtaaatcctaatcttagagttatcaaaagaagaaaaaactgaaggtactttactccctatagagaaaccattgccatcattgtagcaagtgctggaatgtcccttttttcctatgcaactttttttaaccctttaatgaacttatctgttgagtacattgaagaatatttttcttcctagattttgttgtttaaattatggggcctaacctgccacttattttttgtcaatttttaaaacttttttttaattactgtaaagaaaatgaattttttcctgcagcaggaaacatagttttgagtagttctacctcttatttgtagctgccaggctttctgtaaaaattgtattgtatataatgtgatttttacacatacatacacacacaaatacacaatctctagggtaagccagaaggcaagatcagattaaaaacaccatgtttctaagcatccatttttccctttctttaaaagaaacttaactgttctatgaaggagattgagggagaagagacaaactcctatgtcatgagaataaccgatgttctgataatagtagcatctaggtacagatgctggttgtattaccacgtcaatgtcctatgcagtattgttagacattttctcattttgaaatatttgtgtgtttgtgtatgtgctctgtgccatggctggtgtatatatgtgcaatgttagaaggcaaaagagtgatggtaggcagagggcaaagtcattgaatctcttatgccagttttcataaaacccaaaccacatatgaaaaaatccattaagggtccaagaagtctgtccatatgaaaatgagggtaaatatagtttatttcccaggtatcagtcattataattgatataatagctctaacatgcaatataaaattcataggagtattaatagcccatttacacatctataaaatgtaatgggattgcagagctgcagagtacagtgtaacagtactctcatgcaatttttttcaggatgcaaaggcaattattctttgtaagcgggacatttagaatatatttgtgtacatattatatgtatgtatatttcaaagtaccacactgaaaattagacatttattaaccaaatttaacgtggtatttaaaggtaatatttttaatatgatacattacatattgtgaatgtatactaaaaaaacattttaaatgttaaaattataatttcagattcatataaccacaactgtgatatatcctaactataaccagttgttgaggggtatactagaagcagaatgaaaccacattttttggtttgataatatgcacttattgactcccactcattgttatgttaattaagttattattctgtctccttgtaattttgattacaaaaattttattatcctgagttagctgttacttttacagtacctgatactcctaaaacttttaacttatacaaattagtcaataatgaccccaattttttcattaaaataatagtggtgaattatatgttattgtgttaaaacctcacttgccaaattctggcttcacatttgtatttagggctatccttaaaatgatgagtctatattatctagctttctattaccctaatataaactggtataagaagactttccttttttctttatgcatggaagcatcaataaattgtttaaaaaccatgtatagtaaattcagcttaacccgtgatcttcttaagttaaaggtacttttgttttataaaagctctagataaaactttcttttctgatcatgaatcaagtatctgtggtttcatgcccctctctatacctttcaaagaactcctgaagcaacttaactcatcatttcagcctctgagtagaggtaaaacctatgtgtacttctgtttatgatccatattgatatttatgacatgaacacagaatagtaccttacatttgctaaacagacagttaatatcaaatcctttcaatattctgggaacccagggaagtttttaaaaatgtcattactttcaaaggaacagaagtagttaaccaaactaacaagcaaaacctgaggtttacctagtgacaccaaattatcggtattttaactgaatttacccattgactaagaatgaaccagatttggtggtggttttgtttctatgcaaactggacacaaattacaacagtaaatttttttataagtgcttctcccttctccatgatgtgacttccggagataaaggattcaaaagataaagacaaagtacgctcagagttgttaaccagaaagtcctggctgtggttgcagaaacactgttggaagaaaagagatgactaagtcaagtgtctgccttatcaaaagagcaaaaatgcctctggttttgtgtttgggagaaaagtatcttggacgcactgttttccttgataaaagtcatcttctctactgtgtgaaatgaatacttggaattctaattgttttgtgtgccaggggcagtaatgtccctgcctcttctcccaatcaaggttgaggagtggggctggggagaggacttaactgacttaagaagtaggaaaacaaaaacctctctcctcagccttccacctccaagagaggaggaaaaacagttgtctgctgtctgtaattcagtttgcgtgtattttatgctcatgcaccaacccatacagagtaaatcttttatcaactgtatactggtgtttaatagagaatgattgtcttccgagttttttggttccttttttaactgtgttaaagtacttgaaatgtattgactgctgactatattttaaaaacaaaatgaaataatttgagttgtattacagaggttgacattgttcagggatgggacaaagccttcttcaatccttttcatactacttaatgattttggtgcaggaacctgagattttctgatttatatttcatgatatttcacatttgctcttcacagcatgagcatgaagcccagtggcaccaaatggctgggtacaatcaagtgatattttgtagcacctcactatctgaaaggccatgagttttcagatgatttcattgagcttcattgcagcctgaaattttaaaaaagttgtgtaatacgccaaccagtcaagttgtgttttggccagagatttagatatgtccaatttcctggctcatttcattgtgctctatgggtacgtataaaaagcaagaattctgtttcctaggcaaacattgcaactcagggctaaagtcatccagtgaaacttttagagccagaagtaactttgtcccagtcctacaatgtgaaaagagtgaatagttgcctctttttagccattttcatggctggtacatattcgtacgcattacttttcagaatcaatacgcactttcagatattcttatttttattctcttaagtctttattaactttggagagagaaatgatgcatctttttattttaaatgaagtagatcaacatggtggaacaaaatgataaagaacagaaaacatttcaatatattactaataactttttccaatataaatcctaaaattcctataacatagtattttacagttttatgaagctttctattgtgacttttatggaattaagagatgaagaagatgagatattttagcatttatatttttcaaaattatatgtatacttaaaaataaagtaactttatgcattta

SEQ ID NO: 184182 - DNA, 2316 bp, Homo sapiens
  Payload ID: 16277
  Gene Symbol: SLC4A4
  Gene Name: solute carrier family 4 (sodium bicarbonate cotransporter), member 4
  Uniprot ID: Q9Y6R1
  ENST ID: ENST00000512686
  CDS Start-End: 197-2137
aggaggggaagtgagtggttagacctcagctcatctgagggctaaaggttctttgtgacacatcacacagaattggagtgctgtccttctggagagtggtggagaaccaagatacagttcagaaccaaaggaatagagaagggctttgatttctttttggctttagattggggatttgggaggcttagcaggaaagatgtccactgaaaatgtggaagggaagcccagtaaccttggggagagaggaagagcccggagctccactttcctcagggttgtccagccaatgtttaaccacagtattttcacttctgcagtctctcctgctgcagaacgcatccgattcatcttgggagaggaggatgacagcccagctccccctcagctcttcacggaactggatgagctgctggccgtggatgggcaggagatggagtggaaggaaacagccaggtggatcaagtttgaagaaaaagtggaacagggtggggaaagatggagcaagccccatgtggccacattgtcccttcatagtttatttgagctgaggacatgtatggagaaaggatccatcatgcttgatcgggaggcttcttctctcccacagttggtggagatgattgttgaccatcagattgagacaggcctattgaaacctgaacttaaggataaggtgacctatactttgctccggaagcaccggcatcaaaccaagaaatccaaccttcggtccctggctgacattgggaagacagtctccagtgcaagtaggatgtttaccaaccctgataatggtagcccagccatgacccataggaatctgacttcctccagtctgaatgacatttctgataaaccggagaaggaccagctgaagaataagttcatgaaaaaattgccacgtgatgcagaagcttccaacgtgcttgttggggaggttgactttttggatactcctttcattgcctttgttaggctacagcaggctgtcatgctgggtgccctgactgaagttcctgtgcccacaaggttcttgttcattctcttaggtcctaaggggaaagccaagtcctaccacgagattggcagagccattgccaccctgatgtctgatgaggtgttccatgacattgcttataaagcaaaagacaggcacgacctgattgctggtattgatgagttcctagatgaagtcatcgtccttccacctggggaatgggatccagcaattaggatagagcctcctaagagtcttccatcctctgacaaaagaaagaatatgtactcaggtggagagaatgttcagatgaatggggatacgccccatgatggaggtcacggaggaggaggacatggggattgtgaagaattgcagcgaactggacggttctgtggtggactaattaaagacataaagaggaaagcgccattttttgccagtgatttttatgatgctttaaatattcaagctctttcggcaattctcttcatttatctggcaactgtaactaatgctatcacttttggaggactgcttggggatgccactgacaacatgcagggcgtgttggagagtttcctgggcactgctgtctctggagccatcttttgcctttttgctggtcaaccactcactattctgagcagcaccggacctgtcctagtttttgagaggcttctatttaatttcagcaaggacaataattttgactatttggagtttcgcctttggattggcctgtggtccgccttcctatgtctcattttggtagccactgatgccagcttcttggttcaatacttcacacgtttcacggaggagggcttttcctctctgattagcttcatctttatctatgatgctttcaagaagatgatcaagcttgcagattactaccccatcaactccaacttcaaagtgggctacaacactctcttttcctgtacctgtgtgccacctgacccaggtgagggcattacgctttgtgtttatgctcgctttgtatttggaggaaggtgtaggctccatgcttgcaaattttcaacatgctgtcatggtcctcaggaattagtcttgtttttttctctgaaaaactctgctactgaatttgatgtctcattgcctgaggtattttagctgtatgattcaaccaggaaggagaccaggagctctggaatgtgaacataaccaactcaatattttgaaattaactcaaactgtgggatttgcaaggaattcatgtgtacattattcttgattttataagtggggaaacctggatacatgtattaacagatataaatatgtgacaaacc

SEQ ID NO: 184183 - DNA, 6233 bp, Homo sapiens
  Payload ID: 16278
  Gene Symbol: SLC4A5
  Gene Name: solute carrier family 4 (sodium bicarbonate cotransporter), member 5
  Uniprot ID: Q9BY07
  ENST ID: ENST00000346834
  CDS Start-End: 237-3650
tttcaccttcctgcagagtgctgacaccatcacagtatgttcccttctcaaccctggacatggttcagaaacagctaaagcagacaagaatctggggcagccaatattgtaccacctgccaaagcttggcacaaacaatctggaagccaaaaattgcacatactgtggaacagagcaagtggttctggcctccctgggatttggatcctggtttccagagctaagaacacaaagtcatgaaggtgaaggaggagaaggctggggtaggaaagctggaccacactaaccacaggaggagatttccggatcagaaagaatgccctcctatccacattgggcttccagtacccacttaccctcaaagaaaaactgaccagaagggacatctttcaggcctgcaaaaagtccactggggcctgcggccagaccagccacagcaggaactgactggcccagggagtggggcaagcagccaggacagcagcatggatcttatcagcaggactcggtccccagctgctgagcagctccaggacatcctgggggaggaagatgaggctcccaaccccaccctctttacagagatggatactctgcagcatgacggagaccagatggagtggaaggagtcagccaggtggataaagtttgaagaaaaggtagaggaaggcggcgaacgctggagcaagccccacgtgtccacactatccctgcacagcctcttcgagctccgtacctgcctgcagacggggacggtgctgctggatttggacagtggctccttaccacagatcatagatgatgtcattgagaagcagattgaggatggtctcctgcggccagagctccgggagagggtcagttacgtcctcctgaggaggcaccgccaccaaaccaagaagcccatccaccgctccttagctgacattgggaagtcagtctccaccacaaatcgcagtcctgcccggagccctggtgctggcccgagtctacaccactccacggaagacctgcggatgcggcagagtgcaaattacggacgtctgtgtcatgcccagagcagaagcatgaatgacatttctctcaccccaaacacagaccagcggaaaaacaaattcatgaagaagatccccaaggactcagaagcgtccaacgtgctcgtgggcgaggtggacttcctagaccagccattcatcgcgttcgtgcgcctcatccagtcggccatgctgggaggagtgaccgaggtgcctgtccccaccagatttctgtttatactactgggaccttctgggagagcaaaatcctacaatgaaattggccgtgccattgcaaccctcatggtagatgatctcttcagtgacgtggcctacaaagcccgcaatcgggaagatctgatcgcaggaattgatgaatttctggatgaggtcatcgtccttcctcctggagaatgggacccaaatatccggattgagccccccaagaaggtgccctctgctgacaagaggaaatctgtgttctccctagcagagctgggccagatgaatggctctgtgggaggaggcggcggagctcctggaggaggcaatggaggtggtggtggtggtggcagtggcggcggggctggcagtggcggggccggcggaacaagcagcggggatgatggagagatgccagccatgcatgaaatcggggaggaacttatctggacaggaaggttcttcggtggcctgtgtctggatatcaagaggaagttgccctggttcccaagtgacttctatgatggcttccacattcagtccatctctgccatcctattcatctacctcggctgtatcaccaacgcgatcacctttggtgggcttctgggggatgccaccgacaattatcagggagtgatggagagcttcctgggcactgccatggctggctccttgttctgcctcttctcgggacagcctctcatcattctcagcagcacggggcccatcctcatctttgagaagctcctcttcgacttcagcaaaggcaatggcctggactacatggagttccgcctctggattggcctacactcagctgtccagtgccttatcctagtggccacagatgccagctttatcatcaaatatatcacccgcttcaccgaggagggcttctccacccttatcagcttcatcttcatctacgatgccatcaagaagatgatcggtgccttcaagtactaccctatcaatatggacttcaagccaaacttcatcactacctacaagtgcgagtgtgtcgcccctgacacagtgaatacaaccgtgttcaatgcttcagccccattggcaccagacaccaacgcttctctgtacaacctccttaacctcacagcgttggactggtccctgctgagcaagaaggagtgtctgagctacggcgggcgcctgcttgggaattcctgcaagtttatcccagacctggcgctcatgtccttcatccttttctttgggacatactccatgaccctgaccctgaagaagttcaaattcagccgctattttcctaccaaggtccgggccctggtggctgacttttccattgttttctccatcctgatgttctgtggaatcgatgcctgttttggcctagaaactcccaagctgcatgtgcccagtgtcatcaagccaacgcggcctgaccgaggctggttcgtggccccctttgggaagaacccgtggtgggtatacccagcaagcatcctgcccgccctgctggtgaccatcctgatcttcatggaccagcagatcactgccgtcattgtcaaccggaaggagaacaaactgaagaaggctgccggctaccatctggacctgttctgggtgggcatcctcatggctttgtgctcctttatggggctcccctggtacgtggctgccacggtcatctccatcgcccacatcgacagcctcaagatggagacagagaccagtgcccctggggagcagccccagtttctgggagtcagggaacagagagtaaccggcatcatcgtcttcatcctgacgggaatctctgtcttcctggctcccatcctaaagtgtatccccctgccggtgctgtacggagtcttcctctacatgggcgtggcctccctgaatggcatccagatggggaccggagggtcagaattcaaaatccagaagaagctgactccattctgggaacgctgcaagctcttcctgatgccagccaagcaccagccggaccatgccttcctgcggcacgtgccgctgcgccggatccacctcttcaccctggtgcagatcctctgcctggcggtgctctggatcctcaaatccacggtggctgccatcatcttcccggtcatgatcctgggcctcatcatcgttcgaaggcttctggatttcatcttttcccagcacgacctggcctggattgacaacatcctcccagagaaggaaaaaaaggagacagacaagaagaggaagagaaaaaaaggggcccacgaggactgtgatgaggagccccagttccctcctccctcggttataaagattcccatggaaagtgtccaatcagatccccaaaacggtatccactgcattgccagaaaaagatcttccagttggagttactcactctgattcttccttcagtgacacagaacttgaccgaagcatcaccttgcacttcaaaatatcctgtccagcttcacctgctttcagctactcacggaacccagtgttcatggtgccacaggtgaagatagagatggagtcagactatgacttcacagacatggataaataccgaagagaaactgacagtgagaccaccctctaggatgaagcagcttctcccagatgggagatggagagcctggcttagtcttcactgggagggtcttaacttctctgtgcctgtttccttctttatcaaacagagggagtccgtctgcctatagaaaactggagatctattgatgaaaagtattgcttagatgcaaagctctcccctttgtagtaattaaaatacctaaagctaaatattatattttattttaaaatgcagttcagcatagaaattctaacatttctttggaaataaaaaaatgcttgtttccccaaaccatagctaagataaaggggcaatagtcaattcatatttaaaacaaatatcaatttaaaattgtttaaaggttagatttaaatatagatgttctcaaacaaacttgtaatatacttttatgtcactagaccatctttggaatatttggcaattctgcatattaagaaatgctgaaaaggtcctatcttttctccctgtcacatccaatttcctaagggttatatgaaaagtttgaaccagccgggcacagtggcacacgcctgtaatcctagcactttgggaggccgaggcaggtgaattgcctgagctcaggagttcgagaccagcctaggcaacacggtgaaaccccgtctctactaaactacaaaaaattagccgggtgtggtggcatgcacctgtagtcccagctattcgggaggctgaggcaggagaatcgcttgaacccaggaggcagaagttgcagtgagctgagatggcaccactgcactccagcctaggcaacagagtgagactccgtatccaaacaaaaaaaaagtttgaaccatctgcattatgggccttgctccagaagtgtgactggggctttcccagattgaaaagccagttccaaaactctgttaatgaaagaaccaatgcatctgagtggataaatgtttctaaaataaaatagttcttgttaaagtgaaatttgaaaccacatgttaaatcaaaatgatcctttaaattagtatcactggtttttcatacctggaatcacatttcatgatacatttgggtgggtcctccctgcaaattttcaatgtttattcccaaagtcaaactcccattcatgtgaacaatacaggttagacagaggtaaggtcacattttacattacaactttgcaatattaatcaacctagtactttaaaggaatgattgaaaactatttgggaagataaaaaccagtttcaatgaagcaaacctattcctcatgaaacttaagatcagtcattttatcttcaatccacatttaatgaacaccaaccatgttgatttaatgcctactatgaccctgacagccacagtgcatctgacacttactttctccaaaacaactatgatttaaaccttgagtaaatcacttgaaccttgaggttagagttactatatttgctcaagatgacaaatgcaggtgctttcttttttaaagaaaaatgacactagatcattaacaccttgagtataggacaggtaattgcctctgtaattcccagcgtctagtgtagtgcctggtccatagaaagctctcaataagtgtttgattacatttaatctcagagctcccttccaagggatactgccaagaggtaaagctccaaacctctactcttactgagagcagaatttcttagaatttccagaaccatctcctatgcttaagtataaattcttgtcagacacagtggctcacacctgtaatcccgctacttgggaggcagaggtggggggaatcagcagaggtcaggaggtcaagaccagcctgggcaacatagtgagacccatctctaaacaaatgtttaaaaattagctaggcatgctggcacacacctgtagtcccagccatttcagaggctgatgcaggaggatcgtttaagtccaggagttcaaggctgcagtgagctataatcatgccactgcactccagccagggagacagctggaatccatgtcttataaacaataataattaatttttaaaaaaagtatttatcatccacaccaatcctggggaagctaacaatccacccttaacacatttcagttttaaaacctggctgatctggaatagaactttgtccaaattaaattgtagaaatgctatggattcaagagtaaacctgcttgattaatcaaacaagctggaaaactactgttaatttctttgttgtaaattgatcactgtaattttaccttacatgtcatttatattttgtatatacatgaacattttaatttccatagcttttaacaggttgacataatacttctccatgcagtaagtcagtcattttttccacttgtaactgtaattcaataaaatttaatcctgtctggtc

SEQ ID NO: 184184 - DNA, 3142 bp, Homo sapiens
  Payload ID: 16278
  Gene Symbol: SLC4A5
  Gene Name: solute carrier family 4 (sodium bicarbonate cotransporter), member 5
  Uniprot ID: Q9BY07
  ENST ID: ENST00000358683
  CDS Start-End: 50-3109
gcctccctgggatttggatcctggtttccagagctaagaacacaaagtcatgaaggtgaaggaggagaaggctggggtaggaaagctggaccacactaaccacaggaggagatttccggatcagaaagggtccccagctgctgagcagctccaggacatcctgggggaggaagatgaggctcccaaccccaccctctttacagagatggatactctgcagcatgacggagaccagatggagtggaaggagtcagccaggtggataaagtttgaagaaaaggtagaggaaggcggcgaacgctggagcaagccccacgtgtccacactatccctgcacagcctcttcgagctccgtacctgcctgcagacggggacggtgctgctggatttggacagtggctccttaccacagatcatagatgatgtcattgagaagcagattgaggatggtctcctgcggccagagctccgggagagggtcagttacgtcctcctgaggaggcaccgccaccaaaccaagaagcccatccaccgctccttagctgacattgggaagtcagtctccaccacaaatcgcagtcctgcccggagccctggtgctggcccgagtctacaccactccacggaagacctgcggatgcggcagagtgcaaattacggacgtctgtgtcatgcccagagcagaagcatgaatgacatttctctcaccccaaacacagaccagcggaaaaacaaattcatgaagaagatccccaaggactcagaagcgtccaacgtgctcgtgggcgaggtggacttcctagaccagccattcatcgcgttcgtgcgcctcatccagtcggccatgctgggaggagtgaccgaggtgcctgtccccaccagatttctgtttatactactgggaccttctgggagagcaaaatcctacaatgaaattggccgtgccattgcaaccctcatggtagatgatctcttcagtgacgtggcctacaaagcccgcaatcgggaagatctgatcgcaggaattgatgaatttctggatgaggtcatcgtccttcctcctggagaatgggacccaaatatccggattgagccccccaagaaggtgccctctgctgacaagaggaaatctgtgttctccctagcagagctgggccagatgaatggctctgtgggaggaggcggcggagctcctggaggaggcaatggaggtggtggtggtggtggcagtggcggcggggctggcagtggcggggccggcggaacaagcagcggggatgatggagagatgccagccatgcatgaaatcggggaggaacttatctggacaggaaggttcttcggtggcctgtgtctggatatcaagaggaagttgccctggttcccaagtgacttctatgatggcttccacattcagtccatctctgccatcctattcatctacctcggctgtatcaccaacgcgatcacctttggtgggcttctgggggatgccaccgacaattatcagggagtgatggagagcttcctgggcactgccatggctggctccttgttctgcctcttctcgggacagcctctcatcattctcagcagcacggggcccatcctcatctttgagaagctcctcttcgacttcagcaaaggcaatggcctggactacatggagttccgcctctggattggcctacactcagctgtccagtgccttatcctagtggccacagatgccagctttatcatcaaatatatcacccgcttcaccgaggagggcttctccacccttatcagcttcatcttcatctacgatgccatcaagaagatgatcggtgccttcaagtactaccctatcaatatggacttcaagccaaacttcatcactacctacaagtgcgagtgtgtcgcccctgacacagtgaatacaaccgtgttcaatgcttcagccccattggcaccagacaccaacgcttctctgtacaacctccttaacctcacagcgttggactggtccctgctgagcaagaaggagtgtctgagctacggcgggcgcctgcttgggaattcctgcaagtttatcccagacctggcgctcatgtccttcatccttttctttgggacatactccatgaccctgaccctgaagaagttcaaattcagccgctattttcctaccaagccaacgcggcctgaccgaggctggttcgtggccccctttgggaagaacccgtggtgggtatacccagcaagcatcctgcccgccctgctggtgaccatcctgatcttcatggaccagcagatcactgccgtcattgtcaaccggaaggagaacaaactgaagaaggctgccggctaccatctggacctgttctgggtgggcatcctcatggctttgtgctcctttatggggctcccctggtacgtggctgccacggtcatctccatcgcccacatcgacagcctcaagatggagacagagaccagtgcccctggggagcagccccagtttctgggagtcagggaacagagagtaaccggcatcatcgtcttcatcctgacgggaatctctgtcttcctggctcccatcctaaagtgtatccccctgccggtgctgtacggagtcttcctctacatgggcgtggcctccctgaatggcatccagttctgggaacgctgcaagctcttcctgatgccagccaagcaccagccggaccatgccttcctgcggcacgtgccgctgcgccggatccacctcttcaccctggtgcagatcctctgcctggcggtgctctggatcctcaaatccacggtggctgccatcatcttcccggtcatgatcctgggcctcatcatcgttcgaaggcttctggatttcatcttttcccagcacgacctggcctggattgacaacatcctcccagagaaggaaaaaaaggagacagacaagaagaggaagagaaaaaaaggggcccacgaggactgtgatgaggagccccagttccctcctccctcggttataaagattcccatggaaagtgtccaatcagatccccaaaacggtatccactgcattgccagaaaaagatcttccagttggagttactcactctgattcttccttcagtgacacagaacttgaccgaag

SEQ ID NO: 184185 - DNA, 3123 bp, Homo sapiens
  Payload ID: 16278
  Gene Symbol: SLC4A5
  Gene Name: solute carrier family 4 (sodium bicarbonate cotransporter), member 5
  Uniprot ID: Q9BY07
  ENST ID: ENST00000377632
  CDS Start-End: 1-3123
atgaaggtgaaggaggagaaggctggggtaggaaagctggaccacactaaccacaggaggagatttccggatcagaaagaatgccctcctatccacattgggcttccagtacccacttaccctcaaagaaaaactgaccagaagggacatctttcaggcctgcaaaaagtccactggggcctgcggccagaccagccacagcaggaactgactggcccagggagtggggcaagcagccaggacagcagcatggatcttatcagcaggactcggtccccagctgctgagcagctccaggacatcctgggggaggaagatgaggctcccaaccccaccctctttacagagatggatactctgcagcatgacggagaccagatggagtggaaggagtcagccaggtggataaagtttgaagaaaaggtagaggaaggcggcgaacgctggagcaagccccacgtgtccacactatccctgcacagcctcttcgagctccgtacctgcctgcagacggggacggtgctgctggatttggacagtggctccttaccacagatcatagatgatgtcattgagaagcagattgaggatggtctcctgcggccagagctccgggagagggtcagttacgtcctcctgaggaggcaccgccaccaaaccaagaagcccatccaccgctccttagctgacattgggaagtcagtctccaccacaaatcgcagtcctgcccggagccctggtgctggcccgagtctacaccactccacggaagacctgcggatgcggcagagtgcaaattacggacgtctgtgtcatgcccagagcagaagcatgaatgacatttctctcaccccaaacacagaccagcggaaaaacaaattcatgaagaagatccccaaggactcagaagcgtccaacgtgctcgtgggcgaggtggacttcctagaccagccattcatcgcgttcgtgcgcctcatccagtcggccatgctgggaggagtgaccgaggtgcctgtccccaccagatttctgtttatactactgggaccttctgggagagcaaaatcctacaatgaaattggccgtgccattgcaaccctcatggtagatgatctcttcagtgacgtggcctacaaagcccgcaatcgggaagatctgatcgcaggaattgatgaatttctggatgaggtcatcgtccttcctcctggagaatgggacccaaatatccggattgagccccccaagaaggtgccctctgctgacaagaggaaatctgtgttctccctagcagagctgggccagatgaatggctctgtgggaggaggcggcggagctcctggaggaggcaatggaggtggtggtggtggtggcagtggcggcggggctggcagtggcggggccggcggaacaagcagcggggatgatggagagatgccagccatgcatgaaatcggggaggaacttatctggacaggaaggttcttcggtggcctgtgtctggatatcaagaggaagttgccctggttcccaagtgacttctatgatggcttccacattcagtccatctctgccatcctattcatctacctcggctgtatcaccaacgcgatcacctttggtgggcttctgggggatgccaccgacaattatcagggagtgatggagagcttcctgggcactgccatggctggctccttgttctgcctcttctcgggacagcctctcatcattctcagcagcacggggcccatcctcatctttgagaagctcctcttcgacttcagcaaaggcaatggcctggactacatggagttccgcctctggattggcctacactcagctgtccagtgccttatcctagtggccacagatgccagctttatcatcaaatatatcacccgcttcaccgaggagggcttctccacccttatcagcttcatcttcatctacgatgccatcaagaagatgatcggtgccttcaagtactaccctatcaatatggacttcaagccaaacttcatcactacctacaagtgcgagtgtgtcgcccctgacacagtgaatacaaccgtgttcaatgcttcagccccattggcaccagacaccaacgcttctctgtacaacctccttaacctcacagcgttggactggtccctgctgagcaagaaggagtgtctgagctacggcgggcgcctgcttgggaattcctgcaagtttatcccagacctggcgctcatgtccttcatccttttctttgggacatactccatgaccctgaccctgaagaagttcaaattcagccgctattttcctaccaaggtccgggccctggtggctgacttttccattgttttctccatcctgatgttctgtggaatcgatgcctgttttggcctagaaactcccaagctgcatgtgcccagtgtcatcaagccaacgcggcctgaccgaggctggttcgtggccccctttgggaagaacccgtggtgggtatacccagcaagcatcctgcccgccctgctggtgaccatcctgatcttcatggaccagcagatcactgccgtcattgtcaaccggaaggagaacaaactgaagaaggctgccggctaccatctggacctgttctgggtgggcatcctcatggctttgtgctcctttatggggctcccctggtacgtggctgccacggtcatctccatcgcccacatcgacagcctcaagatggagacagagaccagtgcccctggggagcagccccagtttctgggagtcagggaacagagagtaaccggcatcatcgtcttcatcctgacgggaatctctgtcttcctggctcccatcctaaagatcctgggcctcatcatcgttcgaaggcttctggatttcatcttttcccagcacgacctggcctggattgacaacatcctcccagagaaggaaaaaaaggagacagacaagaagaggaagagaaaaaaaggggcccacgaggactgtgatgaggagccccagttccctcctccctcggttataaagattcccatggaaagtgtccaatcagatccccaaaacggtatccactgcattgccagaaaaagatcttccagttggagttactcactctga

SEQ ID NO: 184186 - DNA, 3814 bp, Homo sapiens
  Payload ID: 16278
  Gene Symbol: SLC4A5
  Gene Name: solute carrier family 4 (sodium bicarbonate cotransporter), member 5
  Uniprot ID: Q9BY07
  ENST ID: ENST00000377634
  CDS Start-End: 401-3814
ccaccctaaaggaattggagtcagggcccaggagccacaggccactgcactggggcatcccaggatttggaattcagctgtgagctcatgagctgatggatgtttccaggagtaccctgaagaccacccaggtgggagtgtaagataaccttccagataaagagttgctgctaccaaaagagtgctgacaccatcacagtatgttcccttctcaaccctggacatggttcagaaacagctaaagcagacaagaatctggggcagccaatattgtaccacctgccaaagcttggcacaaacaatctggaagccaaaaattgcacatactgtggaacagagcaagtggttctggcctccctgggatttggatcctggtttccagagctaagaacacaaagtcatgaaggtgaaggaggagaaggctggggtaggaaagctggaccacactaaccacaggaggagatttccggatcagaaagaatgccctcctatccacattgggcttccagtacccacttaccctcaaagaaaaactgaccagaagggacatctttcaggcctgcaaaaagtccactggggcctgcggccagaccagccacagcaggaactgactggcccagggagtggggcaagcagccaggacagcagcatggatcttatcagcaggactcggtccccagctgctgagcagctccaggacatcctgggggaggaagatgaggctcccaaccccaccctctttacagagatggatactctgcagcatgacggagaccagatggagtggaaggagtcagccaggtggataaagtttgaagaaaaggtagaggaaggcggcgaacgctggagcaagccccacgtgtccacactatccctgcacagcctcttcgagctccgtacctgcctgcagacggggacggtgctgctggatttggacagtggctccttaccacagatcatagatgatgtcattgagaagcagattgaggatggtctcctgcggccagagctccgggagagggtcagttacgtcctcctgaggaggcaccgccaccaaaccaagaagcccatccaccgctccttagctgacattgggaagtcagtctccaccacaaatcgcagtcctgcccggagccctggtgctggcccgagtctacaccactccacggaagacctgcggatgcggcagagtgcaaattacggacgtctgtgtcatgcccagagcagaagcatgaatgacatttctctcaccccaaacacagaccagcggaaaaacaaattcatgaagaagatccccaaggactcagaagcgtccaacgtgctcgtgggcgaggtggacttcctagaccagccattcatcgcgttcgtgcgcctcatccagtcggccatgctgggaggagtgaccgaggtgcctgtccccaccagatttctgtttatactactgggaccttctgggagagcaaaatcctacaatgaaattggccgtgccattgcaaccctcatggtagatgatctcttcagtgacgtggcctacaaagcccgcaatcgggaagatctgatcgcaggaattgatgaatttctggatgaggtcatcgtccttcctcctggagaatgggacccaaatatccggattgagccccccaagaaggtgccctctgctgacaagaggaaatctgtgttctccctagcagagctgggccagatgaatggctctgtgggaggaggcggcggagctcctggaggaggcaatggaggtggtggtggtggtggcagtggcggcggggctggcagtggcggggccggcggaacaagcagcggggatgatggagagatgccagccatgcatgaaatcggggaggaacttatctggacaggaaggttcttcggtggcctgtgtctggatatcaagaggaagttgccctggttcccaagtgacttctatgatggcttccacattcagtccatctctgccatcctattcatctacctcggctgtatcaccaacgcgatcacctttggtgggcttctgggggatgccaccgacaattatcagggagtgatggagagcttcctgggcactgccatggctggctccttgttctgcctcttctcgggacagcctctcatcattctcagcagcacggggcccatcctcatctttgagaagctcctcttcgacttcagcaaaggcaatggcctggactacatggagttccgcctctggattggcctacactcagctgtccagtgccttatcctagtggccacagatgccagctttatcatcaaatatatcacccgcttcaccgaggagggcttctccacccttatcagcttcatcttcatctacgatgccatcaagaagatgatcggtgccttcaagtactaccctatcaatatggacttcaagccaaacttcatcactacctacaagtgcgagtgtgtcgcccctgacacagtgaatacaaccgtgttcaatgcttcagccccattggcaccagacaccaacgcttctctgtacaacctccttaacctcacagcgttggactggtccctgctgagcaagaaggagtgtctgagctacggcgggcgcctgcttgggaattcctgcaagtttatcccagacctggcgctcatgtccttcatccttttctttgggacatactccatgaccctgaccctgaagaagttcaaattcagccgctattttcctaccaaggtccgggccctggtggctgacttttccattgttttctccatcctgatgttctgtggaatcgatgcctgttttggcctagaaactcccaagctgcatgtgcccagtgtcatcaagccaacgcggcctgaccgaggctggttcgtggccccctttgggaagaacccgtggtgggtatacccagcaagcatcctgcccgccctgctggtgaccatcctgatcttcatggaccagcagatcactgccgtcattgtcaaccggaaggagaacaaactgaagaaggctgccggctaccatctggacctgttctgggtgggcatcctcatggctttgtgctcctttatggggctcccctggtacgtggctgccacggtcatctccatcgcccacatcgacagcctcaagatggagacagagaccagtgcccctggggagcagccccagtttctgggagtcagggaacagagagtaaccggcatcatcgtcttcatcctgacgggaatctctgtcttcctggctcccatcctaaagtgtatccccctgccggtgctgtacggagtcttcctctacatgggcgtggcctccctgaatggcatccagatggggaccggagggtcagaattcaaaatccagaagaagctgactccattctgggaacgctgcaagctcttcctgatgccagccaagcaccagccggaccatgccttcctgcggcacgtgccgctgcgccggatccacctcttcaccctggtgcagatcctctgcctggcggtgctctggatcctcaaatccacggtggctgccatcatcttcccggtcatgatcctgggcctcatcatcgttcgaaggcttctggatttcatcttttcccagcacgacctggcctggattgacaacatcctcccagagaaggaaaaaaaggagacagacaagaagaggaagagaaaaaaaggggcccacgaggactgtgatgaggagccccagttccctcctccctcggttataaagattcccatggaaagtgtccaatcagatccccaaaacggtatccactgcattgccagaaaaagatcttccagttggagttactcactctga

SEQ ID NO: 184187 - DNA, 6348 bp, Homo sapiens
  Payload ID: 16278
  Gene Symbol: SLC4A5
  Gene Name: solute carrier family 4 (sodium bicarbonate cotransporter), member 5
  Uniprot ID: Q9BY07
  ENST ID: ENST00000394019
  CDS Start-End: 399-3764
accctaaaggaattggagtcagggcccaggagccacaggccactgcactggggcatcccaggatttggaattcagctgtgagctcatgagctgatggatgtttccaggagtaccctgaagaccacccaggtgggagtgtaagataaccttccagataaagagttgctgctaccaaaagagtgctgacaccatcacagtatgttcccttctcaaccctggacatggttcagaaacagctaaagcagacaagaatctggggcagccaatattgtaccacctgccaaagcttggcacaaacaatctggaagccaaaaattgcacatactgtggaacagagcaagtggttctggcctccctgggatttggatcctggtttccagagctaagaacacaaagtcatgaaggtgaaggaggagaaggctggggtaggaaagctggaccacactaaccacaggaggagatttccggatcagaaagaatgccctcctatccacattgggcttccagtacccacttaccctcaaagaaaaactgaccagaagggacatctttcaggcctgcaaaaagtccactggggcctgcggccagaccagccacagcaggaactgactggcccagggagtggggcaagcagccaggacagcagcatggatcttatcagcaggactcggtccccagctgctgagcagctccaggacatcctgggggaggaagatgaggctcccaaccccaccctctttacagagatggatactctgcagcatgacggagaccagatggagtggaaggagtcagccaggtggataaagtttgaagaaaaggtagaggaaggcggcgaacgctggagcaagccccacgtgtccacactatccctgcacagcctcttcgagctccgtacctgcctgcagacggggacggtgctgctggatttggacagtggctccttaccacagatcatagatgatgtcattgagaagcagattgaggatggtctcctgcggccagagctccgggagagggtcagttacgtcctcctgaggaggcaccgccaccaaaccaagaagcccatccaccgctccttagctgacattgggaagtcagtctccaccacaaatcgcagtcctgcccggagccctggtgctggcccgagtctacaccactccacggaagacctgcggatgcggcagagtgcaaattacggacgtctgtgtcatgcccagagcagaagcatgaatgacatttctctcaccccaaacacagaccagcggaaaaacaaattcatgaagaagatccccaaggactcagaagcgtccaacgtgctcgtgggcgaggtggacttcctagaccagccattcatcgcgttcgtgcgcctcatccagtcggccatgctgggaggagtgaccgaggtgcctgtccccaccagatttctgtttatactactgggaccttctgggagagcaaaatcctacaatgaaattggccgtgccattgcaaccctcatggtagatgatctcttcagtgacgtggcctacaaagcccgcaatcgggaagatctgatcgcaggaattgatgaatttctggatgaggtcatcgtccttcctcctggagaatgggacccaaatatccggattgagccccccaagaaggtgccctctgctgacaagaggaaatctgtgttctccctagcagagctgggccagatgaatggctctgtgggaggaggcggcggagctcctggaggaggcaatggaggtggtggtggtggtggcagtggcggcggggctggcagtggcggggccggcggaacaagcagcggggatgatggagagatgccagccatgcatgaaatcggggaggaacttatctggacaggaaggttcttcggtggcctgtgtctggatatcaagaggaagttgccctggttcccaagtgacttctatgatggcttccacattcagtccatctctgccatcctattcatctacctcggctgtatcaccaacgcgatcacctttggtgggcttctgggggatgccaccgacaattatcagggagtgatggagagcttcctgggcactgccatggctggctccttgttctgcctcttctcgggacagcctctcatcattctcagcagcacggggcccatcctcatctttgagaagctcctcttcgacttcagcaaaggcaatggcctggactacatggagttccgcctctggattggcctacactcagctgtccagtgccttatcctagtggccacagatgccagctttatcatcaaatatatcacccgcttcaccgaggagggcttctccacccttatcagcttcatcttcatctacgatgccatcaagaagatgatcggtgccttcaagtactaccctatcaatatggacttcaagccaaacttcatcactacctacaagtgcgagtgtgtcgcccctgacacagtgaatacaaccgtgttcaatgcttcagccccattggcaccagacaccaacgcttctctgtacaacctccttaacctcacagcgttggactggtccctgctgagcaagaaggagtgtctgagctacggcgggcgcctgcttgggaattcctgcaagtttatcccagacctggcgctcatgtccttcatccttttctttgggacatactccatgaccctgaccctgaagaagttcaaattcagccgctattttcctaccaaggtccgggccctggtggctgacttttccattgttttctccatcctgatgttctgtggaatcgatgcctgttttggcctagaaactcccaagctgcatgtgcccagtgtcatcaagccaacgcggcctgaccgaggctggttcgtggccccctttgggaagaacccgtggtgggtatacccagcaagcatcctgcccgccctgctggtgaccatcctgatcttcatggaccagcagatcactgccgtcattgtcaaccggaaggagaacaaactgaagaaggctgccggctaccatctggacctgttctgggtgggcatcctcatggctttgtgctcctttatggggctcccctggtacgtggctgccacggtcatctccatcgcccacatcgacagcctcaagatggagacagagaccagtgcccctggggagcagccccagtttctgggagtcagggaacagagagtaaccggcatcatcgtcttcatcctgacgggaatctctgtcttcctggctcccatcctaaagtgtatccccctgccggtgctgtacggagtcttcctctacatgggcgtggcctccctgaatggcatccagttctgggaacgctgcaagctcttcctgatgccagccaagcaccagccggaccatgccttcctgcggcacgtgccgctgcgccggatccacctcttcaccctggtgcagatcctctgcctggcggtgctctggatcctcaaatccacggtggctgccatcatcttcccggtcatgatcctgggcctcatcatcgttcgaaggcttctggatttcatcttttcccagcacgacctggcctggattgacaacatcctcccagagaaggaaaaaaaggagacagacaagaagaggaagagaaaaaaaggggcccacgaggactgtgatgaggagccccagttccctcctccctcggttataaagattcccatggaaagtgtccaatcagatccccaaaacggtatccactgcattgccagaaaaagatcttccagttggagttactcactctgattcttccttcagtgacacagaacttgaccgaagcatcaccttgcacttcaaaatatcctgtccagcttcacctgctttcagctactcacggaacccagtgttcatggtgccacaggtgaagatagagatggagtcagactatgacttcacagacatggataaataccgaagagaaactgacagtgagaccaccctctaggatgaagcagcttctcccagatgggagatggagagcctggcttagtcttcactgggagggtcttaacttctctgtgcctgtttccttctttatcaaacagagggagtccgtctgcctatagaaaactggagatctattgatgaaaagtattgcttagatgcaaagctctcccctttgtagtaattaaaatacctaaagctaaatattatattttattttaaaatgcagttcagcatagaaattctaacatttctttggaaataaaaaaatgcttgtttccccaaaccatagctaagataaaggggcaatagtcaattcatatttaaaacaaatatcaatttaaaattgtttaaaggttagatttaaatatagatgttctcaaacaaacttgtaatatacttttatgtcactagaccatctttggaatatttggcaattctgcatattaagaaatgctgaaaaggtcctatcttttctccctgtcacatccaatttcctaagggttatatgaaaagtttgaaccagccgggcacagtggcacacgcctgtaatcctagcactttgggaggccgaggcaggtgaattgcctgagctcaggagttcgagaccagcctaggcaacacggtgaaaccccgtctctactaaactacaaaaaattagccgggtgtggtggcatgcacctgtagtcccagctattcgggaggctgaggcaggagaatcgcttgaacccaggaggcagaagttgcagtgagctgagatggcaccactgcactccagcctaggcaacagagtgagactccgtatccaaacaaaaaaaaagtttgaaccatctgcattatgggccttgctccagaagtgtgactggggctttcccagattgaaaagccagttccaaaactctgttaatgaaagaaccaatgcatctgagtggataaatgtttctaaaataaaatagttcttgttaaagtgaaatttgaaaccacatgttaaatcaaaatgatcctttaaattagtatcactggtttttcatacctggaatcacatttcatgatacatttgggtgggtcctccctgcaaattttcaatgtttattcccaaagtcaaactcccattcatgtgaacaatacaggttagacagaggtaaggtcacattttacattacaactttgcaatattaatcaacctagtactttaaaggaatgattgaaaactatttgggaagataaaaaccagtttcaatgaagcaaacctattcctcatgaaacttaagatcagtcattttatcttcaatccacatttaatgaacaccaaccatgttgatttaatgcctactatgaccctgacagccacagtgcatctgacacttactttctccaaaacaactatgatttaaaccttgagtaaatcacttgaaccttgaggttagagttactatatttgctcaagatgacaaatgcaggtgctttcttttttaaagaaaaatgacactagatcattaacaccttgagtataggacaggtaattgcctctgtaattcccagcgtctagtgtagtgcctggtccatagaaagctctcaataagtgtttgattacatttaatctcagagctcccttccaagggatactgccaagaggtaaagctccaaacctctactcttactgagagcagaatttcttagaatttccagaaccatctcctatgcttaagtataaattcttgtcagacacagtggctcacacctgtaatcccgctacttgggaggcagaggtggggggaatcagcagaggtcaggaggtcaagaccagcctgggcaacatagtgagacccatctctaaacaaatgtttaaaaattagctaggcatgctggcacacacctgtagtcccagccatttcagaggctgatgcaggaggatcgtttaagtccaggagttcaaggctgcagtgagctataatcatgccactgcactccagccagggagacagctggaatccatgtcttataaacaataataattaatttttaaaaaaagtatttatcatccacaccaatcctggggaagctaacaatccacccttaacacatttcagttttaaaacctggctgatctggaatagaactttgtccaaattaaattgtagaaatgctatggattcaagagtaaacctgcttgattaatcaaacaagctggaaaactactgttaatttctttgttgtaaattgatcactgtaattttaccttacatgtcatttatattttgtatatacatgaacattttaatttccatagcttttaacaggttgacataatacttctccatgcagtaagtcagtcattttttccacttgtaactgtaattcaataaaatttaatcctgtctggtca

SEQ ID NO: 184188 - DNA, 6185 bp, Homo sapiens
  Payload ID: 16278
  Gene Symbol: SLC4A5
  Gene Name: solute carrier family 4 (sodium bicarbonate cotransporter), member 5
  Uniprot ID: Q9BY07
  ENST ID: ENST00000423644
  CDS Start-End: 237-3602
tttcaccttcctgcagagtgctgacaccatcacagtatgttcccttctcaaccctggacatggttcagaaacagctaaagcagacaagaatctggggcagccaatattgtaccacctgccaaagcttggcacaaacaatctggaagccaaaaattgcacatactgtggaacagagcaagtggttctggcctccctgggatttggatcctggtttccagagctaagaacacaaagtcatgaaggtgaaggaggagaaggctggggtaggaaagctggaccacactaaccacaggaggagatttccggatcagaaagaatgccctcctatccacattgggcttccagtacccacttaccctcaaagaaaaactgaccagaagggacatctttcaggcctgcaaaaagtccactggggcctgcggccagaccagccacagcaggaactgactggcccagggagtggggcaagcagccaggacagcagcatggatcttatcagcaggactcggtccccagctgctgagcagctccaggacatcctgggggaggaagatgaggctcccaaccccaccctctttacagagatggatactctgcagcatgacggagaccagatggagtggaaggagtcagccaggtggataaagtttgaagaaaaggtagaggaaggcggcgaacgctggagcaagccccacgtgtccacactatccctgcacagcctcttcgagctccgtacctgcctgcagacggggacggtgctgctggatttggacagtggctccttaccacagatcatagatgatgtcattgagaagcagattgaggatggtctcctgcggccagagctccgggagagggtcagttacgtcctcctgaggaggcaccgccaccaaaccaagaagcccatccaccgctccttagctgacattgggaagtcagtctccaccacaaatcgcagtcctgcccggagccctggtgctggcccgagtctacaccactccacggaagacctgcggatgcggcagagtgcaaattacggacgtctgtgtcatgcccagagcagaagcatgaatgacatttctctcaccccaaacacagaccagcggaaaaacaaattcatgaagaagatccccaaggactcagaagcgtccaacgtgctcgtgggcgaggtggacttcctagaccagccattcatcgcgttcgtgcgcctcatccagtcggccatgctgggaggagtgaccgaggtgcctgtccccaccagatttctgtttatactactgggaccttctgggagagcaaaatcctacaatgaaattggccgtgccattgcaaccctcatggtagatgatctcttcagtgacgtggcctacaaagcccgcaatcgggaagatctgatcgcaggaattgatgaatttctggatgaggtcatcgtccttcctcctggagaatgggacccaaatatccggattgagccccccaagaaggtgccctctgctgacaagaggaaatctgtgttctccctagcagagctgggccagatgaatggctctgtgggaggaggcggcggagctcctggaggaggcaatggaggtggtggtggtggtggcagtggcggcggggctggcagtggcggggccggcggaacaagcagcggggatgatggagagatgccagccatgcatgaaatcggggaggaacttatctggacaggaaggttcttcggtggcctgtgtctggatatcaagaggaagttgccctggttcccaagtgacttctatgatggcttccacattcagtccatctctgccatcctattcatctacctcggctgtatcaccaacgcgatcacctttggtgggcttctgggggatgccaccgacaattatcagggagtgatggagagcttcctgggcactgccatggctggctccttgttctgcctcttctcgggacagcctctcatcattctcagcagcacggggcccatcctcatctttgagaagctcctcttcgacttcagcaaaggcaatggcctggactacatggagttccgcctctggattggcctacactcagctgtccagtgccttatcctagtggccacagatgccagctttatcatcaaatatatcacccgcttcaccgaggagggcttctccacccttatcagcttcatcttcatctacgatgccatcaagaagatgatcggtgccttcaagtactaccctatcaatatggacttcaagccaaacttcatcactacctacaagtgcgagtgtgtcgcccctgacacagtgaatacaaccgtgttcaatgcttcagccccattggcaccagacaccaacgcttctctgtacaacctccttaacctcacagcgttggactggtccctgctgagcaagaaggagtgtctgagctacggcgggcgcctgcttgggaattcctgcaagtttatcccagacctggcgctcatgtccttcatccttttctttgggacatactccatgaccctgaccctgaagaagttcaaattcagccgctattttcctaccaaggtccgggccctggtggctgacttttccattgttttctccatcctgatgttctgtggaatcgatgcctgttttggcctagaaactcccaagctgcatgtgcccagtgtcatcaagccaacgcggcctgaccgaggctggttcgtggccccctttgggaagaacccgtggtgggtatacccagcaagcatcctgcccgccctgctggtgaccatcctgatcttcatggaccagcagatcactgccgtcattgtcaaccggaaggagaacaaactgaagaaggctgccggctaccatctggacctgttctgggtgggcatcctcatggctttgtgctcctttatggggctcccctggtacgtggctgccacggtcatctccatcgcccacatcgacagcctcaagatggagacagagaccagtgcccctggggagcagccccagtttctgggagtcagggaacagagagtaaccggcatcatcgtcttcatcctgacgggaatctctgtcttcctggctcccatcctaaagtgtatccccctgccggtgctgtacggagtcttcctctacatgggcgtggcctccctgaatggcatccagttctgggaacgctgcaagctcttcctgatgccagccaagcaccagccggaccatgccttcctgcggcacgtgccgctgcgccggatccacctcttcaccctggtgcagatcctctgcctggcggtgctctggatcctcaaatccacggtggctgccatcatcttcccggtcatgatcctgggcctcatcatcgttcgaaggcttctggatttcatcttttcccagcacgacctggcctggattgacaacatcctcccagagaaggaaaaaaaggagacagacaagaagaggaagagaaaaaaaggggcccacgaggactgtgatgaggagccccagttccctcctccctcggttataaagattcccatggaaagtgtccaatcagatccccaaaacggtatccactgcattgccagaaaaagatcttccagttggagttactcactctgattcttccttcagtgacacagaacttgaccgaagcatcaccttgcacttcaaaatatcctgtccagcttcacctgctttcagctactcacggaacccagtgttcatggtgccacaggtgaagatagagatggagtcagactatgacttcacagacatggataaataccgaagagaaactgacagtgagaccaccctctaggatgaagcagcttctcccagatgggagatggagagcctggcttagtcttcactgggagggtcttaacttctctgtgcctgtttccttctttatcaaacagagggagtccgtctgcctatagaaaactggagatctattgatgaaaagtattgcttagatgcaaagctctcccctttgtagtaattaaaatacctaaagctaaatattatattttattttaaaatgcagttcagcatagaaattctaacatttctttggaaataaaaaaatgcttgtttccccaaaccatagctaagataaaggggcaatagtcaattcatatttaaaacaaatatcaatttaaaattgtttaaaggttagatttaaatatagatgttctcaaacaaacttgtaatatacttttatgtcactagaccatctttggaatatttggcaattctgcatattaagaaatgctgaaaaggtcctatcttttctccctgtcacatccaatttcctaagggttatatgaaaagtttgaaccagccgggcacagtggcacacgcctgtaatcctagcactttgggaggccgaggcaggtgaattgcctgagctcaggagttcgagaccagcctaggcaacacggtgaaaccccgtctctactaaactacaaaaaattagccgggtgtggtggcatgcacctgtagtcccagctattcgggaggctgaggcaggagaatcgcttgaacccaggaggcagaagttgcagtgagctgagatggcaccactgcactccagcctaggcaacagagtgagactccgtatccaaacaaaaaaaaagtttgaaccatctgcattatgggccttgctccagaagtgtgactggggctttcccagattgaaaagccagttccaaaactctgttaatgaaagaaccaatgcatctgagtggataaatgtttctaaaataaaatagttcttgttaaagtgaaatttgaaaccacatgttaaatcaaaatgatcctttaaattagtatcactggtttttcatacctggaatcacatttcatgatacatttgggtgggtcctccctgcaaattttcaatgtttattcccaaagtcaaactcccattcatgtgaacaatacaggttagacagaggtaaggtcacattttacattacaactttgcaatattaatcaacctagtactttaaaggaatgattgaaaactatttgggaagataaaaaccagtttcaatgaagcaaacctattcctcatgaaacttaagatcagtcattttatcttcaatccacatttaatgaacaccaaccatgttgatttaatgcctactatgaccctgacagccacagtgcatctgacacttactttctccaaaacaactatgatttaaaccttgagtaaatcacttgaaccttgaggttagagttactatatttgctcaagatgacaaatgcaggtgctttcttttttaaagaaaaatgacactagatcattaacaccttgagtataggacaggtaattgcctctgtaattcccagcgtctagtgtagtgcctggtccatagaaagctctcaataagtgtttgattacatttaatctcagagctcccttccaagggatactgccaagaggtaaagctccaaacctctactcttactgagagcagaatttcttagaatttccagaaccatctcctatgcttaagtataaattcttgtcagacacagtggctcacacctgtaatcccgctacttgggaggcagaggtggggggaatcagcagaggtcaggaggtcaagaccagcctgggcaacatagtgagacccatctctaaacaaatgtttaaaaattagctaggcatgctggcacacacctgtagtcccagccatttcagaggctgatgcaggaggatcgtttaagtccaggagttcaaggctgcagtgagctataatcatgccactgcactccagccagggagacagctggaatccatgtcttataaacaataataattaatttttaaaaaaagtatttatcatccacaccaatcctggggaagctaacaatccacccttaacacatttcagttttaaaacctggctgatctggaatagaactttgtccaaattaaattgtagaaatgctatggattcaagagtaaacctgcttgattaatcaaacaagctggaaaactactgttaatttctttgttgtaaattgatcactgtaattttaccttacatgtcatttatattttgtatatacatgaacattttaatttccatagcttttaacaggttgacataatacttctccatgcagtaagtcagtcattttttccacttgtaactgtaattcaataaaatttaatcctgtctggtc

SEQ ID NO: 184189 - DNA, 727 bp, Homo sapiens
  Payload ID: 16278
  Gene Symbol: SLC4A5
  Gene Name: solute carrier family 4 (sodium bicarbonate cotransporter), member 5
  ENST ID: ENST00000436454
  CDS Start-End: 339-727
aaggtccaccctaaaggaattggagtcagggcccaggagccacaggccactgcactggggcatcccaggatttggaattcagctgtgagctcatgagctgatggatgtttccaggagtaccctgaagaccacccaggtgggagtgtaagataaccttccagataaagagttgctgctaccaaaagagtgctgacaccatcacagtatgttcccttctcaaccctggacatggttcagaaacagctaaagcagacaagaatctggggcagccaatattgtaccacctgccaaagcttggcacaaacaatctggaagccaaaaattgcacatactgtgtcatgaaggtgaaggaggagaaggctggggtaggaaagctggaccacactaaccacaggaggagatttccggatcagaaagaatgccctcctatccacattgggcttccagtacccacttaccctcaaagaaaaactgaccagaagggacatctttcaggcctgcaaaaagtccactggggcctgcggccagaccagccacagcaggaactgactggcccagggagtggggcaagcagccaggacagcagcatggatcttatcagcaggactcggtccccagctgctgagcagctccaggacatcctgggggaggaagatgaggctcccaaccccaccctctttacagagatggatactctgcagcatgacggagaccagatggagtggaa

SEQ ID NO: 184190 - DNA, 3073 bp, Homo sapiens
  Payload ID: 16278
  Gene Symbol: SLC4A5
  Gene Name: solute carrier family 4 (sodium bicarbonate cotransporter), member 5
  ENST ID: ENST00000425249
  CDS Start-End: 183-3073
tggacatggttcagaaacagctaaagcagacaagaatctggggcagccaatattgtaccacctgccaaagcttggcacaaacaatctggaagccaaaaattgcacatactgtggaacagagcaagtggttctggcctccctgggatttggatcctggtttccagagctaagaacacaaagtcatgaaggtgaaggaggagaaggctggggtaggaaagctggaccacactaaccacaggaggagatttccggatcagaaagaatgccctcctatccacattgggcttccagtacccacttaccctcaaagaaaaactgaccagaagggacatctttcaggcctgcaaaaagtccactggggcctgcggccagaccagccacagcaggaactgactggcccagggagtggggcaagcagccaggacagcagcatggatcttatcagcaggactcggtccccagctgctgagcagctccaggacatcctgggggaggaagatgaggctcccaaccccaccctctttacagagatggatactctgcagcatgacggagaccagatggagtggaaggagtcagccaggtggataaagtttgaagaaaaggtagaggaaggcggcgaacgctggagcaagccccacgtgtccacactatccctgcacagcctcttcgagctccgtacctgcctgcagacggggacggtgctgctggatttggacagtggctccttaccacagatcatagatgatgtcattgagaagcagattgaggatggtctcctgcggccagagctccgggagagggtcagttacgtcctcctgaggaggcaccgccaccaaaccaagaagcccatccaccgctccttagctgacattgggaagtcagtctccaccacaaatcgcagtcctgcccggagccctggtgctggcccgagtctacaccactccacggaagacctgcggatgcggcagagtgcaaattacggacgtctgtgtcatgcccagagcagaagcatgaatgacatttctctcaccccaaacacagaccagcggaaaaacaaattcatgaagaagatccccaaggactcagaagcgtccaacgtgctcgtgggcgaggtggacttcctagaccagccattcatcgcgttcgtgcgcctcatccagtcggccatgctgggaggagtgaccgaggtgcctgtccccaccagatttctgtttatactactgggaccttctgggagagcaaaatcctacaatgaaattggccgtgccattgcaaccctcatggtagatgatctcttcagtgacgtggcctacaaagcccgcaatcgggaagatctgatcgcaggaattgatgaatttctggatgaggtcatcgtccttcctcctggagaatgggacccaaatatccggattgagccccccaagaaggtgccctctgctgacaagaggaaatctgtgttctccctagcagagctgggccagatgaatggctctgtgggaggaggcggcggagctcctggaggaggcaatggaggtggtggtggtggtggcagtggcggcggggctggcagtggcggggccggcggaacaagcagcggggatgatggagagatgccagccatgcatgaaatcggggaggaacttatctggacaggaaggttcttcggtggcctgtgtctggatatcaagaggaagttgccctggttcccaagtgacttctatgatggcttccacattcagtccatctctgccatcctattcatctacctcggctgtatcaccaacgcgatcacctttggtgggcttctgggggatgccaccgacaattatcagggagtgatggagagcttcctgggcactgccatggctggctccttgttctgcctcttctcgggacagcctctcatcattctcagcagcacggggcccatcctcatctttgagaagctcctcttcgacttcagcaaaggcaatggcctggactacatggagttccgcctctggattggcctacactcagctgtccagtgccttatcctagtggccacagatgccagctttatcatcaaatatatcacccgcttcaccgaggagggcttctccacccttatcagcttcatcttcatctacgatgccatcaagaagatgatcggtgccttcaagtactaccctatcaatatggacttcaagccaaacttcatcactacctacaagtgcgagtgtgtcgcccctgacacagtgaatacaaccgtgttcaatgcttcagccccattggcaccagacaccaacgcttctctgtacaacctccttaacctcacagcgttggactggtccctgctgagcaagaaggagtgtctgagctacggcgggcgcctgcttgggaattcctgcaagtttatcccagacctggcgctcatgtccttcatccttttctttgggacatactccatgaccctgaccctgaagaagttcaaattcagccgctattttcctaccaagccaacgcggcctgaccgaggctggttcgtggccccctttgggaagaacccgtggtgggtatacccagcaagcatcctgcccgccctgctggtgaccatcctgatcttcatggaccagcagatcactgccgtcattgtcaaccggaaggagaacaaactgaagggaacagagagtaaccggcatcatcgtcttcatcctgacgggaatctctgtcttcctggctcccatcctaaagtgtatccccctgccggtgctgtacggagtcttcctctacatgggcgtggcctccctgaatggcatccagttctgggaacgctgcaagctcttcctgatgccagccaagcaccagccggaccatgccttcctgcggcacgtgccgctgcgccggatccacctcttcaccctggtgcagatcctctgcctggcggtgctctggatcctcaaatccacggtggctgccatcatcttcccggtcatgtctctctccaccacagatcctgggcctcatcatcgttcgaaggcttctggatttcatcttttcccagcacgacctggcctggattgacaacatc

SEQ ID NO: 184191 - DNA, 552 bp, Homo sapiens
  Payload ID: 16278
  Gene Symbol: SLC4A5
  Gene Name: solute carrier family 4 (sodium bicarbonate cotransporter), member 5
  ENST ID: ENST00000444570
  CDS Start-End: 119-552
atactgttcagcctggaaaccacagagagcccttcttgccacccaacaggaacagagcaagtggttctggcctccctgggatttggatcctggtttccagagctaagaacacaaagtcatgaaggtgaaggaggagaaggctggggtaggaaagctggaccacactaaccacaggaggagatttccggatcagaaagaatgccctcctatccacattgggcttccagtacccacttaccctcaaagaaaaactgaccagaagggacatctttcaggcctgcaaaaagtccactggggcctgcggccagaccagccacagcaggaactgactggcccagggagtggggcaagcagccaggacagcagcatggatcttatcagcaggactcggtccccagctgctgagcagctccaggacatcctgggggaggaagatgaggctcccaaccccaccctctttacagagatggatactctgcagcatgacggagaccagatggagtggaaggagtcagccaggtggataaagtttgaagaaaaggtagaggaagg

SEQ ID NO: 184192 - DNA, 905 bp, Homo sapiens
  Payload ID: 16278
  Gene Symbol: SLC4A5
  Gene Name: solute carrier family 4 (sodium bicarbonate cotransporter), member 5
  ENST ID: ENST00000432728
  CDS Start-End: 540-905
agtgcacctgagatttctctctcaccctctcacttctctctctctcttgctcacttctctctctctctctctctctctctctcacttctctgtctctctctctgtctctctctctctcagatctttaattaactcagtgtagcttttctctctcaaacacttttgcataatctttctcacacttacacttaccacacctatattctctctacatatagcctctctctccacctccccagtccttcacacattccttttctctctctctttttctcccctcaaaccccccttcttctctccccacacctcccctggtgcttaactggaaacaaaagtgagtttgttgtgtgaagaagaggacctgtggaagtagcagccagggaggcagcagcggaagcaggctggggccagaggcagcatcgacagccagggaccccagcgctcagctgttccagggagcagggtccccagctgctgagcagctccaggacatcctgggggaggaagatgaggctcccaaccccaccctctttacagagatggatactctgcagcatgacggagaccagatggagtggaaggagtcagccaggtggataaagtttgaagaaaaggtagaggaaggcggcgaacgctggagcaagccccacgtgtccacactatccctgcacagcctcttcgagctccgtacctgcctgcagacggggacggtgctgctggatttggacagtggctccttaccacagatcatagatgatgtcattgagaagcagattgaggatggtctcctgcggccagagctccgggagagggtcagttacgtcctcctgaggaggcaccgccaccaaaccaagaagcccatccaccgctccttagctgacattgggaagtcagtctccaccaca

SEQ ID NO: 184193 - DNA, 7757 bp, Homo sapiens
  Payload ID: 16279
  Gene Symbol: SLC4A7
  Gene Name: solute carrier family 4, sodium bicarbonate cotransporter, member 7
  Uniprot ID: Q9Y6M7
  ENST ID: ENST00000295736
  CDS Start-End: 72-3716
ctcactgtccctggaatcttcaagggagttactgcattacatcatcagaaacaaggcatttctatattactatggaaagatttcgtctggagaagaagttacctggtcctgatgaagaagctgttgtggatcttggcaaaactagctcaactgtgaacaccaagtttgaaaaagaagaactagaaagtcatagagctgtatatattggtgttcacgtcccgtttagtaaagagagtcgtcggcgtcataggcatcgcggacacaaacatcaccaccggagaagaaaagataaagaatcagataaagaagatggacgggaatctccttcttatgatacaccatcccagagagttcagtttatccttggtactgaagatgatgatgaagaacatattccccatgatctcttcacggaaatggatgaactgtgttacagagatggagaagaatatgaatggaaagaaactgctagatggctgaaatttgaagaggatgttgaagatggcggtgaccgatggagtaaaccttatgtggcaactctctctttgcacagtctttttgaactaaggagttgcatcctcaatggaacagtcatgctggatatgagagcaagcactctagatgaaatagcagatatggtattagacaacatgatagcttctggccaattagacgagtccatacgagagaatgtcagagaagctcttctgaagagacatcatcatcagaatgagaaaagattcaccagtcggattcctcttgttcgatcttttgcagatataggcaagaaacattctgaccctcacttgcttgaaaggaatggggaaggcctttcagcctcccgccactctttgcgaacaggtctgtctgcctcaaacctttccttgagaggagaatcacctttatctcttcttcttggtcatcttcttccttcttcaagagctggaacccctgcaggctcaaggtgtacaaccccagtacccacccctcaaaacagtcctccttctagccctagcatcagccgcctgacctccagaagttcccaagagagtcagcgtcaggccccagaactactggtttcacctgccagtgatgatattcccacagtagtaattcatccgcctgaggaagacttagaagcagcgctgaaaggcgaggagcagaagaatgaggaaaatgttgacttaactccaggtattttggcctctccccagtctgctcctggaaacttggacaatagtaaaagtggagaaattaaaggtaatggaagtggtggaagcagagaaaatagtactgttgacttcagcaaggttgatatgaatttcatgagaaaaattcctacgggtgctgaggcatccaacgtcctggtgggcgaagtagactttttggaaaggccaataattgcatttgtgagactggctcctgctgtcctccttacagggttgactgaggtccctgttccaaccaggtttttgtttttgttattgggtccagcgggcaaggcaccacagtaccatgaaattggacgatcaatagccactctcatgacagatgagattttccatgatgtagcttataaagcaaaagacagaaatgacctcttatctggaattgatgaatttttagatcaagtaactgtcctacctccaggagagtgggatccttctatacgcatagaaccaccaaaaagtgtcccttctcaggaaaagagaaagattcctgtgtttcacaatggatctacccccacactgggtgagactcctaaagaggccgctcatcatgctgggcctgagctacagaggactggacggctttttggtggtttgatacttgacatcaaaaggaaagcaccttttttcttgagtgacttcaaggatgcattaagcctgcagtgcctggcctcgattcttttcctatactgtgcctgtatgtctcctgtaatcacttttggagggctgcttggagaagctacagaaggcagaataagtgcaatagagtctctttttggagcatcattaactgggattgcctattcattgtttgctgggcaacctctaacaatattggggagcacaggtccagttctagtgtttgaaaaaattttatataaattctgcagagattatcaactttcttatctgtctttaagaaccagtattggtctgtggacttcttttttgtgcattgttttggttgcaacagatgcaagcagccttgtgtgttatattactcgatttacagaagaggcttttgcagcccttatttgcatcatattcatctacgaggctttggagaagctctttgatttaggagaaacatatgcatttaatatgcacaacaacttagataaactgaccagctactcatgtgtatgtactgaacctccaaaccccagcaatgaaactctagcacaatggaagaaagataatataacagcacacaatatttcctggagaaatcttactgtttctgaatgtaaaaaacttcgtggtgtattcttggggtcagcttgtggtcatcatggaccttatattccagatgtgctcttttggtgtgtcatcttgtttttcacaacattttttctgtcttcattcctcaagcaatttaagaccaagcgttactttcctaccaaggtgcgatcgacaatcagtgattttgctgtatttctcacaatagtaataatggttacaattgactaccttgtaggagttccatctcctaaacttcatgttcctgaaaaatttgagcctactcatccagagagagggtggatcataagcccactgggagataatccttggtggaccttattaatagctgctattcctgctttgctttgtaccattctcatctttatggatcaacaaatcacagctgtaattataaacagaaaggaacacaaattgaagaaaggagctggctatcaccttgatttgctcatggttggcgttatgttgggagtttgctctgtcatgggacttccatggtttgtggctgcaacagtgttgtcaataagtcatgtcaacagcttaaaagttgaatctgaatgttctgctccaggggaacaacccaagtttttgggaattcgtgaacagcgggttacagggctaatgatttttattctaatgggcctctctgtgttcatgacttcagtcctaaagtttattccaatgcctgttctgtatggtgttttcctttatatgggagtttcctcattaaaaggaatccagttatttgaccgtataaaattatttggaatgcctgctaagcatcagcctgatttgatatacctccgttatgtgccgctctggaaggtccatattttcacagtcattcagcttacttgtttggtccttttatgggtgataaaagtttcagctgctgcagtggtttttcccatgatggttcttgcattagtgtttgtgcgcaaactcatggacctgtgtttcacgaagagagaacttagttggcttgatgatcttatgccagaaagtaagaaaaagaaagaagatgacaaaaagaaaaaagagaaagaggaagctgaacggatgcttcaagatgatgatgatactgtgcaccttccatttgaagggggaagtctcttgcaaattccagtcaaggccctaaaatatagtcctgataaacctgtgagtgtgaaaataagttttgaagatgaaccaagaaagaaatacgtggatgctgaaacttcattatagaattgaaccaagaggcattatacatatagatatatacatatgtaatgtgtgcgtatcatgtcactatatataagaatattgtatgtcatgctgtttatgtgtgactaccgggtttttaaaagtagtgtctggagtttgtaatgagcaccgtggagactatgtatttaatgaaatgctctctttgaagtgaggtacatggttcttaactattcaaatatttattctgttagaaaaaaaaattttctgttttgcaatagaaggatgtggagaaatgctttcagtctacttttcttaaatctctgttcatcagtggcaattcgtaaaaaccttaagtgatactttgtttatatgtttataatttttaggtgtttcctgaaattttcacatattatttcacttttgttagtgctttatgggaagaatagggagtctataccagtgctgtgggaaaaatggtaacatttcagggcttctctatttgtgtttcatttctgtagatgtccatcgtgtttcactaactggcgttttcttagccatagagatgactgtagaacaatagaaactttaataatgatagtttttaacttttatgtttaaattttttttaaatcttaaaaccttcatatctaggtatccattgtgacagacaagtaaaattgcaggtgatttgataattaagcacccataccatttataacttctgaatttaaaaagttatacaatgccagtttgcaatagttgattttgatgcctttgtagaatattttttctgaatccttatgctcttttaaagccaatgattcccactctgttctctgccttgtctctctttgtcttaaaatgctttagtttccatcaggttcaagttcttgactattattctcttataagtagtaggcgtaaataatcaggagttagaattctctcagaagggtctatgatcagtattactttattaagaattacctttcattttctctttatgttattctttcacttttgtagattacatttaatagcttgttacctgtgattttattttaaaatatttattttgatatgatgcttaaatattatataaacatttggaaaagtaacaaatagagtaaattgttaatgtaaatagttggtgcttactttcatttatgtttattatcttaaagcaattgatagattttacatctttgatataaagcactgccatatttatattttaaaaggaaattagacattttatatgtagctcagattaatgacatttttattttgtgtattagtttttgcttttctgagctttttaaagtctaacaaatctttttagtcatcttttatatacttttagttccacatgaaataaatgttgttaagcctgtaggactggatgaatggggttgtgaaactgatttgacaagagaataatttacaaaaatcaaatgagtattgagaagccacagaaatatcaaaaatggtgacatcactattaggatgaaaattttatgaaattccaatgctccctttaaccatataattaaattacaaaggtatacataattaatctaataaaggatcatgaggaatgccaaaagctgaaattttagcaagtctggtgttttaaattcattataaactatttattaactaatgtaatgtcctcctctaagaccatattgtaagagtcttgttaaaatgatggattcaacttctgcctcggatgagaggttggaaatgtagctgcttttctttagaaaatatgtagctgtcatcatttggtactgcctaaaaagagttagactctattggcaattgatagagtattacccacggtgcttattattgtttatgagcttccattgtaatgattcctttttatttgtagcagcataattatttccaaagaccccagtatttgctgctatttttaaaactcccctgatgtacctgaacaagaggatttcctcacatcatttccttgtgtctggacatcaggggtaacaactgtacttactttacaggaagaaattttaaaactgaaaactacctgggatcatagtgtttctgtgattttatttaattgtgtatagtaattatccagtgccagaaaaaccgtcacttgcaaaatactttgcactcaaaatgtttttacaatgcttctaaatgttactggtttctgctttcttttgactacttgactgacaaaatgatctgactactccatttaagagcaaaggtaactcatgtttaggtaattaactgcttgttttaagtgattatatttcttccactgtttttgaaaaataatcaaagatagcattcattgagagacagtgacagatataatttactacatatattgatttttaaataaagttgccttaaataagtgtatgtaagcagtagtagttgctatgtactgatttacctcaaggtgcaaaataattaaacctgtacatattccatttacaaaataaattcagccctgcactttctttagatgccttgatttccagaatggagcttagtgctactgaataccctggccacagagccacctcaggatattcttttctccaccctagtttatttatttatagatatctgtttacaaagtctgtagtaaatcctgatgctgaccatctgaaatgtactttttttctgaatgctgtttcaatctaaaatagcagcttttgagaaaacaatgatgtaaattccttatgataaaaggatgattctatatattctttaatgatattaaatatgccgaagccaagcacacagtctttctaaagtgtgtgtatgtttgtgtgaatgtgaatgatactgatcttatatctgttaaaagttgttttaaaaagctgtggcatcccattgttcatatttgccaagtcttctgtaaagatgtctaggacgaaatattttatgtgctaatgcatgtatttgtaaaccagatttgtttaccactcaaaattaacttgttttcttcatccaaaaaagtttatttcttccacgtacttaaattttctgtgtgggtataatatagctttctaatttttttctttcacaaaggcaggttcaaaattctgttgaaagaaaaatgctttctgaaactgaggtataacaccagagcttgctgtttaaaggattatatgatgtacatcagttctataaatgtgctcagcagtttaacatgtgaatcctgttttaaagtgctcagatttcaactgtgtaagccattgatataacgctgtaattaaaaatgtttatatgaaataacttaatgttttaaatttatttatgtagatcacatcatttttatcgtatgcagtgcaaatatgtgaaatgtcttttggtttattccaacaattatttattttagaaagtaagtttaaagactttaaggacattcaaagtttaaaatagtgttcaaattgcaaaatttggcaatcttcatataaattggtttcttttctaacttttcaaaaactaacattaaatgtcaattataggaaaacatagttggaaatgtaatcatccaaagatcatttttaaaatgaaatttaattagcacatattgaacatttgacttaattgttaaaccccagttttgttttgtttttttaatcagatttttgcacactgattagtttttgtgttgtggcttttgttgctttattattcaaggttttttttttttttcttccccatgggggagattgtcttccaatgtttaactacgtttaaataaataaaaattgaattttattgttcatttatataaaatctgataccttgatgtaatttcacaatacagttccaatttttatggcttttataattacaatgatattttcttctataataaaatccaaagtaaacatttaaattgtagaactgatatttttcatttatatgaagtataagcctctactgggtctatattgtgaatcatcctgcctttcaaatttgtttcataattgttagatgaaaactatttttttggagatgttactgaagttgattgagcaataaaagtctacttaatta

SEQ ID NO: 184194 - DNA, 3224 bp, Homo sapiens
  Payload ID: 16279
  Gene Symbol: SLC4A7
  Gene Name: solute carrier family 4, sodium bicarbonate cotransporter, member 7
  ENST ID: ENST00000428179
  CDS Start-End: 72-3224
ctcactgtccctggaatcttcaagggagttactgcattacatcatcagaaacaaggcatttctatattactatggaaagatttcgtctggagaagaagttacctggtcctgatgaagaagctgttgtggatcttggcaaaactagctcaactgtgaacaccaagtttgaaaaagaagaactagaaagtcatagagctgtatatattggtgttcacgtcccgtttagtaaagagagtcgtcggcgtcataggcatcgcggacacaaacatcaccaccggagaagaaaagataaagaatcagataaagaagatggacgggaatctccttcttatgatacaccatcccagagagttcagtttatccttggtactgaagatgatgatgaagaacatattccccatgatctcttcacggaaatggatgaactgtgttacagagatggagaagaatatgaatggaaagaaactgctagatggctgaaatttgaagaggatgttgaagatggcggtgaccgatggagtaaaccttatgtggcaactctctctttgcacagtctttttgaactaaggagttgcatcctcaatggaacagtcatgctggatatgagagcaagcactctagatgaaatagcagatatggtattagacaacatgatagcttctggccaattagacgagtccatacgagagaatgtcagagaagctcttctgaagagacatcatcatcagaatgagaaaagattcaccagtcggattcctcttgttcgatcttttgcagatataggcaagaaacattctgaccctcacttgcttgaaaggaatggtattttggcctctccccagtctgctcctggaaacttggacaatagtaaaagtggagaaattaaaggtaatggaagtggtggaagcagagaaaatagtactgttgacttcagcaaggagtctgcctcctggcactgtagttgtggcacactgggtgtgggactcaagaggcccgctgttgatatgaatttcatgagaaaaattcctacgggtgctgaggcatccaacgtcctggtgggcgaagtagactttttggaaaggccaataattgcatttgtgagactggctcctgctgtcctccttacagggttgactgaggtccctgttccaaccaggtttttgtttttgttattgggtccagcgggcaaggcaccacagtaccatgaaattggacgatcaatagccactctcatgacagatgagattttccatgatgtagcttataaagcaaaagacagaaatgacctcttatctggaattgatgaatttttagatcaagtaactgtcctacctccaggagagtgggatccttctatacgcatagaaccaccaaaaagtgtcccttctcaggaaaagagaaagattcctgtgtttcacaatggatctacccccacactgggtgagactcctaaagaggccgctcatcatgctgggcctgagctacagaggactggacggctttttggtggtttgatacttgacatcaaaaggaaagcaccttttttcttgagtgacttcaaggatgcattaagcctgcagtgcctggcctcgattcttttcctatactgtgcctgtatgtctcctgtaatcacttttggagggctgcttggagaagctacagaaggcagaataagtgcaatagagtctctttttggagcatcattaactgggattgcctattcattgtttgctgggcaacctctaacaatattggggagcacaggtccagttctagtgtttgaaaaaattttatataaattctgcagagattatcaactttcttatctgtctttaagaaccagtattggtctgtggacttcttttttgtgcattgttttggttgcaacagatgcaagcagccttgtgtgttatattactcgatttacagaagaggcttttgcagcccttatttgcatcatattcatctacgaggctttggagaagctctttgatttaggagaaacatatgcatttaatatgcacaacaacttagataaactgaccagctactcatgtgtatgtactgaacctccaaaccccagcaatgaaactctagcacaatggaagaaagataatataacagcacacaatatttcctggagaaatcttactgtttctgaatgtaaaaaacttcgtggtgtattcttggggtcagcttgtggtcatcatggaccttatattccagatgtgctcttttggtgtgtcatcttgtttttcacaacattttttctgtcttcattcctcaagcaatttaagaccaagcgttactttcctaccaaggtgcgatcgacaatcagtgattttgctgtatttctcacaatagtaataatggttacaattgactaccttgtaggagttccatctcctaaacttcatgttcctgaaaaatttgagcctactcatccagagagagggtggatcataagcccactgggagataatccttggtggaccttattaatagctgctattcctgctttgctttgtaccattctcatctttatggatcaacaaatcacagctgtaattataaacagaaaggaacacaaattgaagaaaggagctggctatcaccttgatttgctcatggttggcgttatgttgggagtttgctctgtcatgggacttccatggtttgtggctgcaacagtgttgtcaataagtcatgtcaacagcttaaaagttgaatctgaatgttctgctccaggggaacaacccaagtttttgggaattcgtgaacagcgggttacagggctaatgatttttattctaatgggcctctctgtgttcatgacttcagtcctaaagtttattccaatgcctgttctgtatggtgttttcctttatatgggagtttcctcattaaaaggaatccagttatttgaccgtataaaattatttggaatgcctgctaagcatcagcctgatttgatatacctccgttatgtgccgctctggaaggtccatattttcacagtcattcagcttacttgtttggtccttttatgggtgataaaagtttcagctgctgcagtggtttttcccatgatggttcttgcattagtgtttgtgcgcaaactcatggacctgtgtttcacgaagagagaacttagttggcttgatgatcttatgccagaaagtaagaaaaagaaagaagatgacaaaaagaaaaaagagaaagag

SEQ ID NO: 184195 - DNA, 4159 bp, Homo sapiens
  Payload ID: 16279
  Gene Symbol: SLC4A7
  Gene Name: solute carrier family 4, sodium bicarbonate cotransporter, member 7
  Uniprot ID: Q9Y6M7
  ENST ID: ENST00000454389
  CDS Start-End: 222-4001
cctactaaagccagcccagcagtcgcagcgcgcacacgcacgccccgcgtctcccgcgcccggcgcccggctctccccacgcgcgcacacctcgcgcacggacgcacccacgtttgtcctcgcgcgccgggggctcggcggcggcggcaggggcagcggcagaagcaggcagaccgcgcggggcagtaccgtagcggccgtcacgggctggccggccggccatggaggctgatggggccggcgagcagatgagaccgctactcacccgggtaacgagcaggggtcctgatgaagaagctgttgtggatcttggcaaaactagctcaactgtgaacaccaagtttgaaaaagaagaactagaaagtcatagagctgtatatattggtgttcacgtcccgtttagtaaagagagtcgtcggcgtcataggcatcgcggacacaaacatcaccaccggagaagaaaagataaagaatcagataaagaagatggacgggaatctccttcttatgatacaccatcccagagagttcagtttatccttggtactgaagatgatgatgaagaacatattccccatgatctcttcacggaaatggatgaactgtgttacagagatggagaagaatatgaatggaaagaaactgctagatggctgaaatttgaagaggatgttgaagatggcggtgaccgatggagtaaaccttatgtggcaactctctctttgcacagtctttttgaactaaggagttgcatcctcaatggaacagtcatgctggatatgagagcaagcactctagatgaaatagcagatatggtattagacaacatgatagcttctggccaattagacgagtccatacgagagaatgtcagagaagctcttctgaagagacatcatcatcagaatgagaaaagattcaccagtcggattcctcttgttcgatcttttgcagatataggcaagaaacattctgaccctcacttgcttgaaaggaatggggaaggcctttcagcctcccgccactctttgcgaacaggtctgtctgcctcaaacctttccttgagaggagaatcacctttatctcttcttcttggtcatcttcttccttcttcaagagctggaacccctgcaggctcaaggtgtacaaccccagtacccacccctcaaaacagtcctccttctagccctagcatcagccgcctgacctccagaagttcccaagagagtcagcgtcaggccccagaactactggtttcacctgccagtgatgatattcccacagtagtaattcatccgcctgaggaagacttagaagcagcgctgaaaggcgaggagcagaagaatgaggaaaatgttgacttaactccaggtattttggcctctccccagtctgctcctggaaacttggacaatagtaaaagtggagaaattaaaggtaatggaagtggtggaagcagagaaaatagtactgttgacttcagcaaggttgatatgaatttcatgagaaaaattcctacgggtgctgaggcatccaacgtcctggtgggcgaagtagactttttggaaaggccaataattgcatttgtgagactggctcctgctgtcctccttacagggttgactgaggtccctgttccaaccaggtttttgtttttgttattgggtccagcgggcaaggcaccacagtaccatgaaattggacgatcaatagccactctcatgacagatgagattttccatgatgtagcttataaagcaaaagacagaaatgacctcttatctggaattgatgaatttttagatcaagtaactgtcctacctccaggagagtgggatccttctatacgcatagaaccaccaaaaagtgtcccttctcaggaaaagagaaagattcctgtgtttcacaatggatctacccccacactgggtgagactcctaaagaggccgctcatcatgctgggcctgagctacagaggactggacggctttttggtggtttgatacttgacatcaaaaggaaagcaccttttttcttgagtgacttcaaggatgcattaagcctgcagtgcctggcctcgattcttttcctatactgtgcctgtatgtctcctgtaatcacttttggagggctgcttggagaagctacagaaggcagaataagtgcaatagagtctctttttggagcatcattaactgggattgcctattcattgtttgctgggcaacctctaacaatattggggagcacaggtccagttctagtgtttgaaaaaattttatataaattctgcagagattatcaactttcttatctgtctttaagaaccagtattggtctgtggacttcttttttgtgcattgttttggttgcaacagatgcaagcagccttgtgtgttatattactcgatttacagaagaggcttttgcagcccttatttgcatcatattcatctacgaggctttggagaagctctttgatttaggagaaacatatgcatttaatatgcacaacaacttagataaactgaccagctactcatgtgtatgtactgaacctccaaaccccagcaatgaaactctagcacaatggaagaaagataatataacagcacacaatatttcctggagaaatcttactgtttctgaatgtaaaaaacttcgtggtgtattcttggggtcagcttgtggtcatcatggaccttatattccagatgtgctcttttggtgtgtcatcttgtttttcacaacattttttctgtcttcattcctcaagcaatttaagaccaagcgttactttcctaccaaggtgcgatcgacaatcagtgattttgctgtatttctcacaatagtaataatggttacaattgactaccttgtaggagttccatctcctaaacttcatgttcctgaaaaatttgagcctactcatccagagagagggtggatcataagcccactgggagataatccttggtggaccttattaatagctgctattcctgctttgctttgtaccattctcatctttatggatcaacaaatcacagctgtaattataaacagaaaggaacacaaattgaagaaaggagctggctatcaccttgatttgctcatggttggcgttatgttgggagtttgctctgtcatgggacttccatggtttgtggctgcaacagtgttgtcaataagtcatgtcaacagcttaaaagttgaatctgaatgttctgctccaggggaacaacccaagtttttgggaattcgtgaacagcgggttacagggctaatgatttttattctaatgggcctctctgtgttcatgacttcagtcctaaagtttattccaatgcctgttctgtatggtgttttcctttatatgggagtttcctcattaaaaggaatccagttatttgaccgtataaaattatttggaatgcctgctaagcatcagcctgatttgatatacctccgttatgtgccgctctggaaggtccatattttcacagtcattcagcttacttgtttggtccttttatgggtgataaaagtttcagctgctgcagtggtttttcccatgatggttcttgcattagtgtttgtgcgcaaactcatggacctgtgtttcacgaagagagaacttagttggcttgatgatcttatgccagaaagtaagaaaaagaaagaagatgacaaaaagaaaaaagagaaagaggaagctgaacggatgcttcaagatgatgatgatactgtgcaccttccatttgaagggggaagtctcttgcaaattccagtcaaggccctaaaatatagtgttgatccctcaattgttaacatatcagatgaaatggccaaaactgcacagtggaaggcactttccatgaatactgagaatgccaaagtaaccagatctaacatgagtcctgataaacctgtgagtgtgaaaataagttttgaagatgaaccaagaaagaaatacgtggatgctgaaacttcattatagaattgaaccaagaggcattatacatatagatatatacatatgtaatgtgtgcgtatcatgtcactatatataagaatattgtatgtcatgctgtttatgtgtgactaccgggtttttaaaagtagtgtctggagtttgtaatgagcaccgtggagact

SEQ ID NO: 184196 - DNA, 3667 bp, Homo sapiens
  Payload ID: 16279
  Gene Symbol: SLC4A7
  Gene Name: solute carrier family 4, sodium bicarbonate cotransporter, member 7
  Uniprot ID: Q9Y6M7
  ENST ID: ENST00000437179
  CDS Start-End: 222-3509
cctactaaagccagcccagcagtcgcagcgcgcacacgcacgccccgcgtctcccgcgcccggcgcccggctctccccacgcgcgcacacctcgcgcacggacgcacccacgtttgtcctcgcgcgccgggggctcggcggcggcggcaggggcagcggcagaagcaggcagaccgcgcggggcagtaccgtagcggccgtcacgggctggccggccggccatggaggctgatggggccggcgagcagatgagaccgctactcacccggggtcctgatgaagaagctgttgtggatcttggcaaaactagctcaactgtgaacaccaagtttgaaaaagaagaactagaaagtcatagagctgtatatattggtgttcacgtcccgtttagtaaagagagtcgtcggcgtcataggcatcgcggacacaaacatcaccaccggagaagaaaagataaagaatcagataaagaagatggacgggaatctccttcttatgatacaccatcccagagagttcagtttatccttggtactgaagatgatgatgaagaacatattccccatgatctcttcacggaaatggatgaactgtgttacagagatggagaagaatatgaatggaaagaaactgctagatggctgaaatttgaagaggatgttgaagatggcggtgaccgatggagtaaaccttatgtggcaactctctctttgcacagtctttttgaactaaggagttgcatcctcaatggaacagtcatgctggatatgagagcaagcactctagatgaaatagcagatatggtattagacaacatgatagcttctggccaattagacgagtccatacgagagaatgtcagagaagctcttctgaagagacatcatcatcagaatgagaaaagattcaccagtcggattcctcttgttcgatcttttgcagatataggcaagaaacattctgaccctcacttgcttgaaaggaatggtattttggcctctccccagtctgctcctggaaacttggacaatagtaaaagtggagaaattaaaggtaatggaagtggtggaagcagagaaaatagtactgttgacttcagcaaggttgatatgaatttcatgagaaaaattcctacgggtgctgaggcatccaacgtcctggtgggcgaagtagactttttggaaaggccaataattgcatttgtgagactggctcctgctgtcctccttacagggttgactgaggtccctgttccaaccaggtttttgtttttgttattgggtccagcgggcaaggcaccacagtaccatgaaattggacgatcaatagccactctcatgacagatgagattttccatgatgtagcttataaagcaaaagacagaaatgacctcttatctggaattgatgaatttttagatcaagtaactgtcctacctccaggagagtgggatccttctatacgcatagaaccaccaaaaagtgtcccttctcaggaaaagagaaagattcctgtgtttcacaatggatctacccccacactgggtgagactcctaaagaggccgctcatcatgctgggcctgagctacagaggactggacggctttttggtggtttgatacttgacatcaaaaggaaagcaccttttttcttgagtgacttcaaggatgcattaagcctgcagtgcctggcctcgattcttttcctatactgtgcctgtatgtctcctgtaatcacttttggagggctgcttggagaagctacagaaggcagaataagtgcaatagagtctctttttggagcatcattaactgggattgcctattcattgtttgctgggcaacctctaacaatattggggagcacaggtccagttctagtgtttgaaaaaattttatataaattctgcagagattatcaactttcttatctgtctttaagaaccagtattggtctgtggacttcttttttgtgcattgttttggttgcaacagatgcaagcagccttgtgtgttatattactcgatttacagaagaggcttttgcagcccttatttgcatcatattcatctacgaggctttggagaagctctttgatttaggagaaacatatgcatttaatatgcacaacaacttagataaactgaccagctactcatgtgtatgtactgaacctccaaaccccagcaatgaaactctagcacaatggaagaaagataatataacagcacacaatatttcctggagaaatcttactgtttctgaatgtaaaaaacttcgtggtgtattcttggggtcagcttgtggtcatcatggaccttatattccagatgtgctcttttggtgtgtcatcttgtttttcacaacattttttctgtcttcattcctcaagcaatttaagaccaagcgttactttcctaccaaggtgcgatcgacaatcagtgattttgctgtatttctcacaatagtaataatggttacaattgactaccttgtaggagttccatctcctaaacttcatgttcctgaaaaatttgagcctactcatccagagagagggtggatcataagcccactgggagataatccttggtggaccttattaatagctgctattcctgctttgctttgtaccattctcatctttatggatcaacaaatcacagctgtaattataaacagaaaggaacacaaattgaagaaaggagctggctatcaccttgatttgctcatggttggcgttatgttgggagtttgctctgtcatgggacttccatggtttgtggctgcaacagtgttgtcaataagtcatgtcaacagcttaaaagttgaatctgaatgttctgctccaggggaacaacccaagtttttgggaattcgtgaacagcgggttacagggctaatgatttttattctaatgggcctctctgtgttcatgacttcagtcctaaagtttattccaatgcctgttctgtatggtgttttcctttatatgggagtttcctcattaaaaggaatccagttatttgaccgtataaaattatttggaatgcctgctaagcatcagcctgatttgatatacctccgttatgtgccgctctggaaggtccatattttcacagtcattcagcttacttgtttggtccttttatgggtgataaaagtttcagctgctgcagtggtttttcccatgatggttcttgcattagtgtttgtgcgcaaactcatggacctgtgtttcacgaagagagaacttagttggcttgatgatcttatgccagaaagtaagaaaaagaaagaagatgacaaaaagaaaaaagagaaagaggaagctgaacggatgcttcaagatgatgatgatactgtgcaccttccatttgaagggggaagtctcttgcaaattccagtcaaggccctaaaatatagtcctgataaacctgtgagtgtgaaaataagttttgaagatgaaccaagaaagaaatacgtggatgctgaaacttcattatagaattgaaccaagaggcattatacatatagatatatacatatgtaatgtgtgcgtatcatgtcactatatataagaatattgtatgtcatgctgtttatgtgtgactaccgggtttttaaaagtagtgtctggagtttgtaatgagcaccgtggagact

SEQ ID NO: 184197 - DNA, 7970 bp, Homo sapiens
  Payload ID: 16279
  Gene Symbol: SLC4A7
  Gene Name: solute carrier family 4, sodium bicarbonate cotransporter, member 7
  ENST ID: ENST00000425128
  CDS Start-End: 322-3927
gctctcctccttcccgctcggtccgccggttcgctcagttctagcttcaggttccacgccgcggcctcgctctcctactaaagccagcccagcagtcgcagcgcgcacacgcacgccccgcgtctcccgcgcccggcgcccggctctccccacgcgcgcacacctcgcgcacggacgcacccacgtttgtcctcgcgcgccgggggctcggcggcggcggcaggggcagcggcagaagcaggcagaccgcgcggggcagtaccgtagcggccgtcacgggctggccggccggccatggaggctgatggggccggcgagcagatgagaccgctactcacccggggtcctgatgaagaagctgttgtggatcttggcaaaactagctcaactgtgaacaccaagtttgaaaaagaagaactagaaagtcatagagctgtatatattggtgttcacgtcccgtttagtaaagagagtcgtcggcgtcataggcatcgcggacacaaacatcaccaccggagaagaaaagataaagaatcagataaagaagatggacgggaatctccttcttatgatacaccatcccagagagttcagtttatccttggtactgaagatgatgatgaagaacatattccccatgatctcttcacggaaatggatgaactgtgttacagagatggagaagaatatgaatggaaagaaactgctagatggctgaaatttgaagaggatgttgaagatggcggtgaccgatggagtaaaccttatgtggcaactctctctttgcacagtctttttgaactaaggagttgcatcctcaatggaacagtcatgctggatatgagagcaagcactctagatgaaatagcagatatggtattagacaacatgatagcttctggccaattagacgagtccatacgagagaatgtcagagaagctcttctgaagagacatcatcatcagaatgagaaaagattcaccagtcggattcctcttctcgtgaggattacagtgaggactagggaaggcctttcagcctcccgccactctttgcgaacaggtctgtctgcctcaaacctttccttgagaggagaatcacctttatctcttcttcttggtcatcttcttccttcttcaagagctggaacccctgcaggctcaaggtgtacaaccccagtacccacccctcaaaacagtcctccttctagccctagcatcagccgcctgacctccagaagttcccaagagagtcagcgtcaggccccagaactactggtttcacctgccagtgatgatattcccacagtagtaattcatccgcctgaggaagacttagaagcagcgctgaaaggcgaggagcagaagaatgaggaaaatagcagggatttgaactcaggtattttggcctctccccagtctgctcctggaaacttggacaatagtaaaagtggagaaattaaaggtaatggaagtggtggaagcagagaaaatagtactgttgacttcagcaaggttgatatgaatttcatgagaaaaattcctacgggtgctgaggcatccaacgtcctggtgggcgaagtagactttttggaaaggccaataattgcatttgtgagactggctcctgctgtcctccttacagggttgactgaggtccctgttccaaccaggtttttgtttttgttattgggtccagcgggcaaggcaccacagtaccatgaaattggacgatcaatagccactctcatgacagatgagattttccatgatgtagcttataaagcaaaagacagaaatgacctcttatctggaattgatgaatttttagatcaagtaactgtcctacctccaggagagtgggatccttctatacgcatagaaccaccaaaaagtgtcccttctcaggaaaagagaaagattcctgtgtttcacaatggatctacccccacactgggtgagactcctaaagaggccgctcatcatgctgggcctgagctacagaggactggacggctttttggtggtttgatacttgacatcaaaaggaaagcaccttttttcttgagtgacttcaaggatgcattaagcctgcagtgcctggcctcgattcttttcctatactgtgcctgtatgtctcctgtaatcacttttggagggctgcttggagaagctacagaaggcagaataagtgcaatagagtctctttttggagcatcattaactgggattgcctattcattgtttgctgggcaacctctaacaatattggggagcacaggtccagttctagtgtttgaaaaaattttatataaattctgcagagattatcaactttcttatctgtctttaagaaccagtattggtctgtggacttcttttttgtgcattgttttggttgcaacagatgcaagcagccttgtgtgttatattactcgatttacagaagaggcttttgcagcccttatttgcatcatattcatctacgaggctttggagaagctctttgatttaggagaaacatatgcatttaatatgcacaacaacttagataaactgaccagctactcatgtgtatgtactgaacctccaaaccccagcaatgaaactctagcacaatggaagaaagataatataacagcacacaatatttcctggagaaatcttactgtttctgaatgtaaaaaacttcgtggtgtattcttggggtcagcttgtggtcatcatggaccttatattccagatgtgctcttttggtgtgtcatcttgtttttcacaacattttttctgtcttcattcctcaagcaatttaagaccaagcgttactttcctaccaaggtgcgatcgacaatcagtgattttgctgtatttctcacaatagtaataatggttacaattgactaccttgtaggagttccatctcctaaacttcatgttcctgaaaaatttgagcctactcatccagagagagggtggatcataagcccactgggagataatccttggtggaccttattaatagctgctattcctgctttgctttgtaccattctcatctttatggatcaacaaatcacagctgtaattataaacagaaaggaacacaaattgaagaaaggagctggctatcaccttgatttgctcatggttggcgttatgttgggagtttgctctgtcatgggacttccatggtttgtggctgcaacagtgttgtcaataagtcatgtcaacagcttaaaagttgaatctgaatgttctgctccaggggaacaacccaagtttttgggaattcgtgaacagcgggttacagggctaatgatttttattctaatgggcctctctgtgttcatgacttcagtcctaaagtttattccaatgcctgttctgtatggtgttttcctttatatgggagtttcctcattaaaaggaatccaggcaatgttatttgaccgtataaaattatttggaatgcctgctaagcatcagcctgatttgatatacctccgttatgtgccgctctggaaggtccatattttcacagtcattcagcttacttgtttggtccttttatgggtgataaaagtttcagctgctgcagtggtttttcccatgatggttcttgcattagtgtttgtgcgcaaactcatggacctgtgtttcacgaagagagaacttagttggcttgatgatcttatgccagaaagtaagaaaaagaaagaagatgacaaaaagaaaaaagagaaagaggaagctgaacggatgcttcaagatgatgatgatactgtgcaccttccatttgaagggggaagtctcttgcaaattccagtcaaggccctaaaatatagtcctgataaacctgtgagtgtgaaaataagttttgaagatgaaccaagaaagaaatacgtggatgctgaaacttcattatagaattgaaccaagaggcattatacatatagatatatacatatgtaatgtgtgcgtatcatgtcactatatataagaatattgtatgtcatgctgtttatgtgtgactaccgggtttttaaaagtagtgtctggagtttgtaatgagcaccgtggagactatgtatttaatgaaatgctctctttgaagtgaggtacatggttcttaactattcaaatatttattctgttagaaaaaaaaattttctgttttgcaatagaaggatgtggagaaatgctttcagtctacttttcttaaatctctgttcatcagtggcaattcgtaaaaaccttaagtgatactttgtttatatgtttataatttttaggtgtttcctgaaattttcacatattatttcacttttgttagtgctttatgggaagaatagggagtctataccagtgctgtgggaaaaatggtaacatttcagggcttctctatttgtgtttcatttctgtagatgtccatcgtgtttcactaactggcgttttcttagccatagagatgactgtagaacaatagaaactttaataatgatagtttttaacttttatgtttaaattttttttaaatcttaaaaccttcatatctaggtatccattgtgacagacaagtaaaattgcaggtgatttgataattaagcacccataccatttataacttctgaatttaaaaagttatacaatgccagtttgcaatagttgattttgatgcctttgtagaatattttttctgaatccttatgctcttttaaagccaatgattcccactctgttctctgccttgtctctctttgtcttaaaatgctttagtttccatcaggttcaagttcttgactattattctcttataagtagtaggcgtaaataatcaggagttagaattctctcagaagggtctatgatcagtattactttattaagaattacctttcattttctctttatgttattctttcacttttgtagattacatttaatagcttgttacctgtgattttattttaaaatatttattttgatatgatgcttaaatattatataaacatttggaaaagtaacaaatagagtaaattgttaatgtaaatagttggtgcttactttcatttatgtttattatcttaaagcaattgatagattttacatctttgatataaagcactgccatatttatattttaaaaggaaattagacattttatatgtagctcagattaatgacatttttattttgtgtattagtttttgcttttctgagctttttaaagtctaacaaatctttttagtcatcttttatatacttttagttccacatgaaataaatgttgttaagcctgtaggactggatgaatggggttgtgaaactgatttgacaagagaataatttacaaaaatcaaatgagtattgagaagccacagaaatatcaaaaatggtgacatcactattaggatgaaaattttatgaaattccaatgctccctttaaccatataattaaattacaaaggtatacataattaatctaataaaggatcatgaggaatgccaaaagctgaaattttagcaagtctggtgttttaaattcattataaactatttattaactaatgtaatgtcctcctctaagaccatattgtaagagtcttgttaaaatgatggattcaacttctgcctcggatgagaggttggaaatgtagctgcttttctttagaaaatatgtagctgtcatcatttggtactgcctaaaaagagttagactctattggcaattgatagagtattacccacggtgcttattattgtttatgagcttccattgtaatgattcctttttatttgtagcagcataattatttccaaagaccccagtatttgctgctatttttaaaactcccctgatgtacctgaacaagaggatttcctcacatcatttccttgtgtctggacatcaggggtaacaactgtacttactttacaggaagaaattttaaaactgaaaactacctgggatcatagtgtttctgtgattttatttaattgtgtatagtaattatccagtgccagaaaaaccgtcacttgcaaaatactttgcactcaaaatgtttttacaatgcttctaaatgttactggtttctgctttcttttgactacttgactgacaaaatgatctgactactccatttaagagcaaaggtaactcatgtttaggtaattaactgcttgttttaagtgattatatttcttccactgtttttgaaaaataatcaaagatagcattcattgagagacagtgacagatataatttactacatatattgatttttaaataaagttgccttaaataagtgtatgtaagcagtagtagttgctatgtactgatttacctcaaggtgcaaaataattaaacctgtacatattccatttacaaaataaattcagccctgcactttctttagatgccttgatttccagaatggagcttagtgctactgaataccctggccacagagccacctcaggatattcttttctccaccctagtttatttatttatagatatctgtttacaaagtctgtagtaaatcctgatgctgaccatctgaaatgtactttttttctgaatgctgtttcaatctaaaatagcagcttttgagaaaacaatgatgtaaattccttatgataaaaggatgattctatatattctttaatgatattaaatatgccgaagccaagcacacagtctttctaaagtgtgtgtatgtttgtgtgaatgtgaatgatactgatcttatatctgttaaaagttgttttaaaaagctgtggcatcccattgttcatatttgccaagtcttctgtaaagatgtctaggacgaaatattttatgtgctaatgcatgtatttgtaaaccagatttgtttaccactcaaaattaacttgttttcttcatccaaaaaagtttatttcttccacgtacttaaattttctgtgtgggtataatatagctttctaatttttttctttcacaaaggcaggttcaaaattctgttgaaagaaaaatgctttctgaaactgaggtataacaccagagcttgctgtttaaaggattatatgatgtacatcagttctataaatgtgctcagcagtttaacatgtgaatcctgttttaaagtgctcagatttcaactgtgtaagccattgatataacgctgtaattaaaaatgtttatatgaaataacttaatgttttaaatttatttatgtagatcacatcatttttatcgtatgcagtgcaaatatgtgaaatgtcttttggtttattccaacaattatttattttagaaagtaagtttaaagactttaaggacattcaaagtttaaaatagtgttcaaattgcaaaatttggcaatcttcatataaattggtttcttttctaacttttcaaaaactaacattaaatgtcaattataggaaaacatagttggaaatgtaatcatccaaagatcatttttaaaatgaaatttaattagcacatattgaacatttgacttaattgttaaaccccagttttgttttgtttttttaatcagatttttgcacactgattagtttttgtgttgtggcttttgttgctttattattcaaggttttttttttttttcttccccatgggggagattgtcttccaatgtttaactacgtttaaataaataaaaattgaattttattgttcatttatataaaatctgataccttgatgtaatttcacaatacagttccaatttttatggcttttataattacaatgatattttcttctataataaaatccaaagtaaacatttaaattgtagaactgatatttttcatttatatgaagtataagcctctactgggtctatattgtgaatcatcctgcctttcaaatttgtttcataattgttagatgaaaactatttttttggagatgttactgaagttgattgagcaataaaagtctacttaattagt

SEQ ID NO: 184198 - DNA, 4000 bp, Homo sapiens
  Payload ID: 16279
  Gene Symbol: SLC4A7
  Gene Name: solute carrier family 4, sodium bicarbonate cotransporter, member 7
  Uniprot ID: Q9Y6M7
  ENST ID: ENST00000446700
  CDS Start-End: 222-3842
cctactaaagccagcccagcagtcgcagcgcgcacacgcacgccccgcgtctcccgcgcccggcgcccggctctccccacgcgcgcacacctcgcgcacggacgcacccacgtttgtcctcgcgcgccgggggctcggcggcggcggcaggggcagcggcagaagcaggcagaccgcgcggggcagtaccgtagcggccgtcacgggctggccggccggccatggaggctgatggggccggcgagcagatgagaccgctactcacccggggtcctgatgaagaagctgttgtggatcttggcaaaactagctcaactgtgaacaccaagtttgaaaaagaagaactagaaagtcatagagctgtatatattggtgttcacgtcccgtttagtaaagagagtcgtcggcgtcataggcatcgcggacacaaacatcaccaccggagaagaaaagataaagaatcagataaagaagatggacgggaatctccttcttatgatacaccatcccagagagttcagtttatccttggtactgaagatgatgatgaagaacatattccccatgatctcttcacggaaatggatgaactgtgttacagagatggagaagaatatgaatggaaagaaactgctagatggctgaaatttgaagaggatgttgaagatggcggtgaccgatggagtaaaccttatgtggcaactctctctttgcacagtctttttgaactaaggagttgcatcctcaatggaacagtcatgctggatatgagagcaagcactctagatgaaatagcagatatggtattagacaacatgatagcttctggccaattagacgagtccatacgagagaatgtcagagaagctcttctgaagagacatcatcatcagaatgagaaaagattcaccagtcggattcctcttgttcgatcttttgcagatataggggaaggcctttcagcctcccgccactctttgcgaacaggtctgtctgcctcaaacctttccttgagaggagaatcacctttatctcttcttcttggtcatcttcttccttcttcaagagctggaacccctgcaggctcaaggtgtacaaccccagtacccacccctcaaaacagtcctccttctagccctagcatcagccgcctgacctccagaagttcccaagagagtcagcgtcaggccccagaactactggtttcacctgccagtgatgatattcccacagtagtaattcatccgcctgaggaagacttagaagcagcgctgaaaggcgaggagcagaagaatgaggaaaatgttgacttaactccaggtattttggcctctccccagtctgctcctggaaacttggacaatagtaaaagtggagaaattaaaggtaatggaagtggtggaagcagagaaaatagtactgttgacttcagcaaggttgatatgaatttcatgagaaaaattcctacgggtgctgaggcatccaacgtcctggtgggcgaagtagactttttggaaaggccaataattgcatttgtgagactggctcctgctgtcctccttacagggttgactgaggtccctgttccaaccaggtttttgtttttgttattgggtccagcgggcaaggcaccacagtaccatgaaattggacgatcaatagccactctcatgacagatgagattttccatgatgtagcttataaagcaaaagacagaaatgacctcttatctggaattgatgaatttttagatcaagtaactgtcctacctccaggagagtgggatccttctatacgcatagaaccaccaaaaagtgtcccttctcaggaaaagagaaagattcctgtgtttcacaatggatctacccccacactgggtgagactcctaaagaggccgctcatcatgctgggcctgagctacagaggactggacggctttttggtggtttgatacttgacatcaaaaggaaagcaccttttttcttgagtgacttcaaggatgcattaagcctgcagtgcctggcctcgattcttttcctatactgtgcctgtatgtctcctgtaatcacttttggagggctgcttggagaagctacagaaggcagaataagtgcaatagagtctctttttggagcatcattaactgggattgcctattcattgtttgctgggcaacctctaacaatattggggagcacaggtccagttctagtgtttgaaaaaattttatataaattctgcagagattatcaactttcttatctgtctttaagaaccagtattggtctgtggacttcttttttgtgcattgttttggttgcaacagatgcaagcagccttgtgtgttatattactcgatttacagaagaggcttttgcagcccttatttgcatcatattcatctacgaggctttggagaagctctttgatttaggagaaacatatgcatttaatatgcacaacaacttagataaactgaccagctactcatgtgtatgtactgaacctccaaaccccagcaatgaaactctagcacaatggaagaaagataatataacagcacacaatatttcctggagaaatcttactgtttctgaatgtaaaaaacttcgtggtgtattcttggggtcagcttgtggtcatcatggaccttatattccagatgtgctcttttggtgtgtcatcttgtttttcacaacattttttctgtcttcattcctcaagcaatttaagaccaagcgttactttcctaccaaggtgcgatcgacaatcagtgattttgctgtatttctcacaatagtaataatggttacaattgactaccttgtaggagttccatctcctaaacttcatgttcctgaaaaatttgagcctactcatccagagagagggtggatcataagcccactgggagataatccttggtggaccttattaatagctgctattcctgctttgctttgtaccattctcatctttatggatcaacaaatcacagctgtaattataaacagaaaggaacacaaattgaagaaaggagctggctatcaccttgatttgctcatggttggcgttatgttgggagtttgctctgtcatgggacttccatggtttgtggctgcaacagtgttgtcaataagtcatgtcaacagcttaaaagttgaatctgaatgttctgctccaggggaacaacccaagtttttgggaattcgtgaacagcgggttacagggctaatgatttttattctaatgggcctctctgtgttcatgacttcagtcctaaagtttattccaatgcctgttctgtatggtgttttcctttatatgggagtttcctcattaaaaggaatccagttatttgaccgtataaaattatttggaatgcctgctaagcatcagcctgatttgatatacctccgttatgtgccgctctggaaggtccatattttcacagtcattcagcttacttgtttggtccttttatgggtgataaaagtttcagctgctgcagtggtttttcccatgatggttcttgcattagtgtttgtgcgcaaactcatggacctgtgtttcacgaagagagaacttagttggcttgatgatcttatgccagaaagtaagaaaaagaaagaagatgacaaaaagaaaaaagagaaagaggaagctgaacggatgcttcaagatgatgatgatactgtgcaccttccatttgaagggggaagtctcttgcaaattccagtcaaggccctaaaatatagtcctgataaacctgtgagtgtgaaaataagttttgaagatgaaccaagaaagaaatacgtggatgctgaaacttcattatagaattgaaccaagaggcattatacatatagatatatacatatgtaatgtgtgcgtatcatgtcactatatataagaatattgtatgtcatgctgtttatgtgtgactaccgggtttttaaaagtagtgtctggagtttgtaatgagcaccgtggagact

SEQ ID NO: 184199 - DNA, 4061 bp, Homo sapiens
  Payload ID: 16279
  Gene Symbol: SLC4A7
  Gene Name: solute carrier family 4, sodium bicarbonate cotransporter, member 7
  ENST ID: ENST00000445684
  CDS Start-End: 271-3903
gccggttcgctcagttctagcttcaggttccacgccgcggcctcgctctcctactaaagccagcccagcagtcgcagcgcgcacacgcacgccccgcgtctcccgcgcccggcgcccggctctccccacgcgcgcacacctcgcgcacggacgcacccacgtttgtcctcgcgcgccgggggctcggcggcggcggcaggggcagcggcagaagcaggcagaccgcgcggggcagtaccgtagcggccgtcacgggctggccggccggccatggaggctgatggggccggcgagcagatgagaccgctactcacccgggtaacgagcaggggtcctgatgaagaagctgttgtggatcttggcaaaactagctcaactgtgaacaccaagtttgaaaaagaagaactagaaagtcatagagctgtatatattggtgttcacgtcccgtttagtaaagagagtcgtcggcgtcataggcatcgcggacacaaacatcaccaccggagaagaaaagataaagaatcagataaagaagatggacgggaatctccttcttatgatacaccatcccagagagttcagtttatccttggtactgaagatgatgatgaagaacatattccccatgatctcttcacggaaatggatgaactgtgttacagagatggagaagaatatgaatggaaagaaactgctagatggctgaaatttgaagaggatgttgaagatggcggtgaccgatggagtaaaccttatgtggcaactctctctttgcacagtctttttgaactaaggagttgcatcctcaatggaacagtcatgctggatatgagagcaagcactctagatgaaatagcagatatggtattagacaacatgatagcttctggccaattagacgagtccatacgagagaatgtcagagaagctcttctgaagagacatcatcatcagaatgagaaaagattcaccagtcggattcctcttgttcgatcttttgcagatataggggaaggcctttcagcctcccgccactctttgcgaacaggtctgtctgcctcaaacctttccttgagaggagaatcacctttatctcttcttcttggtcatcttcttccttcttcaagagctggaacccctgcaggctcaaggtgtacaaccccagtacccacccctcaaaacagtcctccttctagccctagcatcagccgcctgacctccagaagttcccaagagagtcagcgtcaggccccagaactactggtttcacctgccagtgatgatattcccacagtagtaattcatccgcctgaggaagacttagaagcagcgctgaaaggcgaggagcagaagaatgaggaaaatgttgacttaactccaggtattttggcctctccccagtctgctcctggaaacttggacaatagtaaaagtggagaaattaaaggtaatggaagtggtggaagcagagaaaatagtactgttgacttcagcaaggttgatatgaatttcatgagaaaaattcctacgggtgctgaggcatccaacgtcctggtgggcgaagtagactttttggaaaggccaataattgcatttgtgagactggctcctgctgtcctccttacagggttgactgaggtccctgttccaaccaggtttttgtttttgttattgggtccagcgggcaaggcaccacagtaccatgaaattggacgatcaatagccactctcatgacagatgagattttccatgatgtagcttataaagcaaaagacagaaatgacctcttatctggaattgatgaatttttagatcaagtaactgtcctacctccaggagagtgggatccttctatacgcatagaaccaccaaaaagtgtcccttctcaggaaaagagaaagattcctgtgtttcacaatggatctacccccacactgggtgagactcctaaagaggccgctcatcatgctgggcctgagctacagaggactggacggctttttggtggtttgatacttgacatcaaaaggaaagcaccttttttcttgagtgacttcaaggatgcattaagcctgcagtgcctggcctcgattcttttcctatactgtgcctgtatgtctcctgtaatcacttttggagggctgcttggagaagctacagaaggcagaataagtgcaatagagtctctttttggagcatcattaactgggattgcctattcattgtttgctgggcaacctctaacaatattggggagcacaggtccagttctagtgtttgaaaaaattttatataaattctgcagagattatcaactttcttatctgtctttaagaaccagtattggtctgtggacttcttttttgtgcattgttttggttgcaacagatgcaagcagccttgtgtgttatattactcgatttacagaagaggcttttgcagcccttatttgcatcatattcatctacgaggctttggagaagctctttgatttaggagaaacatatgcatttaatatgcacaacaacttagataaactgaccagctactcatgtgtatgtactgaacctccaaaccccagcaatgaaactctagcacaatggaagaaagataatataacagcacacaatatttcctggagaaatcttactgtttctgaatgtaaaaaacttcgtggtgtattcttggggtcagcttgtggtcatcatggaccttatattccagatgtgctcttttggtgtgtcatcttgtttttcacaacattttttctgtcttcattcctcaagcaatttaagaccaagcgttactttcctaccaaggtgcgatcgacaatcagtgattttgctgtatttctcacaatagtaataatggttacaattgactaccttgtaggagttccatctcctaaacttcatgttcctgaaaaatttgagcctactcatccagagagagggtggatcataagcccactgggagataatccttggtggaccttattaatagctgctattcctgctttgctttgtaccattctcatctttatggatcaacaaatcacagctgtaattataaacagaaaggaacacaaattgaagaaaggagctggctatcaccttgatttgctcatggttggcgttatgttgggagtttgctctgtcatgggacttccatggtttgtggctgcaacagtgttgtcaataagtcatgtcaacagcttaaaagttgaatctgaatgttctgctccaggggaacaacccaagtttttgggaattcgtgaacagcgggttacagggctaatgatttttattctaatgggcctctctgtgttcatgacttcagtcctaaagtttattccaatgcctgttctgtatggtgttttcctttatatgggagtttcctcattaaaaggaatccagttatttgaccgtataaaattatttggaatgcctgctaagcatcagcctgatttgatatacctccgttatgtgccgctctggaaggtccatattttcacagtcattcagcttacttgtttggtccttttatgggtgataaaagtttcagctgctgcagtggtttttcccatgatggttcttgcattagtgtttgtgcgcaaactcatggacctgtgtttcacgaagagagaacttagttggcttgatgatcttatgccagaaagtaagaaaaagaaagaagatgacaaaaagaaaaaagagaaagaggaagctgaacggatgcttcaagatgatgatgatactgtgcaccttccatttgaagggggaagtctcttgcaaattccagtcaaggccctaaaatatagtcctgataaacctgtgagtgtgaaaataagttttgaagatgaaccaagaaagaaatacgtggatgctgaaacttcattatagaattgaaccaagaggcattatacatatagatatatacatatgtaatgtgtgcgtatcatgtcactatatataagaatattgtatgtcatgctgtttatgtgtgactaccgggtttttaaaagtagtgtctggagtttgtaatgagcaccgtggagact

SEQ ID NO: 184200 - DNA, 3825 bp, Homo sapiens
  Payload ID: 16279
  Gene Symbol: SLC4A7
  Gene Name: solute carrier family 4, sodium bicarbonate cotransporter, member 7
  Uniprot ID: Q9Y6M7
  ENST ID: ENST00000438530
  CDS Start-End: 222-1946
cctactaaagccagcccagcagtcgcagcgcgcacacgcacgccccgcgtctcccgcgcccggcgcccggctctccccacgcgcgcacacctcgcgcacggacgcacccacgtttgtcctcgcgcgccgggggctcggcggcggcggcaggggcagcggcagaagcaggcagaccgcgcggggcagtaccgtagcggccgtcacgggctggccggccggccatggaggctgatggggccggcgagcagatgagaccgctactcacccggggtcctgatgaagaagctgttgtggatcttggcaaaactagctcaactgtgaacaccaagtttgaaaaagaagaactagaaagtcatagagctgtatatattggtgttcacgtcccgtttagtaaagagagtcgtcggcgtcataggcatcgcggacacaaacatcaccaccggagaagaaaagataaagaatcagataaagaagatggacgggaatctccttcttatgatacaccatcccagagagttcagtttatccttggtactgaagatgatgatgaagaacatattccccatgatctcttcacggaaatggatgaactgtgttacagagatggagaagaatatgaatggaaagaaactgctagatggctgaaatttgaagaggatgttgaagatggcggtgaccgatggagtaaaccttatgtggcaactctctctttgcacagtctttttgaactaaggagttgcatcctcaatggaacagtcatgctggatatgagagcaagcactctagatgaaatagcagatatggtattagacaacatgatagcttctggccaattagacgagtccatacgagagaatgtcagagaagctcttctgaagagacatcatcatcagaatgagaaaagattcaccagtcggattcctcttgttcgatcttttgcagatataggggaaggcctttcagcctcccgccactctttgcgaacaggtctgtctgcctcaaacctttccttgagaggagaatcacctttatctcttcttcttggtcatcttcttccttcttcaagagctggaacccctgcaggctcaaggtgtacaaccccagtacccacccctcaaaacagtcctccttctagccctagcatcagccgcctgacctccagaagttcccaagagagtcagcgtcaggccccagaactactggtttcacctgccagtgatgatattcccacagtagtaattcatccgcctgaggaagacttagaagcagcgctgaaaggcgaggagcagaagaatgaggaaaatgttgacttaactccaggtattttggcctctccccagtctgctcctggaaacttggacaatagtaaaagtggagaaattaaaggtaatggaagtggtggaagcagagaaaatagtactgttgacttcagcaaggttgatatgaatttcatgagaaaaattcctacgggtgctgaggcatccaacgtcctggtgggcgaagtagactttttggaaaggccaataattgcatttgtgagactggctcctgctgtcctccttacagggttgactgaggtccctgttccaaccaggtttttgtttttgttattgggtccagcgggcaaggcaccacagtaccatgaaattggacgatcaatagccactctcatgacagatgagattttccatgatgtagcttataaagcaaaagacagaaatgacctcttatctggaattgatgaatttttagatcaagtaactgtcctacctccaggagagtgggatccttctatacgcatagaaccaccaaaaagtgtcccttctcaggaaaagagaaagattcctgtgtttcacaatggatctacccccacactgggtgagactcctaaagaggccgctcatcatgctgggcctgagctacagaggactggacgagtgcaatagagtctctttttggagcatcattaactgggattgcctattcattgtttgctgggcaacctctaacaatattggggagcacaggtccagttctagtgtttgaaaaaattttatataaattctgcagagattatcaactttcttatctgtctttaagaaccagtattggtctgtggacttcttttttgtgcattgttttggttgcaacagatgcaagcagccttgtgtgttatattactcgatttacagaagaggcttttgcagcccttatttgcatcatattcatctacgaggctttggagaagctctttgatttaggagaaacatatgcatttaatatgcacaacaacttagataaactgaccagctactcatgtgtatgtactgaacctccaaaccccagcaatgaaactctagcacaatggaagaaagataatataacagcacacaatatttcctggagaaatcttactgtttctgaatgtaaaaaacttcgtggtgtattcttggggtcagcttgtggtcatcatggaccttatattccagatgtgctcttttggtgtgtcatcttgtttttcacaacattttttctgtcttcattcctcaagcaatttaagaccaagcgttactttcctaccaaggtgcgatcgacaatcagtgattttgctgtatttctcacaatagtaataatggttacaattgactaccttgtaggagttccatctcctaaacttcatgttcctgaaaaatttgagcctactcatccagagagagggtggatcataagcccactgggagataatccttggtggaccttattaatagctgctattcctgctttgctttgtaccattctcatctttatggatcaacaaatcacagctgtaattataaacagaaaggaacacaaattgaagaaaggagctggctatcaccttgatttgctcatggttggcgttatgttgggagtttgctctgtcatgggacttccatggtttgtggctgcaacagtgttgtcaataagtcatgtcaacagcttaaaagttgaatctgaatgttctgctccaggggaacaacccaagtttttgggaattcgtgaacagcgggttacagggctaatgatttttattctaatgggcctctctgtgttcatgacttcagtcctaaagtttattccaatgcctgttctgtatggtgttttcctttatatgggagtttcctcattaaaaggaatccagttatttgaccgtataaaattatttggaatgcctgctaagcatcagcctgatttgatatacctccgttatgtgccgctctggaaggtccatattttcacagtcattcagcttacttgtttggtccttttatgggtgataaaagtttcagctgctgcagtggtttttcccatgatggttcttgcattagtgtttgtgcgcaaactcatggacctgtgtttcacgaagagagaacttagttggcttgatgatcttatgccagaaagtaagaaaaagaaagaagatgacaaaaagaaaaaagagaaagaggaagctgaacggatgcttcaagatgatgatgatactgtgcaccttccatttgaagggggaagtctcttgcaaattccagtcaaggccctaaaatatagtcctgataaacctgtgagtgtgaaaataagttttgaagatgaaccaagaaagaaatacgtggatgctgaaacttcattatagaattgaaccaagaggcattatacatatagatatatacatatgtaatgtgtgcgtatcatgtcactatatataagaatattgtatgtcatgctgtttatgtgtgactaccgggtttttaaaagtagtgtctggagtttgtaatgagcaccgtggagact

SEQ ID NO: 184201 - DNA, 3775 bp, Homo sapiens
  Payload ID: 16279
  Gene Symbol: SLC4A7
  Gene Name: solute carrier family 4, sodium bicarbonate cotransporter, member 7
  Uniprot ID: Q9Y6M7
  ENST ID: ENST00000455077
  CDS Start-End: 222-3617
cctactaaagccagcccagcagtcgcagcgcgcacacgcacgccccgcgtctcccgcgcccggcgcccggctctccccacgcgcgcacacctcgcgcacggacgcacccacgtttgtcctcgcgcgccgggggctcggcggcggcggcaggggcagcggcagaagcaggcagaccgcgcggggcagtaccgtagcggccgtcacgggctggccggccggccatggaggctgatggggccggcgagcagatgagaccgctactcacccggggtcctgatgaagaagctgttgtggatcttggcaaaactagctcaactgtgaacaccaagtttgaaaaagaagaactagaaagtcatagagctgtatatattggtgttcacgtcccgtttagtaaagagagtcgtcggcgtcataggcatcgcggacacaaacatcaccaccggagaagaaaagataaagaatcagataaagaagatggacgggaatctccttcttatgatacaccatcccagagagttcagtttatccttggtactgaagatgatgatgaagaacatattccccatgatctcttcacggaaatggatgaactgtgttacagagatggagaagaatatgaatggaaagaaactgctagatggctgaaatttgaagaggatgttgaagatggcggtgaccgatggagtaaaccttatgtggcaactctctctttgcacagtctttttgaactaaggagttgcatcctcaatggaacagtcatgctggatatgagagcaagcactctagatgaaatagcagatatggtattagacaacatgatagcttctggccaattagacgagtccatacgagagaatgtcagagaagctcttctgaagagacatcatcatcagaatgagaaaagattcaccagtcggattcctcttgttcgatcttttgcagatataggcaagaaacattctgaccctcacttgcttgaaaggaatggtattttggcctctccccagtctgctcctggaaacttggacaatagtaaaagtggagaaattaaaggtaatggaagtggtggaagcagagaaaatagtactgttgacttcagcaaggttgatatgaatttcatgagaaaaattcctacgggtgctgaggcatccaacgtcctggtgggcgaagtagactttttggaaaggccaataattgcatttgtgagactggctcctgctgtcctccttacagggttgactgaggtccctgttccaaccaggtttttgtttttgttattgggtccagcgggcaaggcaccacagtaccatgaaattggacgatcaatagccactctcatgacagatgagattttccatgatgtagcttataaagcaaaagacagaaatgacctcttatctggaattgatgaatttttagatcaagtaactgtcctacctccaggagagtgggatccttctatacgcatagaaccaccaaaaagtgtcccttctcaggaaaagagaaagattcctgtgtttcacaatggatctacccccacactgggtgagactcctaaagaggccgctcatcatgctgggcctgagctacagaggactggacggctttttggtggtttgatacttgacatcaaaaggaaagcaccttttttcttgagtgacttcaaggatgcattaagcctgcagtgcctggcctcgattcttttcctatactgtgcctgtatgtctcctgtaatcacttttggagggctgcttggagaagctacagaaggcagaataagtgcaatagagtctctttttggagcatcattaactgggattgcctattcattgtttgctgggcaacctctaacaatattggggagcacaggtccagttctagtgtttgaaaaaattttatataaattctgcagagattatcaactttcttatctgtctttaagaaccagtattggtctgtggacttcttttttgtgcattgttttggttgcaacagatgcaagcagccttgtgtgttatattactcgatttacagaagaggcttttgcagcccttatttgcatcatattcatctacgaggctttggagaagctctttgatttaggagaaacatatgcatttaatatgcacaacaacttagataaactgaccagctactcatgtgtatgtactgaacctccaaaccccagcaatgaaactctagcacaatggaagaaagataatataacagcacacaatatttcctggagaaatcttactgtttctgaatgtaaaaaacttcgtggtgtattcttggggtcagcttgtggtcatcatggaccttatattccagatgtgctcttttggtgtgtcatcttgtttttcacaacattttttctgtcttcattcctcaagcaatttaagaccaagcgttactttcctaccaaggtgcgatcgacaatcagtgattttgctgtatttctcacaatagtaataatggttacaattgactaccttgtaggagttccatctcctaaacttcatgttcctgaaaaatttgagcctactcatccagagagagggtggatcataagcccactgggagataatccttggtggaccttattaatagctgctattcctgctttgctttgtaccattctcatctttatggatcaacaaatcacagctgtaattataaacagaaaggaacacaaattgaagaaaggagctggctatcaccttgatttgctcatggttggcgttatgttgggagtttgctctgtcatgggacttccatggtttgtggctgcaacagtgttgtcaataagtcatgtcaacagcttaaaagttgaatctgaatgttctgctccaggggaacaacccaagtttttgggaattcgtgaacagcgggttacagggctaatgatttttattctaatgggcctctctgtgttcatgacttcagtcctaaagtttattccaatgcctgttctgtatggtgttttcctttatatgggagtttcctcattaaaaggaatccagttatttgaccgtataaaattatttggaatgcctgctaagcatcagcctgatttgatatacctccgttatgtgccgctctggaaggtccatattttcacagtcattcagcttacttgtttggtccttttatgggtgataaaagtttcagctgctgcagtggtttttcccatgatggttcttgcattagtgtttgtgcgcaaactcatggacctgtgtttcacgaagagagaacttagttggcttgatgatcttatgccagaaagtaagaaaaagaaagaagatgacaaaaagaaaaaagagaaagaggaagctgaacggatgcttcaagatgatgatgatactgtgcaccttccatttgaagggggaagtctcttgcaaattccagtcaaggccctaaaatatagtgttgatccctcaattgttaacatatcagatgaaatggccaaaactgcacagtggaaggcactttccatgaatactgagaatgccaaagtaaccagatctaacatgagtcctgataaacctgtgagtgtgaaaataagttttgaagatgaaccaagaaagaaatacgtggatgctgaaacttcattatagaattgaaccaagaggcattatacatatagatatatacatatgtaatgtgtgcgtatcatgtcactatatataagaatattgtatgtcatgctgtttatgtgtgactaccgggtttttaaaagtagtgtctggagtttgtaatgagcaccgtggagact

SEQ ID NO: 184202 - DNA, 3600 bp, Homo sapiens
  Payload ID: 16279
  Gene Symbol: SLC4A7
  Gene Name: solute carrier family 4, sodium bicarbonate cotransporter, member 7
  Uniprot ID: Q9Y6M7
  ENST ID: ENST00000457377
  CDS Start-End: 222-1613
cctactaaagccagcccagcagtcgcagcgcgcacacgcacgccccgcgtctcccgcgcccggcgcccggctctccccacgcgcgcacacctcgcgcacggacgcacccacgtttgtcctcgcgcgccgggggctcggcggcggcggcaggggcagcggcagaagcaggcagaccgcgcggggcagtaccgtagcggccgtcacgggctggccggccggccatggaggctgatggggccggcgagcagatgagaccgctactcacccggggtcctgatgaagaagctgttgtggatcttggcaaaactagctcaactgtgaacaccaagtttgaaaaagaagaactagaaagtcatagagctgtatatattggtgttcacgtcccgtttagtaaagagagtcgtcggcgtcataggcatcgcggacacaaacatcaccaccggagaagaaaagataaagaatcagataaagaagatggacgggaatctccttcttatgatacaccatcccagagagttcagtttatccttggtactgaagatgatgatgaagaacatattccccatgatctcttcacggaaatggatgaactgtgttacagagatggagaagaatatgaatggaaagaaactgctagatggctgaaatttgaagaggatgttgaagatggcggtgaccgatggagtaaaccttatgtggcaactctctctttgcacagtctttttgaactaaggagttgcatcctcaatggaacagtcatgctggatatgagagcaagcactctagatgaaatagcagatatggtattagacaacatgatagcttctggccaattagacgagtccatacgagagaatgtcagagaagctcttctgaagagacatcatcatcagaatgagaaaagattcaccagtcggattcctcttgttcgatcttttgcagatataggcaagaaacattctgaccctcacttgcttgaaaggaatggtattttggcctctccccagtctgctcctggaaacttggacaatagtaaaagtggagaaattaaaggtaatggaagtggtggaagcagagaaaatagtactgttgacttcagcaaggttgatatgaatttcatgagaaaaattcctacgggtgctgaggcatccaacgtcctggtgggcgaagtagactttttggaaaggccaataattgcatttgtgagactggctcctgctgtcctccttacagggttgactgaggtccctgttccaaccaggtttttgtttttgttattgggtccagcgggcaaggcaccacagtaccatgaaattggacgatcaatagccactctcatgacagatgagattttccatgatgtagcttataaagcaaaagacagaaatgacctcttatctggaattgatgaatttttagatcaagtaactgtcctacctccaggagagtgggatccttctatacgcatagaaccaccaaaaagtgtcccttctcaggaaaagagaaagattcctgtgtttcacaatggatctacccccacactgggtgagactcctaaagaggccgctcatcatgctgggcctgagctacagaggactggacgagtgcaatagagtctctttttggagcatcattaactgggattgcctattcattgtttgctgggcaacctctaacaatattggggagcacaggtccagttctagtgtttgaaaaaattttatataaattctgcagagattatcaactttcttatctgtctttaagaaccagtattggtctgtggacttcttttttgtgcattgttttggttgcaacagatgcaagcagccttgtgtgttatattactcgatttacagaagaggcttttgcagcccttatttgcatcatattcatctacgaggctttggagaagctctttgatttaggagaaacatatgcatttaatatgcacaacaacttagataaactgaccagctactcatgtgtatgtactgaacctccaaaccccagcaatgaaactctagcacaatggaagaaagataatataacagcacacaatatttcctggagaaatcttactgtttctgaatgtaaaaaacttcgtggtgtattcttggggtcagcttgtggtcatcatggaccttatattccagatgtgctcttttggtgtgtcatcttgtttttcacaacattttttctgtcttcattcctcaagcaatttaagaccaagcgttactttcctaccaaggtgcgatcgacaatcagtgattttgctgtatttctcacaatagtaataatggttacaattgactaccttgtaggagttccatctcctaaacttcatgttcctgaaaaatttgagcctactcatccagagagagggtggatcataagcccactgggagataatccttggtggaccttattaatagctgctattcctgctttgctttgtaccattctcatctttatggatcaacaaatcacagctgtaattataaacagaaaggaacacaaattgaagaaaggagctggctatcaccttgatttgctcatggttggcgttatgttgggagtttgctctgtcatgggacttccatggtttgtggctgcaacagtgttgtcaataagtcatgtcaacagcttaaaagttgaatctgaatgttctgctccaggggaacaacccaagtttttgggaattcgtgaacagcgggttacagggctaatgatttttattctaatgggcctctctgtgttcatgacttcagtcctaaagtttattccaatgcctgttctgtatggtgttttcctttatatgggagtttcctcattaaaaggaatccagttatttgaccgtataaaattatttggaatgcctgctaagcatcagcctgatttgatatacctccgttatgtgccgctctggaaggtccatattttcacagtcattcagcttacttgtttggtccttttatgggtgataaaagtttcagctgctgcagtggtttttcccatgatggttcttgcattagtgtttgtgcgcaaactcatggacctgtgtttcacgaagagagaacttagttggcttgatgatcttatgccagaaagtaagaaaaagaaagaagatgacaaaaagaaaaaagagaaagaggaagctgaacggatgcttcaagatgatgatgatactgtgcaccttccatttgaagggggaagtctcttgcaaattccagtcaaggccctaaaatatagtgttgatccctcaattgttaacatatcagatgaaatggccaaaactgcacagtggaaggcactttccatgaatactgagaatgccaaagtaaccagatctaacatgagtcctgataaacctgtgagtgtgaaaataagttttgaagatgaaccaagaaagaaatacgtggatgctgaaacttcattatagaattgaaccaagaggcattatacatatagatatatacatatgtaatgtgtgcgtatcatgtcactatatataagaatattgtatgtcatgctgtttatgtgtgactaccgggtttttaaaagtagtgtctggagtttgtaatgagcaccgtggagact

SEQ ID NO: 184203 - DNA, 3407 bp, Homo sapiens
  Payload ID: 16279
  Gene Symbol: SLC4A7
  Gene Name: solute carrier family 4, sodium bicarbonate cotransporter, member 7
  Uniprot ID: Q9Y6M7
  ENST ID: ENST00000437266
  CDS Start-End: 295-1686
gctctcctccttcccgctcggtccgccggttcgctcagttctagcttcaggttccacgccgcggcctcgctctcctactaaagccagcccagcagtcgcagcgcgcacacgcacgccccgcgtctcccgcgcccggcgcccggctctccccacgcgcgcacacctcgcgcacggacgcacccacgtttgtcctcgcgcgccgggggctcggcggcggcggcaggggcagcggcagaagcaggcagaccgcgcggggcagtaccgtagcggccgtcacgggctggccggccggccatggaggctgatggggccggcgagcagatgagaccgctactcacccggggtcctgatgaagaagctgttgtggatcttggcaaaactagctcaactgtgaacaccaagtttgaaaaagaagaactagaaagtcatagagctgtatatattggtgttcacgtcccgtttagtaaagagagtcgtcggcgtcataggcatcgcggacacaaacatcaccaccggagaagaaaagataaagaatcagataaagaagatggacgggaatctccttcttatgatacaccatcccagagagttcagtttatccttggtactgaagatgatgatgaagaacatattccccatgatctcttcacggaaatggatgaactgtgttacagagatggagaagaatatgaatggaaagaaactgctagatggctgaaatttgaagaggatgttgaagatggcggtgaccgatggagtaaaccttatgtggcaactctctctttgcacagtctttttgaactaaggagttgcatcctcaatggaacagtcatgctggatatgagagcaagcactctagatgaaatagcagatatggtattagacaacatgatagcttctggccaattagacgagtccatacgagagaatgtcagagaagctcttctgaagagacatcatcatcagaatgagaaaagattcaccagtcggattcctcttgttcgatcttttgcagatataggcaagaaacattctgaccctcacttgcttgaaaggaatggtattttggcctctccccagtctgctcctggaaacttggacaatagtaaaagtggagaaattaaaggtaatggaagtggtggaagcagagaaaatagtactgttgacttcagcaaggttgatatgaatttcatgagaaaaattcctacgggtgctgaggcatccaacgtcctggtgggcgaagtagactttttggaaaggccaataattgcatttgtgagactggctcctgctgtcctccttacagggttgactgaggtccctgttccaaccaggtttttgtttttgttattgggtccagcgggcaaggcaccacagtaccatgaaattggacgatcaatagccactctcatgacagatgagattttccatgatgtagcttataaagcaaaagacagaaatgacctcttatctggaattgatgaatttttagatcaagtaactgtcctacctccaggagagtgggatccttctatacgcatagaaccaccaaaaagtgtcccttctcaggaaaagagaaagattcctgtgtttcacaatggatctacccccacactgggtgagactcctaaagaggccgctcatcatgctgggcctgagctacagaggactggacgagtgcaatagagtctctttttggagcatcattaactgggattgcctattcattgtttgctgggcaacctctaacaatattggggagcacaggtccagttctagtgtttgaaaaaattttatataaattctgcagagattatcaactttcttatctgtctttaagaaccagtattggtctgtggacttcttttttgtgcattgttttggttgcaacagatgcaagcagccttgtgtgttatattactcgatttacagaagaggcttttgcagcccttatttgcatcatattcatctacgaggctttggagaagctctttgatttaggagaaacatatgcatttaatatgcacaacaacttagataaactgaccagctactcatgtgtatgtactgaacctccaaaccccagcaatgaaactctagcacaatggaagaaagataatataacagcacacaatatttcctggagaaatcttactgtttctgaatgtaaaaaacttcgtggtgtattcttggggtcagcttgtggtcatcatggaccttatattccagatgtgctcttttggtgtgtcatcttgtttttcacaacattttttctgtcttcattcctcaagcaatttaagaccaagcgttactttcctaccaaggtgcgatcgacaatcagtgattttgctgtatttctcacaatagtaataatggttacaattgactaccttgtaggagttccatctcctaaacttcatgttcctgaaaaatttgagcctactcatccagagagagggtggatcataagcccactgggagataatccttggtggaccttattaatagctgctattcctgctttgctttgtaccattctcatctttatggatcaacaaatcacagctgtaattataaacagaaaggaacacaaattgaagaaaggagctggctatcaccttgatttgctcatggttggcgttatgttgggagtttgctctgtcatgggacttccatggtttgtggctgcaacagtgttgtcaataagtcatgtcaacagcttaaaagttgaatctgaatgttctgctccaggggaacaacccaagtttttgggaattcgtgaacagcgggttacagggctaatgatttttattctaatgggcctctctgtgttcatgacttcagtcctaaagtttattccaatgcctgttctgtatggtgttttcctttatatgggagtttcctcattaaaaggaatccagttatttgaccgtataaaattatttggaatgcctgctaagcatcagcctgatttgatatacctccgttatgtgccgctctggaaggtccatattttcacagtcattcagcttacttgtttggtccttttatgggtgataaaagtttcagctgctgcagtggtttttcccatgatggttcttgcattagtgtttgtgcgcaaactcatggacctgtgtttcacgaagagagaacttagttggcttgatgatcttatgccagaaagtaagaaaaagaaagaagatgacaaaaagaaaaaagagaaagaggaagctgaacggatgcttcaagatgatgatgatactgtgcaccttccatttgaagggggaagtctcttgcaaattccagtcaaggccctaaaatatagtcctgataaacctgtgagtgtgaaaataagttttgaagatgaaccaagaaagaaatacgtggatgctgaaacttcattatag

SEQ ID NO: 184204 - DNA, 6447 bp, Homo sapiens
  Payload ID: 16279
  Gene Symbol: SLC4A7
  Gene Name: solute carrier family 4, sodium bicarbonate cotransporter, member 7
  ENST ID: ENST00000419036
  CDS Start-End: 1-2406
gtaatggaagtggtggaagcagagaaaatagtactgttgacttcagcaaggtttttgtttttgttattgggtccagcgggcaaggcaccacagtaccatgaaattggacgatcaatagccactctcatgacagatgagattttccatgatgtagcttataaagcaaaagacagaaatgacctcttatctggaattgatgaatttttagatcaagtaactgtcctacctccaggagagtgggatccttctatacgcatagaaccaccaaaaagtgtcccttctcaggaaaagagaaagattcctgtgtttcacaatggatctacccccacactgggtgagactcctaaagaggccgctcatcatgctgggcctgagctacagaggactggacggctttttggtggtttgatacttgacatcaaaaggaaagcaccttttttcttgagtgacttcaaggatgcattaagcctgcagtgcctggcctcgattcttttcctatactgtgcctgtatgtctcctgtaatcacttttggagggctgcttggagaagctacagaaggcagaataagtgcaatagagtctctttttggagcatcattaactgggattgcctattcattgtttgctgggcaacctctaacaatattggggagcacaggtccagttctagtgtttgaaaaaattttatataaattctgcagagattatcaactttcttatctgtctttaagaaccagtattggtctgtggacttcttttttgtgcattgttttggttgcaacagatgcaagcagccttgtgtgttatattactcgatttacagaagaggcttttgcagcccttatttgcatcatattcatctacgaggctttggagaagctctttgatttaggagaaacatatgcatttaatatgcacaacaacttagataaactgaccagctactcatgtgtatgtactgaacctccaaaccccagcaatgaaactctagcacaatggaagaaagataatataacagcacacaatatttcctggagaaatcttactgtttctgaatgtaaaaaacttcgtggtgtattcttggggtcagcttgtggtcatcatggaccttatattccagatgtgctcttttggtgtgtcatcttgtttttcacaacattttttctgtcttcattcctcaagcaatttaagaccaagcgttactttcctaccaaggtgcgatcgacaatcagtgattttgctgtatttctcacaatagtaataatggttacaattgactaccttgtaggagttccatctcctaaacttcatgttcctgaaaaatttgagcctactcatccagagagagggtggatcataagcccactgggagataatccttggtggaccttattaatagctgctattcctgctttgctttgtaccattctcatctttatggatcaacaaatcacagctgtaattataaacagaaaggaacacaaattgaagaaaggagctggctatcaccttgatttgctcatggttggcgttatgttgggagtttgctctgtcatgggacttccatggtttgtggctgcaacagtgttgtcaataagtcatgtcaacagcttaaaagttgaatctgaatgttctgctccaggggaacaacccaagtttttgggaattcgtgaacagcgggttacagggctaatgatttttattctaatgggcctctctgtgttcatgacttcagtcctaaagtttattccaatgcctgttctgtatggtgttttcctttatatgggagtttcctcattaaaaggaatccagttatttgaccgtataaaattatttggaatgcctgctaagcatcagcctgatttgatatacctccgttatgtgccgctctggaaggtccatattttcacagtcattcagcttacttgtttggtccttttatgggtgataaaagtttcagctgctgcagtggtttttcccatgatggttcttgcattagtgtttgtgcgcaaactcatggacctgtgtttcacgaagagagaacttagttggcttgatgatcttatgccagaaagtaagaaaaagaaagaagatgacaaaaagaaaaaagagaaagaggaagctgaacggatgcttcaagatgatgatgatactgtgcaccttccatttgaagggggaagtctcttgcaaattccagtcaaggccctaaaatatagtgttgatccctcaattgttaacatatcagatgaaatggccaaaactgcacagtggaaggcactttccatgaatactgagaatgccaaagtaaccagatctaacatgagtcctgataaacctgtgagtgtgaaaataagttttgaagatgaaccaagaaagaaatacgtggatgctgaaacttcattatagaattgaaccaagaggcattatacatatagatatatacatatgtaatgtgtgcgtatcatgtcactatatataagaatattgtatgtcatgctgtttatgtgtgactaccgggtttttaaaagtagtgtctggagtttgtaatgagcaccgtggagactatgtatttaatgaaatgctctctttgaagtgaggtacatggttcttaactattcaaatatttattctgttagaaaaaaaaattttctgttttgcaatagaaggatgtggagaaatgctttcagtctacttttcttaaatctctgttcatcagtggcaattcgtaaaaaccttaagtgatactttgtttatatgtttataatttttaggtgtttcctgaaattttcacatattatttcacttttgttagtgctttatgggaagaatagggagtctataccagtgctgtgggaaaaatggtaacatttcagggcttctctatttgtgtttcatttctgtagatgtccatcgtgtttcactaactggcgttttcttagccatagagatgactgtagaacaatagaaactttaataatgatagtttttaacttttatgtttaaattttttttaaatcttaaaaccttcatatctaggtatccattgtgacagacaagtaaaattgcaggtgatttgataattaagcacccataccatttataacttctgaatttaaaaagttatacaatgccagtttgcaatagttgattttgatgcctttgtagaatattttttctgaatccttatgctcttttaaagccaatgattcccactctgttctctgccttgtctctctttgtcttaaaatgctttagtttccatcaggttcaagttcttgactattattctcttataagtagtaggcgtaaataatcaggagttagaattctctcagaagggtctatgatcagtattactttattaagaattacctttcattttctctttatgttattctttcacttttgtagattacatttaatagcttgttacctgtgattttattttaaaatatttattttgatatgatgcttaaatattatataaacatttggaaaagtaacaaatagagtaaattgttaatgtaaatagttggtgcttactttcatttatgtttattatcttaaagcaattgatagattttacatctttgatataaagcactgccatatttatattttaaaaggaaattagacattttatatgtagctcagattaatgacatttttattttgtgtattagtttttgcttttctgagctttttaaagtctaacaaatctttttagtcatcttttatatacttttagttccacatgaaataaatgttgttaagcctgtaggactggatgaatggggttgtgaaactgatttgacaagagaataatttacaaaaatcaaatgagtattgagaagccacagaaatatcaaaaatggtgacatcactattaggatgaaaattttatgaaattccaatgctccctttaaccatataattaaattacaaaggtatacataattaatctaataaaggatcatgaggaatgccaaaagctgaaattttagcaagtctggtgttttaaattcattataaactatttattaactaatgtaatgtcctcctctaagaccatattgtaagagtcttgttaaaatgatggattcaacttctgcctcggatgagaggttggaaatgtagctgcttttctttagaaaatatgtagctgtcatcatttggtactgcctaaaaagagttagactctattggcaattgatagagtattacccacggtgcttattattgtttatgagcttccattgtaatgattcctttttatttgtagcagcataattatttccaaagaccccagtatttgctgctatttttaaaactcccctgatgtacctgaacaagaggatttcctcacatcatttccttgtgtctggacatcaggggtaacaactgtacttactttacaggaagaaattttaaaactgaaaactacctgggatcatagtgtttctgtgattttatttaattgtgtatagtaattatccagtgccagaaaaaccgtcacttgcaaaatactttgcactcaaaatgtttttacaatgcttctaaatgttactggtttctgctttcttttgactacttgactgacaaaatgatctgactactccatttaagagcaaaggtaactcatgtttaggtaattaactgcttgttttaagtgattatatttcttccactgtttttgaaaaataatcaaagatagcattcattgagagacagtgacagatataatttactacatatattgatttttaaataaagttgccttaaataagtgtatgtaagcagtagtagttgctatgtactgatttacctcaaggtgcaaaataattaaacctgtacatattccatttacaaaataaattcagccctgcactttctttagatgccttgatttccagaatggagcttagtgctactgaataccctggccacagagccacctcaggatattcttttctccaccctagtttatttatttatagatatctgtttacaaagtctgtagtaaatcctgatgctgaccatctgaaatgtactttttttctgaatgctgtttcaatctaaaatagcagcttttgagaaaacaatgatgtaaattccttatgataaaaggatgattctatatattctttaatgatattaaatatgccgaagccaagcacacagtctttctaaagtgtgtgtatgtttgtgtgaatgtgaatgatactgatcttatatctgttaaaagttgttttaaaaagctgtggcatcccattgttcatatttgccaagtcttctgtaaagatgtctaggacgaaatattttatgtgctaatgcatgtatttgtaaaccagatttgtttaccactcaaaattaacttgttttcttcatccaaaaaagtttatttcttccacgtacttaaattttctgtgtgggtataatatagctttctaatttttttctttcacaaaggcaggttcaaaattctgttgaaagaaaaatgctttctgaaactgaggtataacaccagagcttgctgtttaaaggattatatgatgtacatcagttctataaatgtgctcagcagtttaacatgtgaatcctgttttaaagtgctcagatttcaactgtgtaagccattgatataacgctgtaattaaaaatgtttatatgaaataacttaatgttttaaatttatttatgtagatcacatcatttttatcgtatgcagtgcaaatatgtgaaatgtcttttggtttattccaacaattatttattttagaaagtaagtttaaagactttaaggacattcaaagtttaaaatagtgttcaaattgcaaaatttggcaatcttcatataaattggtttcttttctaacttttcaaaaactaacattaaatgtcaattataggaaaacatagttggaaatgtaatcatccaaagatcatttttaaaatgaaatttaattagcacatattgaacatttgacttaattgttaaaccccagttttgttttgtttttttaatcagatttttgcacactgattagtttttgtgttgtggcttttgttgctttattattcaaggttttttttttttttcttccccatgggggagattgtcttccaatgtttaactacgtttaaataaataaaaattgaattttattgttcatttatataaaatctgataccttgatgtaatttcacaatacagttccaatttttatggcttttataattacaatgatattttcttctataataaaatccaaagtaaacatttaaattgtagaactgatatttttcatttatatgaagtataagcctctactgggtctatattgtgaatcatcctgcctttcaaatttgtttcataattgttagatgaaaactatttttttggagatgttactgaagttgattgagcaataaaagtctacttaatta

SEQ ID NO: 184205 - DNA, 4120 bp, Homo sapiens
  Payload ID: 16279
  Gene Symbol: SLC4A7
  Gene Name: solute carrier family 4, sodium bicarbonate cotransporter, member 7
  Uniprot ID: Q9Y6M7
  ENST ID: ENST00000440156
  CDS Start-End: 222-3962
cctactaaagccagcccagcagtcgcagcgcgcacacgcacgccccgcgtctcccgcgcccggcgcccggctctccccacgcgcgcacacctcgcgcacggacgcacccacgtttgtcctcgcgcgccgggggctcggcggcggcggcaggggcagcggcagaagcaggcagaccgcgcggggcagtaccgtagcggccgtcacgggctggccggccggccatggaggctgatggggccggcgagcagatgagaccgctactcacccgggtaacgagcaggggtcctgatgaagaagctgttgtggatcttggcaaaactagctcaactgtgaacaccaagtttgaaaaagaagaactagaaagtcatagagctgtatatattggtgttcacgtcccgtttagtaaagagagtcgtcggcgtcataggcatcgcggacacaaacatcaccaccggagaagaaaagataaagaatcagataaagaagatggacgggaatctccttcttatgatacaccatcccagagagttcagtttatccttggtactgaagatgatgatgaagaacatattccccatgatctcttcacggaaatggatgaactgtgttacagagatggagaagaatatgaatggaaagaaactgctagatggctgaaatttgaagaggatgttgaagatggcggtgaccgatggagtaaaccttatgtggcaactctctctttgcacagtctttttgaactaaggagttgcatcctcaatggaacagtcatgctggatatgagagcaagcactctagatgaaatagcagatatggtattagacaacatgatagcttctggccaattagacgagtccatacgagagaatgtcagagaagctcttctgaagagacatcatcatcagaatgagaaaagattcaccagtcggattcctcttgttcgatcttttgcagatataggggaaggcctttcagcctcccgccactctttgcgaacaggtctgtctgcctcaaacctttccttgagaggagaatcacctttatctcttcttcttggtcatcttcttccttcttcaagagctggaacccctgcaggctcaaggtgtacaaccccagtacccacccctcaaaacagtcctccttctagccctagcatcagccgcctgacctccagaagttcccaagagagtcagcgtcaggccccagaactactggtttcacctgccagtgatgatattcccacagtagtaattcatccgcctgaggaagacttagaagcagcgctgaaaggcgaggagcagaagaatgaggaaaatgttgacttaactccaggtattttggcctctccccagtctgctcctggaaacttggacaatagtaaaagtggagaaattaaaggtaatggaagtggtggaagcagagaaaatagtactgttgacttcagcaaggttgatatgaatttcatgagaaaaattcctacgggtgctgaggcatccaacgtcctggtgggcgaagtagactttttggaaaggccaataattgcatttgtgagactggctcctgctgtcctccttacagggttgactgaggtccctgttccaaccaggtttttgtttttgttattgggtccagcgggcaaggcaccacagtaccatgaaattggacgatcaatagccactctcatgacagatgagattttccatgatgtagcttataaagcaaaagacagaaatgacctcttatctggaattgatgaatttttagatcaagtaactgtcctacctccaggagagtgggatccttctatacgcatagaaccaccaaaaagtgtcccttctcaggaaaagagaaagattcctgtgtttcacaatggatctacccccacactgggtgagactcctaaagaggccgctcatcatgctgggcctgagctacagaggactggacggctttttggtggtttgatacttgacatcaaaaggaaagcaccttttttcttgagtgacttcaaggatgcattaagcctgcagtgcctggcctcgattcttttcctatactgtgcctgtatgtctcctgtaatcacttttggagggctgcttggagaagctacagaaggcagaataagtgcaatagagtctctttttggagcatcattaactgggattgcctattcattgtttgctgggcaacctctaacaatattggggagcacaggtccagttctagtgtttgaaaaaattttatataaattctgcagagattatcaactttcttatctgtctttaagaaccagtattggtctgtggacttcttttttgtgcattgttttggttgcaacagatgcaagcagccttgtgtgttatattactcgatttacagaagaggcttttgcagcccttatttgcatcatattcatctacgaggctttggagaagctctttgatttaggagaaacatatgcatttaatatgcacaacaacttagataaactgaccagctactcatgtgtatgtactgaacctccaaaccccagcaatgaaactctagcacaatggaagaaagataatataacagcacacaatatttcctggagaaatcttactgtttctgaatgtaaaaaacttcgtggtgtattcttggggtcagcttgtggtcatcatggaccttatattccagatgtgctcttttggtgtgtcatcttgtttttcacaacattttttctgtcttcattcctcaagcaatttaagaccaagcgttactttcctaccaaggtgcgatcgacaatcagtgattttgctgtatttctcacaatagtaataatggttacaattgactaccttgtaggagttccatctcctaaacttcatgttcctgaaaaatttgagcctactcatccagagagagggtggatcataagcccactgggagataatccttggtggaccttattaatagctgctattcctgctttgctttgtaccattctcatctttatggatcaacaaatcacagctgtaattataaacagaaaggaacacaaattgaagaaaggagctggctatcaccttgatttgctcatggttggcgttatgttgggagtttgctctgtcatgggacttccatggtttgtggctgcaacagtgttgtcaataagtcatgtcaacagcttaaaagttgaatctgaatgttctgctccaggggaacaacccaagtttttgggaattcgtgaacagcgggttacagggctaatgatttttattctaatgggcctctctgtgttcatgacttcagtcctaaagtttattccaatgcctgttctgtatggtgttttcctttatatgggagtttcctcattaaaaggaatccagttatttgaccgtataaaattatttggaatgcctgctaagcatcagcctgatttgatatacctccgttatgtgccgctctggaaggtccatattttcacagtcattcagcttacttgtttggtccttttatgggtgataaaagtttcagctgctgcagtggtttttcccatgatggttcttgcattagtgtttgtgcgcaaactcatggacctgtgtttcacgaagagagaacttagttggcttgatgatcttatgccagaaagtaagaaaaagaaagaagatgacaaaaagaaaaaagagaaagaggaagctgaacggatgcttcaagatgatgatgatactgtgcaccttccatttgaagggggaagtctcttgcaaattccagtcaaggccctaaaatatagtgttgatccctcaattgttaacatatcagatgaaatggccaaaactgcacagtggaaggcactttccatgaatactgagaatgccaaagtaaccagatctaacatgagtcctgataaacctgtgagtgtgaaaataagttttgaagatgaaccaagaaagaaatacgtggatgctgaaacttcattatagaattgaaccaagaggcattatacatatagatatatacatatgtaatgtgtgcgtatcatgtcactatatataagaatattgtatgtcatgctgtttatgtgtgactaccgggtttttaaaagtagtgtctggagtttgtaatgagcaccgtggagact

SEQ ID NO: 184206 - DNA, 7385 bp, Homo sapiens
  Payload ID: 16279
  Gene Symbol: SLC4A7
  Gene Name: solute carrier family 4, sodium bicarbonate cotransporter, member 7
  Uniprot ID: Q9Y6M7
  ENST ID: ENST00000428386
  CDS Start-End: 72-3344
ctcactgtccctggaatcttcaagggagttactgcattacatcatcagaaacaaggcatttctatattactatggaaagatttcgtctggagaagaagttacctggtcctgatgaagaagctgttgtggatcttggcaaaactagctcaactgtgaacaccaagtttgaaaaagaagaactagaaagtcatagagctgtatatattggtgttcacgtcccgtttagtaaagagagtcgtcggcgtcataggcatcgcggacacaaacatcaccaccggagaagaaaagataaagaatcagataaagaagatggacgggaatctccttcttatgatacaccatcccagagagttcagtttatccttggtactgaagatgatgatgaagaacatattccccatgatctcttcacggaaatggatgaactgtgttacagagatggagaagaatatgaatggaaagaaactgctagatggctgaaatttgaagaggatgttgaagatggcggtgaccgatggagtaaaccttatgtggcaactctctctttgcacagtctttttgaactaaggagttgcatcctcaatggaacagtcatgctggatatgagagcaagcactctagatgaaatagcagatatggtattagacaacatgatagcttctggccaattagacgagtccatacgagagaatgtcagagaagctcttctgaagagacatcatcatcagaatgagaaaagattcaccagtcggattcctcttgttcgatcttttgcagatataggcaagaaacattctgaccctcacttgcttgaaaggaatggtattttggcctctccccagtctgctcctggaaacttggacaatagtaaaagtggagaaattaaaggtaatggaagtggtggaagcagagaaaatagtactgttgacttcagcaaggttgatatgaatttcatgagaaaaattcctacgggtgctgaggcatccaacgtcctggtgggcgaagtagactttttggaaaggccaataattgcatttgtgagactggctcctgctgtcctccttacagggttgactgaggtccctgttccaaccaggtttttgtttttgttattgggtccagcgggcaaggcaccacagtaccatgaaattggacgatcaatagccactctcatgacagatgagattttccatgatgtagcttataaagcaaaagacagaaatgacctcttatctggaattgatgaatttttagatcaagtaactgtcctacctccaggagagtgggatccttctatacgcatagaaccaccaaaaagtgtcccttctcaggaaaagagaaagattcctgtgtttcacaatggatctacccccacactgggtgagactcctaaagaggccgctcatcatgctgggcctgagctacagaggactggacggctttttggtggtttgatacttgacatcaaaaggaaagcaccttttttcttgagtgacttcaaggatgcattaagcctgcagtgcctggcctcgattcttttcctatactgtgcctgtatgtctcctgtaatcacttttggagggctgcttggagaagctacagaaggcagaataagtgcaatagagtctctttttggagcatcattaactgggattgcctattcattgtttgctgggcaacctctaacaatattggggagcacaggtccagttctagtgtttgaaaaaattttatataaattctgcagagattatcaactttcttatctgtctttaagaaccagtattggtctgtggacttcttttttgtgcattgttttggttgcaacagatgcaagcagccttgtgtgttatattactcgatttacagaagaggcttttgcagcccttatttgcatcatattcatctacgaggctttggagaagctctttgatttaggagaaacatatgcatttaatatgcacaacaacttagataaactgaccagctactcatgtgtatgtactgaacctccaaaccccagcaatgaaactctagcacaatggaagaaagataatataacagcacacaatatttcctggagaaatcttactgtttctgaatgtaaaaaacttcgtggtgtattcttggggtcagcttgtggtcatcatggaccttatattccagatgtgctcttttggtgtgtcatcttgtttttcacaacattttttctgtcttcattcctcaagcaatttaagaccaagcgttactttcctaccaaggtgcgatcgacaatcagtgattttgctgtatttctcacaatagtaataatggttacaattgactaccttgtaggagttccatctcctaaacttcatgttcctgaaaaatttgagcctactcatccagagagagggtggatcataagcccactgggagataatccttggtggaccttattaatagctgctattcctgctttgctttgtaccattctcatctttatggatcaacaaatcacagctgtaattataaacagaaaggaacacaaattgaagaaaggagctggctatcaccttgatttgctcatggttggcgttatgttgggagtttgctctgtcatgggacttccatggtttgtggctgcaacagtgttgtcaataagtcatgtcaacagcttaaaagttgaatctgaatgttctgctccaggggaacaacccaagtttttgggaattcgtgaacagcgggttacagggctaatgatttttattctaatgggcctctctgtgttcatgacttcagtcctaaagtttattccaatgcctgttctgtatggtgttttcctttatatgggagtttcctcattaaaaggaatccagttatttgaccgtataaaattatttggaatgcctgctaagcatcagcctgatttgatatacctccgttatgtgccgctctggaaggtccatattttcacagtcattcagcttacttgtttggtccttttatgggtgataaaagtttcagctgctgcagtggtttttcccatgatggttcttgcattagtgtttgtgcgcaaactcatggacctgtgtttcacgaagagagaacttagttggcttgatgatcttatgccagaaagtaagaaaaagaaagaagatgacaaaaagaaaaaagagaaagaggaagctgaacggatgcttcaagatgatgatgatactgtgcaccttccatttgaagggggaagtctcttgcaaattccagtcaaggccctaaaatatagtcctgataaacctgtgagtgtgaaaataagttttgaagatgaaccaagaaagaaatacgtggatgctgaaacttcattatagaattgaaccaagaggcattatacatatagatatatacatatgtaatgtgtgcgtatcatgtcactatatataagaatattgtatgtcatgctgtttatgtgtgactaccgggtttttaaaagtagtgtctggagtttgtaatgagcaccgtggagactatgtatttaatgaaatgctctctttgaagtgaggtacatggttcttaactattcaaatatttattctgttagaaaaaaaaattttctgttttgcaatagaaggatgtggagaaatgctttcagtctacttttcttaaatctctgttcatcagtggcaattcgtaaaaaccttaagtgatactttgtttatatgtttataatttttaggtgtttcctgaaattttcacatattatttcacttttgttagtgctttatgggaagaatagggagtctataccagtgctgtgggaaaaatggtaacatttcagggcttctctatttgtgtttcatttctgtagatgtccatcgtgtttcactaactggcgttttcttagccatagagatgactgtagaacaatagaaactttaataatgatagtttttaacttttatgtttaaattttttttaaatcttaaaaccttcatatctaggtatccattgtgacagacaagtaaaattgcaggtgatttgataattaagcacccataccatttataacttctgaatttaaaaagttatacaatgccagtttgcaatagttgattttgatgcctttgtagaatattttttctgaatccttatgctcttttaaagccaatgattcccactctgttctctgccttgtctctctttgtcttaaaatgctttagtttccatcaggttcaagttcttgactattattctcttataagtagtaggcgtaaataatcaggagttagaattctctcagaagggtctatgatcagtattactttattaagaattacctttcattttctctttatgttattctttcacttttgtagattacatttaatagcttgttacctgtgattttattttaaaatatttattttgatatgatgcttaaatattatataaacatttggaaaagtaacaaatagagtaaattgttaatgtaaatagttggtgcttactttcatttatgtttattatcttaaagcaattgatagattttacatctttgatataaagcactgccatatttatattttaaaaggaaattagacattttatatgtagctcagattaatgacatttttattttgtgtattagtttttgcttttctgagctttttaaagtctaacaaatctttttagtcatcttttatatacttttagttccacatgaaataaatgttgttaagcctgtaggactggatgaatggggttgtgaaactgatttgacaagagaataatttacaaaaatcaaatgagtattgagaagccacagaaatatcaaaaatggtgacatcactattaggatgaaaattttatgaaattccaatgctccctttaaccatataattaaattacaaaggtatacataattaatctaataaaggatcatgaggaatgccaaaagctgaaattttagcaagtctggtgttttaaattcattataaactatttattaactaatgtaatgtcctcctctaagaccatattgtaagagtcttgttaaaatgatggattcaacttctgcctcggatgagaggttggaaatgtagctgcttttctttagaaaatatgtagctgtcatcatttggtactgcctaaaaagagttagactctattggcaattgatagagtattacccacggtgcttattattgtttatgagcttccattgtaatgattcctttttatttgtagcagcataattatttccaaagaccccagtatttgctgctatttttaaaactcccctgatgtacctgaacaagaggatttcctcacatcatttccttgtgtctggacatcaggggtaacaactgtacttactttacaggaagaaattttaaaactgaaaactacctgggatcatagtgtttctgtgattttatttaattgtgtatagtaattatccagtgccagaaaaaccgtcacttgcaaaatactttgcactcaaaatgtttttacaatgcttctaaatgttactggtttctgctttcttttgactacttgactgacaaaatgatctgactactccatttaagagcaaaggtaactcatgtttaggtaattaactgcttgttttaagtgattatatttcttccactgtttttgaaaaataatcaaagatagcattcattgagagacagtgacagatataatttactacatatattgatttttaaataaagttgccttaaataagtgtatgtaagcagtagtagttgctatgtactgatttacctcaaggtgcaaaataattaaacctgtacatattccatttacaaaataaattcagccctgcactttctttagatgccttgatttccagaatggagcttagtgctactgaataccctggccacagagccacctcaggatattcttttctccaccctagtttatttatttatagatatctgtttacaaagtctgtagtaaatcctgatgctgaccatctgaaatgtactttttttctgaatgctgtttcaatctaaaatagcagcttttgagaaaacaatgatgtaaattccttatgataaaaggatgattctatatattctttaatgatattaaatatgccgaagccaagcacacagtctttctaaagtgtgtgtatgtttgtgtgaatgtgaatgatactgatcttatatctgttaaaagttgttttaaaaagctgtggcatcccattgttcatatttgccaagtcttctgtaaagatgtctaggacgaaatattttatgtgctaatgcatgtatttgtaaaccagatttgtttaccactcaaaattaacttgttttcttcatccaaaaaagtttatttcttccacgtacttaaattttctgtgtgggtataatatagctttctaatttttttctttcacaaaggcaggttcaaaattctgttgaaagaaaaatgctttctgaaactgaggtataacaccagagcttgctgtttaaaggattatatgatgtacatcagttctataaatgtgctcagcagtttaacatgtgaatcctgttttaaagtgctcagatttcaactgtgtaagccattgatataacgctgtaattaaaaatgtttatatgaaataacttaatgttttaaatttatttatgtagatcacatcatttttatcgtatgcagtgcaaatatgtgaaatgtcttttggtttattccaacaattatttattttagaaagtaagtttaaagactttaaggacattcaaagtttaaaatagtgttcaaattgcaaaatttggcaatcttcatataaattggtttcttttctaacttttcaaaaactaacattaaatgtcaattataggaaaacatagttggaaatgtaatcatccaaagatcatttttaaaatgaaatttaattagcacatattgaacatttgacttaattgttaaaccccagttttgttttgtttttttaatcagatttttgcacactgattagtttttgtgttgtggcttttgttgctttattattcaaggttttttttttttttcttccccatgggggagattgtcttccaatgtttaactacgtttaaataaataaaaattgaattttattgttcatttatataaaatctgataccttgatgtaatttcacaatacagttccaatttttatggcttttataattacaatgatattttcttctataataaaatccaaagtaaacatttaaattgtagaactgatatttttcatttatatgaagtataagcctctactgggtctatattgtgaatcatcctgcctttcaaatttgtttcataattgttagatgaaaactatttttttggagatgttactgaagttgattgagcaataaaagtctacttaatta

SEQ ID NO: 184207 - DNA, 11731 bp, Homo sapiens
  Payload ID: 16280
  Gene Symbol: SLC4A8
  Gene Name: solute carrier family 4, sodium bicarbonate cotransporter, member 8
  Uniprot ID: Q2Y0W8
  ENST ID: ENST00000358657
  CDS Start-End: 284-3406
attcatctcgtaagcgccaaggtggaggggggtcctaccgagggaggagctacaggccaccgcgaccagcagagagcgaaggcaggagggaccagcctggcccagccccttcattttactgtcgggggtagtgaggaggaagaggaagaggcgaaggctggcggaggaggagagaccagatgaagaagctgtggtggatcagggtgggaccagtacaattctcaacattcactatgaaaaagaagagctggaaggtcacagaactctgtatgtgggagttcggatgccgcttggccggcagagccatcggcatcaccgcactcatggccagaagcaccggagacgagggcggggcaaaggagccagccagggggaggaaggcctggaagccctggcccacgacacaccatctcagcgtgttcagttcattcttggcaccgaggaagatgaagagcatgtgcctcatgagctgtttacagagctggatgagatctgtatgaaagagggagaagatgctgagtggaaggaaacagccaggtggctgaagtttgaagaagatgttgaagatgggggagaacgctggagcaagccttatgtggcaaccctttcattgcacagcctgtttgagctaaggagctgccttattaatggaacagtcctcctggatatgcatgcaaatagcatagaagaaatttcagacctgatcctggatcagcaagaactgtccagtgacctgaatgacagcatgagggttaaagtgcgggaagcccttctcaaaaagcatcatcatcagaatgaaaagaagagaaacaacctcattcccattgttcgctcctttgctgaggttggcaagaagcagtctgatcctcatttgatggataaacatggtcaaaccgtgtctcctcagtctgttccaactacaaatcttgaagtaaaaaatggagtgaattgtgaacatagtcctgtggatttaagcaaggtagaccttcatttcatgaaaaaaattcctactggggccgaggcctccaatgtcctggttggagaggtggatattttggaccgtcccattgttgcctttgtgaggctgtctccagctgttcttctctcaggcctaacagaagtgccaatcccaacaagatttttgtttatcttattgggtccagtagggaaaggtcagcagtaccatgagattggcagatccatggccaccatcatgacagatgagatttttcatgacgtagcatataaggcaaaagagcgagatgatctcctggcggggattgatgagttcctagaccaggtgacggtgctccctccaggagagtgggatccctccattagaattgagccacccaaaaatgtcccttcccaggagaaaaggaaaatgcctggagttccaaatggaaatgtttgccacatagaacaggaaccacatgggggtcacagtgggccagaacttcagcgcactgggcggctatttgggggcttggtgctggacatcaagcggaaggccccctggtactggagcgactaccgagatgcactcagcttacagtgtttggcttcctttctgttcctgtactgtgcctgcatgtcacctgtcatcacctttgggggactgcttggagaagccactgagggacgcataagtgcaattgaatccttgtttggagcttccatgactgggattgcttattccttgtttgcgggacaggctctcaccatcctgggaagtactggaccagtgcttgtgtttgaaaagattttgttcaaattctgcaaagactatgctctttcatacctctccctgcgagcttgtattggactgtggaccgctttcctgtgtattgtccttgtggcaactgatgccagttcccttgtctgctacattacccgtttcactgaagaagcatttgcctccctaatttgcattattttcatctatgaagcaatagaaaaactgattcacctggcagagacctaccccatccacatgcacagccagctggaccaccttagcctctattactgcaggtgtactctgccagagaatccaaacaatcacaccctccagtactggaaggaccacaacatcgtgacagcagaagtccactgggctaacctgactgtcagtgaatgccaggagatgcatggagagttcatgggatctgcgtgcggccatcatggaccctacactcctgatgtcctcttttggtcctgtattctctttttcaccaccttcatcctctcaagcaccttaaagacgtttaagacgagccgttatttcccaaccagagtacgctccatggtgagtgactttgctgttttcctcactatcttcacaatggtgattattgattttttgattggagtcccatcaccaaagcttcaagttcccagtgtgttcaagccaacaagggatgatcgcggatggattattaatcccattggccccaatccctggtggactgtgatagctgcaattatcccagctcttctctgtactatcttgatattcatggatcagcagatcacagccgtcattattaacaggaaggaacataagctcaagaaaggctgtggctaccacctggacctactgatggtggccatcatgctgggtgtctgctccatcatgggcctgccctggtttgtagctgcaactgtcttgtccatcacacatgtgaacagcctcaagctagaatctgaatgctctgctcctggagaacagcccaagttcctgggcatccgagaacagagagtgacaggccttatgatctttgtgctgatgggctgctcagtcttcatgacggctatcttaaagtttattccaatgccagtactctacggagttttcctttacatgggagtttcttcactacagggaattcagttctttgatcgtctaaagctctttgggatgcccgcaaagcaccagccagatttcatctacctgcggcatgtgccgctgcgcaaagtgcacctcttcaccctcatccagttgacctgtctcgtcctgctctgggtcatcaaggcatctccagctgccattgttttcccaatgatggttttggccttggtctttgtcaggaaagtcatggatctctgtttctctaagcgagagctgagctggctagatgatctcatgcctgaaagcaaaaagaagaagttggatgatgccaaaaagaaggccaaggaggaagaggaggctgagaaaatgttagaaattgggggagacaagtttcccttagagagcaggaagttactaagtagtcctggaaagaacatcagttgcagatgtgacccctctgagattaatatatctgatgaaatgcctaaaactacagtttggaaagctctcagtatgaattctggaaatgcaaaggaaaagagtctcttcaactaagagtctttgctgggatggaagatttgggccgtgtggtgcctcagggaagttctggttacagagaaaatggcgagtctctcagagaagaagcaagaccaagtctggccctgtccttggtcatctcaaagccatgccgaagcattcagttattcttggtgtgcattggaaggcatccagctatccccataccagcagccagtcaccagatgtgaatgtggaagcagaagaccacctcctgttggttcttctcctcttccttctttttctctttagaacggccaccattgaagacctagcttcccattttccagacgttttctctgaaattctctgctggcctgccaagccatatggattcattctgccactgaggagtccttcagtgaggtccctcttcctaaaggacagagtggggagtaggaggggaacagagaggacatcctctctggctctccagtgctcttagtgtctacaggctcctaggcagccctgggccttggtttgattacctcccctgggggatgctggtcagacccagaggttgtcaggaggtcagctaccaggaagatccatgatctgggcattggcagtgcctgccaccacagccaggaagatgcctctgacctgggtgcatctccatcactccttagcagcagcctgcataactggcaagaatcttggatgatacaagagccaagaagggacatttgagttgtgtcgcttagataggaaagggatccagggaaaatcaacagtaagtgaggatgagcagtgtctcttggttttcattgaggatagagtaagagattgagtttagattgcaacagaaggaattagtttagataccaggaagaacttcctagcctgaagatttgtcatagtgtctgctttctagatatctgggaaagatttgataatagttgtttgtgaatagaaaggaggatatgatgtttttattggccattttgcgggactcttcgacttcttgctgctgtctcttgaggatacattccaattccatcctggcgagatccaagtgcttacgtactgtctccttagctgccttagagtaaacgatcatcagttcaatggaccaaaatcaccttcagccatgtggtttcttcatcatcatggatttcttttggttgacaaacattctggctctcagatgcaaaaagtcacactgggaaatgaactgtaagtggtgaaattagttttggtatttaatttaaaactacatttatagtttttctcttctcttctatgttgcaatgaatgtaaagtatttgggatccagtgcttataaacctttccttcctttgtgcacagaatgtaactagcaagcccattagcacccagataattctatcatgttagtttcccatcctggaaaatctttgtacagtgggaagttccccgatgtgtttttctttcttaggtgaagggttggctatatcactttattgaattttgcattccttagacttttaaaatatactaatgtattctagtcttactctaaagacctttgatgttaaaggaatccttcatttatttcatattccctatctcatagggccacaattattttaatacagagatgattttcaaaatattttaacaactggtacaggacagatgccagccactcagaagggatgcctgctgtaaacaagcagtatgtatggttgtaccaatgcctattggctgaacattatgctactttcagatattaaaatggtgttcctttgaatcgtgggtattgttcctggtttgtctcatttctatcacaaggctgttttgggcacagccttagcttcctttcatatatatatggtgcagacaggataggtcatgcttcttggaacctatatgggcattaaaatcttcatgagccaaagcttcacattttagcactttaggataactgtagtaattgtactcatttacctacctaattgggaagaattaaaaggcagcccatctggaggataagctttcttgcagacttttcccttgtccctctctggctgcctccttgagcttgccactttttcatcttcattgttccctgagaacatctcccctttcttgctctatcttgcccctcccatcttttcctgccacctctgtgtggggaggttgatgaccatttcacctctttccctagcctcagcacagctgtaaggagtgtatcaaaactgggtgagagtatcactcagaaaaatgcctcccctaacacacggatgtcttgtgctgccttgaccgcttgaggggaggagccttcattaactctgtgtagtgcaggtacaggaccacctgtgcactttagggtacttctcgagctagaccctcctggatcactgcgccttaggaatgttagctactttttaaaaaaaatatgatttggtgcgttgttggggtgaactccatggggaagattgtgagtgaagatgggaaggaatttgggtggttttgccacgaggtgatggttggggttgggcgaatgggttggatgatcctggctctgtgggtgtggtgctcggttgcctccgtacagttgcagttcacctttgtgcatggtgattaccagtcactctagggattgtaggtcccaacagcggttccagcagcctgcacagctggtacgaggacagctggaggagggtctgatatccctgcaagtgatgcaggataaaacttcccggccgggcgcaatggctcgcgcctgtaatcccagcactttgggaggccaagatgggcggatcacgaggtcaggagatcgagaccatcctggctaacgtggtgaaaccccgtctctactaaaaatacaaaaaaattagctgggcatggtggcgggcgcctgtagtcccagctattcaggaggctgaggcagaatggcgtgaacgcgggaggcagagcttgcagtgagccgagatcatgccactgcactccagcctgggtgacagagcaagactccatttcaaaaaaaaaaaaaaaaaaaaacttcccaataggaggtattccttgatggctctcgaatgcatgaatgatatatcaatttgaagtttctcgacctttccatcaaggatcttgaattttttctcaattatgcttgctaatgtgtcaaaggccaagtacactgtatcaaacttgccgtctgtaagatgcaagatcaatctagtgtttcagccagttcactactgacatcagactcaactttgtcccctctctttcttttcatgcaagagactttaagggtaacctcttcagttgaaactgtcttggaagtgcagccctcctcctgtgtggctagagaaagagatggcaccaggatctcttaacggcaagtgctcacggggcatgggtgattttgtctagtctggtccttttggacgtggtgatttcctgtcatcctcgtggtctgacattgcttctcactggatactggttgtggcctttgactcattagctgattgttggatctctttgtgaggttcgattttttaaaaatccatgggtccctatggactgtcacctgttgcagatgatggtgattctcttcttttttttgtctccaatagttgcctggacgacttcatgggtcagtccacatgattgcaggatttcccattgttcatctgtgaatgttgattggccaacctgtctgagctttcagcagatgcatccttgagcttactttcaggaattcctcctggaattggttttccttggtggtaatttctcatggtggagcttgtttctgaggcatggtacagtgctgcggaggcaaggcaaggctgtcatggtgattttcacagcatctggatggcaaattgccttcacgtagggaaaccacatgggactgatagctttctcaagggatctccaagcatctctgaatttggggatttcatcagttactcctggaatcaaaatgagtgtggagtcataatatatattttttttgagacaaagtctcactctgtcgcccaggctggagtgcagtggtgcgatctcatctcactgcaacctctgcctcctgggttcaagtgattctcctgcctcagcctcccaagtagctaggattacaggtgcgcaccaccatgcccagctaatttttgtattttagtagagacgaagtttcactatgttggccaggctggtctgaaactcctggcctcaggtgatccacccacctcagcctcccaaagtgctgggattacaggtatgagccactgcccctggcctcaaaatctttaaggaagttatttatcgtcacaagtgttgtcatctgtgactcatgggccacttgatgaacctgaaccattagtggttgtccagatcctccaactttttcaggcagtattccaatcagggttttacgacaccagggtatcccaccttttttgcaacataggcagaaacaccaagctgtgggtaattgatgtgcgtgtcactgattcctgcaacagctttgaatgtattaaatctgttttcaacagcccttgcataggtgttatctctcaaatctctgtaaagagcactaagagtatgtagtgttgcatgatataatccaagcctgtgggctgtgtcatccgggattgttggaattttgcatgtgtctgttccatatcccgctggtaaccagcttacagaccttctgtcaggttggcttacattatcatcaacaggttgccgtagtgatgatatgatgctggacacaatcattgtgcactttgttaatttggtatggtggtgccacacattatcactgtacagcattaacaaggctggaatatggccctctgctgtagggggcgtggcacctgtgacttgcactggaataagtaggaggctttccccaaaggatatggagactgatgtgtgctccatatcttgaggggagctctcttggtttcctttggccgggtctgttagttacttttgaaggccatgccaacccttttaggccattaaatttttctcaaacaatagccagcctcatttctgcttcatctctgtggtaggaaccattccctactcttactccctcctcttgtccaacttccaccaaacactcaatccgagtcctggctgctttcttgcttaggtctgtggctggtcactgtggtgaaagagtcaaggtgggcagtgtttggggtaggaaatgagtagtggtgaagcagcagcagtgtgtgtgtgggtgtgggtgtgtgtgcatgcgtgtgcatttgcatgtgtgtatgttgacaaatgagagtgtagccataagatttcattgttactactagtctttgtgtacctatctggagggacattaaaaaaatatggccattctcccatctagggggttcccatctcagacttctctgataagagtaatttgagaacaaatacagattcatctatgggaaaagatgtttaaactcagcatgaaggagaaacaaatttaggagtggaaagcaaggcaggtagttaggtgatttccatgaccacatttgcttgggccagggaagtggtgcacctcttttataacaatgggagatttcagaaacagtttgagtgttggcagaccaatgccctgataagcttgtggtatagaggtaggaagggagggaggccagagattagataaaatgatggtgggtgggatcttagctctaaatgaaaagaactggacttactaagtgggtggattacttgctagccataacttttagggaagggtaggtctggagagaaggtgaagaccagcagaaatatactgtgaaattgccaaatatgtttggttgcagaaaacacagcctggctctttgtggctagatgtgacttccaacttctgaagacaggattgccaagagatgtgatctttccacatacagctcctgtccccatctctttatgtgtagagacctggatttggggtagtggggtagtaaaccatatatttccaaaagatggtgtgaagagtcgtttctcttcgtctgggatgtgattggcttttgttttttgttttttgtttttgagacggagtctcgctctgtcgctttgtcaccaggctggagtgcaatggcacaatctcagctcactgcaacctccgcctcctggcttcaagtgattctcctgcctcagcctcctgagtagctgggactataggcgcgcaccaccatgcccagctaatttttgtatttttagtagagatgggatttcaccatgttggccaggatggtcttgatctcttgacctcatgatccacccgccttggcctcccaaagtgctgggattacaggcttgagctactgcgcccggccagtgattggcttttaaattaatcacaaatgtttgataaaattctggtatgtgctaagtcccaggcttggttgatatctcagactatgatagctgtgaccttcaagaaatttctggcttggggaatctgtagtttctggttgtccaaaaaagatagttcttagtcctactttattttctacccactcaactctccagacttccctcttagtaaaggaattcataattctccctgcatcttctctgtttatttcaatgtccatgttctgagtctcaagttttcctgaagcacaggagcaggcttggccccagagcccctggctttttcaacgagcatcagaaatgctatcaatatattctctctgttgctttatcagcttctctaaatttattttgtaaggaagttagcacctccttccaggactttaaacagttgtctttgccaatttgttcctggattttccttgaacttctcaggtttccaagccacatcctagcagggcatccaggagccttgcactgaacctctcagctcttttgactttcttctggtcataggtgttgggcctcccattaggtagaagtcctttgagcagacccgaaatggccaaatgagacatcatccaagttcctccctcctttactgtctcggctttttcaagcacccctttcacctctcttttctgccttttcctcagtctgtcaagttctttggaggaaagaagttcttggtcagaggtcctaaaaccaccaccagctgggggtgctgagaatggtgaggagttggacagtcccggggcttttttgaaaggggactttatggtcatttcccctgtttagggtgagggactaagaattctcaagccttcagtttcatccatatttcaatgtaagcagaaaagcacatctcaaagccaaatagaaatgattttctactaagcctatcctttgtgattcttggttcccttggtctcttaatattaattatagagaatgggcagttgagtcagttaacatcttttcatcagaaaggagggtaatattcataaccaaaagagatgtaaaggaagtatattactgcttgaagtgtgaaaagaggaaaggagtgttatgtgaaccttttcagtagggaaattcagaaaatggaatgattcatccataggcataattcttttaggagattctgtgctcaaagggaagggaatggtttctgatccttctgaagagaaaaggaatagcatttttcttaaacctaacccagtttcagcattggagaatacagaactttttcttctagctgatggcattaatatttcttgagagagagaactcacccatggcacttttctgagcccagcagaaatcagcggagcttgggcttcgcttagcaggtttgcaattgacttcaacatgcaggcttttcacatgtgcaataatgctggaaacagaagcaccaaactgattgtgcaattactccttttgtagaagaggccaaaatcctcctcctccttcctttctcctatattcactcctccaggatcataaagcctccctcttgtttatctgtgtctgtctgtctgattggttagatttggctgcccttccaagctaatggtgtcaggtggagaacagagcaaccttccctcggaaggagacaattcgaggtgctggtacatttcccttgttttctatgttcttctttctagtgggtctcatgtagagatagagatatttttttgttttagagattccaaagtatatatttttagtgtaagaaatgtaccctctccacactccatgatgtaaatagaaccaggaataaatgtgtcattgtgataatcccatagcaatttatggtaagaacaagacccctttccctcaccaccgagtctcgtggtctgtgtctgtgaaccagggcaggtaattgtgacactgcatctcatagaactctgcctgcccagatttttgtgtgctcacctcaatgggtgaaaaataaagtctgtgtaaactgtt

SEQ ID NO: 184208 - DNA, 11824 bp, Homo sapiens
  Payload ID: 16280
  Gene Symbol: SLC4A8
  Gene Name: solute carrier family 4, sodium bicarbonate cotransporter, member 8
  Uniprot ID: Q2Y0W8
  ENST ID: ENST00000453097
  CDS Start-End: 218-3499
gtgctccgcgccctgattggctgcgcaggcctctcgctgattggttgcggcggatgcctcgcgggccggtggctatggaggcggcggcggttgatggttgaccgttggctccggggtgggggtcgccgttcgagtgatctgctcagacccgaccagagggcgcgggctgctgatgcttggcttggagcccgtgggggagacctagttcggctccgccatgccggccgccgggagtaacgagccggacggcgtcctcagctatcagagaccagatgaagaagctgtggtggatcagggtgggaccagtacaattctcaacattcactatgaaaaagaagagctggaaggtcacagaactctgtatgtgggagttcggatgccgcttggccggcagagccatcggcatcaccgcactcatggccagaagcaccggagacgagggcggggcaaaggagccagccagggggaggaaggcctggaagccctggcccacgacacaccatctcagcgtgttcagttcattcttggcaccgaggaagatgaagagcatgtgcctcatgagctgtttacagagctggatgagatctgtatgaaagagggagaagatgctgagtggaaggaaacagccaggtggctgaagtttgaagaagatgttgaagatgggggagaacgctggagcaagccttatgtggcaaccctttcattgcacagcctgtttgagctaaggagctgccttattaatggaacagtcctcctggatatgcatgcaaatagcatagaagaaatttcagacctgatcctggatcagcaagaactgtccagtgacctgaatgacagcatgagggttaaagtgcgggaagcccttctcaaaaagcatcatcatcagaatgaaaagaagagaaacaacctcattcccattgttcgctcctttgctgaggttggcaagaagcagtctgatcctcatttgatggataaacatggtcaaaccgtgtctcctcagtctgttccaactacaaatcttgaagtaaaaaatggagtgaattgtgaacatagtcctgtggatttaagcaaggtagaccttcatttcatgaaaaaaattcctactggggccgaggcctccaatgtcctggttggagaggtggatattttggaccgtcccattgttgcctttgtgaggctgtctccagctgttcttctctcaggcctaacagaagtgccaatcccaacaagatttttgtttatcttattgggtccagtagggaaaggtcagcagtaccatgagattggcagatccatggccaccatcatgacagatgagatttttcatgacgtagcatataaggcaaaagagcgagatgatctcctggcggggattgatgagttcctagaccaggtgacggtgctccctccaggagagtgggatccctccattagaattgagccacccaaaaatgtcccttcccaggagaaaaggaaaatgcctggagttccaaatggaaatgtttgccacatagaacaggaaccacatgggggtcacagtgggccagaacttcagcgcactgggcggctatttgggggcttggtgctggacatcaagcggaaggccccctggtactggagcgactaccgagatgcactcagcttacagtgtttggcttcctttctgttcctgtactgtgcctgcatgtcacctgtcatcacctttgggggactgcttggagaagccactgagggacgcataagtgcaattgaatccttgtttggagcttccatgactgggattgcttattccttgtttgcgggacaggctctcaccatcctgggaagtactggaccagtgcttgtgtttgaaaagattttgttcaaattctgcaaagactatgctctttcatacctctccctgcgagcttgtattggactgtggaccgctttcctgtgtattgtccttgtggcaactgatgccagttcccttgtctgctacattacccgtttcactgaagaagcatttgcctccctaatttgcattattttcatctatgaagcaatagaaaaactgattcacctggcagagacctaccccatccacatgcacagccagctggaccaccttagcctctattactgcaggtgtactctgccagagaatccaaacaatcacaccctccagtactggaaggaccacaacatcgtgacagcagaagtccactgggctaacctgactgtcagtgaatgccaggagatgcatggagagttcatgggatctgcgtgcggccatcatggaccctacactcctgatgtcctcttttggtcctgtattctctttttcaccaccttcatcctctcaagcaccttaaagacgtttaagacgagccgttatttcccaaccagagtacgctccatggtgagtgactttgctgttttcctcactatcttcacaatggtgattattgattttttgattggagtcccatcaccaaagcttcaagttcccagtgtgttcaagccaacaagggatgatcgcggatggattattaatcccattggccccaatccctggtggactgtgatagctgcaattatcccagctcttctctgtactatcttgatattcatggatcagcagatcacagccgtcattattaacaggaaggaacataagctcaagaaaggctgtggctaccacctggacctactgatggtggccatcatgctgggtgtctgctccatcatgggcctgccctggtttgtagctgcaactgtcttgtccatcacacatgtgaacagcctcaagctagaatctgaatgctctgctcctggagaacagcccaagttcctgggcatccgagaacagagagtgacaggccttatgatctttgtgctgatgggctgctcagtcttcatgacggctatcttaaagtttattccaatgccagtactctacggagttttcctttacatgggagtttcttcactacagggaattcagttctttgatcgtctaaagctctttgggatgcccgcaaagcaccagccagatttcatctacctgcggcatgtgccgctgcgcaaagtgcacctcttcaccctcatccagttgacctgtctcgtcctgctctgggtcatcaaggcatctccagctgccattgttttcccaatgatggttttggccttggtctttgtcaggaaagtcatggatctctgtttctctaagcgagagctgagctggctagatgatctcatgcctgaaagcaaaaagaagaagttggatgatgccaaaaagaaggccaaggaggaagaggaggctgagaaaatgttagaaattgggggagacaagtttcccttagagagcaggaagttactaagtagtcctggaaagaacatcagttgcagatgtgacccctctgagattaatatatctgatgaaatgcctaaaactacagtttggaaagctctcagtatgaattctggaaatgcaaaggaaaagagtctcttcaactaagagtctttgctgggatggaagatttgggccgtgtggtgcctcagggaagttctggttacagagaaaatggcgagtctctcagagaagaagcaagaccaagtctggccctgtccttggtcatctcaaagccatgccgaagcattcagttattcttggtgtgcattggaaggcatccagctatccccataccagcagccagtcaccagatgtgaatgtggaagcagaagaccacctcctgttggttcttctcctcttccttctttttctctttagaacggccaccattgaagacctagcttcccattttccagacgttttctctgaaattctctgctggcctgccaagccatatggattcattctgccactgaggagtccttcagtgaggtccctcttcctaaaggacagagtggggagtaggaggggaacagagaggacatcctctctggctctccagtgctcttagtgtctacaggctcctaggcagccctgggccttggtttgattacctcccctgggggatgctggtcagacccagaggttgtcaggaggtcagctaccaggaagatccatgatctgggcattggcagtgcctgccaccacagccaggaagatgcctctgacctgggtgcatctccatcactccttagcagcagcctgcataactggcaagaatcttggatgatacaagagccaagaagggacatttgagttgtgtcgcttagataggaaagggatccagggaaaatcaacagtaagtgaggatgagcagtgtctcttggttttcattgaggatagagtaagagattgagtttagattgcaacagaaggaattagtttagataccaggaagaacttcctagcctgaagatttgtcatagtgtctgctttctagatatctgggaaagatttgataatagttgtttgtgaatagaaaggaggatatgatgtttttattggccattttgcgggactcttcgacttcttgctgctgtctcttgaggatacattccaattccatcctggcgagatccaagtgcttacgtactgtctccttagctgccttagagtaaacgatcatcagttcaatggaccaaaatcaccttcagccatgtggtttcttcatcatcatggatttcttttggttgacaaacattctggctctcagatgcaaaaagtcacactgggaaatgaactgtaagtggtgaaattagttttggtatttaatttaaaactacatttatagtttttctcttctcttctatgttgcaatgaatgtaaagtatttgggatccagtgcttataaacctttccttcctttgtgcacagaatgtaactagcaagcccattagcacccagataattctatcatgttagtttcccatcctggaaaatctttgtacagtgggaagttccccgatgtgtttttctttcttaggtgaagggttggctatatcactttattgaattttgcattccttagacttttaaaatatactaatgtattctagtcttactctaaagacctttgatgttaaaggaatccttcatttatttcatattccctatctcatagggccacaattattttaatacagagatgattttcaaaatattttaacaactggtacaggacagatgccagccactcagaagggatgcctgctgtaaacaagcagtatgtatggttgtaccaatgcctattggctgaacattatgctactttcagatattaaaatggtgttcctttgaatcgtgggtattgttcctggtttgtctcatttctatcacaaggctgttttgggcacagccttagcttcctttcatatatatatggtgcagacaggataggtcatgcttcttggaacctatatgggcattaaaatcttcatgagccaaagcttcacattttagcactttaggataactgtagtaattgtactcatttacctacctaattgggaagaattaaaaggcagcccatctggaggataagctttcttgcagacttttcccttgtccctctctggctgcctccttgagcttgccactttttcatcttcattgttccctgagaacatctcccctttcttgctctatcttgcccctcccatcttttcctgccacctctgtgtggggaggttgatgaccatttcacctctttccctagcctcagcacagctgtaaggagtgtatcaaaactgggtgagagtatcactcagaaaaatgcctcccctaacacacggatgtcttgtgctgccttgaccgcttgaggggaggagccttcattaactctgtgtagtgcaggtacaggaccacctgtgcactttagggtacttctcgagctagaccctcctggatcactgcgccttaggaatgttagctactttttaaaaaaaatatgatttggtgcgttgttggggtgaactccatggggaagattgtgagtgaagatgggaaggaatttgggtggttttgccacgaggtgatggttggggttgggcgaatgggttggatgatcctggctctgtgggtgtggtgctcggttgcctccgtacagttgcagttcacctttgtgcatggtgattaccagtcactctagggattgtaggtcccaacagcggttccagcagcctgcacagctggtacgaggacagctggaggagggtctgatatccctgcaagtgatgcaggataaaacttcccggccgggcgcaatggctcgcgcctgtaatcccagcactttgggaggccaagatgggcggatcacgaggtcaggagatcgagaccatcctggctaacgtggtgaaaccccgtctctactaaaaatacaaaaaaattagctgggcatggtggcgggcgcctgtagtcccagctattcaggaggctgaggcagaatggcgtgaacgcgggaggcagagcttgcagtgagccgagatcatgccactgcactccagcctgggtgacagagcaagactccatttcaaaaaaaaaaaaaaaaaaaaacttcccaataggaggtattccttgatggctctcgaatgcatgaatgatatatcaatttgaagtttctcgacctttccatcaaggatcttgaattttttctcaattatgcttgctaatgtgtcaaaggccaagtacactgtatcaaacttgccgtctgtaagatgcaagatcaatctagtgtttcagccagttcactactgacatcagactcaactttgtcccctctctttcttttcatgcaagagactttaagggtaacctcttcagttgaaactgtcttggaagtgcagccctcctcctgtgtggctagagaaagagatggcaccaggatctcttaacggcaagtgctcacggggcatgggtgattttgtctagtctggtccttttggacgtggtgatttcctgtcatcctcgtggtctgacattgcttctcactggatactggttgtggcctttgactcattagctgattgttggatctctttgtgaggttcgattttttaaaaatccatgggtccctatggactgtcacctgttgcagatgatggtgattctcttcttttttttgtctccaatagttgcctggacgacttcatgggtcagtccacatgattgcaggatttcccattgttcatctgtgaatgttgattggccaacctgtctgagctttcagcagatgcatccttgagcttactttcaggaattcctcctggaattggttttccttggtggtaatttctcatggtggagcttgtttctgaggcatggtacagtgctgcggaggcaaggcaaggctgtcatggtgattttcacagcatctggatggcaaattgccttcacgtagggaaaccacatgggactgatagctttctcaagggatctccaagcatctctgaatttggggatttcatcagttactcctggaatcaaaatgagtgtggagtcataatatatattttttttgagacaaagtctcactctgtcgcccaggctggagtgcagtggtgcgatctcatctcactgcaacctctgcctcctgggttcaagtgattctcctgcctcagcctcccaagtagctaggattacaggtgcgcaccaccatgcccagctaatttttgtattttagtagagacgaagtttcactatgttggccaggctggtctgaaactcctggcctcaggtgatccacccacctcagcctcccaaagtgctgggattacaggtatgagccactgcccctggcctcaaaatctttaaggaagttatttatcgtcacaagtgttgtcatctgtgactcatgggccacttgatgaacctgaaccattagtggttgtccagatcctccaactttttcaggcagtattccaatcagggttttacgacaccagggtatcccaccttttttgcaacataggcagaaacaccaagctgtgggtaattgatgtgcgtgtcactgattcctgcaacagctttgaatgtattaaatctgttttcaacagcccttgcataggtgttatctctcaaatctctgtaaagagcactaagagtatgtagtgttgcatgatataatccaagcctgtgggctgtgtcatccgggattgttggaattttgcatgtgtctgttccatatcccgctggtaaccagcttacagaccttctgtcaggttggcttacattatcatcaacaggttgccgtagtgatgatatgatgctggacacaatcattgtgcactttgttaatttggtatggtggtgccacacattatcactgtacagcattaacaaggctggaatatggccctctgctgtagggggcgtggcacctgtgacttgcactggaataagtaggaggctttccccaaaggatatggagactgatgtgtgctccatatcttgaggggagctctcttggtttcctttggccgggtctgttagttacttttgaaggccatgccaacccttttaggccattaaatttttctcaaacaatagccagcctcatttctgcttcatctctgtggtaggaaccattccctactcttactccctcctcttgtccaacttccaccaaacactcaatccgagtcctggctgctttcttgcttaggtctgtggctggtcactgtggtgaaagagtcaaggtgggcagtgtttggggtaggaaatgagtagtggtgaagcagcagcagtgtgtgtgtgggtgtgggtgtgtgtgcatgcgtgtgcatttgcatgtgtgtatgttgacaaatgagagtgtagccataagatttcattgttactactagtctttgtgtacctatctggagggacattaaaaaaatatggccattctcccatctagggggttcccatctcagacttctctgataagagtaatttgagaacaaatacagattcatctatgggaaaagatgtttaaactcagcatgaaggagaaacaaatttaggagtggaaagcaaggcaggtagttaggtgatttccatgaccacatttgcttgggccagggaagtggtgcacctcttttataacaatgggagatttcagaaacagtttgagtgttggcagaccaatgccctgataagcttgtggtatagaggtaggaagggagggaggccagagattagataaaatgatggtgggtgggatcttagctctaaatgaaaagaactggacttactaagtgggtggattacttgctagccataacttttagggaagggtaggtctggagagaaggtgaagaccagcagaaatatactgtgaaattgccaaatatgtttggttgcagaaaacacagcctggctctttgtggctagatgtgacttccaacttctgaagacaggattgccaagagatgtgatctttccacatacagctcctgtccccatctctttatgtgtagagacctggatttggggtagtggggtagtaaaccatatatttccaaaagatggtgtgaagagtcgtttctcttcgtctgggatgtgattggcttttgttttttgttttttgtttttgagacggagtctcgctctgtcgctttgtcaccaggctggagtgcaatggcacaatctcagctcactgcaacctccgcctcctggcttcaagtgattctcctgcctcagcctcctgagtagctgggactataggcgcgcaccaccatgcccagctaatttttgtatttttagtagagatgggatttcaccatgttggccaggatggtcttgatctcttgacctcatgatccacccgccttggcctcccaaagtgctgggattacaggcttgagctactgcgcccggccagtgattggcttttaaattaatcacaaatgtttgataaaattctggtatgtgctaagtcccaggcttggttgatatctcagactatgatagctgtgaccttcaagaaatttctggcttggggaatctgtagtttctggttgtccaaaaaagatagttcttagtcctactttattttctacccactcaactctccagacttccctcttagtaaaggaattcataattctccctgcatcttctctgtttatttcaatgtccatgttctgagtctcaagttttcctgaagcacaggagcaggcttggccccagagcccctggctttttcaacgagcatcagaaatgctatcaatatattctctctgttgctttatcagcttctctaaatttattttgtaaggaagttagcacctccttccaggactttaaacagttgtctttgccaatttgttcctggattttccttgaacttctcaggtttccaagccacatcctagcagggcatccaggagccttgcactgaacctctcagctcttttgactttcttctggtcataggtgttgggcctcccattaggtagaagtcctttgagcagacccgaaatggccaaatgagacatcatccaagttcctccctcctttactgtctcggctttttcaagcacccctttcacctctcttttctgccttttcctcagtctgtcaagttctttggaggaaagaagttcttggtcagaggtcctaaaaccaccaccagctgggggtgctgagaatggtgaggagttggacagtcccggggcttttttgaaaggggactttatggtcatttcccctgtttagggtgagggactaagaattctcaagccttcagtttcatccatatttcaatgtaagcagaaaagcacatctcaaagccaaatagaaatgattttctactaagcctatcctttgtgattcttggttcccttggtctcttaatattaattatagagaatgggcagttgagtcagttaacatcttttcatcagaaaggagggtaatattcataaccaaaagagatgtaaaggaagtatattactgcttgaagtgtgaaaagaggaaaggagtgttatgtgaaccttttcagtagggaaattcagaaaatggaatgattcatccataggcataattcttttaggagattctgtgctcaaagggaagggaatggtttctgatccttctgaagagaaaaggaatagcatttttcttaaacctaacccagtttcagcattggagaatacagaactttttcttctagctgatggcattaatatttcttgagagagagaactcacccatggcacttttctgagcccagcagaaatcagcggagcttgggcttcgcttagcaggtttgcaattgacttcaacatgcaggcttttcacatgtgcaataatgctggaaacagaagcaccaaactgattgtgcaattactccttttgtagaagaggccaaaatcctcctcctccttcctttctcctatattcactcctccaggatcataaagcctccctcttgtttatctgtgtctgtctgtctgattggttagatttggctgcccttccaagctaatggtgtcaggtggagaacagagcaaccttccctcggaaggagacaattcgaggtgctggtacatttcccttgttttctatgttcttctttctagtgggtctcatgtagagatagagatatttttttgttttagagattccaaagtatatatttttagtgtaagaaatgtaccctctccacactccatgatgtaaatagaaccaggaataaatgtgtcattgtgataatcccatagcaatttatggtaagaacaagacccctttccctcaccaccgagtctcgtggtctgtgtctgtgaaccagggcaggtaattgtgacactgcatctcatagaactctgcctgcccagatttttgtgtgctcacctcaatgggtgaaaaataaagtctgtgtaaactgtt

SEQ ID NO: 184209 - DNA, 2262 bp, Homo sapiens
  Payload ID: 16280
  Gene Symbol: SLC4A8
  Gene Name: solute carrier family 4, sodium bicarbonate cotransporter, member 8
  Uniprot ID: Q2Y0W8
  ENST ID: ENST00000535225
  CDS Start-End: 284-2200
attcatctcgtaagcgccaaggtggaggggggtcctaccgagggaggagctacaggccaccgcgaccagcagagagcgaaggcaggagggaccagcctggcccagccccttcattttactgtcgggggtagtgaggaggaagaggaagaggcgaaggctggcggaggaggagagaccagatgaagaagctgtggtggatcagggtgggaccagtacaattctcaacattcactatgaaaaagaagagctggaaggtcacagaactctgtatgtgggagttcggatgccgcttggccggcagagccatcggcatcaccgcactcatggccagaagcaccggagacgagggcggggcaaaggagccagccagggggaggaaggcctggaagccctggcccacgacacaccatctcagcgtgttcagttcattcttggcaccgaggaagatgaagagcatgtgcctcatgagctgtttacagagctggatgagatctgtatgaaagagggagaagatgctgagtggaaggaaacagccaggtggctgaagtttgaagaagatgttgaagatgggggagaacgctggagcaagccttatgtggcaaccctttcattgcacagcctgtttgagctaaggagctgccttattaatggaacagtcctcctggatatgcatgcaaatagcatagaagaaatttcagacctgatcctggatcagcaagaactgtccagtgacctgaatgacagcatgagggttaaagtgcgggaagcccttctcaaaaagcatcatcatcagaatgaaaagaagagaaacaacctcattcccattgttcgctcctttgctgaggttggcaagaagcagtctgatcctcatttgatggataaacatggtcaaaccgtgtctcctcagtctgttccaactacaaatcttgaagtaaaaaatggagtgaattgtgaacatagtcctgtggatttaagcaaggtagaccttcatttcatgaaaaaaattcctactggggccgaggcctccaatgtcctggttggagaggtggatattttggaccgtcccattgttgcctttgtgaggctgtctccagctgttcttctctcaggcctaacagaagtgccaatcccaacaagatttttgtttatcttattgggtccagtagggaaaggtcagcagtaccatgagattggcagatccatggccaccatcatgacagatgagatttttcatgacgtagcatataaggcaaaagagcgagatgatctcctggcggggattgatgagttcctagaccaggtgacggtgctccctccaggagagtgggatccctccattagaattgagccacccaaaaatgtcccttcccaggagaaaaggaaaatgcctggagttccaaatggaaatgtttgccacatagaacaggaaccacatgggggtcacagtgggccagaacttcagcgcactgggcggctatttgggggcttggtgctggacatcaagcggaaggccccctggtactggagcgactaccgagatgcactcagcttacagtgtttggcttcctttctgttcctgtactgtgcctgcatgtcacctgtcatcacctttgggggactgcttggagaagccactgagggacgcataagtgcaattgaatccttgtttggagcttccatgactgggattgcttattccttgtttgcgggacaggctctcaccatcctgggaagtactggaccagtgcttgtgtttgaaaagattttgttcaaattctgcaaagactatgctctttcatacctctccctgcgagcttgtattggactgtggaccgctttcctgtgtattgtccttgtggcaactgatgccagttcccttgtctgctacattacccgtttcactgaagaagcatttgcctccctaatttgcattattttcatctatgaagcaatagaaaaactgattcacctggcagagacctaccccatccacatgcacagccagctggaccaccttagcctctattactgcaggtgtactctgccagagaatccaaacaatcacaccctccagtactggaaggaccacaacatcgtgacagcagaagtccactgggctaacctgactgtcagtgtaagtctgggagctgccagatgtcctagcattgtgaccacaggtttaggagggacttctaagtgaaggggaggagtagccctttggccaaactctggcatttaccgaaataaagctttttaaaaaac

SEQ ID NO: 184210 - DNA, 3041 bp, Homo sapiens
  Payload ID: 16280
  Gene Symbol: SLC4A8
  Gene Name: solute carrier family 4, sodium bicarbonate cotransporter, member 8
  Uniprot ID: Q2Y0W8
  ENST ID: ENST00000514353
  CDS Start-End: 410-2653
cccgagcccaggcttcccaggccgctccctgagggcgaggggaggccagcccgggacaccagggggcgctccgggcggttggggaccaggccagggctgcgagagagtgaccttgggccgaacctgggatctggcccatctctgccgcatcccttgcgccgcccgcccaggagccctgacagccggcgggcggcgacctcttgttctcctcgcgtctttctgttggaaggggccggcgtctggcctcgcgttgtcctgccagaacgtgggcagaaagggtagcagggaccttgctctgagaccagatgaagaagctgtggtggatcagggtgggaccagtacaattctcaacattcactatgaaaaagaagagctggaaggtcacagaactctgtatgtgggagttcggatgccgcttggccggcagagccatcggcatcaccgcactcatggccagaagcaccggagacgagggcggggcaaaggagccagccagggggaggaaggcctggaagccctggcccacgacacaccatctcagcgtgttcagttcattcttggcaccgaggaagatgaagagcatgtgcctcatgagctgtttacagagctggatgagatctgtatgaaagagggagaagatgctgagtggaaggaaacagccaggtggctgaagtttgaagaagatgttgaagatgggggagaacgctggagcaagccttatgtggcaaccctttcattgcacagcctgtttgagctaaggagctgccttattaatggaacagtcctcctggatatgcatgcaaatagcatagaagaaatttcagacctgatcctggatcagcaagaactgtccagtgacctgaatgacagcatgagggttaaagtgcgggaagcccttctcaaaaagcatcatcatcagaatgaaaagaagagaaacaacctcattcccattgttcgctcctttgctgaggttggcaagaagcagtctgatcctcatttgatggataaacatggtcaaaccgtgtctcctcagtctgttccaactacaaatcttgaagtaaaaaatggagtgaattgtgaacatagtcctgtggatttaagcaaggtagaccttcatttcatgaaaaaaattcctactggggccgaggcctccaatgtcctggttggagaggtggatattttggaccgtcccattgttgcctttgtgaggctgtctccagctgttcttctctcaggcctaacagaagtgccaatcccaacaagatttttgtttatcttattgggtccagtagggaaaggtcagcagtaccatgagattggcagatccatggccaccatcatgacagatgagatttttcatgacgtagcatataaggcaaaagagcgagatgatctcctggcggggattgatgagttcctagaccaggtgacggtgctccctccaggagagtgggatccctccattagaattgagccacccaaaaatgtcccttcccaggagaaaaggaaaatgcctggagttccaaatggaaatgtttgccacatagaacaggaaccacatgggggtcacagtgggccagaacttcagcgcactgggcggctatttgggggcttggtgctggacatcaagcggaaggccccctggtactggagcgactaccgagatgcactcagcttacagtgtttggcttcctttctgttcctgtactgtgcctgcatgtcacctgtcatcacctttgggggactgcttggagaagccactgagggacgcataagtgcaattgaatccttgtttggagcttccatgactgggattgcttattccttgtttgcgggacaggctctcaccatcctgggaagtactggaccagtgcttgtgtttgaaaagattttgttcaaattctgcaaagactatgctctttcatacctctccctgcgagcttgtattggactgtggaccgctttcctgtgtattgtccttgtggcaactgatgccagttcccttgtctgctacattacccgtttcactgaagaagcatttgcctccctaatttgcattattttcatctatgaagcaatagaaaaactgattcacctggcagagacctaccccatccacatgcacagccagctggaccaccttagcctctattactgcaggtgtactctgccagagaatccaaacaatcacaccctccagtactggaaggaccacaacatcgtgacagcagaagtccactgggctaacctgactgtcagtgaatgccaggagatgcatggagagttcatgggatctgcgtgcggccatcatggaccctacactcctgatgtcctcttttggtcctgtattctctttttcaccaccttcatcctctcaagcaccttaaagacgtttaagacgagccgttatttcccaaccagaatggagtcttgctctgtcgcctggctggagtgcggtggtgtgatcttggctcactgcaacctccgcctcctcccgagtagctgggactacaggcacgcaccaccacagccagctaatttttgtatttttagtagagacggggtttccccatgttggccaggatggtctcaatctcttgacctcgtgatctgcctgcctcggcctcccaaaatgctgggattacaagcatgagcctggccaagtgctattctttatttcagattgagagttgggaaaaactggagcaaataatggatttctttcttgcttaaaatgtatttatatgtatgtcttattatatacaaggcagatttccctggaataaaagtctagaatgtgctgcttaattttacacatgtgtgcaggcaatattatctgtgagtgaaaagtggaataatacgtggattgggtcaactgattatcagcttgttaggagtcctctgtgtgagacatggtggtataattgtgaagttctcactgtatgtggatgttcatgtgaaagatagtactttcttcccgtaaatatcttttgatttccatttgtatggaatcccaatgaatgtatctttggaaaacataa

SEQ ID NO: 184211 - DNA, 3086 bp, Homo sapiens
  Payload ID: 16281
  Gene Symbol: SLC4A9
  Gene Name: solute carrier family 4, sodium bicarbonate cotransporter, member 9
  Uniprot ID: Q96Q91
  ENST ID: ENST00000432095
  CDS Start-End: 28-2865
ctggttctgagattctgtgcaagcctcatggaaatgaagctgccaggccaggaagggtttgaagcctccagtgctcctagaaatattccttcaggggagctggacagcaaccctgaccctggcaccggccccagccctgatggcccctcagacacagagagcaaggaactgggagtacccaaagaccctctgctcttcattcagctgaatgagctgctgggctggccccaggcgctggagtggagagagacaggcaggtgggtactgtttgaggagaagttggaggtggctgcaggccggtggagtgccccccacgtgcccaccctggcactgcccagcctccagaagctccgcagcctgctggccgagggccttgtactgctggactgcccagctcagagcctcctggagctcgtggagcaggtgaccagggtggagtcgctgagcccagagctgagagggcagttgcaggccttgctgctgcagagaccccagcattacaaccagaccacaggcaccaggccctgctggggctctactcatccaagaaaggcttctgacaatgaggaagcccccctgagggaacagtgtcagaaccccctgagacagaagctacctccaggagctgaggcagggactgtgctggcaggggagctgggcttcctggcacagccactgggagcctttgttcgactgcggaaccctgtggtactggggtcccttactgaggtgtccctcccaagcaggtttttctgccttctcctgggcccctgtatgctgggaaagggctaccatgagatgggacgggcagcagctgtcctcctcagtgacccgcaattccagtggtcagttcgtcgggccagcaaccttcatgaccttctggcagccctggatgcattcctagaggaggtgacagtgcttcccccaggtcggtgggacccaacagcccggattcccccgcccaaatgtctgccatctcagcacaaaaggcttccctcgcaacagcgggagatcagaggtcccgccgtcccgcgcctgacctcggctgaggacaggcaccgccatgggccacacgcacacagcccggagttgcagcggaccggcaggaaggtcccgtggtaccccagcgatttcttggacgccctgcatctccagtgcttctcggccgtactctacatttacctggccactgtcactaatgccatcacttttgggggtctgctgggagatgccactgatggtgcccagggagtgctggaaagtttcctgggcacagcagtggctggagctgccttctgcctgatggcaggccagcccctcaccattctgagcagcacggggccagtgctggtctttgagcgcctgctcttctctttcagcagagattacagcctggactacctgcccttccgcctatgggtgggcatctgggtggctaccttttgcctggtgctggtggccacagaggccagtgtgctggtgcgctacttcacccgcttcactgaggaaggtttctgtgccctcatcagcctcatcttcatctacgatgctgtgggcaaaatgctgaacttgacccatacctatcctatccagaagcctgggtcctctgcctacgggtgcctctgccaatacccaggcccaggaggaaatgagtctcaatggataaggacaaggccaaaagacagagacgacattgacttaggcctgatcaatgcatccttgctgccgccacctgagtgcacccggcagggaggccaccctcgtggccctggctgtcatacagtcccagacattgccttcttctcccttctcctcttccttacttctttcttctttgctatggccctcaagtgtgtaaagaccagccgcttcttcccctctgtggtgcgcaaagggctcagcgacttctcctcagtcctggccatcctgctcggctgtggccttgatgctttcctgggcctagccacaccaaagctcatggtacccagagagttcaagcccacactccctgggcgtggctggctggtgtcaccttttggagccaacccctggtggtggagtgtggcagctgccctgcctgccctgctgctgtctatcctcatcttcatggaccaacagatcacagcagtcatcctcaaccgcatggaatacagactgcagaagggagctggcttccacctggacctcttctgtgtggctgtgctgatgctactcacatcagcgcttggactgccttggtatgtctcagccactgtcatctccctggctcacatggacagtcttcggagagagagcagagcctgtgcccccggggagcgccccaacttcctgggtatcagggaacagaggctgacaggcctggtggtgttcatccttacaggagcctccatcttcctggcacctgtgctcaagttcattccaatgcctgtgctctatggcatcttcctgtatatgggggtggcagcgctcagcagcattcagttcactaatagggtgaagctgttgttgatgccagcaaaacaccagccagacctgctactcttgcggcatgtgcctctgaccagggtccacctcttcacagccatccagcttgcctgtctggggctgctttggataatcaagtctacccctgcagccatcatcttccccctcatgttgctgggccttgtgggggtccgaaaggccctggagagggtcttctcaccacaggaactcctctggctggatgagctgatgccagaggaggagagaagcatccctgagaaggggctggagccagaacactcattcagtggaagtgacagtgaagattcagagctgatgtatcagccaaaggctccagaaatcaacatttctgtgaattagctggagtaggagtctgggagtggagaccccaggaaacagcatgagatgctcagtcggcttggggaaggactgaagggcagctgccaagacctcagttacctcctgacctgagggtggagagtggcaggaagcaagcatgtttgctgtgcacttaggaaaggctggtgagccagagggactgatcaggccccattcactctctactcattaaaaggtcctga

SEQ ID NO: 184212 - DNA, 2838 bp, Homo sapiens
  Payload ID: 16281
  Gene Symbol: SLC4A9
  Gene Name: solute carrier family 4, sodium bicarbonate cotransporter, member 9
  Uniprot ID: Q96Q91
  ENST ID: ENST00000506545
  CDS Start-End: 28-2718
ctggttctgagattctgtgcaagcctcatggaaatgaagctgccaggccaggaagggtttgaagcctccagtgctcctagaaatattccttcaggggagctggacagcaaccctgaccctggcaccggccccagccctgatggcccctcagacacagagagcaaggaactgggagtacccaaagaccctctgctcttcattcagctgaatgagctgctgggctggccccaggcgctggagtggagagagacaggcaggtgggtactgtttgaggagaagttggaggtggctgcaggccggtggagtgccccccacgtgcccaccctggcactgcccagcctccagaagctccgcagcctgctggccgagggccttgtactgctggactgcccagctcagagcctcctggagctcgtggagcaggtgaccagggtggagtcgctgagcccagagctgagagggcagttgcaggccttgctgctgcagagaccccagcattacaaccagaccacaggcaccaggccctgctggggctctactcatccaagaaaggcttctgacaatgaggaagcccccctgagggaacagtgtcagaaccccctgagacagaagctacctccaggagctgaggcagggactgtgctggcaggggagctgggcttcctggcacagccactgggagcctttgttcgactgcggaaccctgtggtactggggtcccttactgaggtgtccctcccaagcaggtttttctgccttctcctgggcccctgtatgctgggaaagggctaccatgagatgggacgggcagcagctgtcctcctcagtgacccgcaattccagtggtcagttcgtcgggccagcaaccttcatgaccttctggcagccctggatgcattcctagaggaggtgacagtgcttcccccaggtcggtgggacccaacagcccggattcccccgcccaaatgtctgccatctcagcacaaaaggcttccctcgcaacagcgggagatcagaggtcccgccgtcccgcgcctgacctcggctgaggacaggcaccgccatgggccacacgcacacagcccggagttgcagcggaccggcaggctgtttgggggccttatccaggacgtgcgcaggaaggtcccgtggtaccccagcgatttcttggacgccctgcatctccagtgcttctcggccgtactctacatttacctggccactgtcactaatgccatcacttttgggggtctgctgggagatgccactgatggtgcccagggagtgctggaaagtttcctgggcacagcagtggctggagctgccttctgcctgatggcaggccagcccctcaccattctgagcagcacggggccagtgctggtctttgagcgcctgctcttctctttcagcagagattacagcctggactacctgcccttccgcctatgggtgggcatctgggtggctaccttttgcctggtgctggtggccacagaggccagtgtgctggtgcgctacttcacccgcttcactgaggaaggtttctgtgccctcatcagcctcatcttcatctacgatgctgtgggcaaaatgctgaacttgacccatacctatcctatccagaagcctgggtcctctgcctacgggtgcctctgccaatacccaggcccaggaggaaatgagtctcaatggataaggacaaggccaaaagacagagacgacattgtaagcatggtgcgcaaagggctcagcgacttctcctcagtcctggccatcctgctcggctgtggccttgatgctttcctgggcctagccacaccaaagctcatggtacccagagagttcaagcccacactccctgggcgtggctggctggtgtcaccttttggagccaacccctggtggtggagtgtggcagctgccctgcctgccctgctgctgtctatcctcatcttcatggaccaacagatcacagcagtcatcctcaaccgcatggaatacagactgcagaagggagctggcttccacctggacctcttctgtgtggctgtgctgatgctactcacatcagcgcttggactgccttggtatgtctcagccactgtcatctccctggctcacatggacagtcttcggagagagagcagagcctgtgcccccggggagcgccccaacttcctgggtatcagggaacagaggctgacaggcctggtggtgttcatccttacaggagcctccatcttcctggcacctgtgctcaagttcattccaatgcctgtgctctatggcatcttcctgtatatgggggtggcagcgctcagcagcattcagttcactaatagggtgaagctgttgttgatgccagcaaaacaccagccagacctgctactcttgcggcatgtgcctctgaccagggtccacctcttcacagccatccagcttgcctgtctggggctgctttggataatcaagtctacccctgcagccatcatcttccccctcatgttgctgggccttgtgggggtccgaaaggccctggagagggtcttctcaccacaggaactcctctggctggatgagctgatgccagaggaggagagaagcatccctgagaaggggctggagccagaacactcattcagtggaagtgacagtgaagattcagagctgatgtatcagccaaaggctccagaaatcaacatttctgtgaattagctggagtaggagtctgggagtggagaccccaggaaacagcatgagttcacaggtgcttactcaggaagtcaggacatttttggcctttggcttaacttccagatgctcagtcggcttggg

SEQ ID NO: 184213 - DNA, 3277 bp, Homo sapiens
  Payload ID: 16281
  Gene Symbol: SLC4A9
  Gene Name: solute carrier family 4, sodium bicarbonate cotransporter, member 9
  Uniprot ID: Q96Q91
  ENST ID: ENST00000506757
  CDS Start-End: 36-2915
ggactgtactggttctgagattctgtgcaagcctcatggaaatgaagctgccaggccaggaagggtttgaagcctccagtgctcctagaaatattccttcaggggagctggacagcaaccctgaccctggcaccggccccagccctgatggcccctcagacacagagagcaaggaactgggagtacccaaagaccctctgctcttcattcagctgaatgagctgctgggctggccccaggcgctggagtggagagagacaggcaggtgggtactgtttgaggagaagttggaggtggctgcaggccggtggagtgccccccacgtgcccaccctggcactgcccagcctccagaagctccgcagcctgctggccgagggccttgtactgctggactgcccagctcagagcctcctggagctcgtggagcaggtgaccagggtggagtcgctgagcccagagctgagagggcagttgcaggccttgctgctgcagagaccccagcattacaaccagaccacaggcaccaggccctgctggggctctactcatccaagaaaggcttctgacaatgaggaagcccccctgagggaacagtgtcagaaccccctgagacagaagctacctccaggagctgaggcagggactgtgctggcaggggagctgggcttcctggcacagccactgggagcctttgttcgactgcggaaccctgtggtactggggtcccttactgaggtgtccctcccaagcaggtttttctgccttctcctgggcccctgtatgctgggaaagggctaccatgagatgggacgggcagcagctgtcctcctcagtgacccgcaattccagtggtcagttcgtcgggccagcaaccttcatgaccttctggcagccctggatgcattcctagaggaggtgacagtgcttcccccaggtcggtgggacccaacagcccggattcccccgcccaaatgtctgccatctcagcacaaaaggcttccctcgcaacagcgggagatcagaggtcccgccgtcccgcgcctgacctcggctgaggacaggcaccgccatgggccacacgcacacagcccggagttgcagcggaccggcaggctgtttgggggccttatccaggacgtgcgcaggaaggtcccgtggtaccccagcgatttcttggacgccctgcatctccagtgcttctcggccgtactctacatttacctggccactgtcactaatgccatcacttttgggggtctgctgggagatgccactgatggtgcccagggagtgctggaaagtttcctgggcacagcagtggctggagctgccttctgcctgatggcaggccagcccctcaccattctgagcagcacggggccagtgctggtctttgagcgcctgctcttctctttcagcagagattacagcctggactacctgcccttccgcctatgggtgggcatctgggtggctaccttttgcctggtgctggtggccacagaggccagtgtgctggtgcgctacttcacccgcttcactgaggaaggtttctgtgccctcatcagcctcatcttcatctacgatgctgtgggcaaaatgctgaacttgacccatacctatcctatccagaagcctgggtcctctgcctacgggtgcctctgccaatacccaggcccaggaggaaatgagtctcaatggataaggacaaggccaaaagacagagacgacattgtaagcatggacttaggcctgatcaatgcatccttgctgccgccacctgagtgcacccggcagggaggccaccctcgtggccctggctgtcatacagtcccagacattgccttcttctcccttctcctcttccttacttctttcttctttgctatggccctcaagtgtgtaaagaccagccgcttcttcccctctgtggtgcgcaaagggctcagcgacttctcctcagtcctggccatcctgctcggctgtggccttgatgctttcctgggcctagccacaccaaagctcatggtacccagagagttcaagcccacactccctgggcgtggctggctggtgtcaccttttggagccaacccctggtggtggagtgtggcagctgccctgcctgccctgctgctgtctatcctcatcttcatggaccaacagatcacagcagtcatcctcaaccgcatggaatacagactgcagaagggagctggcttccacctggacctcttctgtgtggctgtgctgatgctactcacatcagcgcttggactgccttggtatgtctcagccactgtcatctccctggctcacatggacagtcttcggagagagagcagagcctgtgcccccggggagcgccccaacttcctgggtatcagggaacagaggctgacaggcctggtggtgttcatccttacaggagcctccatcttcctggcacctgtgctcaagttcattccaatgcctgtgctctatggcatcttcctgtatatgggggtggcagcgctcagcagcattcagttcactaatagggtgaagctgttgttgatgccagcaaaacaccagccagacctgctactcttgcggcatgtgcctctgaccagggtccacctcttcacagccatccagcttgcctgtctggggctgctttggataatcaagtctacccctgcagccatcatcttccccctcatgttgctgggccttgtgggggtccgaaaggccctggagagggtcttctcaccacaggaactcctctggctggatgagctgatgccagaggaggagagaagcatccctgagaaggggctggagccagaacactcattcagtggaagtgacagtgaagattcagagctgatgtatcagccaaaggctccagaaatcaacatttctgtgaattagctggagtaggagtctgggagtggagaccccaggaaacagcatgagatgctcagtcggcttggggaaggactgaagggcagctgccaagacctcagttacctcctgacctgagggtggagagtggcaggaagcaagcatgtttgctgtgcacttaggaaaggctggtgagccagagggactgatcaggccccattcactctctactcattaaaaggtcctgagccacgaagcgcttcccattttgaactttctgtcctcacagattctgtttgacagaatctaagggccatcagggaactcttttcatcttgcaaagagaaaaagccagtctttccagaataaatattcatctgtttgaaata

SEQ ID NO: 184214 - DNA, 3258 bp, Homo sapiens
  Payload ID: 16281
  Gene Symbol: SLC4A9
  Gene Name: solute carrier family 4, sodium bicarbonate cotransporter, member 9
  Uniprot ID: Q96Q91
  ENST ID: ENST00000507527
  CDS Start-End: 23-2974
tctgagattctgtgcaagcctcatggaaatgaagctgccaggccaggaagggtttgaagcctccagtgctcctagaaatattccttcaggggagctggacagcaaccctgaccctggcaccggccccagccctgatggcccctcagacacagagagcaaggaactgggagtacccaaagaccctctgctcttcattcagctgaatgagctgctgggctggccccaggcgctggagtggagagagacaggcagctcctctgcatctctgctcctggacatgggagaaatgccctcaataacactgtctacccaccttcatcacaggtgggtactgtttgaggagaagttggaggtggctgcaggccggtggagtgccccccacgtgcccaccctggcactgcccagcctccagaagctccgcagcctgctggccgagggccttgtactgctggactgcccagctcagagcctcctggagctcgtggagcaggtgaccagggtggagtcgctgagcccagagctgagagggcagttgcaggccttgctgctgcagagaccccagcattacaaccagaccacaggcaccaggccctgctggggctctactcatccaagaaaggcttctgacaatgaggaagcccccctgagggaacagtgtcagaaccccctgagacagaagctacctccaggagctgaggcagggactgtgctggcaggggagctgggcttcctggcacagccactgggagcctttgttcgactgcggaaccctgtggtactggggtcccttactgaggtgtccctcccaagcaggtttttctgccttctcctgggcccctgtatgctgggaaagggctaccatgagatgggacgggcagcagctgtcctcctcagtgacccgcaattccagtggtcagttcgtcgggccagcaaccttcatgaccttctggcagccctggatgcattcctagaggaggtgacagtgcttcccccaggtcggtgggacccaacagcccggattcccccgcccaaatgtctgccatctcagcacaaaaggcttccctcgcaacagcgggagatcagaggtcccgccgtcccgcgcctgacctcggctgaggacaggcaccgccatgggccacacgcacacagcccggagttgcagcggaccggcaggctgtttgggggccttatccaggacgtgcgcaggaaggtcccgtggtaccccagcgatttcttggacgccctgcatctccagtgcttctcggccgtactctacatttacctggccactgtcactaatgccatcacttttgggggtctgctgggagatgccactgatggtgcccagggagtgctggaaagtttcctgggcacagcagtggctggagctgccttctgcctgatggcaggccagcccctcaccattctgagcagcacggggccagtgctggtctttgagcgcctgctcttctctttcagcagagattacagcctggactacctgcccttccgcctatgggtgggcatctgggtggctaccttttgcctggtgctggtggccacagaggccagtgtgctggtgcgctacttcacccgcttcactgaggaaggtttctgtgccctcatcagcctcatcttcatctacgatgctgtgggcaaaatgctgaacttgacccatacctatcctatccagaagcctgggtcctctgcctacgggtgcctctgccaatacccaggcccaggaggaaatgagtctcaatggataaggacaaggccaaaagacagagacgacattgtaagcatggacttaggcctgatcaatgcatccttgctgccgccacctgagtgcacccggcagggaggccaccctcgtggccctggctgtcatacagtcccagacattgccttcttctcccttctcctcttccttacttctttcttctttgctatggccctcaagtgtgtaaagaccagccgcttcttcccctctgtggtgcgcaaagggctcagcgacttctcctcagtcctggccatcctgctcggctgtggccttgatgctttcctgggcctagccacaccaaagctcatggtacccagagagttcaagcccacactccctgggcgtggctggctggtgtcaccttttggagccaacccctggtggtggagtgtggcagctgccctgcctgccctgctgctgtctatcctcatcttcatggaccaacagatcacagcagtcatcctcaaccgcatggaatacagactgcagaagggagctggcttccacctggacctcttctgtgtggctgtgctgatgctactcacatcagcgcttggactgccttggtatgtctcagccactgtcatctccctggctcacatggacagtcttcggagagagagcagagcctgtgcccccggggagcgccccaacttcctgggtatcagggaacagaggctgacaggcctggtggtgttcatccttacaggagcctccatcttcctggcacctgtgctcaagttcattccaatgcctgtgctctatggcatcttcctgtatatgggggtggcagcgctcagcagcattcagttcactaatagggtgaagctgttgttgatgccagcaaaacaccagccagacctgctactcttgcggcatgtgcctctgaccagggtccacctcttcacagccatccagcttgcctgtctggggctgctttggataatcaagtctacccctgcagccatcatcttccccctcatgttgctgggccttgtgggggtccgaaaggccctggagagggtcttctcaccacaggaactcctctggctggatgagctgatgccagaggaggagagaagcatccctgagaaggggctggagccagaacactcattcagtggaagtgacagtgaagattcagagctgatgtatcagccaaaggctccagaaatcaacatttctgtgaattagctggagtaggagtctgggagtggagaccccaggaaacagcatgagttcacaggtgcttactcaggaagtcaggacatttttggcctttggcttaacttccagatgctcagtcggcttggggaaggactgaagggcagctgccaagacctcagttacctcctgacctgagggtggagagtggcaggaagcaagcatgtttgctgtgcacttaggaaaggctggtgagccagagggactgatcaggccccattcactctctactcattaaaaggtcctgagccacg

SEQ ID NO: 184215 - DNA, 3414 bp, Homo sapiens
  Payload ID: 16282
  Gene Symbol: SLC4A10
  Gene Name: solute carrier family 4, sodium bicarbonate transporter, member 10
  ENST ID: ENST00000272716
  CDS Start-End: 94-3414
gatccgaatactaagcagagcgagtgccgggctgagtgtaagacactgaagacactgcagagcaaggtgcttattccagaggcgttacaaaacatggagattaaagaccagggagcccaaatggagccgctgctgcctacgagaaatgatgaagaagcagttgtggatagaggtggaactcgttctattctcaaaacacactttgagaaagaagatttagaaggtcatcgaacactatttattggagtacatgtgcccttgggaggaagaaaaagccatcgacgtcacaggcatcgtggtcataaacacagaaagagagacagagaaagagattcaggattagaggatggaagggagtcaccttcttttgacaccccatcacagagggtacagtttattcttggaaccgaggatgatgacgaggaacacattcctcatgaccttttcacagaactggatgagatttgttggcgtgaaggtgaggacgctgagtggcgagaaacagccaggtggttgaagtttgaagaagatgtggaagatggaggagaaaggtggagcaagccttatgtggctactctttcattgcacagcttgtttgaattgagaagttgtattctgaatggaactgtgttgctggacatgcatgccaacactttagaagaaattgcagatatggttcttgaccaacaagtgagctcaggtcagctgaatgaagatgtacgccatagggtccatgaggcattgatgaaacagcatcatcatcagaatcagaaaaaactcaccaacaggattcccattgttcgttcctttgctgatattggcaagaaacagtcagaaccaaattccatggacaaaaatgcaggtcaggttgtttctcctcagtctgctccagcctgtgttgaaaataaaaatgatgttagcagagaaaacagcactgttgactttagcaaggttgatctgcattttatgaaaaagattcctccaggtgctgaagcatcgaacatcttagtgggagaactggagttcttggatcgaacagtagttgcgtttgtcaggttgtctccagctgtattgcttcaaggactggctgaagtcccaatcccaaccagatttttgttcattcttctgggacccctgggaaagggtcaacagtaccatgagattggcagatcaattgcaaccctaatgacagatgaggtatttcatgatgttgcctataaagctaaagatcgtaatgacttggtatcaggaattgatgagtttctggatcaggttactgttctccctcctggagaatgggatccaagcattcgaatagagcctcccaaaaatgttccttcccaggagaagaggaagattcctgctgtaccaaatggaacagcagctcatggggaagcagagccccacggaggacatagtggacctgaactccagcgaactggaaggatttttgggggacttattttagatatcaaaagaaaagctccatacttctggagtgacttcagagatgctttcagcctgcagtgcttagcatcttttctatttctctactgcgcgtgtatgtctcctgtcatcacgtttggaggactgctgggagaagcaactgaagggcgtataagtgcaattgaatctctctttggagcatccatgaccgggatagcctattctctctttggtggacagcctcttaccatattaggcagtacaggaccagttttggtgtttgaaaagattttgtttaaattttgcaaagaatatgggctgtcatacctatctttaagagctagcattggactttggactgcaactctatgtatcatacttgtggccacagatgctagttcccttgtctgctacatcactcggtttactgaagaagcttttgcttccctgatttgcatcattttcatttatgaggccctggagaagttgtttgaactcagtgaagcatatccaatcaacatgcataatgatctggaactgctgacacaatactcgtgtaactgtgtggaaccgcataatcccagcaatggcacattgaaggaatggagggaatccaatatttctgcctctgacataatttgggagaacctaactgtgtcagaatgcaaatcattgcatggagagtatgttggacgggcctgtggccatgatcacccatatgttccagatgttctattttggtctgtgatcctgttcttttccacagttactctgtcagccaccctgaagcagttcaagactagcagatattttccaaccaaggttcgatccatagtgagtgactttgctgtctttcttacaattctgtgtatggttttaattgactatgccattgggatcccatctccaaaactacaagtaccaagtgttttcaagcccactagagatgatcgtggctggtttgttacgcctttaggtccaaacccatggtggacagtaatagctgctataattccagctctgctttgtactattctaatttttatggaccaacagattacagctgtcatcatcaacaggaaagagcataagctaaagaaaggttgtgggtaccatctggacctattaatggtggctgtcatgctcggtgtatgctccatcatgggcctgccatggtttgtggctgccacagtcctctccatcactcatgtcaatagcctaaaactggaatcagaatgctcagctccaggagaacaacccaaatttctcggcattcgggagcaaagggttactgggcttatgatttttattcttatgggttcatcagtctttatgaccagtattctgaagtttattcccatgccagtgctatatggagtgtttctttatatgggtgcttcatctctaaagggaattcagttctttgataggataaagctcttctggatgccggcaaaacatcaaccagattttatatacctaaggcacgtaccgcttcgaaaagtgcatctcttcacaattattcagatgagttgccttggccttttgtggataataaaagtttcaagagctgctattgtctttcccatgatggtgttagccctggtatttgtaagaaagttgatggacttgttgttcacgaagcgggaactcagctggttggatgatttgatgcccgagagtaagaaaaagaaactggaagatgctgaaaaagaagaagaacaaagtatgctagctatggaagatgagggcacagtacaactcccattggaagggcactatagagatgatccatctgtgatcaatatatctgatgaaatgtcaaagactgccttgtggaggaaccttctgattactgccgataactcaaaagataaggagtcaagctttccttccaaaagcattgaaagccgaaaagagaagaaagctgactcagggaaaggtgttgacagggagacttgtctatga

SEQ ID NO: 184216 - DNA, 5710 bp, Homo sapiens
  Payload ID: 16282
  Gene Symbol: SLC4A10
  Gene Name: solute carrier family 4, sodium bicarbonate transporter, member 10
  Uniprot ID: Q6U841
  ENST ID: ENST00000375514
  CDS Start-End: 288-3587
gtgcaaaacctggccagcagcccgagtgagtaggagccatgtgactctggtgagttggagtgtgcaattgcctcctgcttcagagctacctgatccgaatactaagcagagcgagtgccgggctgagtgtaagacactgaagacactgcagagcaaggtgcttattccagaggcgttacaaaacatggagattaaagaccagggagcccaaatggagccgctgctgcctacgccctgaagatgctgagacatagagatggctgtgattatcttttgtaagacaggaaatgcagtctttaggggtttctggaaatagaaaggtcatgcagtctggaacctgtgagccttttcaatctctaagtcatcagagaaatgatgaagaagcagttgtggatagaggtggaactcgttctattctcaaaacacactttgagaaagaagatttagaaggtcatcgaacactatttattggagtacatgtgcccttgggaggaagaaaaagccatcgacgtcacaggcatcgtggtcataaacacagaaagagagacagagaaagagattcaggattagaggatggaagggagtcaccttcttttgacaccccatcacagagggtacagtttattcttggaaccgaggatgatgacgaggaacacattcctcatgaccttttcacagaactggatgagatttgttggcgtgaaggtgaggacgctgagtggcgagaaacagccaggtggttgaagtttgaagaagatgtggaagatggaggagaaaggtggagcaagccttatgtggctactctttcattgcacagcttgtttgaattgagaagttgtattctgaatggaactgtgttgctggacatgcatgccaacactttagaagaaattgcagatatggttcttgaccaacaagtgagctcaggtcagctgaatgaagatgtacgccatagggtccatgaggcattgatgaaacagcatcatcatcagaatcagaaaaaactcaccaacaggattcccattgttcgttcctttgctgatattggcaagaaacagtcagaaccaaattccatggacaaaaatgcaggtcaggttgtttctcctcagtctgctccagcctgtgttgaaaataaaaatgatgttagcagagaaaacagcactgttgactttagcaaggttgatctgcattttatgaaaaagattcctccaggtgctgaagcatcgaacatcttagtgggagaactggagttcttggatcgaacagtagttgcgtttgtcaggttgtctccagctgtattgcttcaaggactggctgaagtcccaatcccaaccagatttttgttcattcttctgggacccctgggaaagggtcaacagtaccatgagattggcagatcaattgcaaccctaatgacagatgaggtatttcatgatgttgcctataaagctaaagatcgtaatgacttggtatcaggaattgatgagtttctggatcaggttactgttctccctcctggagaatgggatccaagcattcgaatagagcctcccaaaaatgttccttcccaggagaagaggaagattcctgctgtaccaaatggaacagcagctcatggggaagcagagccccacggaggacatagtggacctgaactccagcgaactggaaggatttttgggggacttattttagatatcaaaagaaaagctccatacttctggagtgacttcagagatgctttcagcctgcagtgcttagcatcttttctatttctctactgcgcgtgtatgtctcctgtcatcacgtttggaggactgctgggagaagcaactgaagggcgtataagtgcaattgaatctctctttggagcatccatgaccgggatagcctattctctctttggtggacagcctcttaccatattaggcagtacaggaccagttttggtgtttgaaaagattttgtttaaattttgcaaagaatatgggctgtcatacctatctttaagagctagcattggactttggactgcaactctatgtatcatacttgtggccacagatgctagttcccttgtctgctacatcactcggtttactgaagaagcttttgcttccctgatttgcatcattttcatttatgaggccctggagaagttgtttgaactcagtgaagcatatccaatcaacatgcataatgatctggaactgctgacacaatactcgtgtaactgtgtggaaccgcataatcccagcaatggcacattgaaggaatggagggaatccaatatttctgcctctgacataatttgggagaacctaactgtgtcagaatgcaaatcattgcatggagagtatgttggacgggcctgtggccatgatcacccatatgttccagatgttctattttggtctgtgatcctgttcttttccacagttactctgtcagccaccctgaagcagttcaagactagcagatattttccaaccaaggttcgatccatagtgagtgactttgctgtctttcttacaattctgtgtatggttttaattgactatgccattgggatcccatctccaaaactacaagtaccaagtgttttcaagcccactagagatgatcgtggctggtttgttacgcctttaggtccaaacccatggtggacagtaatagctgctataattccagctctgctttgtactattctaatttttatggaccaacagattacagctgtcatcatcaacaggaaagagcataagctaaagaaaggttgtgggtaccatctggacctattaatggtggctgtcatgctcggtgtatgctccatcatgggcctgccatggtttgtggctgccacagtcctctccatcactcatgtcaatagcctaaaactggaatcagaatgctcagctccaggagaacaacccaaatttctcggcattcgggagcaaagggttactgggcttatgatttttattcttatgggttcatcagtctttatgaccagtattctgaagtttattcccatgccagtgctatatggagtgtttctttatatgggtgcttcatctctaaagggaattcagttctttgataggataaagctcttctggatgccggcaaaacatcaaccagattttatatacctaaggcacgtaccgcttcgaaaagtgcatctcttcacaattattcagatgagttgccttggccttttgtggataataaaagtttcaagagctgctattgtctttcccatgatggtgttagccctggtatttgtaagaaagttgatggacttgttgttcacgaagcgggaactcagctggttggatgatttgatgcccgagagtaagaaaaagaaactggaagatgctgaaaaagaagaagaacaaagtatgctagctatggaagatgagggcacagtacaactcccattggaagggcactatagagatgatccatctgtgatcaatatatctgatgaaatgtcaaagactgccttgtggaggaaccttctgattactgccgataactcaaaagataaggagtcaagctttccttccaaaagctccccttcctaatcactctagaagctgattccccaaagcattgaaagccgaaaagagaagaaagctgactcagggaaaggtgttgacagggagacttgtctatgactcgatcttcaatttattttttacatatatatgagaagagtgtcacaattattaataaaactgctttgatcatgtattgtaaattctgtccctcaacccaaatccaccttcatactgtaagtagtgcaatacttgtttcatttctgtgtttaaacttctgagcagtgagacatccctgtgagcagatacaatagccaatgcaagaatctgtgtgttccttgctgtacgttagacatttgtaaactggattctgattgtcagttttatgagagcaatagcttccttaaagagataagtcatatttacctagtttgtattttcctactttagtgacctgaagatgcctgataatttcattcagaagaatttttgaaaggtagtcttacttctttttagtttttatagcttagcattagtgacttatttcaaaagacccaaatcaaaaagttagtttgaaagcattttttaataattgtatttatgcatttccttgatttaatatgataaatttaatacttaacaatttatatgtaactaaaacttaaagtcatttgaaaaatatatagaaacctatttacaacttgttaaggacaatcagacataatgcagagttaagtagtatttgcttaaaattcaagttgtgactaatgatcaaatactaggcttgtacgaaatgctttagaaaaactttgtaacagttttgtgggatttttcaatataaacctttatcagaaatatactaagtttgtctcccactgacaacagatgttttccaaataaacatattctatacatacttgtggaatgccacatggtgaatcattgtatatgaaattccactcctgtacagttactctgcagctaatggtcatgcactgcttaatgctggtcctgaatcatgttctcatgttagaccaacagctctccaattgtcattttttttctgcagagttttttttttccacttttaaattaaatgcatgttgtggaaaaacagtcttttaaaatgaaatttcagattccatttgagaaggttctgtagatatttcagtccatataaaataatacatctttactaaacttatataaggggagagaaagttatgaagttttggacattactaaaagtacagtatttgatttcactttcaatgaatgtgaagttaataaaactaaatctcataatgctcttggttcctaagaatgagtagtaatcatcaactttataatactccaatattccgttttataataattcagagccctgtggcttttacacaccgttaattatgtactctgttggaagtgcacatgaaaagtgaagaaaagttcctcttgtgattaaactaatgggaggaaataaatcaacaaagtctccattaagttctacattttgagaccttttaaaaattcccctcacaattctttaaggagcccccctttttatggaacatgagcctaaaaattatagaaagaagaattttaagttaataaagtttgtatttataaatgctgaaaaaatacagaaactttctgttccaaatgtgttgcctttgtgtattttataatacagatactacattgtaaacatttccattgttttatgatttagccagtgattccccaaagcagcctcttagtgttttaatatattaataactgttttgttaaaaatgatcatagtgaatttaaatcttcacatgatcacctatttgaataagcaatcatatccaatgaaattctgtatttctgagtatttttatagtcattttgttcttgtgtgaattttaaagctatccctatgttaatcctaatattttgaaatcatataaaatataataaaaatgtagtattatatatttacttctaatttcagattcctggtcaaaattactaaatatcttgaatgtaatttagtgccaagtttaaataatgtgtaaatgtgactaggatattgtgtttttcacaattaagaaatgttatgtggaaataaatatttatcctaacttccttgcacattttaaattgtg

SEQ ID NO: 184217 - DNA, 3669 bp, Homo sapiens
  Payload ID: 16282
  Gene Symbol: SLC4A10
  Gene Name: solute carrier family 4, sodium bicarbonate transporter, member 10
  ENST ID: ENST00000446228
  CDS Start-End: 59-1468
gtgtaagacactgaagacactgcagagcaaggtgcttattccagaggcgttacaaaacatggagattaaagaccagggagcccaaatggagccgctgctgcctacgagaaatgatgaagaagcagttgtggatagaggtggaactcgttctattctcaaaacacactttgagaaagaagatttagaaggtcatcgaacactatttattggagtacatgtgcccttgggaggaagaaaaagccatcgacgtcacaggcatcgtggtcataaacacagaaagagagacagagaaagagattcaggattagaggatggaagggagtcaccttcttttgacaccccatcacagagggtacagtttattcttggaaccgaggatgatgacgaggaacacattcctcatgaccttttcacagaactggatgagatttgttggcgtgaaggtgaggacgctgagtggcgagaaacagccaggtggttgaagtttgaagaagatgtggaagatggaggagaaaggtggagcaagccttatgtggctactctttcattgcacagcttgtttgaattgagaagttgtattctgaatggaactgtgttgctggacatgcatgccaacactttagaagaaattgcagatatggttcttgaccaacaagtgagctcaggtcagctgaatgaagatgtacgccatagggtccatgaggcattgatgaaacagcatcatcatcagaatcagaaaaaactcaccaacaggattcccattgttcgttcctttgctgatattggcaagaaacagtcagaaccaaattccatggacaaaaatgcaggtcaggttgtttctcctcagtctgctccagcctgtgttgaaaataaaaatgatgttagcagagaaaacagcactgttgactttagcaaggttgatctgcattttatgaaaaagattcctccaggtgctgaagcatcgaacatcttagtgggagaactggagttcttggatcgaacagtagttgcgtttgtcaggttgtctccagctgtattgcttcaaggactggctgaagtcccaatcccaaccagatttttgttcattcttctgggacccctgggaaagggtcaacagtaccatgagattggcagatcaattgcaaccctaatgacagatgaggtatttcatgatgttgcctataaagctaaagatcgtaatgacttggtatcaggaattgatgagtttctggatcaggttactgttctccctcctggagaatgggatccaagcattcgaatagagcctcccaaaaatgttccttcccaggagaagaggaagattcctgctgtaccaaatggaacagcagctcatggggaagcagagccccacggaggacatagtggacctgaactccagcgaactggaaggtcaccaatatccggtatcttcgcttctccagagttcttccacagattctgttgctgacatgacttgaagtatccattactcatctgctctcctggagttgctggtgtacatctgggctgctcttgcactgttctctgatttttgggggacttattttagatatcaaaagaaaagctccatacttctggagtgacttcagagatgctttcagcctgcagtgcttagcatcttttctatttctctactgcgcgtgtatgtctcctgtcatcacgtttggaggactgctgggagaagcaactgaagggcgtataagtgcaattgaatctctctttggagcatccatgaccgggatagcctattctctctttggtggacagcctcttaccatattaggcagtacaggaccagttttggtgtttgaaaagattttgtttaaattttgcaaagaatatgggctgtcatacctatctttaagagctagcattggactttggactgcaactctatgtatcatacttgtggccacagatgctagttcccttgtctgctacatcactcggtttactgaagaagcttttgcttccctgatttgcatcattttcatttatgaggccctggagaagttgtttgaactcagtgaagcatatccaatcaacatgcataatgatctggaactgctgacacaatactcgtgtaactgtgtggaaccgcataatcccagcaatggcacattgaaggaatggagggaatccaatatttctgcctctgacataatttgggagaacctaactgtgtcagaatgcaaatcattgcatggagagtatgttggacgggcctgtggccatgatcacccatatgttccagatgttctattttggtctgtgatcctgttcttttccacagttactctgtcagccaccctgaagcagttcaagactagcagatattttccaaccaaggttcgatccatagtgagtgactttgctgtctttcttacaattctgtgtatggttttaattgactatgccattgggatcccatctccaaaactacaagtaccaagtgttttcaagcccactagagatgatcgtggctggtttgttacgcctttaggtccaaacccatggtggacagtaatagctgctataattccagctctgctttgtactattctaatttttatggaccaacagattacagctgtcatcatcaacaggaaagagcataagctaaagaaaggttgtgggtaccatctggacctattaatggtggctgtcatgctcggtgtatgctccatcatgggcctgccatggtttgtggctgccacagtcctctccatcactcatgtcaatagcctaaaactggaatcagaatgctcagctccaggagaacaacccaaatttctcggcattcgggagcaaagggttactgggcttatgatttttattcttatgggttcatcagtctttatgaccagtattctgaagtttattcccatgccagtgctatatggagtgtttctttatatgggtgcttcatctctaaagggaattcagttctttgataggataaagctcttctggatgccggcaaaacatcaaccagattttatatacctaaggcacgtaccgcttcgaaaagtgcatctcttcacaattattcagatgagttgccttggccttttgtggataataaaagtttcaagagctgctattgtctttcccatgatggtgttagccctggtatttgtaagaaagttgatggacttgttgttcacgaagcgggaactcagctggttggatgatttgatgcccgagagtaagaaaaagaaactggaagatgctgaaaaagaagaagaacaaagtatgctagctatggaagatgagggcacagtacaactcccattggaagggcactatagagatgatccatctgtgatcaatatatctgatgaaatgtcaaagactgccttgtggaggaaccttctgattactgccgataactcaaaagataaggagtcaagctttccttccaaaagctccccttcctaatcactctagaagctgattccccaaagcattgaaagccgaaaagagaagaaagctgactcagggaaaggtgttgacagggagacttgtctatgactcgatcttcaatttattttttacatatatatgagaagagtgtcacaattattaataaaactgctttgatcatgtattgtaaattctgtccctcaacccaaatccaccttcata

SEQ ID NO: 184218 - DNA, 5551 bp, Homo sapiens
  Payload ID: 16282
  Gene Symbol: SLC4A10
  Gene Name: solute carrier family 4, sodium bicarbonate transporter, member 10
  Uniprot ID: Q6U841
  ENST ID: ENST00000446997
  CDS Start-End: 94-3450
gatccgaatactaagcagagcgagtgccgggctgagtgtaagacactgaagacactgcagagcaaggtgcttattccagaggcgttacaaaacatggagattaaagaccagggagcccaaatggagccgctgctgcctacgagaaatgatgaagaagcagttgtggatagaggtggaactcgttctattctcaaaacacactttgagaaagaagatttagaaggtcatcgaacactatttattggagtacatgtgcccttgggaggaagaaaaagccatcgacgtcacaggcatcgtggtcataaacacagaaagagagacagagaaagagattcaggattagaggatggaagggagtcaccttcttttgacaccccatcacagagggtacagtttattcttggaaccgaggatgatgacgaggaacacattcctcatgaccttttcacagaactggatgagatttgttggcgtgaaggtgaggacgctgagtggcgagaaacagccaggtggttgaagtttgaagaagatgtggaagatggaggagaaaggtggagcaagccttatgtggctactctttcattgcacagcttgtttgaattgagaagttgtattctgaatggaactgtgttgctggacatgcatgccaacactttagaagaaattgcagatatggttcttgaccaacaagtgagctcaggtcagctgaatgaagatgtacgccatagggtccatgaggcattgatgaaacagcatcatcatcagaatcagaaaaaactcaccaacaggattcccattgttcgttcctttgctgatattggcaagaaacagtcagaaccaaattccatggacaaaaatgcaggtcaggttgtttctcctcagtctgctccagcctgtgttgaaaataaaaatgatgttagcagagaaaacagcactgttgactttagcaagggactgggaggccaacaaaaggggcatactagtccatgtgggatgaaacaaaggcatgaaaaaggacctccacaccagcaagagagagaggttgatctgcattttatgaaaaagattcctccaggtgctgaagcatcgaacatcttagtgggagaactggagttcttggatcgaacagtagttgcgtttgtcaggttgtctccagctgtattgcttcaaggactggctgaagtcccaatcccaaccagatttttgttcattcttctgggacccctgggaaagggtcaacagtaccatgagattggcagatcaattgcaaccctaatgacagatgaggtatttcatgatgttgcctataaagctaaagatcgtaatgacttggtatcaggaattgatgagtttctggatcaggttactgttctccctcctggagaatgggatccaagcattcgaatagagcctcccaaaaatgttccttcccaggagaagaggaagattcctgctgtaccaaatggaacagcagctcatggggaagcagagccccacggaggacatagtggacctgaactccagcgaactggaaggatttttgggggacttattttagatatcaaaagaaaagctccatacttctggagtgacttcagagatgctttcagcctgcagtgcttagcatcttttctatttctctactgcgcgtgtatgtctcctgtcatcacgtttggaggactgctgggagaagcaactgaagggcgtataagtgcaattgaatctctctttggagcatccatgaccgggatagcctattctctctttggtggacagcctcttaccatattaggcagtacaggaccagttttggtgtttgaaaagattttgtttaaattttgcaaagaatatgggctgtcatacctatctttaagagctagcattggactttggactgcaactctatgtatcatacttgtggccacagatgctagttcccttgtctgctacatcactcggtttactgaagaagcttttgcttccctgatttgcatcattttcatttatgaggccctggagaagttgtttgaactcagtgaagcatatccaatcaacatgcataatgatctggaactgctgacacaatactcgtgtaactgtgtggaaccgcataatcccagcaatggcacattgaaggaatggagggaatccaatatttctgcctctgacataatttgggagaacctaactgtgtcagaatgcaaatcattgcatggagagtatgttggacgggcctgtggccatgatcacccatatgttccagatgttctattttggtctgtgatcctgttcttttccacagttactctgtcagccaccctgaagcagttcaagactagcagatattttccaaccaaggttcgatccatagtgagtgactttgctgtctttcttacaattctgtgtatggttttaattgactatgccattgggatcccatctccaaaactacaagtaccaagtgttttcaagcccactagagatgatcgtggctggtttgttacgcctttaggtccaaacccatggtggacagtaatagctgctataattccagctctgctttgtactattctaatttttatggaccaacagattacagctgtcatcatcaacaggaaagagcataagctaaagaaaggttgtgggtaccatctggacctattaatggtggctgtcatgctcggtgtatgctccatcatgggcctgccatggtttgtggctgccacagtcctctccatcactcatgtcaatagcctaaaactggaatcagaatgctcagctccaggagaacaacccaaatttctcggcattcgggagcaaagggttactgggcttatgatttttattcttatgggttcatcagtctttatgaccagtattctgaagtttattcccatgccagtgctatatggagtgtttctttatatgggtgcttcatctctaaagggaattcagttctttgataggataaagctcttctggatgccggcaaaacatcaaccagattttatatacctaaggcacgtaccgcttcgaaaagtgcatctcttcacaattattcagatgagttgccttggccttttgtggataataaaagtttcaagagctgctattgtctttcccatgatggtgttagccctggtatttgtaagaaagttgatggacttgttgttcacgaagcgggaactcagctggttggatgatttgatgcccgagagtaagaaaaagaaactggaagatgctgaaaaagaagaagaacaaagtatgctagctatggaagatgagggcacagtacaactcccattggaagggcactatagagatgatccatctgtgatcaatatatctgatgaaatgtcaaagactgccttgtggaggaaccttctgattactgccgataactcaaaagataaggagtcaagctttccttccaaaagctccccttcctaatcactctagaagctgattccccaaagcattgaaagccgaaaagagaagaaagctgactcagggaaaggtgttgacagggagacttgtctatgactcgatcttcaatttattttttacatatatatgagaagagtgtcacaattattaataaaactgctttgatcatgtattgtaaattctgtccctcaacccaaatccaccttcatactgtaagtagtgcaatacttgtttcatttctgtgtttaaacttctgagcagtgagacatccctgtgagcagatacaatagccaatgcaagaatctgtgtgttccttgctgtacgttagacatttgtaaactggattctgattgtcagttttatgagagcaatagcttccttaaagagataagtcatatttacctagtttgtattttcctactttagtgacctgaagatgcctgataatttcattcagaagaatttttgaaaggtagtcttacttctttttagtttttatagcttagcattagtgacttatttcaaaagacccaaatcaaaaagttagtttgaaagcattttttaataattgtatttatgcatttccttgatttaatatgataaatttaatacttaacaatttatatgtaactaaaacttaaagtcatttgaaaaatatatagaaacctatttacaacttgttaaggacaatcagacataatgcagagttaagtagtatttgcttaaaattcaagttgtgactaatgatcaaatactaggcttgtacgaaatgctttagaaaaactttgtaacagttttgtgggatttttcaatataaacctttatcagaaatatactaagtttgtctcccactgacaacagatgttttccaaataaacatattctatacatacttgtggaatgccacatggtgaatcattgtatatgaaattccactcctgtacagttactctgcagctaatggtcatgcactgcttaatgctggtcctgaatcatgttctcatgttagaccaacagctctccaattgtcattttttttctgcagagttttttttttccacttttaaattaaatgcatgttgtggaaaaacagtcttttaaaatgaaatttcagattccatttgagaaggttctgtagatatttcagtccatataaaataatacatctttactaaacttatataaggggagagaaagttatgaagttttggacattactaaaagtacagtatttgatttcactttcaatgaatgtgaagttaataaaactaaatctcataatgctcttggttcctaagaatgagtagtaatcatcaactttataatactccaatattccgttttataataattcagagccctgtggcttttacacaccgttaattatgtactctgttggaagtgcacatgaaaagtgaagaaaagttcctcttgtgattaaactaatgggaggaaataaatcaacaaagtctccattaagttctacattttgagaccttttaaaaattcccctcacaattctttaaggagcccccctttttatggaacatgagcctaaaaattatagaaagaagaattttaagttaataaagtttgtatttataaatgctgaaaaaatacagaaactttctgttccaaatgtgttgcctttgtgtattttataatacagatactacattgtaaacatttccattgttttatgatttagccagtgattccccaaagcagcctcttagtgttttaatatattaataactgttttgttaaaaatgatcatagtgaatttaaatcttcacatgatcacctatttgaataagcaatcatatccaatgaaattctgtatttctgagtatttttatagtcattttgttcttgtgtgaattttaaagctatccctatgttaatcctaatattttgaaatcatataaaatataataaaaatgtagtattatatatttacttctaatttcagattcctggtcaaaattactaaatatcttgaatgtaatttagtgccaagtttaaataatgtgtaaatgtgactaggatattgtgtttttcacaattaagaaatgttatgtggaaataaatatttatcctaact

SEQ ID NO: 184219 - DNA, 5578 bp, Homo sapiens
  Payload ID: 16282
  Gene Symbol: SLC4A10
  Gene Name: solute carrier family 4, sodium bicarbonate transporter, member 10
  Uniprot ID: Q6U841
  ENST ID: ENST00000415876
  CDS Start-End: 182-3448
caaaacctggccagcagcccgagtgagtaggagccatgtgactctggtgagttggagtgtgcaattgcctcctgcttcagagctacctgatccgaatactaagcagagcgagtgccgggctgagtgtaagacactgaagacactgcagagcaaggtgcttattccagaggcgttacaaaacatggagattaaagaccagggagcccaaatggagccgctgctgcctacgagaaatgatgaagaagcagttgtggatagaggtggaactcgttctattctcaaaacacactttgagaaagaagatttagaaggtcatcgaacactatttattggagtacatgtgcccttgggaggaagaaaaagccatcgacgtcacaggcatcgtggtcataaacacagaaagagagacagagaaagagattcaggattagaggatggaagggagtcaccttcttttgacaccccatcacagagggtacagtttattcttggaaccgaggatgatgacgaggaacacattcctcatgaccttttcacagaactggatgagatttgttggcgtgaaggtgaggacgctgagtggcgagaaacagccaggtggttgaagtttgaagaagatgtggaagatggaggagaaaggtggagcaagccttatgtggctactctttcattgcacagcttgtttgaattgagaagttgtattctgaatggaactgtgttgctggacatgcatgccaacactttagaagaaattgcagatatggttcttgaccaacaagtgagctcaggtcagctgaatgaagatgtacgccatagggtccatgaggcattgatgaaacagcatcatcatcagaatcagaaaaaactcaccaacaggattcccattgttcgttcctttgctgatattggcaagaaacagtcagaaccaaattccatggacaaaaatgcaggtcaggttgtttctcctcagtctgctccagcctgtgttgaaaataaaaatgatgttagcagagaaaacagcactgttgactttagcaaggttgatctgcattttatgaaaaagattcctccaggtgctgaagcatcgaacatcttagtgggagaactggagttcttggatcgaacagtagttgcgtttgtcaggttgtctccagctgtattgcttcaaggactggctgaagtcccaatcccaaccagatttttgttcattcttctgggacccctgggaaagggtcaacagtaccatgagattggcagatcaattgcaaccctaatgacagatgaggtatttcatgatgttgcctataaagctaaagatcgtaatgacttggtatcaggaattgatgagtttctggatcaggttactgttctccctcctggagaatgggatccaagcattcgaatagagcctcccaaaaatgttccttcccaggagaagaggaagattcctgctgtaccaaatggaacagcagctcatggggaagcagagccccacggaggacatagtggacctgaactccagcgaactggaaggatttttgggggacttattttagatatcaaaagaaaagctccatacttctggagtgacttcagagatgctttcagcctgcagtgcttagcatcttttctatttctctactgcgcgtgtatgtctcctgtcatcacgtttggaggactgctgggagaagcaactgaagggcgtataagtgcaattgaatctctctttggagcatccatgaccgggatagcctattctctctttggtggacagcctcttaccatattaggcagtacaggaccagttttggtgtttgaaaagattttgtttaaattttgcaaagaatatgggctgtcatacctatctttaagagctagcattggactttggactgcaactctatgtatcatacttgtggccacagatgctagttcccttgtctgctacatcactcggtttactgaagaagcttttgcttccctgatttgcatcattttcatttatgaggccctggagaagttgtttgaactcagtgaagcatatccaatcaacatgcataatgatctggaactgctgacacaatactcgtgtaactgtgtggaaccgcataatcccagcaatggcacattgaaggaatggagggaatccaatatttctgcctctgacataatttgggagaacctaactgtgtcagaatgcaaatcattgcatggagagtatgttggacgggcctgtggccatgatcacccatatgttccagatgttctattttggtctgtgatcctgttcttttccacagttactctgtcagccaccctgaagcagttcaagactagcagatattttccaaccaaggttcgatccatagtgagtgactttgctgtctttcttacaattctgtgtatggttttaattgactatgccattgggatcccatctccaaaactacaagtaccaagtgttttcaagcccactagagatgatcgtggctggtttgttacgcctttaggtccaaacccatggtggacagtaatagctgctataattccagctctgctttgtactattctaatttttatggaccaacagattacagctgtcatcatcaacaggaaagagcataagctaaagaaaggttgtgggtaccatctggacctattaatggtggctgtcatgctcggtgtatgctccatcatgggcctgccatggtttgtggctgccacagtcctctccatcactcatgtcaatagcctaaaactggaatcagaatgctcagctccaggagaacaacccaaatttctcggcattcgggagcaaagggttactgggcttatgatttttattcttatgggttcatcagtctttatgaccagtattctgaagtttattcccatgccagtgctatatggagtgtttctttatatgggtgcttcatctctaaagggaattcagttctttgataggataaagctcttctggatgccggcaaaacatcaaccagattttatatacctaaggcacgtaccgcttcgaaaagtgcatctcttcacaattattcagatgagttgccttggccttttgtggataataaaagtttcaagagctgctattgtctttcccatgatggtgttagccctggtatttgtaagaaagttgatggacttgttgttcacgaagcgggaactcagctggttggatgatttgatgcccgagagtaagaaaaagaaactggaagatgctgaaaaagaagaagaacaaagtatgctagctatggaagatgagggcacagtacaactcccattggaagggcactatagagatgatccatctgtgatcaatatatctgatgaaatgtcaaagactgccttgtggaggaaccttctgattactgccgataactcaaaagataaggagtcaagctttccttccaaaagctccccttcctaatcactctagaagctgattccccaaagcattgaaagccgaaaagagaagaaagctgactcagggaaaggtgttgacagggagacttgtctatgactcgatcttcaatttattttttacatatatatgagaagagtgtcacaattattaataaaactgctttgatcatgtattgtaaattctgtccctcaacccaaatccaccttcatactgtaagtagtgcaatacttgtttcatttctgtgtttaaacttctgagcagtgagacatccctgtgagcagatacaatagccaatgcaagaatctgtgtgttccttgctgtacgttagacatttgtaaactggattctgattgtcagttttatgagagcaatagcttccttaaagagataagtcatatttacctagtttgtattttcctactttagtgacctgaagatgcctgataatttcattcagaagaatttttgaaaggtagtcttacttctttttagtttttatagcttagcattagtgacttatttcaaaagacccaaatcaaaaagttagtttgaaagcattttttaataattgtatttatgcatttccttgatttaatatgataaatttaatacttaacaatttatatgtaactaaaacttaaagtcatttgaaaaatatatagaaacctatttacaacttgttaaggacaatcagacataatgcagagttaagtagtatttgcttaaaattcaagttgtgactaatgatcaaatactaggcttgtacgaaatgctttagaaaaactttgtaacagttttgtgggatttttcaatataaacctttatcagaaatatactaagtttgtctcccactgacaacagatgttttccaaataaacatattctatacatacttgtggaatgccacatggtgaatcattgtatatgaaattccactcctgtacagttactctgcagctaatggtcatgcactgcttaatgctggtcctgaatcatgttctcatgttagaccaacagctctccaattgtcattttttttctgcagagttttttttttccacttttaaattaaatgcatgttgtggaaaaacagtcttttaaaatgaaatttcagattccatttgagaaggttctgtagatatttcagtccatataaaataatacatctttactaaacttatataaggggagagaaagttatgaagttttggacattactaaaagtacagtatttgatttcactttcaatgaatgtgaagttaataaaactaaatctcataatgctcttggttcctaagaatgagtagtaatcatcaactttataatactccaatattccgttttataataattcagagccctgtggcttttacacaccgttaattatgtactctgttggaagtgcacatgaaaagtgaagaaaagttcctcttgtgattaaactaatgggaggaaataaatcaacaaagtctccattaagttctacattttgagaccttttaaaaattcccctcacaattctttaaggagcccccctttttatggaacatgagcctaaaaattatagaaagaagaattttaagttaataaagtttgtatttataaatgctgaaaaaatacagaaactttctgttccaaatgtgttgcctttgtgtattttataatacagatactacattgtaaacatttccattgttttatgatttagccagtgattccccaaagcagcctcttagtgttttaatatattaataactgttttgttaaaaatgatcatagtgaatttaaatcttcacatgatcacctatttgaataagcaatcatatccaatgaaattctgtatttctgagtatttttatagtcattttgttcttgtgtgaattttaaagctatccctatgttaatcctaatattttgaaatcatataaaatataataaaaatgtagtattatatatttacttctaatttcagattcctggtcaaaattactaaatatcttgaatgtaatttagtgccaagtttaaataatgtgtaaatgtgactaggatattgtgtttttcacaattaagaaatgttatgtggaaataaatatttatcctaacttccttgcacattttaaattgtgatacaaa

SEQ ID NO: 184220 - DNA, 3398 bp, Homo sapiens
  Payload ID: 16282
  Gene Symbol: SLC4A10
  Gene Name: solute carrier family 4, sodium bicarbonate transporter, member 10
  ENST ID: ENST00000421911
  CDS Start-End: 59-3223
gtgtaagacactgaagacactgcagagcaaggtgcttattccagaggcgttacaaaacatggagattaaagaccagggagcccaaatggagccgctgctgcctacgagaaatgatgaagaagcagttgtggatagaggtggaactcgttctattctcaaaacacactttgagaaagaagatttagaaggtcatcgaacactatttattggagtacatgtgcccttgggaggaagaaaaagccatcgacgtcacaggcatcgtggtcataaacacagaaagagagacagagaaagagattcaggattagaggatggaagggagtcaccttcttttgacaccccatcacagagggtacagtttattcttggaaccgaggatgatgacgaggaacacattcctcatgaccttttcacagaactggatgagatttgttggcgtgaaggtgaggacgctgagtggcgagaaacagccaggtggttgaagtttgaagaagatgtggaagatggaggagaaaggtggagcaagccttatgtggctactctttcattgcacagcttgtttgaattgagaagttgtattctgaatggaactgtgttgctggacatgcatgccaacactttagaagaaattgcagatatggttcttgaccaacaagtgagctcaggtcagctgaatgaagatgtacgccatagggtccatgaggcattgatgaaacagcatcatcatcagaatcagaaaaaactcaccaacaggattcccattgttcgttcctttgctgatattggcaagaaacagtcagaaccaaattccatggacaaaaatgcaggtcaggttgtttctcctcagtctgctccagcctgtgttgaaaataaaaatgatgttagcagagaaaacagcactgttgactttagcaagggactgggaggccaacaaaaggggcatactagtccatgtgggatgaaacaaaggcatgaaaaaggacctccacaccagcaagagagagaggttgatctgcattttatgaaaaagattcctccaggtgctgaagcatcgaacatcttagtgggagaactggagttcttggatcgaacagtagttgcgtttgtcaggttgtctccagctgtattgcttcaaggactggctgaagtcccaatcccaaccagatttttgttcattcttctgggacccctgggaaagggtcaacagtaccatgagattggcagatcaattgcaaccctaatgacagatgaggtatttcatgatgttgcctataaagctaaagatcgtaatgacttggtatcaggaattgatgagtttctggatcaggttactgttctccctcctggagaatgggatccaagcattcgaatagagcctcccaaaaatgttccttcccaggagaagaggaagattcctgctgtaccaaatggaacagcagctcatggggaagcagagccccacggaggacatagtggacctgaactccagcgaactggaaggatttttgggggacttattttagatatcaaaagaaaagctccatacttctggagtgacttcagagatgctttcagcctgcagtgcttagcatcttttctatttctctactgcgcgtgtatgtctcctgtcatcacgtttggaggactgctgggagaagcaactgaagggcgtataagtgcaattgaatctctctttggagcatccatgaccgggatagcctattctctctttggtggacagcctcttaccatattaggcagtacaggaccagttttggtgtttgaaaagattttgtttaaattttgcaaagaatatgggctgtcatacctatctttaagagctagcattggactttggactgcaactctatgtatcatacttgtggccacagatgctagttcccttgtctgctacatcactcggtttactgaagaagcttttgcttccctgatttgcatcattttcatttatgaggccctggagaagttgtttgaactcagtgaagcatatccaatcaacatgcataatgatctggaactgctgacacaatactcgtgtaactgtgtggaaccgcataatcccagcaatggcacattgaaggaatggagggaatccaatatttctgcctctgacataatttgggagaacctaactgtgtcagaatgcaaatcattgcatggagagtatgttggacgggcctgtggccatgatcacccatatgttccagatgttctattttggtctgtgatcctgttcttttccacagttactctgtcagccaccctgaagcagttcaagactagcagatattttccaaccaaggttcgatccatagtgagtgactttgctgtctttcttacaattctgtgtatggttttaattgactatgccattgggatcccatctccaaaactacaagtaccaagtgttttcaagcccactagagatgatcgtggctggtttgttacgcctttaggtccaaacccatggtggacagtaatagctgctataattccagctctgctttgtactattctaatttttatggaccaacagattacagctgtcatcatcaacaggaaagagcataagctaaagaaaggttgtgggtaccatctggacctattaatggtggctgtcatgctcggtgtatgctccatcatgggcctgccatggtttgtggctgccacagtcctctccatcactcatgtcaatagcctaaaactggaatcagaatgctcagctccaggagaacaacccaaatttctcggcattcgggagcaaagggttactgggcttatgatttttattcttatgggttcatcagtctttatgaccagtattctgaagtttattcccatgccagtgctatatggagtgtttctttatatgggtgcttcatctctaaagggaattcagttctttgataggataaagctcttctggatgccggcaaaacatcaaccagattttatatacctaaggcacgtaccgcttcgaaaagtgcatctcttcacaattattcagatgagttgccttggccttttgtggataataaaagtttcaagagctgctattgtctttcccatgatggtgttagccctggtatttgtaagaaagttgatggacttgttgttcacgaagcgggaactcagctggttggatgatttgatgcccgagagtaagaaaaagaaactggaagatgctgaaaaagaacattgaaagccgaaaagagaagaaagctgactcagggaaaggtgttgacagggagacttgtctatgactcgatcttcaatttattttttacatatatatgagaagagtgtcacaattattaataaaactgctttgatcatgtattgtaaattctgtccctcaacccaaatccaccttcata

SEQ ID NO: 184221 - DNA, 3094 bp, Homo sapiens
  Payload ID: 16283
  Gene Symbol: SLC4A11
  Gene Name: solute carrier family 4, sodium borate transporter, member 11
  Uniprot ID: Q8NBS3
  ENST ID: ENST00000380056
  CDS Start-End: 49-2724
ctttctccctagggtggcgtgggttgcatccctcggaagagcgaaggaatgagccaggtcggggggcggggagacaggtgcacacaggaggtccagggcttggtccatggggctggtgacctttctgcttcccttgcagaaaactctcccaccatgtcgcagaatggatacttcgaggattcaagctactacaagtgtgacacagatgacaccttcgaagcccgagaggagatcctgggggatgaggccttcgacactgccaactcctccatcgtgtctggcgagagtatccgtttttttgtcaatgtcaaccttgagatgcaggccaccaacactgagaatgaagcgacttccggtggctgtgtgctcctgcacacctcccgaaagtacctgaagttaaagaacttcaaggaagagatccgtgcgcaccgcgacctagatggcttcctggcgcaggccagcatcgtcctgaacgagacggccacctccctggataacgtgctgcggaccatgcttcgccgcttcgccagggaccctgacaacaatgagcccaactgcaacctggacctgctcatggccatgctcttcaccgatgccggggcacccatgcggggtaaagtccacctgctgtcagataccatccaaggggtcaccgccacagtgacaggggtgcggtaccagcagtcgtggctctgcatcatctgtaccatgaaggccctacagaagcggcacgtgtgcatcagccgcctggttcgcccacagaactggggggagaattcctgtgaggttcggttcgtcatcctggtgctggccccacccaagatgaaaagcactaagactgcgatggaggtggcgcgcacgtttgccaccatgttctcggatatcgccttccgccagaagctcctggagacccgcacagaggaggaattcaaggaggccttggtgcatcagagacagctgctcaccatggtgagccacggtccagtggcgccgagaacgaaggaacgcagcacagtctccctccctgcccacagacacccagagcccccaaagtgcaaggactttgtcccttttgggaagggcatccgggaggacatcgcacgcaggttccccttgtaccccttggacttcactgatggcattattgggaaaaacaaggctgtgggcaaatacatcaccaccaccctgttcctctacttcgcctgcctcctgcccaccatcgctttcgggtctctcaatgacgagaacacagacggggccatcgacgtgcagaagaccatagccgggcagagcatcgggggcctgctctacgcgctcttctctgggcagccattggtgattctgctgaccaccgcgcccctggcgctctacatccaggtgattcgtgtcatctgtgatgactatgacctggacttcaactccttctacgcatggacgggcctgtggaatagtttcttccttgcgctttatgcctttttcaacctcagcctggtcatgagtctcttcaagaggtcgacggaggagatcatcgccctcttcatttccatcacgtttgtgctggatgccgtcaagggcacggttaaaatcttctggaagtactactatgggcattacttggacgactatcacacaaaaaggacttcatcccttgtcagcctgtcaggcctcggcgccagcctcaacgccagcctccacactgccctcaacgccagcttcctcgccagccccacggagctgccctcggccacacactcaggccaggcgaccgccgtgctcagcctcctcatcatgctgggcacgctctggctgggctacaccctctaccaattcaagaagagcccctacctgcacccctgcgtgcgagagatcctgtccgactgcgccctgcccatcgcggtgctcgccttctccctcatcagctcccatggcttccgggaaatcgagatgagcaagttccgctacaaccccagcgagagcccctttgcgatggcgcagatccagtcgctgtccctgagggccgtcagcggtgccatgggcctcggcttcctgctgtccatgctcttcttcatcgagcagaacttggtggccgccttggtgaatgcaccggagaacaggctggtgaagggcactgcctaccactgggacctcctgctcctcgccatcatcaacacagggctgtctctgtttgggctgccttggatccatgccgcctacccccactccccgctgcacgtgcgagccctggccttagtggaggagcgtgtggagaacggacacatctatgacacgattgtgaacgtgaaggagacgcggctgacctcgctgggcgccagcgtcctggtgggcctgtccctgttgctgctgccggtcccgcttcagtggatccccaagcccgtgctctatggcctcttcctctacatcgcgctcacctccctcgatggcaaccagctcgtccagcgcgtggccctgctgctcaaggagcagactgcgtaccccccgacacactacatccggagggtgccccagaggaagatccactacttcacgggcctgcaggtgcttcagctgctgctgctgtgtgccttcggcatgagctccctgccctacatgaagatgatctttcccctcatcatgatcgccatgatccccatccgctatatcctgctgccccgaatcattgaagccaagtacttggatgtcatggacgctgagcacaggccttgactggcagaccctgcccacgccccattcgccagccctccacgtcctcccaggctggctctggagctgtgaggggaggtgtaggtgtgtgggtgactgctctgtgctgcgccttctcatggctgactcaggcctggggcatctgggcattgtaggggtgcagtggtatgtgcccacccctctcccattatcctttagctttaggccaagagcgttgctcagggcagcttctgcccagggtgggtgggactgagcaggatggattttcttttgataaaagagtcgatgcctgaaagagaaaccatttccttgattgtgtaaggaacttgctggacgcacattagagaataaagctcctgtttctaggctccta

SEQ ID NO: 184222 - DNA, 3229 bp, Homo sapiens
  Payload ID: 16283
  Gene Symbol: SLC4A11
  Gene Name: solute carrier family 4, sodium borate transporter, member 11
  Uniprot ID: Q8NBS3
  ENST ID: ENST00000380059
  CDS Start-End: 103-2859
cttccaggcggccgggacgcggtcccaggactggagaccgttgcctgtcggcccccgtgtgacccggggcgcgtgacgggggtcgggggaactgcgcctgcaatgggcgtttatggcccccaggaccggtctgagagtgagaagagggatgtgcagagagatcccccgccttggcatccgaggagagagggggagaggcccgctcgggcccggtcccttcctctcgctgcagcggggcagggttttctcaggaaaacctggattagcgaacatgaaaactctcccaccatgtcgcagaatggatacttcgaggattcaagctactacaagtgtgacacagatgacaccttcgaagcccgagaggagatcctgggggatgaggccttcgacactgccaactcctccatcgtgtctggcgagagtatccgtttttttgtcaatgtcaaccttgagatgcaggccaccaacactgagaatgaagcgacttccggtggctgtgtgctcctgcacacctcccgaaagtacctgaagttaaagaacttcaaggaagagatccgtgcgcaccgcgacctagatggcttcctggcgcaggccagcatcgtcctgaacgagacggccacctccctggataacgtgctgcggaccatgcttcgccgcttcgccagggaccctgacaacaatgagcccaactgcaacctggacctgctcatggccatgctcttcaccgatgccggggcacccatgcggggtaaagtccacctgctgtcagataccatccaaggggtcaccgccacagtgacaggggtgcggtaccagcagtcgtggctctgcatcatctgtaccatgaaggccctacagaagcggcacgtgtgcatcagccgcctggttcgcccacagaactggggggagaattcctgtgaggttcggttcgtcatcctggtgctggccccacccaagatgaaaagcactaagactgcgatggaggtggcgcgcacgtttgccaccatgttctcggatatcgccttccgccagaagctcctggagacccgcacagaggaggaattcaaggaggccttggtgcatcagagacagctgctcaccatggtgagccacggtccagtggcgccgagaacgaaggaacgcagcacagtctccctccctgcccacagacacccagagcccccaaagtgcaaggactttgtcccttttgggaagggcatccgggaggacatcgcacgcaggttccccttgtaccccttggacttcactgatggcattattgggaaaaacaaggctgtgggcaaatacatcaccaccaccctgttcctctacttcgcctgcctcctgcccaccatcgctttcgggtctctcaatgacgagaacacagacggggccatcgacgtgcagaagaccatagccgggcagagcatcgggggcctgctctacgcgctcttctctgggcagccattggtgattctgctgaccaccgcgcccctggcgctctacatccaggtgattcgtgtcatctgtgatgactatgacctggacttcaactccttctacgcatggacgggcctgtggaatagtttcttccttgcgctttatgcctttttcaacctcagcctggtcatgagtctcttcaagaggtcgacggaggagatcatcgccctcttcatttccatcacgtttgtgctggatgccgtcaagggcacggttaaaatcttctggaagtactactatgggcattacttggacgactatcacacaaaaaggacttcatcccttgtcagcctgtcaggcctcggcgccagcctcaacgccagcctccacactgccctcaacgccagcttcctcgccagccccacggagctgccctcggccacacactcaggccaggcgaccgccgtgctcagcctcctcatcatgctgggcacgctctggctgggctacaccctctaccaattcaagaagagcccctacctgcacccctgcgtgcgagagatcctgtccgactgcgccctgcccatcgcggtgctcgccttctccctcatcagctcccatggcttccgggaaatcgagatgagcaagttccgctacaaccccagcgagagcccctttgcgatggcgcagatccagtcgctgtccctgagggccgtcagcggtgccatgggcctcggcttcctgctgtccatgctcttcttcatcgagcagaacttggtggccgccttggtgaatgcaccggagaacaggctggtgaagggcactgcctaccactgggacctcctgctcctcgccatcatcaacacagggctgtctctgtttgggctgccttggatccatgccgcctacccccactccccgctgcacgtgcgagccctggccttagtggaggagcgtgtggagaacggacacatctatgacacgattgtgaacgtgaaggagacgcggctgacctcgctgggcgccagcgtcctggtgggcctgtccctgttgctgctgccggtcccgcttcagtggatccccaagcccgtgctctatggcctcttcctctacatcgcgctcacctccctcgatggcaaccagctcgtccagcgcgtggccctgctgctcaaggagcagactgcgtaccccccgacacactacatccggagggtgccccagaggaagatccactacttcacgggcctgcaggtgcttcagctgctgctgctgtgtgccttcggcatgagctccctgccctacatgaagatgatctttcccctcatcatgatcgccatgatccccatccgctatatcctgctgccccgaatcattgaagccaagtacttggatgtcatggacgctgagcacaggccttgactggcagaccctgcccacgccccattcgccagccctccacgtcctcccaggctggctctggagctgtgaggggaggtgtaggtgtgtgggtgactgctctgtgctgcgccttctcatggctgactcaggcctggggcatctgggcattgtaggggtgcagtggtatgtgcccacccctctcccattatcctttagctttaggccaagagcgttgctcagggcagcttctgcccagggtgggtgggactgagcaggatggattttcttttgataaaagagtcgatgcctgaaagagaaaccatttccttgattgtgtaaggaacttgctggacgcacattagagaataaagctcctgtttctaggctccta

SEQ ID NO: 184223 - DNA, 494 bp, Homo sapiens
  Payload ID: 16283
  Gene Symbol: SLC4A11
  Gene Name: solute carrier family 4, sodium borate transporter, member 11
  ENST ID: ENST00000437836
  CDS Start-End: 181-494
tttaccttccgcccgggcatcttcccgtccggcgccgcggtgggagccccggaacccctggagttttgggagtcccgggacccctgaccgtgccctgcgcggccgcagcggtttctcccttgctctgacacgggagggccagccctgggtccccgccaggacccagaaaactctcccaccatgtcgcagaatggatacttcgaggattcaagctactacaagtgtgacacagatgacaccttcgaagcccgagaggagatcctgggggatgaggccttcgacactgccaactcctccatcgtgtctggcgagagtatccgtttttttgtcaatgtcaaccttgagatgcaggccaccaacactgagaatgaagcgacttccggtggctgtgtgctcctgcacacctcccgaaagtacctgaagttaaagaacttcaaggaagagatccgtgcgcaccgcgacctagatggcttcctggcgcaggccagcatcgt

SEQ ID NO: 184224 - DNA, 2832 bp, Homo sapiens
  Payload ID: 16283
  Gene Symbol: SLC4A11
  Gene Name: solute carrier family 4, sodium borate transporter, member 11
  Uniprot ID: Q8NBS3
  ENST ID: ENST00000539553
  CDS Start-End: 54-2681
agaagcgccggagcgccgcgtgaggagcccggccgtgagtgcgcgagtgtgccatggccgcggccaccaggcgcgtgttccatctgcagccgtgcgaaaactctcccaccatgtcgcagaatggatacttcgaggattcaagctactacaagtgtgacacagatgacaccttcgaagcccgagaggagatcctgggggatgaggccttcgacactgccaactcctccatcgtgtctggcgagagtatccgtttttttgtcaatgtcaaccttgagatgcaggccaccaacactgagaatgaagcgacttccggtggctgtgtgctcctgcacacctcccgaaagtacctgaagttaaagaacttcaaggaagagatccgtgcgcaccgcgacctagatggcttcctggcgcaggccagcatcgtcctgaacgagacggccacctccctggataacgtgctgcggaccatgcttcgccgcttcgccagggaccctgacaacaatgagcccaactgcaacctggacctgctcatggccatgctcttcaccgatgccggggcacccatgcggggtaaagtccacctgctgtcagataccatccaaggggtcaccgccacagtgacaggggtgcggtaccagcagtcgtggctctgcatcatctgtaccatgaaggccctacagaagcggcacgtgtgcatcagccgcctggttcgcccacagaactggggggagaattcctgtgaggttcggttcgtcatcctggtgctggccccacccaagatgaaaagcactaagactgcgatggaggtggcgcgcacgtttgccaccatgttctcggatatcgccttccgccagaagctcctggagacccgcacagaggaggaattcaaggaggccttggtgcatcagagacagctgctcaccatggtgagccacggtccagtggcgccgagaacgaaggaacgcagcacagtctccctccctgcccacagacacccagagcccccaaagtgcaaggactttgtcccttttgggaagggcatccgggaggacatcgcacgcaggttccccttgtaccccttggacttcactgatggcattattgggaaaaacaaggctgtgggcaaatacatcaccaccaccctgttcctctacttcgcctgcctcctgcccaccatcgctttcgggtctctcaatgacgagaacacagacggggccatcgacgtgcagaagaccatagccgggcagagcatcgggggcctgctctacgcgctcttctctgggcagccattggtgattctgctgaccaccgcgcccctggcgctctacatccaggtgattcgtgtcatctgtgatgactatgacctggacttcaactccttctacgcatggacgggcctgtggaatagtttcttccttgcgctttatgcctttttcaacctcagcctggtcatgagtctcttcaagaggtcgacggaggagatcatcgccctcttcatttccatcacgtttgtgctggatgccgtcaagggcacggttaaaatcttctggaagtactactatgggcattacttggacgactatcacacaaaaaggacttcatcccttgtcagcctgtcaggcctcggcgccagcctcaacgccagcctccacactgccctcaacgccagcttcctcgccagccccacggagctgccctcggccacacactcaggccaggcgaccgccgtgctcagcctcctcatcatgctgggcacgctctggctgggctacaccctctaccaattcaagaagagcccctacctgcacccctgcgtgcgagagatcctgtccgactgcgccctgcccatcgcggtgctcgccttctccctcatcagctcccatggcttccgggaaatcgagatgagcaagttccgctacaaccccagcgagagcccctttgcgatggcgcagatccagtcgctgtccctgagggccgtcagcggtgccatgggcctcggcttcctgctgtccatgctcttcttcatcgagcagaacttggtggccgccttggtgaatgcaccggagaacaggctggtgaagggcactgcctaccactgggacctcctgctcctcgccatcatcaacacagggctgtctctgtttgggctgccttggatccatgccgcctacccccactccccgctgcacgtgcgagccctggccttagtggaggagcgtgtggagaacggacacatctatgacacgattgtgaacgtgaaggagacgcggctgacctcgctgggcgccagcgtcctggtgggcctgtccctgttgctgctgccggtcccgcttcagtggatccccaagcccgtgctctatggcctcttcctctacatcgcgctcacctccctcgatggcaaccagctcgtccagcgcgtggccctgctgctcaaggagcagactgcgtaccccccgacacactacatccggagggtgccccagaggaagatccactacttcacgggcctgcaggtgcttcagctgctgctgctgtgtgccttcggcatgagctccctgccctacatgaagatgatctttcccctcatcatgatcgccatgatccccatccgctatatcctgctgccccgaatcattgaagccaagtacttggatgtcatggacgctgagcacaggccttgactggcagaccctgcccacgccccattcgccagccctccacgtcctcccaggctggctctggagctgtgaggggaggtgtaggtgtgtgggtgactgctctgtgctgcgccttctcatggctgactcaggcctggggcatctgggcattgta

SEQ ID NO: 184225 - DNA, 3015 bp, Homo sapiens
  Payload ID: 16283
  Gene Symbol: SLC4A11
  Gene Name: solute carrier family 4, sodium borate transporter, member 11
  ENST ID: ENST00000474451
  CDS Start-End: 226-1950
agaagcgccggagcgccgcgtgaggagcccggccgtgagtgcgcgagtgtgccatggccgcggccaccaggcgcgtgttccatctgcagccgtgcggtgggtgcctgaacccgggggcgcggcgggaaggccgcccgggtctccgccaccgtctcccgtcggggaccccggggagaacgcggatgccgtctgcctgcgcgggccggggccgaaaactctcccaccatgtcgcagaatggatacttcgaggattcaagctactacaagtgtgacacagatgacaccttcgaagcccgagaggagatcctgggggatgaggccttcgacactgccaactcctccatcgtgtctggcgagagtatccgtttttttgtcaatgtcaaccttgagatgcaggccaccaacactgagaatgaagcgacttccggtggctgtgtgctcctgcacacctcccgaaagtacctgaagttaaagaacttcaaggaagagatccgtgcgcaccgcgacctagatggcttcctggcgcaggccagcatcgtcctgaacgagacggccacctccctggataacgtgctgcggaccatgcttcgccgcttcgccagggaccctgacaacaatgagcccaactgcaacctggacctgctcatggccatgctcttcaccgatgccggggcacccatgcggggtaaagtccacctgctgtcagataccatccaaggggtcaccgccacagtgacaggggtgcggtaccagcagtcgtggctctgcatcatctgtaccatgaaggccctacagaagcggcacgtgtgcatcagccgcctggttcgcccacagaactggggggagaattcctgtgaggttcggttcgtcatcctggtgctggccccacccaagatgaaaagcactaagactgcgatggaggtggcgcgcacgtttgccaccatgttctcggatatcgccttccgccagaagctcctggagacccgcacagaggaggaattcaaggaggccttggtgcatcagagacagctgctcaccatggtgagccacggtccagtggcgccgagaacgaaggaacgcagcacagtctccctccctgcccacagacacccagagcccccaaagtgcaaggactttgtcccttttgggaagggcatccgggaggacatcgcacgcaggttccccttgtaccccttggacttcactgatggcattattgggaaaaacaaggctgtgggcaaatacatcaccaccaccctgttcctctacttcgcctgcctcctgcccaccatcgctttcgggtctctcaatgacgagaacacagacggggccatcgacgtgcagaagaccatagccgggcagagcatcgggggcctgctctacgcgctcttctctgggcagccattggtgattctgctgaccaccgcgcccctggcgctctacatccaggtgattcgtgtcatctgtgatgactatgacctggacttcaactccttctacgcatggacgggcctgtggaatagtttcttccttgcgctttatgcctttttcaacctcagcctggtcatgagtctcttcaagaggtcgacggaggagatcatcgccctcttcatttccatcacgtttgtgctggatgccgtcaagggcacggttaaaacctgtcaggcctcggcgccagcctcaacgccagcctccacactgccctcaacgccagcttcctcgccagccccacggagctgccctcggccacacactcaggccaggcgaccgccgtgctcagcctcctcatcatgctgggcacgctctggctgggctacaccctctaccaattcaagaagagcccctacctgcacccctgcgtgcgagagatcctgtccgactgcgccctgcccatcgcggtgctcgccttctccctcatcagctcccatggcttccgggaaatcgagatgagcaagttccgctacaaccccagcgagagcccctttgcgatggcgcagatccagtcgctgtccctgagggccgtcagcggtgccatgggcctcggcttcctgctgtccatgctcttcttcatcgagcagaacttggtggccgccttggtgaatgcaccggagaacaggctggtgaagggcactgcctaccactgggacctcctgctcctcgccatcatcaacacagggctgtctctgtttgggctgccttggatccatgccgcctacccccactccccgctgcacgtgcgagccctggccttagtggaggagcgtgtggagaacggacacatctatgacacgattgtgaacgtgaaggagacgcggctgacctcgctgggcgccagcgtcctggtgggcctgtccctgttgctgctgccggtcccgcttcagtggatccccaagcccgtgctctatggcctcttcctctacatcgcgctcacctccctcgatggcaaccagctcgtccagcgcgtggccctgctgctcaaggagcagactgcgtaccccccgacacactacatccggagggtgccccagaggaagatccactacttcacgggcctgcaggtgcttcagctgctgctgctgtgtgccttcggcatgagctccctgccctacatgaagatgatctttcccctcatcatgatcgccatgatccccatccgctatatcctgctgccccgaatcattgaagccaagtacttggatgtcatggacgctgagcacaggccttgactggcagaccctgcccacgccccattcgccagccctccacgtcctcccaggctggctctggagctgtgaggggaggtgtaggtgtgtgggtgactgctctgtgctgcgccttctcatggctgactcaggcctggggcatctgggcattgtaggggtgcagtggtatgtgcccacccctctcccattatcctttagctttaggccaagagcgttgctcagggcagcttctgcccagggtgggtgggactgagcaggatggattttcttttgataaaagagtcgatgcctg

SEQ ID NO: 184226 - DNA, 3442 bp, Homo sapiens
  Payload ID: 16284
  Gene Symbol: SLC40A1
  Gene Name: solute carrier family 40 (iron-regulated transporter), member 1
  Uniprot ID: Q9NP59
  ENST ID: ENST00000261024
  CDS Start-End: 428-2143
gggacgcccgggcggccctgaaggggacggggcggccccagtcggaggtcgcagggagctccgcccccgactcggtataagagctgggcccggcccacggcggcggcggcggcggcggagagagctggctcagggcgtccgctaggctcggacgacctgctgagcctcccaaaccgcttccataaggctttgcctttccaacttcagctacagtgttagctaagtttggaaagaaggaaaaaagaaaatccctgggccccttttcttttgttctttgccaaagtcgtcgttgtagtctttttgcccaaggctgttgtgtttttagaggtgctatctccagttccttgcactcctgttaacaagcacctcagcgagagcagcagcagcgatagcagccgcagaagagccagcggggtcgcctagtgtcatgaccagggcgggagatcacaaccgccagagaggatgctgtggatccttggccgactacctgacctctgcaaaattccttctctaccttggtcattctctctctacttggggagatcggatgtggcactttgcggtgtctgtgtttctggtagagctctatggaaacagcctccttttgacagcagtctacgggctggtggtggcagggtctgttctggtcctgggagccatcatcggtgactgggtggacaagaatgctagacttaaagtggcccagacctcgctggtggtacagaatgtttcagtcatcctgtgtggaatcatcctgatgatggttttcttacataaacatgagcttctgaccatgtaccatggatgggttctcacttcctgctatatcctgatcatcactattgcaaatattgcaaatttggccagtactgctactgcaatcacaatccaaagggattggattgttgttgttgcaggagaagacagaagcaaactagcaaatatgaatgccacaatacgaaggattgaccagttaaccaacatcttagcccccatggctgttggccagattatgacatttggctccccagtcatcggctgtggctttatttcgggatggaacttggtatccatgtgcgtggagtacgttctgctctggaaggtttaccagaaaaccccagctctagctgtgaaagctggtcttaaagaagaggaaactgaattgaaacagctgaatttacacaaagatactgagccaaaacccctggagggaactcatctaatgggtgtgaaagactctaacatccatgagcttgaacatgagcaagagcctacttgtgcctcccagatggctgagcccttccgtaccttccgagatggatgggtctcctactacaaccagcctgtgtttctggctggcatgggtcttgctttcctttatatgactgtcctgggctttgactgcatcaccacagggtacgcctacactcagggactgagtggttccatcctcagtattttgatgggagcatcagctataactggaataatgggaactgtagcttttacttggctacgtcgaaaatgtggtttggttcggacaggtctgatctcaggattggcacagctttcctgtttgatcttgtgtgtgatctctgtattcatgcctggaagccccctggacttgtccgtttctccttttgaagatatccgatcaaggttcattcaaggagagtcaattacacctaccaagatacctgaaattacaactgaaatatacatgtctaatgggtctaattctgctaatattgtcccggagacaagtcctgaatctgtgcccataatctctgtcagtctgctgtttgcaggcgtcattgctgctagaatcggtctttggtcctttgatttaactgtgacacagttgctgcaagaaaatgtaattgaatctgaaagaggcattataaatggtgtacagaactccatgaactatcttcttgatcttctgcatttcatcatggtcatcctggctccaaatcctgaagcttttggcttgctcgtattgatttcagtctcctttgtggcaatgggccacattatgtatttccgatttgcccaaaatactctgggaaacaagctctttgcttgcggtcctgatgcaaaagaagttaggaaggaaaatcaagcaaatacatctgttgtttgagacagtttaactgttgctatcctgttactagattatatagagcacatgtgcttattttgtactgcagaattccaataaatggctgggtgttttgctctgtttttaccacagctgtgccttgagaactaaaagctgtttaggaaacctaagtcagcagaaattaactgattaatttcccttatgttgaggcatggaaaaaaaattggaaaagaaaaactcagtttaaatacggagactataatgataacactgaattcccctatttctcatgagtagatacaatcttacgtaaaagagtggttagtcacgtgaattcagttatcatttgacagattcttatctgtactagaattcagatatgtcagttttctgcaaaactcactcttgttcaagactagctaatttatttttttgcatcttagttatttttaaaaacaaattcttcaagtatgaagactaaattttgataactaatattatccttattgatcctattgatcttaaggtatttacatgtatgtggaaaaacaaaacacttaactagaattctctaataaggtttatggtttagcttaaagagcacctttgtatttttattatcagatggggcaacatattgtatgaagcatatgtagcacttcacagcatggttatcatgtaagctgcaggtagaagcaaagctgtaaagtagatttatcacacaatgactgcatacagacttcaaatatgtcaatagtttggtcatagaacctagaagccaaaagccacacagaagggcaagaatcccaatttaactcatgttatcatcattagtgatctgtgttgtagaacatgagggtgtaagccttcagcctggcaagttacatgtagaaagcccacacttgtgaaggttttgttttacaaatcacttgatttaacacactcaggtagaatatttttatttttactgttttatacccagaagttatttctacattgttctacagcaagaatattcataaaagtatccctttcaaatgcctttgagaagaatagaagaaaaaaagtttgtatatattttaaaaaattgttttaaaagtcagtttgcaacatgtctgtaccaagatggtactttgccttaaccgtttatatgcactttcatggagactgcaatacgttgctatgagcactttctttatccttggagtttaatcctttgcttcatctttctacagtatgacataatgatttgctatgttgtaaaatctttgtaaaaaatttctatataaaaatattttgaaaatcttaatttttcctgaa

SEQ ID NO: 184227 - DNA, 824 bp, Homo sapiens
  Payload ID: 16284
  Gene Symbol: SLC40A1
  Gene Name: solute carrier family 40 (iron-regulated transporter), member 1
  ENST ID: ENST00000427241
  CDS Start-End: 224-824
aatgagagccagcattcataagaaacttcgcaagagcagtggaatagtgaccattctttattctgcctttgtcctggtgagcacatctgatatggcagaggaaactgaggatgcctggccgaggtgctatctccagttccttgcactcctgttaacaagcacctcagcgagagcagcagcagcgatagcagccgcagaagagccagcggggtcgcctagtgtcatgaccagggcgggagatcacaaccgccagagaggatgctgtggatccttggccgactacctgacctctgcaaaattccttctctaccttggtcattctctctctacttggggagatcggatgtggcactttgcggtgtctgtgtttctggtagagctctatggaaacagcctccttttgacagcagtctacgggctggtggtggcagggtctgttctggtcctgggagccatcatcggtgactgggtggacaagaatgctagacttaaagtggcccagacctcgctggtggtacagaatgtttcagtcatcctgtgtggaatcatcctgatgatggttttcttacataaacatgagcttctgaccatgtaccatggatgggttctcacttcctgctatatcctgatcatcactattgcaaatattgcaaatttggccagtactgctactgcaatcacaatccaaagggattggattgttgttgttgcaggagaagacagaagcaaactagcaaatatgaatgccacaatacgaaggattgaccagttaaccaacatcttagcccccatggctgttggccagattatgacatttggctccc

SEQ ID NO: 184228 - DNA, 299 bp, Homo sapiens
  Payload ID: 16284
  Gene Symbol: SLC40A1
  Gene Name: solute carrier family 40 (iron-regulated transporter), member 1
  ENST ID: ENST00000427419
  CDS Start-End: 224-299
atactcatgcgtggctcccttcactactgggtgtcagtctggcctgtgctcaaggtgtggcatctggttggagtttcaatatgtaggatccactaccagggttttcgtgagattaagaaggaggtgctatctccagttccttgcactcctgttaacaagcacctcagcgagagcagcagcagcgatagcagccgcagaagagccagcggggtcgcctagtgtcatgaccagggcgggagatcacaaccgccagagaggatgctgtggatccttggccgactacctgacctctgcaaaat

SEQ ID NO: 184229 - DNA, 209 bp, Homo sapiens
  Payload ID: 16284
  Gene Symbol: SLC40A1
  Gene Name: solute carrier family 40 (iron-regulated transporter), member 1
  ENST ID: ENST00000440626
  CDS Start-End: 134-209
attctttattctgcctttgtcctggtgagcacatctgatatggcagaggaaactgaggatgcctggccgcacctcagcgagagcagcagcagcgatagcagccgcagaagagccagcggggtcgcctagtgtcatgaccagggcgggagatcacaaccgccagagaggatgctgtggatccttggccgactacctgacctctgcaaaat

SEQ ID NO: 184230 - DNA, 592 bp, Homo sapiens
  Payload ID: 16284
  Gene Symbol: SLC40A1
  Gene Name: solute carrier family 40 (iron-regulated transporter), member 1
  ENST ID: ENST00000455320
  CDS Start-End: 427-592
acagggcacatactcatgcgtggctcccttcactactgggtgtcagtctggcctgtgctcaaggtgtggcatctggttggagtttcaatatgtaggatccactaccagggttttcgtgagattaagaagggtaaggtaacctactggcaaaaggggctggtatgccccaggggttggtttggcacagcaggattaaaacgaagtcaaccaaggctagagtctggtgttctttagtcattcacctcaccctccaggaggccaccgaatggctttatctggacagggacagatccagggacacaactgggataaccggtattcctgaggtgctatctccagttccttgcactcctgttaacaagcacctcagcgagagcagcagcagcgatagcagccgcagaagagccagcggggtcgcctagtgtcatgaccagggcgggagatcacaaccgccagagaggatgctgtggatccttggccgactacctgacctctgcaaaattccttctctaccttggtcattctctctctacttggggagatcggatgtggcactttgcggtgtctgtgtttctggtagagctctatggaa

SEQ ID NO: 184231 - DNA, 4997 bp, Homo sapiens
  Payload ID: 16285
  Gene Symbol: SLC41A1
  Gene Name: solute carrier family 41 (magnesium transporter), member 1
  Uniprot ID: Q8IVJ1
  ENST ID: ENST00000367137
  CDS Start-End: 1016-2557
ccaccggcagccaaccagttgggcccgagtccgcgggcaagaagcgattgggggcgcgtgagctcggctccccggtcccccgtccgggtgcccccccgccgggcccgaagcgatatatcctgccctccccggccacctcccccgcgtggaagcggagcggcggcctcgctgtaacgcagaagcgaaatgtagcgagccgggtgtcgcggctggacgctcgccttggctgggggtgtgggggggcacgccgggggccaaggaggactgtcgaggaggagtgatgagaagagggggtgccctgcaccccccgagaccacgggccacgctgccacttgccaggcgccccccttcctcccaggcgaggggcaggtgttccacactgattctcgtgactttaaggaccagggatttgaagaggtattagctcttcccaggaagggaggaagtttctggaagagaagggaaagacggcagacgctgcgctgggaccagcagagcctgaggagctgtgggaagctgacagagcccagccaaaggagcgggaaggagccgcagccccaggctggcactgtgttctgaaagatttgaactcaagctgctttttacggaagaggggccacttcagagggcaccccagaatttggttgagctcttctactctggatgccccctgctctgaggagcctgccactgagaaccaaagaagataagaggacagatactttttcttcaagcacagagctggtgggttggagtcaggcatctgcacccctagtggctgtctggtgaggaatttcttgtttcttcccagcttgcggcttcagtgcttgatggggctgcctgttggtggatcagtttttgcagtgcctggtaggagtggagagccgtgggaagaggtcctgcggcgcccaagcctgggttcaccccaagactaagttctttcccaagttagagaagaagagagaaagcaaaaagaagagaggaaagttctcccttcccctcctccgtgcctgtcatgtcctctaagccagagccgaaggacgtccaccaactgaacgggactggcccttctgcctctccctgctcttcagatggcccagggagagagcccttggctgggacctcagagttcctggggcctgatggggctggggtagaggtggtgattgagtctcgggccaacgccaagggggttcgggaggaggacgccctgctggagaacgggagccagagcaacgaaagtgacgacgtcagcacagaccgtggccctgcgccaccttccccgctcaaggagacctccttttccatcgggctgcaagtactgtttccattcctcctggcaggctttgggaccgtggctgctggcatggtgttggacatcgtgcagcactgggaagtcttccagaaggtgacagaggtcttcatcctagtgcctgcgctgctggggctcaaagggaacctggaaatgaccctggcatcaaggctttccactgcagccaacattggacacatggacacacccaaggagctctggcggatgatcactgggaacatggccctcatccaggtgcaggccacggtggtgggcttcctggcgtccatcgcagccgtcgtctttggctggatccctgatggccacttcagtattccgcacgccttcctgctctgtgctagcagcgtggccacagccttcattgcctccctggtactgggtatgatcatgattggagtcatcattggctctcgcaagattgggatcaacccagacaacgtggccacacccattgctgccagcctgggcgacctcatcaccttggcgctgctctcaggcatcagctggggactctacctggaactgaatcactggcgatacatctacccactggtgtgtgctttctttgtggccctgctgcctgtctgggtggtgctggcccgacgaagtccagccacaagggaggtgttgtactcgggctgggagcctgttatcattgccatggccatcagcagtgtgggaggcctcatcttggacaagactgtctcagaccccaactttgctgggatggctgtcttcacgcctgtgattaatggtgttgggggcaatctggtggcagtgcaggccagccgcatctccaccttcctgcacatgaatggaatgcccggagagaactctgagcaagctcctcgccgctgtcccagtccttgtaccaccttcttcagccctgatgtgaattctcgctcagcccgggtcctcttcctcctcgtggtcccaggacacctggtgttcctctacaccatcagctgtatgcagggcgggcacaccaccctcacactcatcttcatcatcttctatatgacagctgcactgctccaggtgctgattctcctgtacatcgcagactggatggtgcactggatgtggggccggggcctggacccggacaacttctccatcccatacttgactgctctgggggacctgcttggcactgggctcctagcactcagcttccatgttctctggctcataggggaccgagacacggatgtcggggactagcttggtcactcaacattttccccatccctctgcactttctatttgaaatttttcttttgttcccctgtccctcctccaccccacactcccacctctttctaggacttcactttgataccaaattctcattattttcaatgggaatttttatacattgagccaagtttgtatagcaagaatttgggaaacacagatggcctgagataagcagtacaagtaggtttttgagacaatcaccaagtgcagtttcatggtgggtgcctccaggtgatgtggactggagcaggggagttttgtctggaatctggggacatggggtttggctttagcaacctgtcttggccctaatgagaaaccctttgtaagtgggctctggatttttggttttgttttctttttatctgttttgttttatttttggttttggttgaacagagggacagaagaataagtaacactcccaaacacagacatacttttgtagaagtggaccaacttcaaagctctggacaggagacacctgctccaggcccctgtgatcccagttctgttctcttgccctctggacctaagcgttcccactcgcagaaagagtaaggtggactgacttttcaatttgtgcacatgcctcttgttcaatggcctggtcaacatcaacaacccctccctctgatcatttccagttgattgtcatatccaggaaaaaatggaacagtgcactcttctccctgttgacccatgtccacctattggttccccaaaatccacattctccctgggcccaaatgactttgtctccctgggcccagattctttgtctctcttcaaccttcatctcaaattgtctctaagcactaccttccccagagcttgccaggttgggttttgagattagggtcaggtcatgggtatgtggagaatggtttggaggttgaggacaaccacaggtgtctcattgctgccatttctcctgaggacataatcacttggtcaccttggaccctgtcacttcctaaaattactcgttctgtcatgccatagaggtcagttttcctctttcttggcttctacccacaaacattcaccaatcatttattcgttcatttagcaaatatgcagcctccgcaagatgagctctcctgcagacaagcatggtctgaaacattctttgagcaatatttattgagtgcctactatgtgttaggtactgtgccaggcactgataagccagtggtaagggaaacacagctctaacctcacctcattctccaggttacaaaggccatgtgcccctttgaatctggcagagaaagtttcctcgttgtaagtatttgcatctacttcaagccagattcttctgcctctttctcctttccagacccctactctgtgcagtgctgaccacagctagagccaccgccccattgctcaaccagtatttatttccctaaacgacccttcctcacattcccttccctccacctctccttaccaagcacccaaaagaggatttagaactagcagggtggacatcatctggttgtttctacttttctctgcctagcacaaaattgggagaaaactggagcctccatccgcagtcacacgtgtacagatctggggatttggatgtaggctttttctaacttctctctcagaagcttctacagaaacccttccatctgtagcctcaagggcccacctccaagggaaggcttaggcaatgatcctgtttctaccaacactgcaccttatcccaggaacctgccctagacctccagagaccatattttctctccctccatttctacccagacctccaggcctccttctggaatcatagaaccgtagaattggaaggaattttagaggttttctagttggagttgtgtccaacagaattcattaacaccagcctgggcttgtttttcctcctccctctggacttttttcatcttttcctccacctcaaaaaatacttacacacagattcttcttgtacaggcatcaaaaccaactcctctgcccctaaggctgtgtccctgtggtctccagccacccctaccccagtcactcgccccttcctcatctctggaatttggccaggcagtcccagaagactctggagtgacctcctttgcctaaaaagcagacagataggcatgccccaggccctgagtgagcagaggaggactgtagggtgagagggaaagaaaatgaaggtgactttcatggaagtttcatttcttttccccgattgtaccaactgcatgtacttttggcctggctgcaaggagcaatattggtttactctcgtatccttaaaaagttacagaactgtgtcttaagagaattatttatagttactataactgaattgacaaatgtcaacttaactgataaattatatttggtaaaataaagaggacgtttatttaga

SEQ ID NO: 184232 - DNA, 4449 bp, Homo sapiens
  Payload ID: 16286
  Gene Symbol: SLC41A2
  Gene Name: solute carrier family 41 (magnesium transporter), member 2
  Uniprot ID: Q96JW4
  ENST ID: ENST00000258538
  CDS Start-End: 129-1850
gtggaaatattttctacacaatgaagtcaacaacttaatttaaaccagtgtttgtgcggttctgattcatctgctgtggttcccgaagcttgagatctaaggagtacagggtcttttgtgatgacaatatgactaatagtaaaggaagatctattaccgataaaacaagtggtggtccaagtagtggaggaggttttgtagattggactttacgtttaaacacaattcaatccgacaagtttttaaatttactcttgagtatggttccagtgatttaccagaaaaaccaagaagacaggcacaaaaaagcaaacggcatttggcaagatggattatcaactgcagtacagacttttagtaatagatctgagcaacacatggagtatcacagtttctcagagcagtcttttcatgccaataatgggcacgcatcatcaagctgcagccaaaagtatgatgactatgccaattataattactgtgatggaagggagacttcagaaaccactgccatgttacaagatgaagatatatctagtgatggtgatgaagatgctattgtagaagtgaccccaaaattaccaaaggaatccagtggcatcatggcattgcaaatacttgtgccctttttgctagctggttttggaacagtttcagctggcatggtactggatatagtacagcactgggaggtgttcagaaaagttacagaagttttcattttagtccctgcacttcttggtctcaaagggaacttggaaatgacattggcatccagattatccactgcagtaaatattgggaagatggattcacccattgaaaagtggaacctaataattggcaacttggctttaaagcaggttcaggcaacagtagtgggttttctagcagctgtggcagcaattatattgggctggattccagaaggaaaatattaccttgatcattccatacttctgtgctctagcagtgtggcaactgccttcattgcatctcttctgcagggaataataatggttggggttatcgttggttcaaagaagactggtataaatcctgataatgttgctacacccattgctgctagttttggcgaccttataactcttgccatattggcttggataagtcagggcttatactcctgtcttgagacctattactacatttctccattagttggtgtatttttcttggctctaacccctatttggattataatagctgccaaacatccagccacaagaacagttctccactcaggctgggagcctgtcataacagctatggttataagtagcattgggggccttattctggacacaactgtatcagacccaaacttggttgggattgttgtttacacgccagttattaatggtattggtggtaatttggtggccattcaggctagcaggatttctacctacctccatttacatagcattccaggagaattgcctgatgaacccaaaggttgttactacccatttagaactttctttggtccaggagtaaataataagtctgctcaagttctactgcttttagtgattcctggacatttaattttcctctacactattcatttgatgaaaagtggtcatacttctttaactataatcttcatagtagtgtatttatttggcgctgtgttacaggtatttaccttgctgtggattgctgactggatggtccatcacttctggaggaaaggaaaggacccggatagtttctccatcccctacctaacagcattgggtgatctgctcgggacagctctgttagccttaagttttcattttctttggcttattggagatcgagatggagatgttggagactaataaattctacaaactgctctcaagttaccaaggaagaaaatacacgacaaccacttatggctctttttcaaaactcttaaatcagtagtttgacttttgccagggtaatcttcagttggccctgattcaattaaatggccttaatttttttttaaggaatttgtgtcaaaaccagaatgaagagtattcgtgctgcttttcatagaataaatgataatttgacatagacatagatataagttccagctctgaaattaattaggaaagaatataggatgtttacagtgaataattttaaaaccacaaacatagcagaaatgtactttattattaaatttgtaatgcaggattagaagaagcagagctctagtttagcctttcttgtctcacagatgtgctgtatcccaggcatactataaaacgaagagtgcccaaccaagctttgaatcgtattaacaatgcccacctctatgctagctgaggataaatttaccagttgctcatatttaaactgacctaaatatgttttgctgagcataagataaactcacttttacctccatctaaaattatcctgttctgatgccaattcaatttcagctctgcaagttcttgtcaggctaatctttaaacattgagtgatcttgagagattgttaatgaaagcagtgagtcattttttgatgattgatttgttggaaaaatgttgatgtgttttaaaaaatgtaatcttcaaaaacagaatataacctgagatgcatttgtagagacaagacggtacgagaatgtgtgtgtgtgtgtgtgtgagagagagagacttttgatgaagaactaaatcttggattgctgatagcaaagatcatagtgctgttggaatatcagcaatatagagttattcttaaacacattctattaacatgtttttgtcattgggtccaaaaattttgctgctgaccagaatttactatttgttacctatattctttttttttttttttttttttttttttgagacagagtcttgctctgtcgcccaggctggaatgcagtggtgtgatctcggctcactgctacctccacctcctggattcaagtgattctcctgcctcagcctcccgagtagctgggattacaggaatgcgccacaacgcccagctaatttgttacctacactctaattaataattaataatttcttattttaaaaagtagtactatttaatataatcaagataggagatttaaaatgagcaagtgattcatttgctcttttaaagaagcccgttgacttacgcttttaaaaaagaagttggtgggttacctcaattattgttcatgcttaaacatatccatttgtacaggcttatttctacgtgggacccaatcatatatactatatttctcaaataatttttctaaaactctggcctatattctaaacacttgaccaacaccttagttattgaataggtaaccatttttaaagtacatgtggttcattttttaaaattcaatctctcaagaccgttagatatttaataatttaagctgataagggtatcaaaatgcacattaactttgatcatcatgatttaagttgtaactttgtgttattatataaatattaggttgtttataaatatattgcagaaagtattcttgttaagctcttttaaatgaggggactgtggtttagagttatatatttttgcttatttttaaacttcaattattccattcttctgccttataataaaacttttaaggcagagaactgaactaattatagaatttctcctttggagagttataatgttacatagtgaacattcttataaaagaaagaataagtttaagttgatgaatatttagctgcaaagattttttacttaaaaaaatccatgaatatctttgattttattataaagcatttgtaaattatttgcatttgagctgtaagattcataaacatttacatttcccaatgatttctattttgatttttaaaaaatatacagggcaagctacatttttaaagcattaatcaacaactttattatattacacattccagtgcacaaacacacaatatcatttaatactcacagtagtacctgtgaaatatatcagatggatattcctatctctattttacagcagaggaaaccgaaattcagagaacttacatttctaaggttgtacagctgcaaaatgaccaaattgtgaagtccctaacatccaggttttcataatgccagtactctttctatgacatgtttatgaccctccaaatgtaccaaaactacctaactaattcactgagaggaagccaactgcaaaaataggatttttaaaagtacaatagagtattactacattttatggatttcagacaaagaaacctccgtttattatatcctgatggtgagtattgccagctctaaattattcatatttctaagaccaaggaaaatataggtaaatgaaaattttgaaataaagaacaatgccttaatttgtaaaatctatcattgctaccaccctgcccaggtctggccatttgccataaatgctggtaaataaatacaatgactgataga

SEQ ID NO: 184233 - DNA, 447 bp, Homo sapiens
  Payload ID: 16286
  Gene Symbol: SLC41A2
  Gene Name: solute carrier family 41 (magnesium transporter), member 2
  ENST ID: ENST00000437220
  CDS Start-End: 1-447
atgatgactatgccaattataattactgtgatggaagggagacttcagaaaccactgccatgttacaagatgaagatatatctagtgatggtgatgaagatgctattgtagaagtgaccccaaaattaccaaaggaatccagtggcatcatggcattgcaaatacttgtgccctttttgctagctggttttggaacagtttcagctggcatggtactggatatagtacaggtaaatattgggaagatggattcacccattgaaaagtggaacctaataattggcaacttggctttaaagcaggttcaggcaacagtagtgggttttctagcagctgtggcagcaattatattgggctggattccagaaggaaaatattaccttgatcattccatacttctgtgctctagcagtgtggcaactgccttcattgcatctcttctgcagg

SEQ ID NO: 184234 - DNA, 685 bp, Homo sapiens
  Payload ID: 16286
  Gene Symbol: SLC41A2
  Gene Name: solute carrier family 41 (magnesium transporter), member 2
  ENST ID: ENST00000433540
  CDS Start-End: 458-685
agggggccgcgggcgccgacggccgggctgtcagcttggggccgcagccgcgcgaggaggcgcgggagcaggaaggagctgtgggctgggagccgctgtcctccccgccaccaccggtgccgggcaccagatcctcttctcatgtagacggctttcttccaagtggtggtgatgatggtggtggtagaaggagctttgtgaggaggaagacacagtgacagaaagtttcagaattaagtcattccaaaggaaagtcttcccccaaaggccttcccctctgaaatagccctatccagtccttctgtggaacttctgaacatcttttattagtggaaatattttctacacaatgaagtcaacaacttaatttaaaccagtgtttgtgcggttctgattcatctgctgtggttcccgaagcttgagatctaaggagtacagggtcttttgtgatgacaatatgactaatagtaaaggaagatctattaccgataaaacaagtggtggtccaagtagtggaggaggttttgtagattggactttacgtttaaacacaattcaatccgacaagtttttaaatttactcttgagtatggttccagtgatttaccagaaaaaccaagaagacaggcacaaaaaagcaaacggcatttggcaagatggattatcaactgcagtacagactttt

SEQ ID NO: 184235 - DNA, 563 bp, Homo sapiens
  Payload ID: 16286
  Gene Symbol: SLC41A2
  Gene Name: solute carrier family 41 (magnesium transporter), member 2
  ENST ID: ENST00000417469
  CDS Start-End: 426-563
agtctgcaagaaacatgacctcagccaaaaagaggccgctggtctgagaagagaaatcatgagtcatggattcgggggttcggaccttggagcaggcgatcctcttctcatgtagacggctttcttccaagtggtggtgatgatggtggtggtagaaggagctttgtgaggaggaagacacagtgacagaaagtttcagaattaagtcattccaaaggaaagtcttcccccaaaggccttcccctctgaaatagccctatccagtccttctgtggaacttctgaacatcttttattagtggaaatattttctacacaatgaagtcaacaacttaatttaaaccagtgtttgtgcggttctgattcatctgctgtggttcccgaagcttgagatctaaggagtacagggtcttttgtgatgacaatatgactaatagtaaaggaagatctattaccgataaaacaagtggtggtccaagtagtggaggaggttttgtagattggactttacgtttaaacacaattcaatccgacaagtttttaaatttactcttgagtatggtt

SEQ ID NO: 184236 - DNA, 702 bp, Homo sapiens
  Payload ID: 16286
  Gene Symbol: SLC41A2
  Gene Name: solute carrier family 41 (magnesium transporter), member 2
  ENST ID: ENST00000415674
  CDS Start-End: 272-702
gctgtcagcttggggccgcagccgcgcgaggaggcgcgggagcaggaaggagctgtgggctgggagccgctgtcctccccgccaccaccggtgccgggcaccagatccagtccttctgtggaacttctgaacatcttttattagtggaaatattttctacacaatgaagtcaacaacttaatttaaaccagtgtttgtgcggttctgattcatctgctgtggttcccgaagcttgagatctaaggagtacagggtcttttgtgatgacaatatgactaatagtaaaggaagatctattaccgataaaacaagtggtggtccaagtagtggaggaggttttgtagattggactttacgtttaaacacaattcaatccgacaagtttttaaatttactcttgagtatggttccagtgatttaccagaaaaaccaagaagacaggcacaaaaaagcaaacggcatttggcaagatggattatcaactgcagtacagacttttagtaatagatctgagcaacacatggagtatcacagtttctcagagcagtcttttcatgccaataatgggcacgcatcatcaagctgcagccaaaagtatgatgactatgccaattataattactgtgatggaagggagacttcagaaaccactgccatgttacaagatgaagatatatctagtgatggtgatgaagatgctat

SEQ ID NO: 184237 - DNA, 590 bp, Homo sapiens
  Payload ID: 16286
  Gene Symbol: SLC41A2
  Gene Name: solute carrier family 41 (magnesium transporter), member 2
  ENST ID: ENST00000424946
  CDS Start-End: 374-590
gctgtcagcttggggccgcagccgcgcgaggaggcgcgggagcaggaaggagctgtgggctgggagccgctgtcctccccgccaccaccggtgccgggcaccaggtgaatgccccttccatcccccgcccctggtgtctcggtctggtctgaggagacggggacccttctcacaccggccgctgccgccgccgcgctccggaacagatccagtccttctgtggaacttctgaacatcttttattagtggaaatattttctacacaatgaagtcaacaacttaatttaaaccagtgtttgtgcggttctgattcatctgctgtggttcccgaagcttgagatctaaggagtacagggtcttttgtgatgacaatatgactaatagtaaaggaagatctattaccgataaaacaagtggtggtccaagtagtggaggaggttttgtagattggactttacgtttaaacacaattcaatccgacaagtttttaaatttactcttgagtatggttccagtgatttaccagaaaaaccaagaagacaggcacaaaaaagcaaacggcatttggcaagatggattatcaactgcag

SEQ ID NO: 184238 - DNA, 571 bp, Homo sapiens
  Payload ID: 16286
  Gene Symbol: SLC41A2
  Gene Name: solute carrier family 41 (magnesium transporter), member 2
  ENST ID: ENST00000411411
  CDS Start-End: 206-571
gatcagtggtaaaagaagttacgaacagttcataaaagatccagtccttctgtggaacttctgaacatcttttattagtggaaatattttctacacaatgaagtcaacaacttaatttaaaccagtgtttgtgcggttctgattcatctgctgtggttcccgaagcttgagatctaaggagtacagggtcttttgtgatgacaatatgactaatagtaaaggaagatctattaccgataaaacaagtggtggtccaagtagtggaggaggttttgtagattggactttacgtttaaacacaattcaatccgacaagtttttaaatttactcttgagtatggttccagtgatttaccagaaaaaccaagaagacaggcacaaaaaagcaaacggcatttggcaagatggattatcaactgcagtacagacttttagtaatagatctgagcaacacatggagtatcacagtttctcagagcagtcttttcatgccaataatgggcacgcatcatcaagctgcagccaaaagtatgatgactatgccaattataattactgtgatggaagggag

SEQ ID NO: 184239 - DNA, 564 bp, Homo sapiens
  Payload ID: 16286
  Gene Symbol: SLC41A2
  Gene Name: solute carrier family 41 (magnesium transporter), member 2
  ENST ID: ENST00000432951
  CDS Start-End: 529-564
cagcttggggccgcagccgcgcgaggaggcgcgggagcaggaaggagctgtgggctgggagccgctgtcctccccgccaccaccggtgccgggcaccaggtgaatgccccttccatcccccgcccctggtgtctcggtctggtctgaggagacggggacccttctcacaccggccgctgccgccgccgcgctccggaacagatcctcttctcatgtagacggctttcttccaagtggtggtgatgatggtggtggtagaaggagctttgtgaggaggaagacacagtgacagaaagtttcagaattaagtcattccaaaggaaagtcttcccccaaaggccttcccctctgaaatagccctatccagtccttctgtggaacttctgaacatcttttattagtggaaatattttctacacaatgaagtcaacaacttaatttaaaccagtgtttgtgcggttctgattcatctgctgtggttcccgaagcttgagatctaaggagtacagggtcttttgtgatgacaatatgactaatagtaaaggaagatctattaccgataaa

SEQ ID NO: 184240 - DNA, 574 bp, Homo sapiens
  Payload ID: 16286
  Gene Symbol: SLC41A2
  Gene Name: solute carrier family 41 (magnesium transporter), member 2
  ENST ID: ENST00000449866
  CDS Start-End: 291-574
actatgcgctgctgggccgaaagacacgtggttcggttttaactccagtctgcaagaaacatgacctcagccaaaaagaggccgctggtctgagaagagaaatcatgagtcatggattcggggatccagtccttctgtggaacttctgaacatcttttattagtggaaatattttctacacaatgaagtcaacaacttaatttaaaccagtgtttgtgcggttctgattcatctgctgtggttcccgaagcttgagatctaaggagtacagggtcttttgtgatgacaatatgactaatagtaaaggaagatctattaccgataaaacaagtggtggtccaagtagtggaggaggttttgtagattggactttacgtttaaacacaattcaatccgacaagtttttaaatttactcttgagtatggttccagtgatttaccagaaaaaccaagaagacaggcacaaaaaagcaaacggcatttggcaagatggattatcaactgcagtacagacttttagtaatagatctgagcaacacatggagtatcacagtttctcagagcagtcttttca

SEQ ID NO: 184241 - DNA, 1705 bp, Homo sapiens
  Payload ID: 16287
  Gene Symbol: SLC41A3
  Gene Name: solute carrier family 41, member 3
  Uniprot ID: Q96GZ6
  ENST ID: ENST00000346785
  CDS Start-End: 240-1655
cggctcccagccccccgggcccccggcggggctctgcgctgccggagcttgggcgtctgctgctgtcccggagcgccaagtcgtccgaggtccggccgcccggccggggcggggccagggaggcccggccttcccgcttcctgcctgagccgcaggcccgcccctgcgtcctccgcccgcctctttcccgccgccgcctgggaggggacccgggctgccaggcgcccagctgtgcccagatggatgggacagagacccggcagcggaggctggacagctgtggcaagccaggggagctggggcttcctcaccccctcagcacaggaggactccctgtagcctcagaagatggagctctcagggcccctgagagccaaagcgtgacccccaagccactggagactgagcctagcagggagaccacctggtccataggccttcaggtgaccgtgcccttcatgtttgcaggcctgggactgtcctgggccggcatgcttctggactatttccaggccaacactggacaaattgatgacccccaggagcagcacagagtcatcagcagcaacctggccctcatccaggtgcaggccactgtcgtggggctcttggctgctgtggctgcgctgctgttgggcgtggtgtctcgagaggaagtggatgtcgccaaggtggagttgctgtgtgccagcagtgtcctcactgccttccttgcagcctttgccctgggggtgctgatggtctgtatagtgattggtgctcgaaagctcggggtcaacccagacaacattgccacgcccattgcagccagcctgggagacctcatcacactgtccattctggctttggttagcagcttcttctacagacacaaagatagtcggtatctgacgccgctggtctgcctcagctttgcggctctgaccccagtgtgggtcctcattgccaagcagagcccacccatcgtgaagatcctgaagtttggctggttcccaatcatcctggccatggtcatcagcagtttcggaggactcatcttgagcaaaaccgtttctaaacagcagtacaaaggcatggcgatatttacccccgtcatatgtggtgttggtggcaatctggtggccattcagaccagccgaatctcaacctacctgcacatgtggagtgcacctggcgtcctgcccctccagatgaagaaattctggcccaacccgtgttctactttctgcacgtcagaaatcaattccatgtcagctcgagtcctgctcttgctggtggtcccaggccatctgattttcttctacatcatctacctggtggagggtcagtcagtcataaacagccagacctttgtggtgctctacctgctggcaggcctgatccaggtgacaatcctgctgtacctcgcagaagtgatggttcggctgacttggcaccaggccctggatcctgacaaccactgcatcccctaccttacagggctgggggacctgctcggttcaagctccgtgggccacactgctgctgtgccaagaaggtgtacagcctccccaggatggggcctcatacaacccttcatctgcactcaacatttaatcgtgtccttgctgtctttttattttcctttttgtttgttagcaaaaacctctatttagatttcaataatcagagaagtgtaaaataaaacagattatattgtacttga

SEQ ID NO: 184242 - DNA, 1797 bp, Homo sapiens
  Payload ID: 16287
  Gene Symbol: SLC41A3
  Gene Name: solute carrier family 41, member 3
  Uniprot ID: Q96GZ6
  ENST ID: ENST00000315891
  CDS Start-End: 240-1763
cggctcccagccccccgggcccccggcggggctctgcgctgccggagcttgggcgtctgctgctgtcccggagcgccaagtcgtccgaggtccggccgcccggccggggcggggccagggaggcccggccttcccgcttcctgcctgagccgcaggcccgcccctgcgtcctccgcccgcctctttcccgccgccgcctgggaggggacccgggctgccaggcgcccagctgtgcccagatggatgggacagagacccggcagcggaggctggacagctgtggcaagccaggggagctggggcttcctcaccccctcagcacaggaggactccctgtagcctcagaagatggagctctcagggcccctgagagccaaagcgtgacccccaagccactggagactgagcctagcagggagaccacctggtccataggccttcaggtgaccgtgcccttcatgtttgcaggcctgggactgtcctgggccggcatgcttctggactatttccagcactggcctgtgtttgtggaggtgaaagaccttttgacattggtgccgcccctggtgggcctgaaggggaacctggagatgacactggcatccagactctccacagctgccaacactggacaaattgatgacccccaggagcagcacagagtcatcagcagcaacctggccctcatccaggtgcaggccactgtcgtggggctcttggctgctgtggctgcgctgctgttgggcgtggtgtctcgagaggaagtggatgtcgccaaggtggagttgctgtgtgccagcagtgtcctcactgccttccttgcagcctttgccctgggggtgctgatggtctgtatagtgattggtgctcgaaagctcggggtcaacccagacaacattgccacgcccattgcagccagcctgggagacctcatcacactgtccattctggctttggttagcagcttcttctacagacacaaagatagtcggtatctgacgccgctggtctgcctcagctttgcggctctgaccccagtgtgggtcctcattgccaagcagagcccacccatcgtgaagatcctgaagtttggctggttcccaatcatcctggccatggtcatcagcagtttcggaggactcatcttgagcaaaaccgtttctaaacagcagtacaaaggcatggcgatatttacccccgtcatatgtggtgttggtggcaatctggtggccattcagaccagccgaatctcaacctacctgcacatgtggagtgcacctggcgtcctgcccctccagatgaagaaattctggcccaacccgtgttctactttctgcacgtcagaaatcaattccatgtcagctcgagtcctgctcttgctggtggtcccaggccatctgattttcttctacatcatctacctggtggagggtcagtcagtcataaacagccagacctttgtggtgctctacctgctggcaggcctgatccaggtgacaatcctgctgtacctcgcagaagtgatggttcggctgacttggcaccaggccctggatcctgacaaccactgcatcccctaccttacagggctgggggacctgctcggttcaagctccgtgggccacactgctgctgtgccaagaaggtgtacagcctccccaggatggggcctcatacaacccttcatctgcactcaacatttaatcgtgtccttgctgtctttttattttcctttttgtttgttagcaaaaacctctatttagatttcaataatcagagaagtgtaaaataaaacag

SEQ ID NO: 184243 - DNA, 2169 bp, Homo sapiens
  Payload ID: 16287
  Gene Symbol: SLC41A3
  Gene Name: solute carrier family 41, member 3
  Uniprot ID: Q96GZ6
  ENST ID: ENST00000360370
  CDS Start-End: 45-1508
gcctgggaggggacccgggctgccaggcgcccagctgtgcccagatggatgggacagagacccggcagcggaggctggacagctgtggcaagccaggggagctggggcttcctcaccccctcagcacaggaggactccctgtagcctcagaagatggagctctcagggcccctgagagccaaagcgtgacccccaagccactggagactgagcctagcagggagaccacctggtccataggccttcaggtgaccgtgcccttcatgtttgcaggcctgggactgtcctgggccggcatgcttctggactatttccagcactggcctgtgtttgtggaggtgaaagaccttttgacattggtgccgcccctggtgggcctgaaggggaacctggagatgacactggcatccagactctccacagctgccaacactggacaaattgatgacccccaggagcagcacagagtcatcagcagcaacctggccctcatccaggtgcaggccactgtcgtggggctcttggctgctgtggctgcgctgctgttgggcgtggtgtctcgagaggaagtggatgtcgccaaggtggagttgctgtgtgccagcagtgtcctcactgccttccttgcagcctttgccctgggggtgctgatggtctgtatagtgattggtgctcgaaagctcggggtcaacccagacaacattgccacgcccattgcagccagcctgggagacctcatcacactgtccattctggctttggttagcagcttcttctacagacacaaagatagtcggtatctgacgccgctggtctgcctcagctttgcggctctgaccccagtgtgggtcctcattgccaagcagagcccacccatcgtgaagatcctgaagtttggctggttcccaatcatcctggccatggtcatcagcagtttcggaggactcatcttgagcaaaaccgtttctaaacagcagtacaaaggcatggcgatatttacccccgtcatatgtggtgttggtggcaatctggtggccattcagaccagccgaatctcaacctacctgcacatgtggagtgcacctggcgtcctgcccctccagatgaagaaattctggcccaacccgtgttctactttctgcacgtcagaaatcaattccatgtcagctcgagtcctgctcttgctggtggtcccaggccatctgattttcttctacatcatctacctggtggagggtcagtcagtcataaacagccagacctttgtggtgctctacctgctggcaggcctgatccaggtgacaatcctgctgtacctcgcagaagtgatggttcggctgacttggcaccaggccctggatcctgacaaccactgcatcccctaccttacagggctgggggacctgctcggtactggcctcctggcactctgctttttcactgactggctactgaagagcaaggcagagctgggtggcatctcagaactggcatctggacctccctaactgggccccgctggtcccatttgctcattagaatttcctctcacatcagtgggatacagaattcagtttctcccttgccaggtccttgggatggttgacccctgcctctgcagtagccttttgtgagtctgctaaggtagctctcacacacctcggctctggggttgatacctgagcctgcaatagagccctgaaatcaagagcatggcttgagtgtgtgaatatgatgtgtgcacatgcttaatgagcgtgcaagtgtgcacacgtttgtggagaggagggtgttctggcctgagaaggtaaagaagaggcatgtccagtatgctttgcagggtgtgtttgctcttttccatgcccatgcaacccagattggggtggagcaggaaggagctcttttctgttcccaagcctcagaactcttgagctgtggcttacttgctgtcttcaccaggttcaagctccgtgggccacactgctgctgtgccaagaaggtgtacagcctccccaggatggggcctcatacaacccttcatctgcactcaacatttaatcgtgtccttgctgtctttttattttcctttttgtttgttagcaaaaacctctatttagatttcaataatcagagaagtgtaaaataaaacagattatattgtacttgacc

SEQ ID NO: 184244 - DNA, 2330 bp, Homo sapiens
  Payload ID: 16287
  Gene Symbol: SLC41A3
  Gene Name: solute carrier family 41, member 3
  Uniprot ID: Q96GZ6
  ENST ID: ENST00000383598
  CDS Start-End: 287-1672
actgtctgaggagagcctgaccttcagggagggacagcagggcctggcagagtctctgtaatgaggccgtgagtcacactggcctttgttcctcactcatctgtgctggccctcagccgaggggctgttggggaactctctgcaggcacagggcacctggtgactgggaagcttctgtttgtgtggacttcttgggaacagcgtcctggtgtgggccaggaggagaggactggagcaccccaggctctgacttcgtgctcctgggatcgtggtgcattgcctggccatggtggtcacccagctgaatctggagttttgctttcagggcaagaagctgcgaggcttcagctgtgagcttacccggtccccacatggggtcttgcctgaatctttcttcaccatcatgtgccaggtcgtggtgcccattctgctgtccggcttgtgcatgatgacagccggcctggtgatgaacaccattcaacactggcctgtgtttgtggaggtgaaagaccttttgacattggtgccgcccctggtgggcctgaaggggaacctggagatgacactggcatccagactctccacagctgccaacactggacaaattgatgacccccaggagcagcacagagtcatcagcagcaacctggccctcatccaggtgcaggccactgtcgtggggctcttggctgctgtggctgcgctgctgttgggcgtggtgtctcgagaggaagtggatgtcgccaaggtggagttgctgtgtgccagcagtgtcctcactgccttccttgcagcctttgccctgggggtgctgatggtctgtatagtgattggtgctcgaaagctcggggtcaacccagacaacattgccacgcccattgcagccagcctgggagacctcatcacactgtccattctggctttggttagcagcttcttctacagacacaaagatagtcggtatctgacgccgctggtctgcctcagctttgcggctctgaccccagtgtgggtcctcattgccaagcagagcccacccatcgtgaagatcctgaagtttggctggttcccaatcatcctggccatggtcatcagcagtttcggaggactcatcttgagcaaaaccgtttctaaacagcagtacaaaggcatggcgatatttacccccgtcatatgtggtgttggtggcaatctggtggccattcagaccagccgaatctcaacctacctgcacatgtggagtgcacctggcgtcctgcccctccagatgaagaaattctggcccaacccgtgttctactttctgcacgtcagaaatcaattccatgtcagctcgagtcctgctcttgctggtggtcccaggccatctgattttcttctacatcatctacctggtggagggtcagtcagtcataaacagccagacctttgtggtgctctacctgctggcaggcctgatccaggtgacaatcctgctgtacctcgcagaagtgatggttcggctgacttggcaccaggccctggatcctgacaaccactgcatcccctaccttacagggctgggggacctgctcggtactggcctcctggcactctgctttttcactgactggctactgaagagcaaggcagagctgggtggcatctcagaactggcatctggacctccctaactgggccccgctggtcccatttgctcattagaatttcctctcacatcagtgggatacagaattcagtttctcccttgccaggtccttgggatggttgacccctgcctctgcagtagccttttgtgagtctgctaaggtagctctcacacacctcggctctggggttgatacctgagcctgcaatagagccctgaaatcaagagcatggcttgagtgtgtgaatatgatgtgtgcacatgcttaatgagcgtgcaagtgtgcacacgtttgtggagaggagggtgttctggcctgagaaggtaaagaagaggcatgtccagtatgctttgcagggtgtgtttgctcttttccatgcccatgcaacccagattggggtggagcaggaaggagctcttttctgttcccaagcctcagaactcttgagctgtggcttacttgctgtcttcaccaggttcaagctccgtgggccacactgctgctgtgccaagaaggtgtacagcctccccaggatggggcctcatacaacccttcatctgcactcaacatttaatcgtgtccttgctgtctttttattttcctttttgtttgttagcaaaaacctctatttagatttcaataatcagagaagtgtaaaataaaacagattatattgtacttg

SEQ ID NO: 184245 - DNA, 726 bp, Homo sapiens
  Payload ID: 16287
  Gene Symbol: SLC41A3
  Gene Name: solute carrier family 41, member 3
  ENST ID: ENST00000512470
  CDS Start-End: 123-726
gggaggcgcgcgggagagggcgcccgggagtgggtgcgcgggaggcgagtgagccgggcgccgggccctgggggctcggcgggagggggagtcagggctgccaggcgcccagctgtgcccagatggatgggacagagacccggcagcggaggctggacagctgtggcaagccaggggagctggggcttcctcaccccctcagcacaggaggactccctgtagcctcagaagatggagctctcagggcccctgagagccaaagcgtgacccccaagccactggagactgagcctagcagggagaccacctggtccataggccttcaggtgaccgtgcccttcatgtttgcaggcctgggactgtcctgggccggcatgcttctggactatttccagcactggcctgtgtttgtggaggtgaaagaccttttgacattggtgccgcccctggtgggcctgaaggggaacctggagatgacactggcatccagactctccacagctgccaacactggacaaattgatgacccccaggagcagcacagagtcatcagcagcaacctggccctcatccaggtgcaggccactgtcgtggggctcttggctgctgtggctgcgctgctgttgggcgtggtgtctcgagaggaagtggatgtcgccaaggtggagttgctgtgtgccagcagtgtcctcactgccttccttgcagcctttgccctgggtgagc

SEQ ID NO: 184246 - DNA, 526 bp, Homo sapiens
  Payload ID: 16287
  Gene Symbol: SLC41A3
  Gene Name: solute carrier family 41, member 3
  ENST ID: ENST00000504035
  CDS Start-End: 71-526
cccggtaagcgcggccctgttccgggcggggttggggcggaagggctgccaggcgcccagctgtgcccagatggatgggacagagacccggcagcggaggctggacagctgtggcaagccaggggagctggggcttcctcaccccctcagcacaggaggactccctgtagcctcagaagatggagctctcagggcccctgagagccaaagcgtgacccccaagccactggagactgagcctagcagggagaccacctggtccataggccttcaggtgaccgtgcccttcatgtttgcaggcctgggactgtcctgggccggcatgcttctggactatttccagcactggcctgtgtttgtggaggtgaaagaccttttgacattggtgccgcccctggtgggcctgaaggggaacctggagatgacactggcatccagactctccacagctgccaacactggacaaattgatgacccccaggagcagcacagagtcatcagcagcaacctggccctcatccaggtg

SEQ ID NO: 184247 - DNA, 500 bp, Homo sapiens
  Payload ID: 16287
  Gene Symbol: SLC41A3
  Gene Name: solute carrier family 41, member 3
  ENST ID: ENST00000509452
  CDS Start-End: 244-500
ttaggcattagattctcataaggagcacacaacctagatcccctgcgtgcgcagttcacaatacggtttgagctcctatgaggatctgatgctgccggtgatctgacaggagagggaacctgatcaggcagtgatgctcgccgggagccgctcaccttctgctgtgtggcccagttcccaacgggggttggggacccctgctctaaaggatctcttggctgccaggcgcccagctgtgcccagatggatgggacagagacccggcagcggaggctggacagctgtggcaagccaggggagctggggcttcctcaccccctcagcacaggaggactccctgtagcctcagaagatggagctctcagggcccctgagagccaaagcgtgacccccaagccactggagactgagcctagcagggagaccacctggtccataggccttcaggtgaccgtgcccttcatgtttgcaggcctgggactgtcctgggccggcatgct

SEQ ID NO: 184248 - DNA, 588 bp, Homo sapiens
  Payload ID: 16287
  Gene Symbol: SLC41A3
  Gene Name: solute carrier family 41, member 3
  ENST ID: ENST00000514333
  CDS Start-End: 176-588
tctttcccgccgccgcctgggaggggacccgagggtttcaccatcttgcctaagctggtcttcaactcctgagctcaagcaatctgcttgcctcggcctcccaaagtgctgggattacaggcatgagccactgcatctggccagatagggctgccaggcgcccagctgtgcccagatggatgggacagagacccggcagcggaggctggacagctgtggcaagccaggggagctggggcttcctcaccccctcagcacaggaggactccctgtagcctcagaagatggagctctcagggcccctgagagccaaagcgtgacccccaagccactggagactgagcctagcagggagaccacctggtccataggccttcaggtgaccgtgcccttcatgtttgcaggcctgggactgtcctgggccggcatgcttctggactatttccaggccaacactggacaaattgatgacccccaggagcagcacagagtcatcagcagcaacctggccctcatccaggtgcaggccactgtcgtggggctcttggctgctgtggctgcgctgctgttgggcgtggtgtctcgaga

SEQ ID NO: 184249 - DNA, 544 bp, Homo sapiens
  Payload ID: 16287
  Gene Symbol: SLC41A3
  Gene Name: solute carrier family 41, member 3
  ENST ID: ENST00000507280
  CDS Start-End: 89-544
attgctcgggtgaccactggccttggcaagaacagtttgcatcaggagaagaggaggggagggctgccaggcgcccagctgtgcccagatggatgggacagagacccggcagcggaggctggacagctgtggcaagccaggggagctggggcttcctcaccccctcagcacaggaggactccctgtagcctcagaagatggagctctcagggcccctgagagccaaagcgtgacccccaagccactggagactgagcctagcagggagaccacctggtccataggccttcaggtgaccgtgcccttcatgtttgcaggcctgggactgtcctgggccggcatgcttctggactatttccagcactggcctgtgtttgtggaggtgaaagaccttttgacattggtgccgcccctggtgggcctgaaggggaacctggagatgacactggcatccagactctccacagctgccaacactggacaaattgatgacccccaggagcagcacagagtcatcagcagcaacctggccctcatccaggtg

SEQ ID NO: 184250 - DNA, 986 bp, Homo sapiens
  Payload ID: 16287
  Gene Symbol: SLC41A3
  Gene Name: solute carrier family 41, member 3
  ENST ID: ENST00000514677
  CDS Start-End: 105-986
gcttcctgcctgagccgcaggcccgcccctgcgtcctccgcccgcctctttcccgccgccgcctgggaggggacccgggctgccaggcgcccagctgtgcccagatggatgggacagagacccggcagcggaggctggacagctgtggcaagccaggggagctggggcttcctcaccccctcagcacaggaggactccctgtagcctcagaagatggagctctcagggcccctgagagccaaagcgtgacccccaagccactggagactgagcctagcagggagaccacctggtccataggccttcaggtgaccgtgcccttcatgtttgcaggcctgggactgtcctgggccggcatgcttctggactatttccagcactggcctgtgtttgtggaggtgaaagaccttttgacattggtgccgcccctggtgggcctgaaggggaacctggagatgacactggcatccagactctccacagctgtaagtggacacctggacattcgaggcggccacaacgtgaggcaggccaacactggacaaattgatgacccccaggagcagcacagagtcatcagcagcaacctggccctcatccaggtgcaggccactgtcgtggggctcttggctgctgtggctgcgctgctgttgggcgtggtgtctcgagaggaagtggatgtcgccaaggtggagttgctgtgtgccagcagtgtcctcactgccttccttgcagcctttgccctgggggtgctgatggtctgtatagtgattggtgctcgaaagctcggggtcaacccagacaacattgccacgcccattgcagccagcctgggagacctcatcacactgtccattctggctttggttagcagcttcttctacagacacaaagatagtcggtatctgacgccgctggtctgcctcagctttgcggctctgaccccagtgtgggtcctcattgccaagcagagcccacccatcgtg

SEQ ID NO: 184251 - DNA, 530 bp, Homo sapiens
  Payload ID: 16287
  Gene Symbol: SLC41A3
  Gene Name: solute carrier family 41, member 3
  ENST ID: ENST00000514891
  CDS Start-End: 75-530
accgggatttgggggactcggtgggggaaaggcgcgcgggagatgagggctgccaggcgcccagctgtgcccagatggatgggacagagacccggcagcggaggctggacagctgtggcaagccaggggagctggggcttcctcaccccctcagcacaggaggactccctgtagcctcagaagatggagctctcagggcccctgagagccaaagcgtgacccccaagccactggagactgagcctagcagggagaccacctggtccataggccttcaggtgaccgtgcccttcatgtttgcaggcctgggactgtcctgggccggcatgcttctggactatttccagcactggcctgtgtttgtggaggtgaaagaccttttgacattggtgccgcccctggtgggcctgaaggggaacctggagatgacactggcatccagactctccacagctgccaacactggacaaattgatgacccccaggagcagcacagagtcatcagcagcaacctggccctcatccaggtg

SEQ ID NO: 184252 - DNA, 580 bp, Homo sapiens
  Payload ID: 16287
  Gene Symbol: SLC41A3
  Gene Name: solute carrier family 41, member 3
  ENST ID: ENST00000510651
  CDS Start-End: 59-580
tctttcccgccgccgcctgggaggggacccgggctgccaggcgcccagctgtgcccagatggatgggacagagacccggcagcggaggctggacagctgtggcaagccaggggagctggggcttcctcaccccctcagcacaggaggactccctgtagcctcagaagatggagctctcagggcccctgagagccaaagcgtgacccccaagccactggagactgagcctagcagggagaccacctggtccataggccttcaggtgaccgtgcccttcatgtttgcaggcctgggactgtcctgggccggcatgcttctggactatttccagcactggcctgtgtttgtggaggtgaaagaccttttgacattggtgccgcccctggtgggcctgaaggggaacctggagatgacactggcatccagactctccacagctgtaagtggacacctggacattcgaggcggccacaacgtgaggcaggtgcaggccactgtcgtggggctcttggctgctgtggctgcgctgctgttgggcgtggtgtctcgagaggaagtggatgtcgccaaggtggagttg

SEQ ID NO: 184253 - DNA, 569 bp, Homo sapiens
  Payload ID: 16287
  Gene Symbol: SLC41A3
  Gene Name: solute carrier family 41, member 3
  ENST ID: ENST00000509064
  CDS Start-End: 155-569
aaacagagcttggttttagccagggcgcccactgcagtcacgctggagacctctggtgcagatgggcgagactggacccagctttccagctttcttcccctttccataattctcctgaaagtgtaagggctgccaggcgcccagctgtgcccagatggatgggacagagacccggcagcggaggctggacagctgtggcaagccaggggagctggggcttcctcaccccctcagcacaggaggactccctgtagcctcagaagatggagctctcagggcccctgagagccaaagcgtgacccccaagccactggagactgagcctagcagggagaccacctggtccataggccttcaggtgaccgtgcccttcatgtttgcaggcctgggactgtcctgggccggcatgcttctggactatttccagcactggcctgtgtttgtggaggtgaaagaccttttgacattggtgccgcccctggtgggcctgaaggggaacctggagatgacactggcatccagactctccacagctgccaacactggacaaattgatgacccccaggagc

SEQ ID NO: 184254 - DNA, 692 bp, Homo sapiens
  Payload ID: 16287
  Gene Symbol: SLC41A3
  Gene Name: solute carrier family 41, member 3
  ENST ID: ENST00000507008
  CDS Start-End: 212-409
agacacaaacagagcttggttttagccagggcgcccactgcagtcacgctggagacctctggtgcagatgggcgagactggacccagctttccagctttcttcccctttccataattctcctgaaagtgtaagcactggcctgtgtttgtggaggtgaaagaccttttgacattggtgccgcccctggtgggcctgaaggggaacctggagatgacactggcatccagactctccacagctgccaacactggacaaattgatgacccccaggagcagcacagagtcatcagcagcaacctggccctcatccaggtgcaggccactgtcgtggggctcttggctgctgtggctgcgctgctgttgggcgtggtgtctcgagaggaagtggatgtcgccaaggggtgctgatggtctgtatagtgattggtgctcgaaagctcggggtcaacccagacaacattgccacgcccattgcagccagcctgggagacctcatcacactgtccattctggctttggttagcagcttcttctacagacacaaagatagtcggtatctgacgccgctggtctgcctcagctttgcggctctgaccccagtgtgggtcctcattgccaagcagagcccacccatcgtgaagatcctgaagtttggctggttcccaatcatcctggccatggtcatcagcag

SEQ ID NO: 184255 - DNA, 923 bp, Homo sapiens
  Payload ID: 16287
  Gene Symbol: SLC41A3
  Gene Name: solute carrier family 41, member 3
  ENST ID: ENST00000513723
  CDS Start-End: 59-923
tctttcccgccgccgcctgggaggggacccgggctgccaggcgcccagctgtgcccagatggatgggacagagacccggcagcggaggctggacagctgtggcaagccaggggagctggggcttcctcaccccctcagcacaggaggactccctgtagcctcagaagatggagctctcagggcccctgagagccaaagcgtgacccccaagccactggagactgagcctagcagggagaccacctggtccataggccttcaggtgaccgtgcccttcatgtttgcaggcctgggactgtcctgggccggcatgcttctggactatttccagggcaagaagctgcgaggcttcagctgtgagcttacccggtccccacatggggtcttgcctgaatctttcttcaccatcatgtgccaggtcgtggtgcccattctgctgtccggcttgtgcatgatgacagccggcctggtgatgaacaccattcaacactggcctgtgtttgtggaggtgaaagaccttttgacattggtgccgcccctggtgggcctgaaggggaacctggagatgacactggcatccagactctccacagctgccaacactggacaaattgatgacccccaggagcagcacagagtcatcagcagcaacctggccctcatccaggtgcaggccactgtcgtggggctcttggctgctgtggctgcgctgctgttgggcgtggtgtctcgagaggaagtggatgtcgccaaggtggagttgctgtgtgccagcagtgtcctcactgccttccttgcagcctttgccctgggggtgctgatggtctgtatagtgattggtgctcgaaagctcggggtcaacccagacaacattgccacgcccattgcagccagcctgggagacctcatcacactgtccattc

SEQ ID NO: 184256 - DNA, 541 bp, Homo sapiens
  Payload ID: 16287
  Gene Symbol: SLC41A3
  Gene Name: solute carrier family 41, member 3
  ENST ID: ENST00000505996
  CDS Start-End: 60-338
ctctttcccgccgccgcctgggaggggacccgggctgccaggcgcccagctgtgcccagatggatgggacagagacccggcagcggaggctggacagctgtggcaagccaggggagctggggcttcctcaccccctcagcacaggaggactccctgtagcctcagaagatggagctctcagggcccctgagagccaaagcgtgacccccaagccactggagactgagcctagcagggagaccacctggtccataggccttcaggtgaccgtgcccttcatgtttgcaggcctgggactgtcctgggccggcatgcttctggactatttccagttctagaggctggaagtccaagatcaaggtgttggcagcattggtttctcctgtggcctctccttggcttgcagacggctgccttttctccgtgtcttcagcactggcctgtgtttgtggaggtgaaagaccttttgacattggtgccgcccctggtgggcctgaaggggaacctggagatgacactggcatccagactctccacagct

SEQ ID NO: 184257 - DNA, 1480 bp, Homo sapiens
  Payload ID: 16287
  Gene Symbol: SLC41A3
  Gene Name: solute carrier family 41, member 3
  Uniprot ID: Q96GZ6
  ENST ID: ENST00000508835
  CDS Start-End: 208-1320
acaaacagagcttggttttagccagggcgcccactgcagtcacgctggagacctctggtgcagatgggcgagactggacccagctttccagctttcttcccctttccataattctcctgaaagtgtaagcactggcctgtgtttgtggaggtgaaagaccttttgacattggtgccgcccctggtgggcctgaaggggaacctggagatgacactggcatccagactctccacagctgccaacactggacaaattgatgacccccaggagcagcacagagtcatcagcagcaacctggccctcatccaggtgcaggccactgtcgtggggctcttggctgctgtggctgcgctgctgttgggcgtggtgtctcgagaggaagtggatgtcgccaaggtggagttgctgtgtgccagcagtgtcctcactgccttccttgcagcctttgccctgggggtgctgatggtctgtatagtgattggtgctcgaaagctcggggtcaacccagacaacattgccacgcccattgcagccagcctgggagacctcatcacactgtccattctggctttggttagcagcttcttctacagacacaaagatagtcggtatctgacgccgctggtctgcctcagctttgcggctctgaccccagtgtgggtcctcattgccaagcagagcccacccatcgtgaagatcctgaagtttggctggttcccaatcatcctggccatggtcatcagcagtttcggaggactcatcttgagcaaaaccgtttctaaacagcagtacaaaggcatggcgatatttacccccgtcatatgtggtgttggtggcaatctggtggccattcagaccagccgaatctcaacctacctgcacatgtggagtgcacctggcgtcctgcccctccagatgaagaaattctggcccaacccgtgttctactttctgcacgtcagaaatcaattccatgtcagctcgagtcctgctcttgctggtggtcccaggccatctgattttcttctacatcatctacctggtggagggtcagtcagtcataaacagccagacctttgtggtgctctacctgctggcaggcctgatccaggtgacaatcctgctgtacctcgcagaagtgatggttcggctgacttggcaccaggccctggatcctgacaaccactgcatcccctaccttacagggctgggggacctgctcggtactggcctcctggcactctgctttttcactgactggctactgaagagcaaggcagagctgggtggcatctcagaactggcatctggacctccctaactgggccccgctggtcccatttgctcattagaatttcctctcacatcagtgggatacagaattcagtttctcccttgccaggtccttgggatggttgacccctgcctctgcagtagccttttgtgagtctgctaaggtagctctcacacacctcggctct

SEQ ID NO: 184258 - DNA, 1606 bp, Homo sapiens
  Payload ID: 16287
  Gene Symbol: SLC41A3
  Gene Name: solute carrier family 41, member 3
  Uniprot ID: Q96GZ6
  ENST ID: ENST00000612940
  CDS Start-End: 43-1545
ctgggaggggacccgggctgccaggcgcccagctgtgcccagatggatgggacagagacccggcagcggaggctggacagctgtggcaagccaggggagctggggcttcctcaccccctcagcacaggaggactccctgtagcctcagaagatggagctctcagggcccctgagagccaaagcgtgacccccaagccactggagactgagcctagcagggagaccacctggtccataggccttcaggtgaccgtgcccttcatgtttgcaggcctgggactgtcctgggccggcatgcttctggactatttccagcactggcctgtgtttgtggaggtgaaagaccttttgacattggtgccgcccctggtgggcctgaaggggaacctggagatgacactggcatccagactctccacagctgccaacactggacaaattgatgacccccaggagcagcacagagtcatcagcagcaacctggccctcatccaggtgcaggccactgtcgtggggctcttggctgctgtggctgcgctgctgttgggcgtggtgtctcgagaggaagtggatgtcgccaaggtggagttgctgtgtgccagcagtgtcctcactgccttccttgcagcctttgccctgggggtgctgatggtctgtatagtgattggtgctcgaaagctcggggtcaacccagacaacattgccacgcccattgcagccagcctgggagacctcatcacactgtccattctggctttggttagcagcttcttctacagacacaaagatagtcggtatctgacgccgctggtctgcctcagctttgcggctctgaccccagtgtgggtcctcattgccaagcagagcccacccatcgtgaagatcctgaagtttggctggttcccaatcatcctggccatggtcatcagcagtttcggaggactcatcttgagcaaaaccgtttctaaacagcagtacaaaggcatggcgatatttacccccgtcatatgtggtgttggtggcaatctggtggccattcagaccagccgaatctcaacctacctgcacatgtggagtgcacctggcgtcctgcccctccagatgaagaaattctggcccaacccgtgttctactttctgcacgtcagaaatcaattccatgtcagctcgagtcctgctcttgctggtggtcccaggccatctgattttcttctacatcatctacctggtggagggtcagtcagtcataaacagccagacctttgtggtgctctacctgctggcaggcctgatccaggtgacaatcctgctgtacctcgcagaagtgatggttcggctgacttggcaccaggccctggatcctgacaaccactgcatcccctaccttacagggctgggggacctgctcggttcaagctccgtgggccacactgctgctgtgccaagaaggtgtacagcctccccaggatggggcctcatacaacccttcatctgcactcaacatttaatcgtgtccttgctgtctttttattttcctttttgttagcaaaaacctctatttagatttcaataatcagagaagtgtaaaataaaacagattatattgt

SEQ ID NO: 184259 - DNA, 2598 bp, Homo sapiens
  Payload ID: 16288
  Gene Symbol: SLC43A1
  Gene Name: solute carrier family 43 (amino acid system L transporter), member 1
  Uniprot ID: O75387
  ENST ID: ENST00000278426
  CDS Start-End: 357-2036
gaggggaaaagaagggagcccccgcccccacctcggggcgcagctccggacgcgtgtaaatacaactatcaactccgcagatccacttcatccaagcccagcttcgcagacctctggcgcccggcgggttcccagttcccccgcttcttccgaggagacagcggaggcgaggccaccgggctgtcaggctgaagctccgtggccgccgggtcctgcacgcagagaagaccccagcgccggcgcggctcagggctgggcccacgggactccggacgcgccgcgaaagcgttgcgctcccggaggcgtccgcagctgctggctgctcatttgccggtgaccggaggctcggggccagcatggcccccacgctgcaacaggcgtaccggaggcgctggtggatggcctgcacggctgtgctggagaacctcttcttctctgctgtactcctgggctggggctccctgttgatcattctgaagaacgagggcttctattccagcacgtgcccagctgagagcagcaccaacaccacccaggatgagcagcgcaggtggccaggctgtgaccagcaggacgagatgctcaacctgggcttcaccattggttccttcgtgctcagcgccaccaccctgccactggggatcctcatggaccgctttggcccccgacccgtgcggctggttggcagtgcctgcttcactgcgtcctgcaccctcatggccctggcctcccgggacgtggaagctctgtctccgttgatattcctggcgctgtccctgaatggctttggtggcatctgcctaacgttcacttcactcacgctgcccaacatgtttgggaacctgcgctccacgttaatggccctcatgattggctcttacgcctcttctgccattacgttcccaggaatcaagctgatctacgatgccggtgtggccttcgtggtcatcatgttcacctggtctggcctggcctgccttatctttctgaactgcaccctcaactggcccatcgaagcctttcctgcccctgaggaagtcaattacacgaagaagatcaagctgagtgggctggccctggaccacaaggtgacaggtgacctcttctacacccatgtgaccaccatgggccagaggctcagccagaaggcccccagcctggaggacggttcggatgccttcatgtcaccccaggatgttcggggcacctcagaaaaccttcctgagaggtctgtccccttacgcaagagcctctgctcccccactttcctgtggagcctcctcaccatgggcatgacccagctgcggatcatcttctacatggctgctgtgaacaagatgctggagtaccttgtgactggtggccaggagcatgagacaaatgaacagcaacaaaaggtggcagagacagttgggttctactcctccgtcttcggggccatgcagctgttgtgccttctcacctgccccctcattggctacatcatggactggcggatcaaggactgcgtggacgccccaactcagggcactgtcctcggagatgccagggacggggttgctaccaaatccatcagaccacgctactgcaagatccaaaagctcaccaatgccatcagtgccttcaccctgaccaacctgctgcttgtgggttttggcatcacctgtctcatcaacaacttacacctccagtttgtgacctttgtcctgcacaccattgttcgaggtttcttccactcagcctgtgggagtctctatgctgcagtgttcccatccaaccactttgggacgctgacaggcctgcagtccctcatcagtgctgtgttcgccttgcttcagcagccacttttcatggcgatggtgggacccctgaaaggagagcccttctgggtgaatctgggcctcctgctattctcactcctgggattcctgttgccttcctacctcttctattaccgtgcccggctccagcaggagtacgccgccaatgggatgggcccactgaaggtgcttagcggctctgaggtgaccgcatagacttctcagaccaagggacctggatgacaggcaatcaaggcctgagcaaccaaaaggagtgccccatatggcttttctacctgtaacatgcacatagagccatggccgtagatttataaataccaagagaagttctatttttgtaaagactgcaaaaaggaggaaaaaaaaccttcaaaaacgccccctaagtcaacgctccattgactgaagacagtccctatcctagaggggttgagccttcttcctccttgggttggaggagaccagggtgcctcttatctccttctagcggtctgcctcctggtacctcttggggggatcggcaaacaggctacccctgaggtcccatgtgccatgagtgtgcacacatgcatgtgtctgtgtatgtgtgaatgtgagagagacacagccctcctttcagaaggaaaggggcctgaggtgccagctgtgtcctgggttaggggttgggggtcggccccttccagggccaggagggcaggttccctctctggtgctgctgcttgcaagtcttagaggaaataaaaagggaagtgagaga

SEQ ID NO: 184260 - DNA, 580 bp, Homo sapiens
  Payload ID: 16288
  Gene Symbol: SLC43A1
  Gene Name: solute carrier family 43 (amino acid system L transporter), member 1
  ENST ID: ENST00000534105
  CDS Start-End: 67-243
aggggggcaagcgggttccgaggtgcaaagcctggtgccccgagccctgcggagctcggggccagcatggcccccacgctgcaacaggcgtaccggaggcgctggtggatggcctgcacggctgtgctggagaacctcttcttctctgctgtactcctgggctggggctccctgttgatcattctgaagaacgagggcttctattccagcacgtgcccagctgttcctggtgtcatgtgctgagccctcccttccccctcctcagctgagagcagcaccaacaccacccaggatgagcagcgcaggtggccaggctgtgaccagcaggacgagatgctcaacctgggcttcaccattggttccttcgtgctcagcgccaccaccctgccactggggatcctcatggaccgctttggcccccgacccgtgcggctggttggcagtgcctgcttcactgcgtcctgcaccctcatggccctggcctcccgggacgtggaagctctgtctccgttgatattcctggcgctgtccctgaatggctttggtggcatctgcctaacgttcacttcactcacgctgc

SEQ ID NO: 184261 - DNA, 953 bp, Homo sapiens
  Payload ID: 16288
  Gene Symbol: SLC43A1
  Gene Name: solute carrier family 43 (amino acid system L transporter), member 1
  ENST ID: ENST00000524995
  CDS Start-End: 351-527
aaaagaagggagcccccgcccccacctcggggcgcagctccggacgcgtgtaaatacaactatcaactccgcagatccacttcatccaagcccagcttcgcagacctctggcgcccggcgggttcccagttcccccgcttcttccgaggagacagcggaggcgaggccaccgggctgtcaggctgaagctccgtggccgccgggtcctgcacgcagagaagaccccagcgccggcgcggctcagggctgggcccacgggactccggacgcgccgcgaaagcgttgcgctcccggaggcgtccgcagctgctggctgctcatttgccggtgaccggaggctcggggccagcatggcccccacgctgcaacaggcgtaccggaggcgctggtggatggcctgcacggctgtgctggagaacctcttcttctctgctgtactcctgggctggggctccctgttgatcattctgaagaacgagggcttctattccagcacgtgcccagctgttcctggtgtcatgtgctgagccctcccttccccctcctcagctgagagcagcaccaacaccacccaggatgagcagcgcaggtggccaggctgtgaccagcaggacgagatgctcaacctgggcttcaccattggttccttcgtgctcagcgccaccaccctgccactggggatcctcatggaccgctttggcccccgacccgtgcggctggttggcagtgcctgcttcactgcgtcctgcaccctcatggccctggcctcccgggacgtggaagctctgtctccgttgatattcctggcgctgtccctgaatggctttggtggcatctgcctaacgttcacttcactcacgctgcccaacatgtttgggaacctgcgctccacgttaatggccctcatgattggctcttacgcctcttctgccattacgttcccaggaatcaag

SEQ ID NO: 184262 - DNA, 788 bp, Homo sapiens
  Payload ID: 16288
  Gene Symbol: SLC43A1
  Gene Name: solute carrier family 43 (amino acid system L transporter), member 1
  ENST ID: ENST00000530159
  CDS Start-End: 85-600
gccccctcccggggctggaggggggcaagcgggttccgaggtgcaaagcctggtgccccgagccctgcggagctcggggccagcatggcccccacgctgcaacaggcgtaccggaggcgctggtggatggcctgcacggctgtgctggagaacctcttcttctctgctgtactcctgggctggggctccctgttgatcattctgaagaacgagggcttctattccagcacgtgcccagctgagagcagcaccaacaccacccaggatgagcagcgcaggtggccaggctgtgaccagcaggacgagatgctcaacctgggcttcaccattggttccttcgtgctcagcgccaccaccctgccactggggatcctcatggaccgctttggcccccgacccgtgcggctggttggcagtgcctgcttcactgcgtcctgcaccctcatggccctggcctcccgggacgtggaagctctgtctccgttgatattcctggcgctgtccctgaatggctttggtggcatctgcctaacgttcacttcactcacggaagaagatcaagctgagtgggctggccctggaccacaaggtgacaggtgacctcttctacacccatgtgaccaccatgggccagaggctcagccagaaggcccccagcctggaggacggttcggatgccttcatgtcaccccaggatgttcggggcacctcagaaaaccttcctgagaggtctgtccccttacgcaagagcctctgctcccccactttcctgtggagcctcctcacca

SEQ ID NO: 184263 - DNA, 690 bp, Homo sapiens
  Payload ID: 16288
  Gene Symbol: SLC43A1
  Gene Name: solute carrier family 43 (amino acid system L transporter), member 1
  ENST ID: ENST00000533263
  CDS Start-End: 359-690
gcttcgcagacctctggcgcccggcgggttcccagttcccccgcttcttccgaggagacagcggaggcgaggccaccgggctgtcaggctgaagctccgtggccgccgggtcctgcacgcagagaagaccccagcgccggcgcggctcagggctgggcccacgggactccggacgcgccgcgaaagcgttgcgctcccggaggcgtccgcagctgctggctgctcatttgccggtgaccggagagctgcgcgtttgccagagttccagcggacctcctggagcgcttgaacccaaagccccgtttcacagatgagaataccgagtccccctggaagaagtgactggctcggggccagcatggcccccacgctgcaacaggcgtaccggaggcgctggtggatggcctgcacggctgtgctggagaacctcttcttctctgctgtactcctgggctggggctccctgttgatcattctgaagaacgagggcttctattccagcacgtgcccagctgagagcagcaccaacaccacccaggatgagcagcgcaggtggccaggctgtgaccagcaggacgagatgctcaacctgggcttcaccattggttccttcgtgctcagcgccaccaccctgccactggggatcctcatggaccgctttggcccccgacccgtgcggctggttggcag

SEQ ID NO: 184264 - DNA, 999 bp, Homo sapiens
  Payload ID: 16288
  Gene Symbol: SLC43A1
  Gene Name: solute carrier family 43 (amino acid system L transporter), member 1
  ENST ID: ENST00000533066
  CDS Start-End: 222-999
tcttggaggggcaactggaagatggggtcgtagggtagccttgaacttgcccttcttcctgccagcttctaggggtctttcctggcgcgagagtccggacatgggcccgcggtgcttcagagcgcgctctgccccttgctgtcctctggggacctgggcagatgcggactttctccccagcagcccggccctgagcgccctggcctgggctcggggccagcatggcccccacgctgcaacaggcgtaccggaggcgctggtggatggcctgcacggctgtgctggagaacctcttcttctctgctgtactcctgggctggggctccctgttgatcattctgaagaacgagggcttctattccagcacgtgcccagctgagagcagcaccaacaccacccaggatgagcagcgcaggtggccaggctgtgaccagcaggacgagatgctcaacctgggcttcaccattggttccttcgtgctcagcgccaccaccctgccactggggatcctcatggaccgctttggcccccgacccgtgcggctggttggcagtgcctgcttcactgcgtcctgcaccctcatggccctggcctcccgggacgtggaagctctgtctccgttgatattcctggcgctgtccctgaatggctttggtggcatctgcctaacgttcacttcactcacgctgatctacgatgccggtgtggccttcgtggtcatcatgttcacctggtctggcctggcctgccttatctttctgaactgcaccctcaactggcccatcgaagcctttcctgcccctgaggaagtcaattacacgaagaagatcaagctgagtgggctggccctggaccacaaggtgacaggtgacctcttctacacccatgtgaccaccatgggccagaggctcagccagaaggcccccagcctggaggacggttcggatgccttcatgtcaccccaggatgttcggggcacctcagaaaaccttcctgaga

SEQ ID NO: 184265 - DNA, 2358 bp, Homo sapiens
  Payload ID: 16288
  Gene Symbol: SLC43A1
  Gene Name: solute carrier family 43 (amino acid system L transporter), member 1
  Uniprot ID: O75387
  ENST ID: ENST00000528450
  CDS Start-End: 119-1798
gtcagcagccgccagacttcctgccgaagtccgagccccctcccggggctggaggggggcaagcgggttccgaggtgcaaagcctggtgccccgagccctgcggagctcggggccagcatggcccccacgctgcaacaggcgtaccggaggcgctggtggatggcctgcacggctgtgctggagaacctcttcttctctgctgtactcctgggctggggctccctgttgatcattctgaagaacgagggcttctattccagcacgtgcccagctgagagcagcaccaacaccacccaggatgagcagcgcaggtggccaggctgtgaccagcaggacgagatgctcaacctgggcttcaccattggttccttcgtgctcagcgccaccaccctgccactggggatcctcatggaccgctttggcccccgacccgtgcggctggttggcagtgcctgcttcactgcgtcctgcaccctcatggccctggcctcccgggacgtggaagctctgtctccgttgatattcctggcgctgtccctgaatggctttggtggcatctgcctaacgttcacttcactcacgctgcccaacatgtttgggaacctgcgctccacgttaatggccctcatgattggctcttacgcctcttctgccattacgttcccaggaatcaagctgatctacgatgccggtgtggccttcgtggtcatcatgttcacctggtctggcctggcctgccttatctttctgaactgcaccctcaactggcccatcgaagcctttcctgcccctgaggaagtcaattacacgaagaagatcaagctgagtgggctggccctggaccacaaggtgacaggtgacctcttctacacccatgtgaccaccatgggccagaggctcagccagaaggcccccagcctggaggacggttcggatgccttcatgtcaccccaggatgttcggggcacctcagaaaaccttcctgagaggtctgtccccttacgcaagagcctctgctcccccactttcctgtggagcctcctcaccatgggcatgacccagctgcggatcatcttctacatggctgctgtgaacaagatgctggagtaccttgtgactggtggccaggagcatgagacaaatgaacagcaacaaaaggtggcagagacagttgggttctactcctccgtcttcggggccatgcagctgttgtgccttctcacctgccccctcattggctacatcatggactggcggatcaaggactgcgtggacgccccaactcagggcactgtcctcggagatgccagggacggggttgctaccaaatccatcagaccacgctactgcaagatccaaaagctcaccaatgccatcagtgccttcaccctgaccaacctgctgcttgtgggttttggcatcacctgtctcatcaacaacttacacctccagtttgtgacctttgtcctgcacaccattgttcgaggtttcttccactcagcctgtgggagtctctatgctgcagtgttcccatccaaccactttgggacgctgacaggcctgcagtccctcatcagtgctgtgttcgccttgcttcagcagccacttttcatggcgatggtgggacccctgaaaggagagcccttctgggtgaatctgggcctcctgctattctcactcctgggattcctgttgccttcctacctcttctattaccgtgcccggctccagcaggagtacgccgccaatgggatgggcccactgaaggtgcttagcggctctgaggtgaccgcatagacttctcagaccaagggacctggatgacaggcaatcaaggcctgagcaaccaaaaggagtgccccatatggcttttctacctgtaacatgcacatagagccatggccgtagatttataaataccaagagaagttctatttttgtaaagactgcaaaaaggaggaaaaaaaaccttcaaaaacgccccctaagtcaacgctccattgactgaagacagtccctatcctagaggggttgagccttcttcctccttgggttggaggagaccagggtgcctcttatctccttctagcggtctgcctcctggtacctcttggggggatcggcaaacaggctacccctgaggtcccatgtgccatgagtgtgcacacatgcatgtgtctgtgtatgtgtgaatgtgagagagacacagccctcctttcagaaggaaaggggcctgaggtgccagctgtgtcctgggttaggggttgggggtcggccccttccagggccaggagggcaggttccctctctggtgctgctgcttgcaagtcttagaggaaataaaaagggaagtgaga

SEQ ID NO: 184266 - DNA, 556 bp, Homo sapiens
  Payload ID: 16288
  Gene Symbol: SLC43A1
  Gene Name: solute carrier family 43 (amino acid system L transporter), member 1
  ENST ID: ENST00000525764
  CDS Start-End: 1-556
caccaacaccacccaggatgagcagcgcaggtggccaggctgtgaccagcaggacgagatgctcaacctgggcttcaccattggttccttcgtgctcagcgccaccaccctgccactggggatcctcatggaccgctttggcccccgacccgtgcggctggttggcagtgcctgcttcactgcgtcctgcaccctcatggccctggcctcccgggacgtggaagctctgtctccgttgatattcctggcgctgtccctgaatggctttggtggcatctgcctaacgttcacttcactcacgggacggggttgctaccaaatccatcagaccacgctactgcaagatccaaaagctcaccaatgccatcagtgccttcaccctgaccaacctgctgcttgtgggttttggcatcacctgtctcatcaacaacttacacctccagtttgtgacctttgtcctgcacaccattgttcgaggtttcttccactcagcctgtgggagtctctatgctgcagtgttcccatccaaccactttgggacgctgacaggcctgca

SEQ ID NO: 184267 - DNA, 8136 bp, Homo sapiens
  Payload ID: 16289
  Gene Symbol: SLC43A2
  Gene Name: solute carrier family 43 (amino acid system L transporter), member 2
  Uniprot ID: Q8N370
  ENST ID: ENST00000301335
  CDS Start-End: 90-1799
agaaaaggcgccgggcgggcccgacacacgccggaggagccgggtggtgcagagccggagccggagccggagccgcgccgcgccgcaccatggcgcccaccctggccactgcccatcggcgccgctggtggatggcctgcacggccgtgctggagaacctcctcttctcggcagtcctcctgggctggggctcgctgctcatcatgctcaagtcagagggcttttactcctacctgtgtaccgagccagagaatgtcaccaatggcacagtgggcggcacagcagagccggggcacgaggaggtgagctggatgaacggctggctcagctgccaggcccaggacgagatgctaaatttggccttcactgtgggctcctttctgctcagtgccatcaccctgcccctgggtatcgtcatggacaagtatggcccgaggaagctcaggctgctgggcagcgcctgcttcgcggtttcctgcttgctgattgcgtacggagcaagtaaaccaaacgctctctccgtgctcatcttcatcgccctggctctgaatggctttggtgggatgtgtatgaccttcacctcattaacactgcccaacatgttcggcgaccttcggtccacgtttattgccttgatgattgggtcctacgcctcctcggcagtcacctttccaggaatcaagctcatctatgatgctggtgtctccttcatcgtcgtcctcgtggtctgggccggctgctccgggctggttttcctcaactgcttctttaactggccccttgagcccttcccggggccggaggacatggactactcggtgaagatcaagttcagctggctgggctttgaccacaagatcacagggaagcagttctacaagcaggtgaccacggtgggccggcgcctgagtgtgggcagctccatgaggagtgccaaggagcaggtggcgctgcaggagggccacaagctgtgcctgtccaccgtcgacctggaggtgaagtgccagccggatgccgcagtggccccctccttcatgcacagcgtgttcagccccatcctgctgctcagcctggtcaccatgtgcgtcacgcagctgcggctcatcttctacatgggggctatgaacaacatcctcaagttcctggtcagcggcgaccagaagacagttggcctctacacctccatcttcggcgtgctccagctgctgtgcctgctgacggcccccgtcattggctacatcatggactggaggctgaaggagtgtgaagacgcctccgaggagcccgaggagaaagacgccaaccaaggcgagaagaaaaagaagaagcgggaccggcagatccagaagatcactaatgccatgcgggccttcgccttcaccaacctgctgctcgtgggctttggggtgacctgcctcattcccaacctgcctctccagatcctctccttcatcctgcacacaatcgtgcgaggattcatccactccgctgtcgggggcctgtacgctgccgtgtacccctccacccagttcggcagcctcacgggactgcagtctctgatcagcgcgctcttcgcccttctgcagcagccgctgtttctggccatgatgggtcctctccagggagaccctctgtgggtgaacgtggggctgctccttctcagcctgctgggcttctgcctcccgctctacctgatctgctaccggcgccagctggagcggcagctgcagcagaggcaggaggatgacaaactcttcctcaaaatcaacggctcgtccaaccaggaggccttcgtgtagtggctgccgcctcggaactgcggtctcctgcctgtgcttcagtgactgacccctgtcctgcccctccagagtaccccacgcacccccaggaccttcgccgtctccgtgccagcgttcacgctccctcccggggccctgcctcggagctctgtggtggaaggacgggagagggccccggacacgcgcgttttctcctgccgaacgcaggggctgccctgactttgctctgccgccccccggggacccggggcctggggtctctgtggtgcctgcagcaggagccaggaacgcccggcaggcaggcgctctcccgccagtgtctggattctgcctcttgccaaagcagagggggctgccatcccctgcctgccacctgcccctcggctgcatgcccacagccgtacctgcctgaggacaaaggcttgcactgtctcgcccgcgcctggcccccaccccctccccggccagcctgaggctgcctgaggaaggaaggacccgcttcctgttgtcggtgctaattcctttgtaattccagccccctgtcgcctgtccagggcctgcccacccgttggaggccggtggagaagccccacctggcttatgccctggagagggtttagcgggctgggtggacccctcgcctcctccccgagggccaatgccgcggacacgttttcactgtcaccctcgttctgtctgccacctgaagggaatttgaggaccgccgccagggcaccccgtacatacacacagctgcttttgtggaggtggacgaaaggctgtggccggcagacgtggaggtccaggccggggtggggacgtgggtgggtccgaggtgtgtgtggggtcggggtgggctctaggagttagcccttatccccactgaccaggcgggagccgccaggcctgcagctgggccagtgcccaggagccatcctggcgtggggccaggagcttgtccaaggccacaggcccacagcaccccctgccggcgggctccgtggggccctggagctgatgacgggggaggcccgtccgcctggcccaccaacccgcccaccttgactgcccccagaagtgtgtcttgagacctcctgggcgtgcttagaggggtgagttgtgtttggatttttagttattttctcttcagttttattagacttcttttttataaagcaataaatccattttcctccgggtaagggatgccccttctggcatatcagttaatagctgcatgtgcctattttgagcttgagaagaaaaggcaggacaagattctctgccaccgaccagctccagccgtgcccagctgctcttcgtctctctgggggactgctgactcgggagggacagtgggccaggaaaagaccttcctccccaacccccaaacaaactgggcttgtgcagacatcttagaagtgtgagccaccctcctctaccgattttcccagccaaacaggcgaatcctggtccctttccatccctacacccttccacaaccctgaagattcccgctgggttcttctgcaggctcagagcagttcaggatgtgggcggcagggagggggatgaaaggagaagaggaaagggcaggtccaggccacattcaagctccacattaacagcttgggcgcctggaacacatatctcctaggctttatttcactcaaatatttaaaaaaagactgggcgtggtggctcacgcctataatcccagcactttgggaggccaaggcaggaggctcacctgaggtcaggagttcgagaccatcctgaccaacatggagaaaccccgtctgtactaaaaataaacattaatcgggcgtggtggcgtgcgcctgtaatcccaactactcgggagcctgaggcaggagaatcgcttgaaccggggagacggagattgccgtgagtcgagatcgcaccattgcactccagcctgggcaacagagcgaggctccgtctcaaaaagaaaaaaaaaaagagaacgagataaacatgcccactcctgagaacactcgttttgtgatgttagtggttattctgattttcaagaaagtattatagtcaagtttgggaaaggctgagttaaaagtcaagcctgtttccttacagccagcactgacagcactttgccaacgctcatgagctccgtggctcctcaggagcgggtgtgctgtgctgccgaggaacggctcgaaccatcagagccaccagcctccacgtgcggctccatgatcacccccagcagaggctcccgggtgctggttccaaatggagactccaggtcttgccgctgaccggtgactctgctgccagcatttgagacccgccatcacacaggagttgcagattcggagaaaccctaactagccagggtgctgccagctgggaaaaggccgcctttttttttttttttttttttttgagttggggtcttgctctgccatccaggctggagtgcagtggtgcaactgatagctcaccacggcctccaactcatgggctcaagggatcctcccacctcggcctcctaagtatctgggactataagtgtgtgccaccatgcctggctaattttttttttctttttcataaagatgaattcttgctattttgcccaggctggtctggaactcctgggctgaagcaattctcccacctcagcctcccaaagtgctgagattacaggcgtgagtcacaatgcctagccaaaaagccagtcttgagatggggaagacgtggcccgtgctgtccccagcagtgcccagtcccagccaaagtgggcagtgctgcctcactctcccacccaccctcagggtgtggcacttactgggaagaagcaggcattgagaaacagaattgagggggggaaacagtccagggccaacagtgcttggggattgaggcctgaaaatgcgagcagggtacagaggctgtggctggccagatgggtcgggtgccccctgcactcccaccccctagtcaggggtcacccatcctactttgccttgtgtggagctgacaggtgacatgttttcctattgttgtccttgacttgataacaatctgggagttaaacacatatgatcatccctgctttacaactgaaaaacgaggcctagagatactatcatcatatacacctgaaaaacgaggcctggagcgatggaggagcttgttcaaggtcagagccagcactcatatatgggtcttaagacactggagcagccaagggcctctagaccaggacattccactcggagcagcagctcaggggccaccaggcctctgtggcagggggacctctgtggcaggggggacctctgtggcggggggggggcctctgtggcaggggggtcacagcccaaggaaggggagcaggcccaggcatggtttccgtttctgggagccaagagccttctcagaagagggggagagagctactgcatggaatcatttgggccctggaggctgatgggtacttgggggagcaatccctggtgaccccaaccagcaagacaagtgccctgtgaaggggaagggactacagctgatcaaaggagcaggcaccagtggccgggcctcccgtctgcccctcatcctccaggctctggcgggaaggagcaggaagggctccctgcccttggggttttgatcagtgaggaggggggcttgggtctgagtctgggtctgggtctgctgccgaaacactgcccccagtccctctcctcactagactctggggtctaggcgtgtctttgtggtcggccttctccaaaccctctaggcctctgtctgcagctgctgctgcctggacctatacacaaggtcccacccctcaccggggccaaagacgtggttgcaggccctggtggatcctttctgttttgctccatccccgtcccctcttgcacccagcatcgtcctggtcagaacttccgtttaaaccttccttgcctgccgtgcactccgaggggggcgtcactttgccataggccccagggctgaaaatggcgggacatccagtattgggctcacgtgcataagactgtcccagacagcagcacaatcacgttcagccaagtggagtttccgacgcacttgtgtggcagccgcgtgaatgtgagccgatatgcagctgggaggggttgtgggcctcctgcggtgaggggctcctgccaggagctctgagaagcctccacagaatcagccgtcgggctccttcagcagcagctccccttatctgtgccaacgactgggggcctaactcaagggtgccagcccgtcttccgccaatacagactgtgggattctgagagttaggagcctggggtcccctggggtggggtggtcagggtgagcaggtgggctctgtgagcctgtttccccatgccctgactcaccccaatccctgggtgaggacagagctcctgaaggccactgaaggaggtgcagcacactccacctgggtggccttccgcagctcagccctcttcctgccagcaggaagcctctgcctgtgctccttaagttagccatcctcaccccctccgggcagctctgagactgagccagggccactagcagcacccagacctcgacccttctcagaccgaggcgccaccaccccaggccgaggaggcaaggagggaagaccaaagtctagaggactgtcttggtggccctgggcgagtcttgaactttggtgccatcatctgcaaaagggaggaaagaatgcctgcgtggtgcagctacgtggatacgcagtgaagacccgcatggtgggacgcctggcacttaacaatggtagcatttggccgggcgcggtggctcacgcctgtaatcccagcactttgggaggccgaggcgggcggatcacgaggtcaggagatcaagaccatcccggctaaaacggtgaaaccccgtctctactaaaaatacaaaaaattagccgggcgtagtggcgggcgcctgtagtcccagctacttgggaggctgaggcaggagaatggtgtgaacccgggaggcggagcttgcagtgagccgagatcccgccactgcactccagcctgggcgacagagcgagactccgtctcaaaaaaaaaaaaaaaaacaatggtagcatcgttttcagtgcccaggaagaaggcagctgggacagggaaagggccaccacaccacacccaagcccatacaacaggagagccactttcagcagctctgagcaggacagacttgtggccaagtcaagaaagtaaggtctggtcccagcgaggtggctcatccctgtaatcccagtgctttgggaggccgaagcgggggcggggtggatcacttgaggtcaggggtttgagaccagcctgaccaacatggtgaaacctcaactctactaaaaatacaaaaattagggccgggcgcagtggctcacgcctgtaatcccagcactttgggaggctgaggcgggcggatcacaaggtcaggagatcgagaccaacgtggctaacacagtgaaaccccatctctactaaaaatacgaaaaaaaaaaattagctgggcgtggtggtgggtacctgtagtcccagctacttgggaggctgaggcaggagaatggcatgaacccgggaggtgaagcttgcagtgagccgagattgtgccactgcactccagcctgggcgacagagcaagactccgtctcaaaaaaaaaaaaaaaaaaaaaaaaagtaaggtctgtatctgctgaccccacccttctccgaagccctctccgagcaaagccttaagaaactcttctctcgttcacttttcttttgtggctttcacgttttggtaagacttggccaaatagctgctcgagataatcaatcactggtggacaagtttctgctgagtgaggtttctgctgagtggggcgactcaaggcacggtcacgtaggcagcacctgtacaccgcatcctcatacagctgcgggaccgtgcctctgactgtgtgcgtgtgtgtttatctaagtgtgagatgcatccgggcatgtcagggtgtgtacatgttgggaagactgtgtagatttcttgtgtgccgctctctgaatggaggagaggggaagcgtcttacctcgctgaatccctttccattgctggaaagaacacctgggcaggagcggccccaagaccccgcccaggccctcggaagggagcctgaagggttaatccgtaccctgtattaaccagggtcaacccagcggctgacccgcctcttccctgctcctttgccgtttctagcacctggcttacttcctggcacacagtgagcactcaataaatgtatgctgagaatgac

SEQ ID NO: 184268 - DNA, 1658 bp, Homo sapiens
  Payload ID: 16289
  Gene Symbol: SLC43A2
  Gene Name: solute carrier family 43 (amino acid system L transporter), member 2
  Uniprot ID: Q8N370
  ENST ID: ENST00000382147
  CDS Start-End: 257-1555
acctgtgagtgtggtggtgagtcaggaaacagctccggcttcctgcttggcagcaaagctggtccttcccctcctggggtccttcccctccgccagccctcgaggcccgcgctagggcgctctgctcagcgctcagccctcactccggcaccgcggcttcgaacagccattatgcgcagctgagaccggtggaggcagggaagctggggacggagtgagcgagagggggaatgtggggagtgacccagatgtcaggatgacctacgggagtccacaggcaaatgcaagcccatccgatgctgtggcgctggaccatggggaggtcagccgaaggcaacagcaggagctgcccaacatgttcggcgaccttcggtccacgtttattgccttgatgattgggtcctacgcctcctcggcagtcacctttccaggaatcaagctcatctatgatgctggtgtctccttcatcgtcgtcctcgtggtctgggccggctgctccgggctggttttcctcaactgcttctttaactggccccttgagcccttcccggggccggaggacatggactactcggtgaagatcaagttcagctggctgggctttgaccacaagatcacagggaagcagttctacaagcaggtgaccacggtgggccggcgcctgagtgtgggcagctccatgaggagtgccaaggagcaggtggcgctgcaggagggccacaagctgtgcctgtccaccgtcgacctggaggtgaagtgccagccggatgccgcagtggccccctccttcatgcacagcgtgttcagccccatcctgctgctcagcctggtcaccatgtgcgtcacgcagctgcggctcatcttctacatgggggctatgaacaacatcctcaagttcctggtcagcggcgaccagaagacagttggcctctacacctccatcttcggcgtgctccagctgctgtgcctgctgacggcccccgtcattggctacatcatggactggaggctgaaggagtgtgaagacgcctccgaggagcccgaggagaaagacgccaaccaaggcgagaagaaaaagaagaagcgggaccggcagatccagaagatcactaatgccatgcgggccttcgccttcaccaacctgctgctcgtgggctttggggtgacctgcctcattcccaacctgcctctccagatcctctccttcatcctgcacacaatcgtgcgaggattcatccactccgctgtcgggggcctgtacgctgccgtgtacccctccacccagttcggcagcctcacgggactgcagtctctgatcagcgcgctcttcgcccttctgcagcagccgctgtttctggccatgatgggtcctctccagggagaccctctgtgggtgaacgtggggctgctccttctcagcctgctgggcttctgcctcccgctctacctgatctgctaccggcgccagctggagcggcagctgcagcagaggcaggaggatgacaaactcttcctcaaaatcaacggctcgtccaaccaggaggccttcgtgtagtggctgccgcctcggaactgcggtctcctgcctgtgcttcagtgactgacccctgtcctgcccctccagagtaccccacgcacccccaggaccttcgccgtct

SEQ ID NO: 184269 - DNA, 1658 bp, Homo sapiens; identical to SEQ ID NO: 184268
  Payload ID: 16289
  Gene Symbol: SLC43A2
  Gene Name: solute carrier family 43 (amino acid system L transporter), member 2
  Uniprot ID: Q8N370
  ENST ID: ENST00000412517
  CDS Start-End: 257-1555

SEQ ID NO: 184270 - DNA, 567 bp, Homo sapiens
  Payload ID: 16289
  Gene Symbol: SLC43A2
  Gene Name: solute carrier family 43 (amino acid system L transporter), member 2
  ENST ID: ENST00000576721
  CDS Start-End: 116-286
actccggcaccgcggcttcgaacagccattatgcgcagctgagaccggtggaggcagggaagctggggacggagtgagcgagagggggaatgtggggagtgacccagatgtcaggatgacctacgggagtccacaggcaaatgcaagcccatccgatgctgtggcgctggaccatggggaggtcagccgaaggcaacagcaggagagctgtggttcctgccagaggacacttccctcgttggctatgcccaggagcagcttgaccagaagattttccctgttatgaagtcataacacatatcataatactgcccaacatgttcggcgaccttcggtccacgtttattgccttgatgattgggtcctacgcctcctcggcagtcacctttccaggaatcaagctcatctatgatgctggtgtctccttcatcgtcgtcctcgtggtctgggccggctgctccgggctggttttcctcaactgcttctttaactggccccttgagcccttcccggggccggaggacatggactactcggtgaagatcaagttcagctggctgggctttg

SEQ ID NO: 184271 - DNA, 915 bp, Homo sapiens
  Payload ID: 16289
  Gene Symbol: SLC43A2
  Gene Name: solute carrier family 43 (amino acid system L transporter), member 2
  ENST ID: ENST00000572801
  CDS Start-End: 94-282
gggcagaaaaggcgccgggcgggcccgacacacgccggaggagccgggtggtgcagagccggagccggagccggagccgcgccgcgccgcaccatggcgcccaccctggccactgcccatcggcgccgctggtggatggcctgcacggccgtgctggagaacctcctcttctcggcagtcctcctgggctggggctcgctgctcatcatgctcaagtcagagggcttttactcctacctgtgtaccgagccagcgcctgcttcgcggtttcctgcttgctgattgcgtacggagcaagtaaaccaaacgctctctccgtgctcatcttcatcgccctggctctgaatggctttggtgggatgtgtatgaccttcacctcattaacactgcccaacatgttcggcgaccttcggtccacgtttattgccttgatgattgggtcctacgcctcctcggcagtcacctttccaggaatcaagctcatctatgatgctggtgtctccttcatcgtcgtcctcgtggtctgggccggctgctccgggctggttttcctcaactgcttctttaactggccccttgagcccttcccggggccggaggacatggactactcggtgaagatcaagttcagctggctgggctttgaccacaagatcacagggaagcagttctacaagcaggtgaccacggtgggccggcgcctgagtgtgggcagctccatgaggagtgccaaggagcaggtggcgctgcaggagggccacaagctgtgcctgtccaccgtcgacctggaggtgaagtgccagccggatgccgcagtggccccctccttcatgcacagcgtgttcagccccatcctgctgctcagcctggtcaccatgtgcgtcacgcagctgcggctcatcttctacatggggg

SEQ ID NO: 184272 - DNA, 3261 bp, Homo sapiens
  Payload ID: 16289
  Gene Symbol: SLC43A2
  Gene Name: solute carrier family 43 (amino acid system L transporter), member 2
  Uniprot ID: Q8N370
  ENST ID: ENST00000571650
  CDS Start-End: 308-2029
gtcagggtccctgggagaggcagccctcggatctgcccctgcccacctcacgctgcgttccatgctggccccaggcgatgtcagtcctgctgcaggccaggactagttccacggccctgagcatgcgttagccccttcttgcctccatgcctcagtttacctcggagtgagctgcgggagacgtctccctgcctggccggggcggctctgtcgtagcggagggcagcggtacgagccggccgcgggctcggggtgtcccaggtggtgcagagccggagccggagccggagccgcgccgcgccgcaccatggcgcccaccctggccactgcccatcggcgccgctggtggatggcctgcacggccgtgctggagaacctcctcttctcggcagtcctcctgggctggggctcgctgctcatcatgctcaagtcagagggcttttactcctacctgtgtaccgagccagagaatgtcaccaatggcacagtgggcggcacagcagagccggggcacgaggaggtgagctggatgaacggctggctcagctgccaggcccaggacgagatgctaaatttggccttcactgtgggctcctttctgctcagtgccatcaccctgcccctgggtatcgtcatggacaagtatggcccgaggaagctcaggctgctgggcagcgcctgcttcgcggtttcctgcttgctgattgcgtacggagcaagtaaaccaaacgctctctccgtgctcatcttcatcgccctggctctgaatggctttggtgggatgtgtatgaccttcacctcattaacactgcccaacatgttcggcgaccttcggtccacgtttattgccttgatgattgggtcctacgcctcctcggcagtcacctttccaggaatcaagctcatctatgatgctggtgtctccttcatcgtcgtcctcgtggtctgggccggctgctccgggctggttttcctcaactgcttctttaactggccccttgagcccttcccggggccggaggacatggactactcggtgaagatcaagttcagctggctgggctttgaccacaagatcacagggaagcagttctacaagcaggtgaccacggtgggccggcgcctgagtgtgggcagctccatgaggagtgccaaggagcaggtggcgctgcaggagggccacaagctgtgcctgtccaccgtcgacctggaggtgaagtgccagccggatgccgcagtggccccctccttcatgcacagcgtgttcagccccatcctgctgctcagcctggtcaccatgtgcgtcacgcagctgcggctcatcttctacatgggggctatgaacaacatcctcaagttcctggtcagcggcgaccagaagacagtgatggccacggttggcctctacacctccatcttcggcgtgctccagctgctgtgcctgctgacggcccccgtcattggctacatcatggactggaggctgaaggagtgtgaagacgcctccgaggagcccgaggagaaagacgccaaccaaggcgagaagaaaaagaagaagcgggaccggcagatccagaagatcactaatgccatgcgggccttcgccttcaccaacctgctgctcgtgggctttggggtgacctgcctcattcccaacctgcctctccagatcctctccttcatcctgcacacaatcgtgcgaggattcatccactccgctgtcgggggcctgtacgctgccgtgtacccctccacccagttcggcagcctcacgggactgcagtctctgatcagcgcgctcttcgcccttctgcagcagccgctgtttctggccatgatgggtcctctccagggagaccctctgtgggtgaacgtggggctgctccttctcagcctgctgggcttctgcctcccgctctacctgatctgctaccggcgccagctggagcggcagctgcagcagaggcaggaggatgacaaactcttcctcaaaatcaacggctcgtccaaccaggaggccttcgtgtagtggctgccgcctcggaactgcggtctcctgcctgtgcttcagtgactgacccctgtcctgcccctccagagtaccccacgcacccccaggaccttcgccgtctccgtgccagcgttcacgctccctcccggggccctgcctcggagctctgtggtggaaggacgggagagggccccggacacgcgcgttttctcctgccgaacgcaggggctgccctgactttgctctgccgccccccggggacccggggcctggggtctctgtggtgcctgcagcaggagccaggaacgcccggcaggcaggcgctctcccgccagtgtctggattctgcctcttgccaaagcagagggggctgccatcccctgcctgccacctgcccctcggctgcatgcccacagccgtacctgcctgaggacaaaggcttgcactgtctcgcccgcgcctggcccccaccccctccccggccagcctgaggctgcctgaggaaggaaggacccgcttcctgttgtcggtgctaattcctttgtaattccagccccctgtcgcctgtccagggcctgcccacccgttggaggccggtggagaagccccacctggcttatgccctggagagggtttagcgggctgggtggacccctcgcctcctccccgagggccaatgccgcggacacgttttcactgtcaccctcgttctgtctgccacctgaagggaatttgaggaccgccgccagggcaccccgtacatacacacagctgcttttgtggaggtggacgaaaggctgtggccggcagacgtggaggtccaggccggggtggggacgtgggtgggtccgaggtgtgtgtggggtcggggtgggctctaggagttagcccttatccccactgaccaggcgggagccgccaggcctgcagctgggccagtgcccaggagccatcctggcgtggggccaggagcttgtccaaggccacaggcccacagcaccccctgccggcgggctccgtggggccctggagctgatgacgggggaggcccgtccgcctggcccaccaacccgcccaccttgactgcccccagaagtgtgtcttgagacctcctgggcgtgcttagaggggtgagttgtgtttggatttttagttattttctcttcagttttattagacttcttttttataaagcaataaatccattttcctccgggtaagggatgccccttctggcatatcagttaata

SEQ ID NO: 184273 - DNA, 623 bp, Homo sapiens
  Payload ID: 16289
  Gene Symbol: SLC43A2
  Gene Name: solute carrier family 43 (amino acid system L transporter), member 2
  ENST ID: ENST00000571376
  CDS Start-End: 38-367
agccggagccggagccggagccgcgccgcgccgcaccatggcgcccaccctggccactgcccatcggcgccgctggtggatggcctgcacggccgtgctggagaacctcctcttctcggcagtcctcctgggctggggctcgctgctcatcatgctcaagtcagagggcttttactcctacctgtgtaccgagccagagaatgtcaccaatggcacagtgggcggcacagcagagccggggcacgaggagtgccatcaccctgcccctgggtatcgtcatggacaagtatggcccgaggaagctcaggctgctgggcagcgcctgcttcgcggtttcctgcttgctgattgcgtacggagcaagtaaaccaaacgctctctccgtgctcatcttcatcgccctggctctgaatggctttggtgggatgtgtatgaccttcacctcattaacactgcccaacatgttcggcgaccttcggtccacgtttattgccttgatgattgggtcctacgcctcctcggcagtcacctttccaggaatcaagctcatctatgatgctggtgtctccttcatcgtcgtcctcgtggtctgggccggctgctccgggctggttttcctcaac

SEQ ID NO: 184274 - DNA, 3261 bp, Homo sapiens; identical to SEQ ID NO: 184272
  Payload ID: 16289
  Gene Symbol: SLC43A2
  Gene Name: solute carrier family 43 (amino acid system L transporter), member 2
  Uniprot ID: Q8N370
  ENST ID: ENST00000612931
  CDS Start-End: 308-2029

SEQ ID NO: 184275 - DNA, 3011 bp, Homo sapiens
  Payload ID: 16289
  Gene Symbol: SLC43A2
  Gene Name: solute carrier family 43 (amino acid system L transporter), member 2
  Uniprot ID: Q8N370
  ENST ID: ENST00000613070
  CDS Start-End: 90-1811
agaaaaggcgccgggcgggcccgacacacgccggaggagccgggtggtgcagagccggagccggagccggagccgcgccgcgccgcaccatggcgcccaccctggccactgcccatcggcgccgctggtggatggcctgcacggccgtgctggagaacctcctcttctcggcagtcctcctgggctggggctcgctgctcatcatgctcaagtcagagggcttttactcctacctgtgtaccgagccagagaatgtcaccaatggcacagtgggcggcacagcagagccggggcacgaggaggtgagctggatgaacggctggctcagctgccaggcccaggacgagatgctaaatttggccttcactgtgggctcctttctgctcagtgccatcaccctgcccctgggtatcgtcatggacaagtatggcccgaggaagctcaggctgctgggcagcgcctgcttcgcggtttcctgcttgctgattgcgtacggagcaagtaaaccaaacgctctctccgtgctcatcttcatcgccctggctctgaatggctttggtgggatgtgtatgaccttcacctcattaacactgcccaacatgttcggcgaccttcggtccacgtttattgccttgatgattgggtcctacgcctcctcggcagtcacctttccaggaatcaagctcatctatgatgctggtgtctccttcatcgtcgtcctcgtggtctgggccggctgctccgggctggttttcctcaactgcttctttaactggccccttgagcccttcccggggccggaggacatggactactcggtgaagatcaagttcagctggctgggctttgaccacaagatcacagggaagcagttctacaagcaggtgaccacggtgggccggcgcctgagtgtgggcagctccatgaggagtgccaaggagcaggtggcgctgcaggagggccacaagctgtgcctgtccaccgtcgacctggaggtgaagtgccagccggatgccgcagtggccccctccttcatgcacagcgtgttcagccccatcctgctgctcagcctggtcaccatgtgcgtcacgcagctgcggctcatcttctacatgggggctatgaacaacatcctcaagttcctggtcagcggcgaccagaagacagtgatggccacggttggcctctacacctccatcttcggcgtgctccagctgctgtgcctgctgacggcccccgtcattggctacatcatggactggaggctgaaggagtgtgaagacgcctccgaggagcccgaggagaaagacgccaaccaaggcgagaagaaaaagaagaagcgggaccggcagatccagaagatcactaatgccatgcgggccttcgccttcaccaacctgctgctcgtgggctttggggtgacctgcctcattcccaacctgcctctccagatcctctccttcatcctgcacacaatcgtgcgaggattcatccactccgctgtcgggggcctgtacgctgccgtgtacccctccacccagttcggcagcctcacgggactgcagtctctgatcagcgcgctcttcgcccttctgcagcagccgctgtttctggccatgatgggtcctctccagggagaccctctgtgggtgaacgtggggctgctccttctcagcctgctgggcttctgcctcccgctctacctgatctgctaccggcgccagctggagcggcagctgcagcagaggcaggaggatgacaaactcttcctcaaaatcaacggctcgtccaaccaggaggccttcgtgtagtggctgccgcctcggaactgcggtctcctgcctgtgcttcagtgactgacccctgtcctgcccctccagagtaccccacgcacccccaggaccttcgccgtctccgtgccagcgttcacgctccctcccggggccctgcctcggagctctgtggtggaaggacgggagagggccccggacacgcgcgttttctcctgccgaacgcaggggctgccctgactttgctctgccgccccccggggacccggggcctggggtctctgtggtgcctgcagcaggagccaggaacgcccggcaggcaggcgctctcccgccagtgtctggattctgcctcttgccaaagcagagggggctgccatcccctgcctgccacctgcccctcggctgcatgcccacagccgtacctgcctgaggacaaaggcttgcactgtctcgcccgcgcctggcccccaccccctccccggccagcctgaggctgcctgaggaaggaaggacccgcttcctgttgtcggtgctaattcctttgtaattccagccccctgtcgcctgtccagggcctgcccacccgttggaggccggtggagaagccccacctggcttatgccctggagagggtttagcgggctgggtggacccctcgcctcctccccgagggccaatgccgcggacacgttttcactgtcaccctcgttctgtctgccacctgaagggaatttgaggaccgccgccagggcaccccgtacatacacacagctgcttttgtggaggtggacgaaaggctgtggccggcagacgtggaggtccaggccggggtggggacgtgggtgggtccgaggtgtgtgtggggtcggggtgggctctaggagttagcccttatccccactgaccaggcgggagccgccaggcctgcagctgggccagtgcccaggagccatcctggcgtggggccaggagcttgtccaaggccacaggcccacagcaccccctgccggcgggctccgtggggccctggagctgatgacgggggaggcccgtccgcctggcccaccaacccgcccaccttgactgcccccagaagtgtgtcttgagacctcctgggcgtgcttagaggggtgagttgtgtttggatttttagttattttctcttcagttttattagacttcttttttataaagcaataaatccattttcctccgggt

SEQ ID NO: 184276 - DNA, 623 bp, Homo sapiens; identical to SEQ ID NO: 184273
  Payload ID: 16289
  Gene Symbol: SLC43A2
  Gene Name: solute carrier family 43 (amino acid system L transporter), member 2
  ENST ID: ENST00000631603
  CDS Start-End: 38-367

SEQ ID NO: 184277 - DNA, 567 bp, Homo sapiens; identical to SEQ ID NO: 184270
  Payload ID: 16289
  Gene Symbol: SLC43A2
  Gene Name: solute carrier family 43 (amino acid system L transporter), member 2
  ENST ID: ENST00000633255
  CDS Start-End: 116-286

SEQ ID NO: 184278 - DNA, 7430 bp, Homo sapiens
  Payload ID: 16289
  Gene Symbol: SLC43A2
  Gene Name: solute carrier family 43 (amino acid system L transporter), member 2
  Uniprot ID: Q8N370
  ENST ID: ENST00000634102
  CDS Start-End: 90-1799
agaaaaggcgccgggcgggcccgacacacgccggaggagccgggtggtgcagagccggagccggagccggagccgcgccgcgccgcaccatggcgcccaccctggccactgcccatcggcgccgctggtggatggcctgcacggccgtgctggagaacctcctcttctcggcagtcctcctgggctggggctcgctgctcatcatgctcaagtcagagggcttttactcctacctgtgtaccgagccagagaatgtcaccaatggcacagtgggcggcacagcagagccggggcacgaggaggtgagctggatgaacggctggctcagctgccaggcccaggacgagatgctaaatttggccttcactgtgggctcctttctgctcagtgccatcaccctgcccctgggtatcgtcatggacaagtatggcccgaggaagctcaggctgctgggcagcgcctgcttcgcggtttcctgcttgctgattgcgtacggagcaagtaaaccaaacgctctctccgtgctcatcttcatcgccctggctctgaatggctttggtgggatgtgtatgaccttcacctcattaacactgcccaacatgttcggcgaccttcggtccacgtttattgccttgatgattgggtcctacgcctcctcggcagtcacctttccaggaatcaagctcatctatgatgctggtgtctccttcatcgtcgtcctcgtggtctgggccggctgctccgggctggttttcctcaactgcttctttaactggccccttgagcccttcccggggccggaggacatggactactcggtgaagatcaagttcagctggctgggctttgaccacaagatcacagggaagcagttctacaagcaggtgaccacggtgggccggcgcctgagtgtgggcagctccatgaggagtgccaaggagcaggtggcgctgcaggagggccacaagctgtgcctgtccaccgtcgacctggaggtgaagtgccagccggatgccgcagtggccccctccttcatgcacagcgtgttcagccccatcctgctgctcagcctggtcaccatgtgcgtcacgcagctgcggctcatcttctacatgggggctatgaacaacatcctcaagttcctggtcagcggcgaccagaagacagttggcctctacacctccatcttcggcgtgctccagctgctgtgcctgctgacggcccccgtcattggctacatcatggactggaggctgaaggagtgtgaagacgcctccgaggagcccgaggagaaagacgccaaccaaggcgagaagaaaaagaagaagcgggaccggcagatccagaagatcactaatgccatgcgggccttcgccttcaccaacctgctgctcgtgggctttggggtgacctgcctcattcccaacctgcctctccagatcctctccttcatcctgcacacaatcgtgcgaggattcatccactccgctgtcgggggcctgtacgctgccgtgtacccctccacccagttcggcagcctcacgggactgcagtctctgatcagcgcgctcttcgcccttctgcagcagccgctgtttctggccatgatgggtcctctccagggagaccctctgtgggtgaacgtggggctgctccttctcagcctgctgggcttctgcctcccgctctacctgatctgctaccggcgccagctggagcggcagctgcagcagaggcaggaggatgacaaactcttcctcaaaatcaacggctcgtccaaccaggaggccttcgtgtagtggctgccgcctcggaactgcggtctcctgcctgtgcttcagtgactgacccctgtcctgcccctccagagtaccccacgcacccccaggaccttcgccgtctccgtgccagcgttcacgctccctcccggggccctgcctcggagctctgtggtggaaggacgggagagggccccggacacgcgcgttttctcctgccgaacgcaggggctgccctgactttgctctgccgccccccggggacccggggcctggggtctctgtggtgcctgcagcaggagccaggaacgcccggcaggcaggcgctctcccgccagtgtctggattctgcctcttgccaaagcagagggggctgccatcccctgcctgccacctgcccctcggctgcatgcccacagccgtacctgcctgaggacaaaggcttgcactgtctcgcccgcgcctggcccccaccccctccccggccagcctgaggctgcctgaggaaggaaggacccgcttcctgttgtcggtgctaattcctttgtaattccagccccctgtcgcctgtccagggcctgcccacccgttggaggccggtggagaagccccacctggcttatgccctggagagggtttagcgggctgggtggacccctcgcctcctccccgagggccaatgccgcggacacgttttcactgtcaccctcgttctgtctgccacctgaagggaatttgaggaccgccgccagggcaccccgtacatacacacagctgcttttgtggaggtggacgaaaggctgtggccggcagacgtggaggtccaggccggggtggggacgtgggtgggtccgaggtgtgtgtggggtcggggtgggctctaggagttagcccttatccccactgaccaggcgggagccgccaggcctgcagctgggccagtgcccaggagccatcctggcgtggggccaggagcttgtccaaggccacaggcccacagcaccccctgccggcgggctccgtggggccctggagctgatgacgggggaggcccgtccgcctggcccaccaacccgcccaccttgactgcccccagaagtgtgtcttgagacctcctgggcgtgcttagaggggtgagttgtgtttggatttttagttattttctcttcagttttattagacttcttttttataaagcaataaatccattttcctccgggtaagggatgccccttctggcatatcagttaatagctgcatgtgcctattttgagcttgagaagaaaaggcaggacaagattctctgccaccgaccagctccagccgtgcccagctgctcttcgtctctctgggggactgctgactcgggagggacagtgggccaggaaaagaccttcctccccaacccccaaacaaactgggcttgtgcagacatcttagaagtgtgagccaccctcctctaccgattttcccagccaaacaggcgaatcctggtccctttccatccctacacccttccacaaccctgaagattcccgctgggttcttctgcaggctcagagcagttcaggatgtgggcggcagggagggggatgaaaggagaagaggaaagggcaggtccaggccacattcaagctccacattaacagcttgggcgcctggaacacatatctcctaggctttatttcactcaaatatttaaaaaaagactgggcgtggtggctcacgcctataatcccagcactttgggaggccaaggcaggaggctcacctgaggtcaggagttcgagaccatcctgaccaacatggagaaaccccgtctgtactaaaaataaacattaatcgggcgtggtggcgtgcgcctgtaatcccaactactcgggagcctgaggcaggagaatcgcttgaaccggggagacggagattgccgtgagtcgagatcgcaccattgcactccagcctgggcaacagagcgaggctccgtctcaaaaagaaaaaaaaaaagagaacgagataaacatgcccactcctgagaacactcgttttgtgatgttagtggttattctgattttcaagaaagtattatagtcaagtttgggaaaggctgagttaaaagtcaagcctgtttccttacagccagcactgacagcactttgccaacgctcatgagctccgtggctcctcaggagcgggtgtgctgtgctgccgaggaacggctcgaaccatcagagccaccagcctccacgtgcggctccatgatcacccccagcagaggctcccgggtgctggttccaaatggagactccaggtcttgccgctgaccggtgactctgctgccagcatttgagacccgccatcacacaggagttgcagattcggagaaaccctaactagccagggtgctgccagctgggaaaaggccgcctttttttttttttttttttttttgagttggggtcttgctctgccatccaggctggagtgcagtggtgcaactgatagctcaccacggcctccaactcatgggctcaagggatcctcccacctcggcctcctaagtatctgggactataagtgtgtgccaccatgcctggctaattttttttttctttttcataaagatgaattcttgctattttgcccaggctggtctggaactcctgggctgaagcaattctcccacctcagcctcccaaagtgctgagattacaggcgtgagtcacaatgcctagccaaaaagccagtcttgagatggggaagacgtggcccgtgctgtccccagcagtgcccagtcccagccaaagtgggcagtgctgcctcactctcccacccaccctcagggtgtggcacttactgggaagaagcaggcattgagaaacagaattgagggggggaaacagtccagggccaacagtgcttggggattgaggcctgaaaatgcgagcagggtacagaggctgtggctggccagatgggtcgggtgccccctgcactcccaccccctagtcaggggtcacccatcctactttgccttgtgtggagctgacaggtgacatgttttcctattgttgtccttgacttgataacaatctgggagttaaacacatatgatcatccctgctttacaactgaaaaacgaggcctagagatactatcatcatatacacctgaaaaacgaggcctggagcgatggaggagcttgttcaaggtcagagccagcactcatatatgggtcttaagacactggagcagccaagggcctctagaccaggacattccactcggagcagcagctcaggggccaccaggcctctgtggcagggggacctctgtggcaggggggacctctgtggcggggggggggcctctgtggcaggggggtcacagcccaaggaaggggagcaggcccaggcatggtttccgtttctgggagccaagagccttctcagaagagggggagagagctactgcatggaatcatttgggccctggaggctgatgggtacttgggggagcaatccctggtgaccccaaccagcaagacaagtgccctgtgaaggggaagggactacagctgatcaaaggagcaggcaccagtggccgggcctcccgtctgcccctcatcctccaggctctggcgggaaggagcaggaagggctccctgcccttggggttttgatcagtgaggaggggggcttgggtctgagtctgggtctgggtctgctgccgaaacactgcccccagtccctctcctcactagactctggggtctaggcgtgtctttgtggtcggccttctccaaaccctctaggcctctgtctgcagctgctgctgcctggacctatacacaaggtcccacccctcaccggggccaaagacgtggttgcaggccctggtggatcctttctgttttgctccatccccgtcccctcttgcacccagcatcgtcctggtcagaacttccgtttaaaccttccttgcctgccgtgcactccgaggggggcgtcactttgccataggccccagggctgaaaatggcgggacatccagtattgggctcacgtgcataagactgtcccagacagcagcacaatcacgttcagccaagtggagtttccgacgcacttgtgtggcagccgcgtgaatgtgagccgatatgcagctgggaggggttgtgggcctcctgcggtgaggggctcctgccaggagctctgagaagcctccacagaatcagccgtcgggctccttcagcagcagctccccttatctgtgccaacgactgggggcctaactcaagggtgccagcccgtcttccgccaatacagactgtgggattctgagagttaggagcctggggtcccctggggtggggtggtcagggtgagcaggtgggctctgtgagcctgtttccccatgccctgactcaccccaatccctgggtgaggacagagctcctgaaggccactgaaggaggtgcagcacactccacctgggtggccttccgcagctcagccctcttcctgccagcaggaagcctctgcctgtgctccttaagttagccatcctcaccccctccgggcagctctgagactgagccagggccactagcagcacccagacctcgacccttctcagaccgaggcgccaccaccccaggccgaggaggcaaggagggaagaccaaagtctagaggactgtcttggtggccctgggcgagtcttgaactttggtgccatcatctgcaaaagggaggaaagaatgcctgcgtggtgcagctacgtggatacgcagtgaagacccgcatggtgggacgcctggcacttaacaatggtagcatttggccgggcgcggtggctcacgcctgtaatcccagcactttgggaggccgaggcgggcggatcacgaggtcaggagatcaagaccatcccggctaaaacggtgaaaccccgtctctactaaaaatacaaaaaattagccgggcgtagtggcgggcgcctgtagtcccagctacttgggaggctgaggcaggagaatggtgtgaacccgggaggcggagcttgcagtgagccgagatcccgccactgcactccagcctgggcgacagagcgagactccgtctcaaaaaaaaaaaaaaaaacaatggtagcatcgttttcagtgcccaggaagaaggcagctgggacagggaaagggccaccacaccacacccaagcccatacaacaggagagccactttcagcagctctgagcaggacagacttgtggccaagtcaagaaagtaaggtctggtcccagcgaggtggctcatccctgtaatcccagtgctttgggaggccgaagcgggggcggggtggatcacttgaggtcaggggtttgagaccagcctgaccaacatggtgaaacctcaactctactaaaaatacaaaaattagggccgggcgcagtggctcacgcctgtaatcccagcactttgggaggctgaggcgggcggatcacaaggtcaggagatcgagaccaacgtggctaacacagtgaaaccccatctctactaaaaatacgaaaaaaaaaaattagctgggcgtggtggtgggtacctgtagtcccagctacttgggaggctgaggcaggagaatggcatgaacccgggaggtg

SEQ ID NO: 184279 - DNA, 915 bp, Homo sapiens; identical to SEQ ID NO: 184271
  Payload ID: 16289
  Gene Symbol: SLC43A2
  Gene Name: solute carrier family 43 (amino acid system L transporter), member 2
  ENST ID: ENST00000633994
  CDS Start-End: 94-282

SEQ ID NO: 184280 - DNA, 2595 bp, Homo sapiens
  Payload ID: 16290
  Gene Symbol: SLC43A3
  Gene Name: solute carrier family 43, member 3
  Uniprot ID: Q8NBI5
  ENST ID: ENST00000352187
  CDS Start-End: 284-1759
gctctgggagtgtgaaactgggagagacggttaagctggggacggtattcagaattcgagcgcaggagctccgcttctccacctgctcccggggagctattgggatccagagaatcacccgctgatggtttttgcccaggcctgaaacaaccagagagctacgggaaaggaagggcttggcttgccagaggaattttccaagtgctcaaacgccaggcttacggcgcctgtgatccgtccaggaggacaaagtgggatttgaagatccactccacttctgctcatggcgggccagggcctgcccctgcacgtggccacactgctgactgggctgctggaatgcctgggctttgctggcgtcctctttggctggccttcactagtgtttgtcttcaagaatgaagattactttaaggatctgtgtggaccagatgctgggccgattggcaatgccacagggcaggctgactgcaaagcccaggatgagaggttctcactcatcttcaccctggggtccttcatgaacaacttcatgacattccccactggctacatctttgaccggttcaagaccaccgtggcacgcctcatagccatatttttctacaccaccgccacactcatcatagccttcacctctgcaggctcagccgtgctgctcttcctggccatgccaatgctcaccattgggggaatcctgtttctcatcaccaacctgcagattgggaacctatttggccaacaccgttcgaccatcatcactctgtacaatggagcatttgactcttcctcggcagtcttccttattattaagcttctttatgaaaaaggcatcagcctcagggcctccttcatcttcatctctgtctgcagtacctggcatgtagcacgcactttcctcctgatgccccgggggcacatcccatacccactgccccccaactacagctatggcctgtgccctgggaatggcaccacaaaggaagagaaggaaacagctgagcatgaaaacagggagctacagtcaaaggagttcctttcagcgaaggaagagaccccaggggcagggcagaagcaggaactccgctccttctggagctacgctttctctcggcgctttgcctggcacctggtgtggctgtctgtgatacagttgtggcactacctcttcattggcactctcaactccttgctgaccaacatggccggtggggacatggcacgagtcagcacctacacaaatgcctttgccttcactcagttcggagtgctgtgtgccccctggaatggcctgctcatggaccggcttaaacagaagtaccagaaggaagcaagaaagacaggttcctccactttggcggtggccctctgctcgacggtgccttcgctggccctgacatccctgctgtgcctgggcttcgccctctgtgcctcagtccccatcctccctctccagtacctcaccttcatcctgcaagtgatcagccgctccttcctctatgggagcaacgcggccttcctcacccttgctttcccttcagagcactttggcaagctctttgggctggtgatggccttgtcggctgtggtgtctctgctccagttccccatcttcaccctcatcaaaggctcccttcagaatgacccattttacgtgaatgtgatgttcatgcttgccattcttctgacattcttccacccctttctggtatatcgggaatgccgtacttggaaagaaagtccctctgcaattgcatagttcagaagccctcacttttcagccccgaggatggttttgttcatcttccaccacctttgaggacctcgtgtcccaaaagactttgcctatcccagcaaaacacacacacacacacacacacacacaaaataaagacacacaaggacgtctgcgcagcaagaaaagaatctcagttgccaagcagattgatatcacacagactcaaagcaaaggcatgtggaacttctttatttcaaaacagaagtgtctccttgcacttagccttggcagacccttgactccaggggagatgacctgggggaggaagtgtgtcaactatttctttaggcctgtttggctccgaagcctatatgtgcctggatcctctgccacgggttaaattttcaggtgaagagtgaggttgtcatggcctcagctatgcttcctggctctccctcaagagtgcagccttggctagagaactcacagctctgggaaaaagaggagcagacagggttccctgggcccagtctcagcccagccactgatgctggatgaccttggcctgaccctggtctggtctcagaatcacttttcccatctgtaaaattgagatgaattttggtgttgaaagttcttcctggagcagatgtcctagaaggttttaggaatagtgacagagtcaggccaccccaagggccatgggagccagctgacctgcttgaccgaaggatttctgacagactatctttggggatgttttcaagaagggatataagttatttactttgggcatttaaaagaaaatttctctcgggaataattttatagaaaaataaagcttctgtgtctaaggc

SEQ ID NO: 184281 - DNA, 2619 bp, Homo sapiens
  Payload ID: 16290
  Gene Symbol: SLC43A3
  Gene Name: solute carrier family 43, member 3
  Uniprot ID: Q8NBI5
  ENST ID: ENST00000395123
  CDS Start-End: 306-1781
gagcggcccccggaggctttcctggtagaagttgatgcgaggaagggcggcggggaccaggggacggtattcagaattcgagcgcaggagctccgcttctccacctgctcccggggagctattgggatccagagaatcacccgctgatggtttttgcccaggcctgaaacaaccagagagctacgggaaaggaagggcttggcttgccagaggaattttccaagtgctcaaacgccaggcttacggcgcctgtgatccgtccaggaggacaaagtgggatttgaagatccactccacttctgctcatggcgggccagggcctgcccctgcacgtggccacactgctgactgggctgctggaatgcctgggctttgctggcgtcctctttggctggccttcactagtgtttgtcttcaagaatgaagattactttaaggatctgtgtggaccagatgctgggccgattggcaatgccacagggcaggctgactgcaaagcccaggatgagaggttctcactcatcttcaccctggggtccttcatgaacaacttcatgacattccccactggctacatctttgaccggttcaagaccaccgtggcacgcctcatagccatatttttctacaccaccgccacactcatcatagccttcacctctgcaggctcagccgtgctgctcttcctggccatgccaatgctcaccattgggggaatcctgtttctcatcaccaacctgcagattgggaacctatttggccaacaccgttcgaccatcatcactctgtacaatggagcatttgactcttcctcggcagtcttccttattattaagcttctttatgaaaaaggcatcagcctcagggcctccttcatcttcatctctgtctgcagtacctggcatgtagcacgcactttcctcctgatgccccgggggcacatcccatacccactgccccccaactacagctatggcctgtgccctgggaatggcaccacaaaggaagagaaggaaacagctgagcatgaaaacagggagctacagtcaaaggagttcctttcagcgaaggaagagaccccaggggcagggcagaagcaggaactccgctccttctggagctacgctttctctcggcgctttgcctggcacctggtgtggctgtctgtgatacagttgtggcactacctcttcattggcactctcaactccttgctgaccaacatggccggtggggacatggcacgagtcagcacctacacaaatgcctttgccttcactcagttcggagtgctgtgtgccccctggaatggcctgctcatggaccggcttaaacagaagtaccagaaggaagcaagaaagacaggttcctccactttggcggtggccctctgctcgacggtgccttcgctggccctgacatccctgctgtgcctgggcttcgccctctgtgcctcagtccccatcctccctctccagtacctcaccttcatcctgcaagtgatcagccgctccttcctctatgggagcaacgcggccttcctcacccttgctttcccttcagagcactttggcaagctctttgggctggtgatggccttgtcggctgtggtgtctctgctccagttccccatcttcaccctcatcaaaggctcccttcagaatgacccattttacgtgaatgtgatgttcatgcttgccattcttctgacattcttccacccctttctggtatatcgggaatgccgtacttggaaagaaagtccctctgcaattgcatagttcagaagccctcacttttcagccccgaggatggttttgttcatcttccaccacctttgaggacctcgtgtcccaaaagactttgcctatcccagcaaaacacacacacacacacacacacacacaaaataaagacacacaaggacgtctgcgcagcaagaaaagaatctcagttgccaagcagattgatatcacacagactcaaagcaaaggcatgtggaacttctttatttcaaaacagaagtgtctccttgcacttagccttggcagacccttgactccaggggagatgacctgggggaggaagtgtgtcaactatttctttaggcctgtttggctccgaagcctatatgtgcctggatcctctgccacgggttaaattttcaggtgaagagtgaggttgtcatggcctcagctatgcttcctggctctccctcaagagtgcagccttggctagagaactcacagctctgggaaaaagaggagcagacagggttccctgggcccagtctcagcccagccactgatgctggatgaccttggcctgaccctggtctggtctcagaatcacttttcccatctgtaaaattgagatgaattttggtgttgaaagttcttcctggagcagatgtcctagaaggttttaggaatagtgacagagtcaggccaccccaagggccatgggagccagctgacctgcttgaccgaaggatttctgacagactatctttggggatgttttcaagaagggatataagttatttactttgggcatttaaaagaaaatttctctcgggaataattttatagaaaaataaagcttctgtgtctaaggcaa

SEQ ID NO: 184282 - DNA, 2617 bp, Homo sapiens
  Payload ID: 16290
  Gene Symbol: SLC43A3
  Gene Name: solute carrier family 43, member 3
  Uniprot ID: Q8NBI5
  ENST ID: ENST00000395124
  CDS Start-End: 306-1781
gcgaatgcgaacctggcccgtgcggaaagggcgcggagagccccggcgcggagcaggcgggggacggtattcagaattcgagcgcaggagctccgcttctccacctgctcccggggagctattgggatccagagaatcacccgctgatggtttttgcccaggcctgaaacaaccagagagctacgggaaaggaagggcttggcttgccagaggaattttccaagtgctcaaacgccaggcttacggcgcctgtgatccgtccaggaggacaaagtgggatttgaagatccactccacttctgctcatggcgggccagggcctgcccctgcacgtggccacactgctgactgggctgctggaatgcctgggctttgctggcgtcctctttggctggccttcactagtgtttgtcttcaagaatgaagattactttaaggatctgtgtggaccagatgctgggccgattggcaatgccacagggcaggctgactgcaaagcccaggatgagaggttctcactcatcttcaccctggggtccttcatgaacaacttcatgacattccccactggctacatctttgaccggttcaagaccaccgtggcacgcctcatagccatatttttctacaccaccgccacactcatcatagccttcacctctgcaggctcagccgtgctgctcttcctggccatgccaatgctcaccattgggggaatcctgtttctcatcaccaacctgcagattgggaacctatttggccaacaccgttcgaccatcatcactctgtacaatggagcatttgactcttcctcggcagtcttccttattattaagcttctttatgaaaaaggcatcagcctcagggcctccttcatcttcatctctgtctgcagtacctggcatgtagcacgcactttcctcctgatgccccgggggcacatcccatacccactgccccccaactacagctatggcctgtgccctgggaatggcaccacaaaggaagagaaggaaacagctgagcatgaaaacagggagctacagtcaaaggagttcctttcagcgaaggaagagaccccaggggcagggcagaagcaggaactccgctccttctggagctacgctttctctcggcgctttgcctggcacctggtgtggctgtctgtgatacagttgtggcactacctcttcattggcactctcaactccttgctgaccaacatggccggtggggacatggcacgagtcagcacctacacaaatgcctttgccttcactcagttcggagtgctgtgtgccccctggaatggcctgctcatggaccggcttaaacagaagtaccagaaggaagcaagaaagacaggttcctccactttggcggtggccctctgctcgacggtgccttcgctggccctgacatccctgctgtgcctgggcttcgccctctgtgcctcagtccccatcctccctctccagtacctcaccttcatcctgcaagtgatcagccgctccttcctctatgggagcaacgcggccttcctcacccttgctttcccttcagagcactttggcaagctctttgggctggtgatggccttgtcggctgtggtgtctctgctccagttccccatcttcaccctcatcaaaggctcccttcagaatgacccattttacgtgaatgtgatgttcatgcttgccattcttctgacattcttccacccctttctggtatatcgggaatgccgtacttggaaagaaagtccctctgcaattgcatagttcagaagccctcacttttcagccccgaggatggttttgttcatcttccaccacctttgaggacctcgtgtcccaaaagactttgcctatcccagcaaaacacacacacacacacacacacacacaaaataaagacacacaaggacgtctgcgcagcaagaaaagaatctcagttgccaagcagattgatatcacacagactcaaagcaaaggcatgtggaacttctttatttcaaaacagaagtgtctccttgcacttagccttggcagacccttgactccaggggagatgacctgggggaggaagtgtgtcaactatttctttaggcctgtttggctccgaagcctatatgtgcctggatcctctgccacgggttaaattttcaggtgaagagtgaggttgtcatggcctcagctatgcttcctggctctccctcaagagtgcagccttggctagagaactcacagctctgggaaaaagaggagcagacagggttccctgggcccagtctcagcccagccactgatgctggatgaccttggcctgaccctggtctggtctcagaatcacttttcccatctgtaaaattgagatgaattttggtgttgaaagttcttcctggagcagatgtcctagaaggttttaggaatagtgacagagtcaggccaccccaagggccatgggagccagctgacctgcttgaccgaaggatttctgacagactatctttggggatgttttcaagaagggatataagttatttactttgggcatttaaaagaaaatttctctcgggaataattttatagaaaaataaagcttctgtgtctaaggc

SEQ ID NO: 184283 - DNA, 494 bp, Homo sapiens
  Payload ID: 16290
  Gene Symbol: SLC43A3
  Gene Name: solute carrier family 43, member 3
  ENST ID: ENST00000529896
  CDS Start-End: 249-494
taggggacggtattcagaattcgagcgcaggagctccgcttctccacctgctcccggggagctattgggatccagagaatcacccgctgatggtttttgcccaggcctgaaacaaccagagagctacgggaaaggaagggcttggcttgccagaggaattttccaagtgctcaaacgccaggcttacggcgcctgtgatccgtccaggaggacaaagtgggatttgaagatccactccacttctgctcatggcgggccagggcctgcccctgcacgtggccacactgctgactgggctgctggaatgcctgggctttgctggcgtcctctttggctggccttcactagtgtttgtcttcaagaatgaagattactttaaggatctgtgtggaccagatgctgggccgattggcaatgccacagggcaggctggaaggctgggatgcatgggagaccttttttctactccagactgcaaagcccaggatgagagg

SEQ ID NO: 184284 - DNA, 589 bp, Homo sapiens
  Payload ID: 16290
  Gene Symbol: SLC43A3
  Gene Name: solute carrier family 43, member 3
  ENST ID: ENST00000533245
  CDS Start-End: 261-589
gcgaatgcgaacctggcccgtgcggaaagggcgcggagagccccggcgcggagcaggcggcctctatctttattctacaggatccagagaatcacccgctgatggtttttgcccaggcctgaaacaaccagagagctacgggaaaggaagggcttggcttgccagaggaattttccaagtgctcaaacgccaggcttacggcgcctgtgatccgtccaggaggacaaagtgggatttgaagatccactccacttctgctcatggcgggccagggcctgcccctgcacgtggccacactgctgactgggctgctggaatgcctgggctttgctggcgtcctctttggctggccttcactagtgtttgtcttcaagaatgaagattactttaaggatctgtgtggaccagatgctgggccgattggcaatgccacagggcaggctgactgcaaagcccaggatgagaggttctcactcatcttcaccctggggtccttcatgaacaacttcatgacattccccactggctacatctttgaccggttcaagaccaccgtggcacgcctcatagccatatttttctacaccac

SEQ ID NO: 184285 - DNA, 573 bp, Homo sapiens
  Payload ID: 16290
  Gene Symbol: SLC43A3
  Gene Name: solute carrier family 43, member 3
  ENST ID: ENST00000530316
  CDS Start-End: 441-573
gcgaatgcgaacctggcccgtgcggaaagggcgcggagagccccggcgcggagcaggcggtaaactgaagataacaccaacttggcagcgggagtttgtgtcttctgtatgaaatctccctgcctctgcacctggttgagttgctgtcattattttaggggacggtattcagaattcgagcgcaggagctccgcttctccacctgctcccggggagctattgggcctcctcttccagcagcctctatctttattctacaggatccagagaatcacccgctgatggtttttgcccaggcctgaaacaaccagagagctacgggaaaggaagggcttggcttgccagaggaattttccaagtgctcaaacgccaggcttacggcgcctgtgatccgtccaggaggacaaagtgggatttgaagatccactccacttctgctcatggcgggccagggcctgcccctgcacgtggccacactgctgactgggctgctggaatgcctgggctttgctggcgtcctctttggctggccttcactagtgtttgtcttcaagaatgaagattactttaagg

SEQ ID NO: 184286 - DNA, 862 bp, Homo sapiens
  Payload ID: 16290
  Gene Symbol: SLC43A3
  Gene Name: solute carrier family 43, member 3
  ENST ID: ENST00000525205
  CDS Start-End: 1-413
gcaccacaaaggaagagaaggaaacagctgagcatgaaaacagggagctacagtcaaaggagttcctttcagcgaaggaagagaccccaggggcagggcagaagcaggaactccgctccttctggagctacgctttctctcggcgctttgcctggcacctggtgtggctgtctgtgatacagttgtggcactacctcttcattggcactctcaactccttgctgaccaacatggccggtggggacatggcacgagtcagcacctacacaaatgcctttgccttcactcagttcggagtgctgtgtgccccctggaatggcctgctcatggaccggcttaaacagaagtaccagaaggaagcaagaaagacagtttcccttcagagcactttggcaagctctttgggctggtgatggccttgtcggctgtggtgtctctgctccagttccccatcttcaccctcatcaaaggctcccttcagaatgacccattttacgtgaatgtgatgttcatgcttgccattcttctgacattcttccacccctttctggtatatcgggaatgccgtacttggaaagaaagtccctctgcaattgcatagttcagaagccctcacttttcagccccgaggatggttttgttcatcttccaccacctttgaggacctcgtgtcccaaaagactttgcctatcccagcaaaacacacacacacacacacacacacacaaaataaagacacacaaggacgtctgcgcagcaagaaaagaatctcagttgccaagcagattgatatcacacagactcaaagcaaaggcatgtggaacttctttatttcaaaacagaagtgtctccttgcacttag

SEQ ID NO: 184287 - DNA, 397 bp, Homo sapiens
  Payload ID: 16290
  Gene Symbol: SLC43A3
  Gene Name: solute carrier family 43, member 3
  ENST ID: ENST00000529748
  CDS Start-End: 332-397
gggaggctgaaaggcagcgaggagggagggaaagacaccgctggggttctagggggttctagagggagaagtttcaagagggagaggggacggtattcagaattcgagcgcaggagctccgcttctccacctgctcccggggagctattgggatccagagaatcacccgctgatggtttttgcccaggcctgaaacaaccagagagctacgggaaaggaagggcttggcttgccagaggaattttccaagtgctcaaacgccaggcttacggcgcctgtgatccgtccaggaggacaaagtgggatttgaagatccactccacttctgctcatggcgggccagggcctgcccctgcacgtggccacactgctgactgggctgctggaatgcctgggc

SEQ ID NO: 184288 - DNA, 560 bp, Homo sapiens
  Payload ID: 16290
  Gene Symbol: SLC43A3
  Gene Name: solute carrier family 43, member 3
  ENST ID: ENST00000529494
  CDS Start-End: 203-560
gaatgcgaacctggcccgtgcggaaagggcgcggagagccccggcgcggagcaggcgggcctgaaacaaccagagagctacgggaaaggaagggcttggcttgccagaggaattttccaagtgctcaaacgccaggcttacggcgcctgtgatccgtccaggaggacaaagtgggatttgaagatccactccacttctgctcatggcgggccagggcctgcccctgcacgtggccacactgctgactgggctgctggaatgcctgggctttgctggcgtcctctttggctggccttcactagtgtttgtcttcaagaatgaagattactttaaggatctgtgtggaccagatgctgggccgattggcaatgccacagggcaggctgactgcaaagcccaggatgagaggttctcactcatcttcaccctggggtccttcatgaacaacttcatgacattccccactggctacatctttgaccggttcaagaccaccgtggcacgcctcatagccatatttttctacaccaccgccacactcatcatagccttcacctctg

SEQ ID NO: 184289 - DNA, 541 bp, Homo sapiens
  Payload ID: 16290
  Gene Symbol: SLC43A3
  Gene Name: solute carrier family 43, member 3
  ENST ID: ENST00000529113
  CDS Start-End: 162-541
ttgatctgggaagtgcctgggagggaggcaccagctcctgaggggtaattaggggcagccacatttcaactcagcttaagggacaagtttgcgaccgacaagctgtctgaggtggaggggagcccagcctgtgtgctcatttggcaggaaggctgggatgcatgggagaccttttttctactccagactgcaaagcccaggatgagaggttctcactcatcttcaccctggggtccttcatgaacaacttcatgacattccccactggctacatctttgaccggttcaagaccaccgtggcacgcctcatagccatatttttctacaccaccgccacactcatcatagccttcacctctgcaggctcagccgtgctgctcttcctggccatgccaatgctcaccattgggggaatcctgtttctcatcaccaacctgcagattgggaacctatttggccaacaccgttcgaccatcatcactctgtacaatggagcatttgactcttcctcggcagtcttccttattattaagcttcttta

SEQ ID NO: 184290 - DNA, 506 bp, Homo sapiens
  Payload ID: 16290
  Gene Symbol: SLC43A3
  Gene Name: solute carrier family 43, member 3
  ENST ID: ENST00000532278
  CDS Start-End: 502-506
tttcgggcgccatggggcgccgagcgcggcctggcccctcgggctcctctgcggggagggcaggccgcaggctggagcggggtgcggaggctggcggggagcggcccccggaggctttcctggtagaagttgatgcgaggaagggcggcggggaccagtaaactgaagataacaccaacttggcagcgggagtttgtgtcttctgtatgaaatctccctgcctctgcacctggttgagttgctgtcattattttaggggacggtattcagaattcgagcgcaggagctccgcttctccacctgctcccggggagctattgggatccagagaatcacccgctgatggtttttgcccaggcctgaaacaaccagagagctacgggaaaggaagggcttggcttgccagaggaattttccaagtgctcaaacgccaggcttacggcgcctgtgatccgtccaggaggacaaagtgggatttgaagatccactccacttctgctcatggc

SEQ ID NO: 184291 - DNA, 1879 bp, Homo sapiens
  Payload ID: 16290
  Gene Symbol: SLC43A3
  Gene Name: solute carrier family 43, member 3
  Uniprot ID: Q8NBI5
  ENST ID: ENST00000533524
  CDS Start-End: 343-1857
gcgaatgcgaacctggcccgtgcggaaagggcgcggagagccccggcgcggagcaggcgggggacggtattcagaattcgagcgcaggagctccgcttctccacctgctcccggggagctattgggcctcctcttccagcagcctctatctttattctacaggatccagagaatcacccgctgatggtttttgcccaggcctgaaacaaccagagagctacgggaaaggaagggcttggcttgccagaggaattttccaagtgctcaaacgccaggcttacggcgcctgtgatccgtccaggaggacaaagtgggatttgaagatccactccacttctgctcatggcgggccagggcctgcccctgcacgtggccacactgctgactgggctgctggaatgcctgggctttgctggcgtcctctttggctggccttcactagtgtttgtcttcaagaatgaagattactttaaggatctgtgtggaccagatgctgggccgattggcaatgccacagggcaggctggaaggctgggatgcatgggagaccttttttctactccagactgcaaagcccaggatgagaggttctcactcatcttcaccctggggtccttcatgaacaacttcatgacattccccactggctacatctttgaccggttcaagaccaccgtggcacgcctcatagccatatttttctacaccaccgccacactcatcatagccttcacctctgcaggctcagccgtgctgctcttcctggccatgccaatgctcaccattgggggaatcctgtttctcatcaccaacctgcagattgggaacctatttggccaacaccgttcgaccatcatcactctgtacaatggagcatttgactcttcctcggcagtcttccttattattaagcttctttatgaaaaaggcatcagcctcagggcctccttcatcttcatctctgtctgcagtacctggcatgtagcacgcactttcctcctgatgccccgggggcacatcccatacccactgccccccaactacagctatggcctgtgccctgggaatggcaccacaaaggaagagaaggaaacagctgagcatgaaaacagggagctacagtcaaaggagttcctttcagcgaaggaagagaccccaggggcagggcagaagcaggaactccgctccttctggagctacgctttctctcggcgctttgcctggcacctggtgtggctgtctgtgatacagttgtggcactacctcttcattggcactctcaactccttgctgaccaacatggccggtggggacatggcacgagtcagcacctacacaaatgcctttgccttcactcagttcggagtgctgtgtgccccctggaatggcctgctcatggaccggcttaaacagaagtaccagaaggaagcaagaaagacaggttcctccactttggcggtggccctctgctcgacggtgccttcgctggccctgacatccctgctgtgcctgggcttcgccctctgtgcctcagtccccatcctccctctccagtacctcaccttcatcctgcaagtgatcagccgctccttcctctatgggagcaacgcggccttcctcacccttgctttcccttcagagcactttggcaagctctttgggctggtgatggccttgtcggctgtggtgtctctgctccagttccccatcttcaccctcatcaaaggctcccttcagaatgacccattttacgtgaatgtgatgttcatgcttgccattcttctgacattcttccacccctttctggtatatcgggaatgccgtacttggaaagaaagtccctctgcaattgcatagttcagaagccctcacttttcag

SEQ ID NO: 184292 - DNA, 539 bp, Homo sapiens
  Payload ID: 16290
  Gene Symbol: SLC43A3
  Gene Name: solute carrier family 43, member 3
  ENST ID: ENST00000524863
  CDS Start-End: 235-539
gcgaacctggcccgtgcggaaagggcgcggagagccccggcgcggagcaggcgggatccagagaatcacccgctgatggtttttgcccaggcctgaaacaaccagagagctacgggaaaggaagggcttggcttgccagaggaattttccaagtgctcaaacgccaggcttacggcgcctgtgatccgtccaggaggacaaagtgggatttgaagatccactccacttctgctcatggcgggccagggcctgcccctgcacgtggccacactgctgactgggctgctggaatgcctgggctttgctggcgtcctctttggctggccttcactagtgtttgtcttcaagaatgaagattactttaaggatctgtgtggaccagatgctgggccgattggcaatgccacagggcaggctgactgcaaagcccaggatgagaggttctcactcatcttcaccctggggtccttcatgaacaacttcatgacattccccactggctacatctttgaccggttcaagaccaccgtggcacgcct

SEQ ID NO: 184293 - DNA, 562 bp, Homo sapiens
  Payload ID: 16290
  Gene Symbol: SLC43A3
  Gene Name: solute carrier family 43, member 3
  ENST ID: ENST00000526621
  CDS Start-End: 372-562
gcaaaatgcacaaatagagtgtgtgtgtccctatgccctcatgtgctgtctgtgtgtcctctgggtgctgggtgtgacattttccctaggggacggtattcagaattcgagcgcaggagctccgcttctccacctgctcccggggagctattgggcctcctcttccagcagcctctatctttattctacaggatccagagaatcacccgctgatggtttttgcccaggcctgaaacaaccagagagctacgggaaaggaagggcttggcttgccagaggaattttccaagtgctcaaacgccaggcttacggcgcctgtgatccgtccaggaggacaaagtgggatttgaagatccactccacttctgctcatggcgggccagggcctgcccctgcacgtggccacactgctgactgggctgctggaatgcctgggctttgctggcgtcctctttggctggccttcactagtgtttgtcttcaagaatgaagattactttaaggatctgtgtggaccagatgctgggccgattggcaatgccacagggcaggctggaaggct

SEQ ID NO: 184294 - DNA, 653 bp, Homo sapiens
  Payload ID: 16290
  Gene Symbol: SLC43A3
  Gene Name: solute carrier family 43, member 3
  ENST ID: ENST00000529112
  CDS Start-End: 210-653
gggacggtattcagaattcgagcgcaggagctccgcttctccacctgctcccggggagctattgggcctgaaacaaccagagagctacgggaaaggaagggcttggcttgccagaggaattttccaagtgctcaaacgccaggcttacggcgcctgtgatccgtccaggaggacaaagtgggatttgaagatccactccacttctgctcatggcgggccagggcctgcccctgcacgtggccacactgctgactgggctgctggaatgcctgggctttgctggcgtcctctttggctggccttcactagtgtttgtcttcaagaatgaagattactttaaggatctgtgtggaccagatgctgggccgattggcaatgccacagggcaggctgactgcaaagcccaggatgagaggttctcactcatcttcaccctggggtccttcatgaacaacttcatgacattccccactggctacatctttgaccggttcaagaccaccgtggcacgcctcatagccatatttttctacaccaccgccacactcatcatagccttcacctctgcaggctcagccgtgctgctcttcctggccatgccaatgctcaccattgggggaatcctgtttctcatcaccaacctgcagattggg

SEQ ID NO: 184295 - DNA, 587 bp, Homo sapiens
  Payload ID: 16290
  Gene Symbol: SLC43A3
  Gene Name: solute carrier family 43, member 3
  ENST ID: ENST00000532795
  CDS Start-End: 295-587
atgtgctgtctgtgtgtcctctgggtgctgggtgtgacattttccctaggggacggtattcagaattcgagcgcaggagctccgcttctccacctgctcccggggagctattgggatccagagaatcacccgctgatggtttttgcccaggcctgaaacaaccagagagctacgggaaaggaagggcttggcttgccagaggaattttccaagtgctcaaacgccaggcttacggcgcctgtgatccgtccaggaggacaaagtgggatttgaagatccactccacttctgctcatggcgggccagggcctgcccctgcacgtggccacactgctgactgggctgctggaatgcctgggctttgctggcgtcctctttggctggccttcactagtgtttgtcttcaagaatgaagattactttaaggatctgtgtggaccagatgctgggccgattggcaatgccacagggcaggctgactgcaaagcccaggatgagaggttctcactcatcttcaccctggggtccttcatgaacaacttcatgacattccccactggctacatctttgaccggttcaagaccac

SEQ ID NO: 184296 - DNA, 581 bp, Homo sapiens
  Payload ID: 16290
  Gene Symbol: SLC43A3
  Gene Name: solute carrier family 43, member 3
  ENST ID: ENST00000533235
  CDS Start-End: 259-581
aaatagagtgtgtgtgtccctatgccctcatgtgctgtctgtgtgtcctctgggtgctgggtgtgacattttccctaggatccagagaatcacccgctgatggtttttgcccaggcctgaaacaaccagagagctacgggaaaggaagggcttggcttgccagaggaattttccaagtgctcaaacgccaggcttacggcgcctgtgatccgtccaggaggacaaagtgggatttgaagatccactccacttctgctcatggcgggccagggcctgcccctgcacgtggccacactgctgactgggctgctggaatgcctgggctttgctggcgtcctctttggctggccttcactagtgtttgtcttcaagaatgaagattactttaaggatctgtgtggaccagatgctgggccgattggcaatgccacagggcaggctgactgcaaagcccaggatgagaggttctcactcatcttcaccctggggtccttcatgaacaacttcatgacattccccactggctacatctttgaccggttcaagaccaccgtggcacgcctcatagccatatttttcta

SEQ ID NO: 184297 - DNA, 648 bp, Homo sapiens
  Payload ID: 16290
  Gene Symbol: SLC43A3
  Gene Name: solute carrier family 43, member 3
  ENST ID: ENST00000528187
  CDS Start-End: 249-648
gcggaaagggcgcggagagccccggcgcggagcaggcgggggacggtattcagaattcgagcgcaggagctccgcttctccacctgctcccggggagctattgggcctgaaacaaccagagagctacgggaaaggaagggcttggcttgccagaggaattttccaagtgctcaaacgccaggcttacggcgcctgtgatccgtccaggaggacaaagtgggatttgaagatccactccacttctgctcatggcgggccagggcctgcccctgcacgtggccacactgctgactgggctgctggaatgcctgggctttgctggcgtcctctttggctggccttcactagtgtttgtcttcaagaatgaagattactttaaggatctgtgtggaccagatgctgggccgattggcaatgccacagggcaggctggaaggctgggatgcatgggagaccttttttctactccagactgcaaagcccaggatgagaggttctcactcatcttcaccctggggtccttcatgaacaacttcatgacattccccactggctacatctttgaccggttcaagaccaccgtggcacgcctcatagccatatttttctacaccaccgccacactcatcatagccttcacctctgcag

SEQ ID NO: 184298 - DNA, 571 bp, Homo sapiens
  Payload ID: 16290
  Gene Symbol: SLC43A3
  Gene Name: solute carrier family 43, member 3
  ENST ID: ENST00000533051
  CDS Start-End: 337-571
gcgaacctggcccgtgcggaaagggcgcggagagccccggcgcggagcaggcgggggacggtattcagaattcgagcgcaggagctccgcttctccacctgctcccggggagctattgggcctcctcttccagcagcctctatctttattctacaggatccagagaatcacccgctgatggtttttgcccaggcctgaaacaaccagagagctacgggaaaggaagggcttggcttgccagaggaattttccaagtgctcaaacgccaggcttacggcgcctgtgatccgtccaggaggacaaagtgggatttgaagatccactccacttctgctcatggcgggccagggcctgcccctgcacgtggccacactgctgactgggctgctggaatgcctgggctttgctggcgtcctctttggctggccttcactagtgtttgtcttcaagaatgaagattactttaaggatctgtgtggaccagatgctgggccgattggcaatgccacagggcaggctgactgcaaagcccaggatgagaggttctcactcatcttcaccctggggtcct

SEQ ID NO: 184299 - DNA, 1434 bp, Homo sapiens
  Payload ID: 16290
  Gene Symbol: SLC43A3
  Gene Name: solute carrier family 43, member 3
  ENST ID: ENST00000530005
  CDS Start-End: 441-1434
tttcgggcgccatggggcgccgagcgcggcctggcccctcgggctcctctgcggggagggcaggccgcaggctggagcggggtgcggaggctggcggggagcggcccccggaggctttcctggtagaagttgatgcgaggaagggcggcggggaccaggggacggtattcagaattcgagcgcaggagctccgcttctccacctgctcccggggagctattgggcctcctcttccagcagcctctatctttattctacaggatccagagaatcacccgctgatggtttttgcccaggcctgaaacaaccagagagctacgggaaaggaagggcttggcttgccagaggaattttccaagtgctcaaacgccaggcttacggcgcctgtgatccgtccaggaggacaaagtgggatttgaagatccactccacttctgctcatggcgggccagggcctgcccctgcacgtggccacactgctgactgggctgctggaatgcctgggctttgctggcgtcctctttggctggccttcactagtgtttgtcttcaagaatgaagattactttaaggatctgtgtggaccagatgctgggccgattggcaatgccacagggcaggctgactgcaaagcccaggatgagaggttctcactcatcttcaccctggggtccttcatgaacaacttcatgacattccccactggctacatctttgaccggttcaagaccaccgtggcacgcctcatagccatatttttctacaccaccgccacactcatcatagccttcacctctgcaggctcagccgtgctgctcttcctggccatgccaatgctcaccattgggggaatcctgtttctcatcaccaacctgcagattgggaacctatttggccaacaccgttcgaccatcatcactctgtacaatggagcatttgactcttcctcggcagtcttccttattattaagcttctttatgaaaaaggcatcagcctcagggcctccttcatcttcatctctgtctgcagtacctggcatgtagcacgcactttcctcctgatgccccgggggcacatcccatacccactgccccccaactacagctatggcctgtgccctgggaatggcaccacaaaggaagagaaggaaacagctgagcatgaaaacagggagctacagtcaaaggagttcctttcagcgaaggaagagaccccaggggcagggcagaagcaggaactccgctccttctggagctacgctttctctcggcgctttgcctggcacctggtgtggctgtctgtgatacagttgtggcactacctcttcattggcactctcaactccttgctgaccaacatggccggtggggacatggcacgagtcagcacctacacaaatgcctttgccttcactcagttcggagtgctgtgtg

SEQ ID NO: 184300 - DNA, 801 bp, Homo sapiens
  Payload ID: 16290
  Gene Symbol: SLC43A3
  Gene Name: solute carrier family 43, member 3
  ENST ID: ENST00000525474
  CDS Start-End: 295-801
acattttccctaggtgggcctgagcgagtaacagcattcaactaacttggggacggtattcagaattcgagcgcaggagctccgcttctccacctgctcccggggagctattgggatccagagaatcacccgctgatggtttttgcccaggcctgaaacaaccagagagctacgggaaaggaagggcttggcttgccagaggaattttccaagtgctcaaacgccaggcttacggcgcctgtgatccgtccaggaggacaaagtgggatttgaagatccactccacttctgctcatggcgggccagggcctgcccctgcacgtggccacactgctgactgggctgctggaatgcctgggctttgctggcgtcctctttggctggccttcactagtgtttgtcttcaagaatgaagattactttaaggatctgtgtggaccagatgctgggccgattggcaatgccacagggcaggctgactgcaaagcccaggatgagaggttctcactcatcttcaccctggggtccttcatgaacaacttcatgacattccccactggctacatctttgaccggttcaagaccaccgtggcacgcctcatagccatatttttctacaccaccgccacactcatcatagccttcacctctgcaggctcagccgtgctgctcttcctggccatgccaatgctcaccattgggggaatcctgtttctcatcaccaacctgcagattgggaacctatttggccaacaccgttcgaccatcatcactctgtacaatggagcatttgactcttcc

SEQ ID NO: 184301 - DNA, 2207 bp, Homo sapiens
  Payload ID: 16290
  Gene Symbol: SLC43A3
  Gene Name: solute carrier family 43, member 3
  Uniprot ID: Q8NBI5
  ENST ID: ENST00000529554
  CDS Start-End: 346-1821
agtaaactgaagataacaccaacttggcagcgggagtttgtgtcttctgtatgaaatctccctgcctctgcacctggttgagttgctgtcattattttaggggacggtattcagaattcgagcgcaggagctccgcttctccacctgctcccggggagctattgggatccagagaatcacccgctgatggtttttgcccaggcctgaaacaaccagagagctacgggaaaggaagggcttggcttgccagaggaattttccaagtgctcaaacgccaggcttacggcgcctgtgatccgtccaggaggacaaagtgggatttgaagatccactccacttctgctcatggcgggccagggcctgcccctgcacgtggccacactgctgactgggctgctggaatgcctgggctttgctggcgtcctctttggctggccttcactagtgtttgtcttcaagaatgaagattactttaaggatctgtgtggaccagatgctgggccgattggcaatgccacagggcaggctgactgcaaagcccaggatgagaggttctcactcatcttcaccctggggtccttcatgaacaacttcatgacattccccactggctacatctttgaccggttcaagaccaccgtggcacgcctcatagccatatttttctacaccaccgccacactcatcatagccttcacctctgcaggctcagccgtgctgctcttcctggccatgccaatgctcaccattgggggaatcctgtttctcatcaccaacctgcagattgggaacctatttggccaacaccgttcgaccatcatcactctgtacaatggagcatttgactcttcctcggcagtcttccttattattaagcttctttatgaaaaaggcatcagcctcagggcctccttcatcttcatctctgtctgcagtacctggcatgtagcacgcactttcctcctgatgccccgggggcacatcccatacccactgccccccaactacagctatggcctgtgccctgggaatggcaccacaaaggaagagaaggaaacagctgagcatgaaaacagggagctacagtcaaaggagttcctttcagcgaaggaagagaccccaggggcagggcagaagcaggaactccgctccttctggagctacgctttctctcggcgctttgcctggcacctggtgtggctgtctgtgatacagttgtggcactacctcttcattggcactctcaactccttgctgaccaacatggccggtggggacatggcacgagtcagcacctacacaaatgcctttgccttcactcagttcggagtgctgtgtgccccctggaatggcctgctcatggaccggcttaaacagaagtaccagaaggaagcaagaaagacaggttcctccactttggcggtggccctctgctcgacggtgccttcgctggccctgacatccctgctgtgcctgggcttcgccctctgtgcctcagtccccatcctccctctccagtacctcaccttcatcctgcaagtgatcagccgctccttcctctatgggagcaacgcggccttcctcacccttgctttcccttcagagcactttggcaagctctttgggctggtgatggccttgtcggctgtggtgtctctgctccagttccccatcttcaccctcatcaaaggctcccttcagaatgacccattttacgtgaatgtgatgttcatgcttgccattcttctgacattcttccacccctttctggtatatcgggaatgccgtacttggaaagaaagtccctctgcaattgcatagttcagaagccctcacttttcagccccgaggatggttttgttcatcttccaccacctttgaggacctcgtgtcccaaaagactttgcctatcccagcaaaacacacacacacacacacacacacacaaaataaagacacacaaggacgtctgcgcagcaagaaaagaatctcagttgccaagcagattgatatcacacagactcaaagcaaaggcatgtggaacttctttatttcaaaacagaagtgtctccttgcacttagccttggcagacccttgactccaggggagatgacctgggggaggaagtgtgtcaactatttctttaggcctgtttggctccgaagcctatatgtgcctggatcctctgccacgggttaaattttca

SEQ ID NO: 184302 - DNA, 10511 bp, Homo sapiens
  Payload ID: 16291
  Gene Symbol: SLC44A1
  Gene Name: solute carrier family 44 (choline transporter), member 1
  Uniprot ID: Q8WWI5
  ENST ID: ENST00000374720
  CDS Start-End: 248-2221
agcagctgctgcagcaggagcagagcaggagacgcgtagccgccgtcgccgccgccgggggatgtggccggcgcctgcctctagccgcgccgcctcttgagtaccagccgccgctgcagccgccgccgccgcctagccgtgcggtgccaggccgcgccctccccgggcgcccgccggctcgcatgccgaggggctccggggcgtagctgcgcgcccggcgccgcctccgggctccttcggccccgccatgggctgctgcagctccgcctcctccgccgcgcagagctccaaacgagaatggaagccgctggaggaccgtagctgcacagacataccatggctgctgctcttcatcctcttctgcattgggatgggatttatttgtggcttttcaatagcaacaggtgcagcagcaagactagtgtcaggatacgacagctatggaaatatctgtgggcagaaaaatacaaagttggaagcaataccaaacagtggcatggaccacacccagcggaagtatgtattctttttggatccatgcaacctggacttgataaaccggaagattaagtctgtagcactgtgtgtagcagcgtgtccaaggcaagaactgaaaactctgagtgatgttcagaagtttgcagagataaatggttcagccctatgtagctacaacctaaagccttctgaatacactacatctccaaaatcttctgttctctgccccaaactaccagttccagcgagtgcacctattccattcttccatcgctgtgctcctgtgaacatttcctgctatgccaagtttgcagaggccctgatcacctttgtcagtgacaatagtgtcttacacaggctgattagtggagtaatgaccagcaaagaaattatattgggactttgcttgttatcactagttctatccatgattttgatggtgataatcaggtatatatcaagagtacttgtgtggatcttaacgattctggtcatactcggttcacttggaggcacaggtgtactatggtggctgtatgcaaagcaaagaaggtctcccaaagaaactgttactcctgagcagcttcagatagctgaagacaatcttcgggccctcctcatttatgccatttcagctacagtgttcacagtgatcttattcctgataatgttggttatgcgcaaacgtgttgctcttaccatcgccttgttccacgtagctggcaaggtcttcattcacttgccactgctagtcttccaacccttctggactttctttgctcttgtcttgttttgggtgtactggatcatgacacttctttttcttggcactaccggcagtcctgttcagaatgagcaaggctttgtggagttcaaaatttctgggcctctgcagtacatgtggtggtaccatgtggtgggcctgatttggatcagtgaatttattctagcatgtcagcagatgacagtggcaggagctgtggtaacatactattttactagggataaaaggaatttgccatttacacctattttggcatcagtaaatcgccttattcgttaccacctaggtacggtggcaaaaggatctttcattatcacattagtcaaaattccgcgaatgatccttatgtatattcacagtcagctcaaaggaaaggaaaatgcttgtgcacgatgtgtgctgaaatcttgcatttgttgcctttggtgtcttgaaaagtgcctaaattatttaaatcagaatgcatacacagccacagctatcaacagcaccaacttctgcacctcagcaaaggatgcctttgtcattctggtggagaatgctttgcgagtggctaccatcaacacagtaggagattttatgttattccttggcaaggtgctgatagtctgcagcacaggtttagctgggattatgctgctcaactaccagcaggactacacagtatgggtgctgcctctgatcatcgtctgcctctttgctttcctagtcgctcattgcttcctgtctatttatgaaatggtagtggatgtattattcttgtgttttgccattgatacaaaatacaatgatgggagccctggcagagaattctatatggataaagtgctgatggagtttgtggaaaacagtaggaaagcaatgaaagaagctggtaagggaggcgtcgctgattccagagagctaaagccgatggcttcgggagcaagttctgcttgaacctagccgacggttatggaaacccattgacattccaaaacaatatatacacataactatgtatttgtgtgtgtgggtgtgtgtatatatgtatatgtatgtgtgtatatatgtatatgtatatacacacacacacataaatcagccaaaatcagagaaaaggaacagggatttaataccttttttatgcttatttttgtcaaacatgtactcctttcatacgggtggcttttacaaggcaacttccgtcatttaatgttttcaactgtaattgtcttaatggaaatgttaaaattcatatctgattaacatttttaataacttagaggagattttaactttatttaaaaataggtaaaattattgtacctaattatgtctaaagtttattcaggggtaatttccctgatgtctgtataaaatcaagatcttattttactgatgcataagtcctagtgggtcaagactaggcatatgctttcagataaataaggaattactccaatcagttttccccaatcaaagaagccatgtcattttacttttagaaacatacaattgggcccaatatgggaattttcataatagttcatacatttgtcagccaacattaaaaggtaaccaactcctcaggtatttgtagtttaccctaacgcttctttaaaagaaagtaggtaaaaaaagaaaagggtagataatctttcgtatgcaaacttttcccttatattttgtctttctttcctttttgactttagtagcatcctccacacatttgtgtgcctgatttgaaaggaagctggggcacccagcgagtttagcctttaagtttctgtgtattgatttgcagattaagtaatgctgggaggaataaagaagggacagaaacatggaacataaagcattgaaaattccggtgcttgggcttcggcttcagagtaacgtcagtggcttagggttaaacggccattttattcaaatgcttgctatacaatctgaaaacacactggcaggtgctcctctccttggcaattcattgagtatccagagttctacgatgtttaactgaagaattggctaatgttttgatcctccagtgtgactgttgtttttgtttgggggtgggtttggggttttttgcttttttattcctgaagcttaccagatatgaatggctaatactccattgttctgcttgttgtaatggtgaatgctttaagaaaaaaaagtgtaatttgctaagaataattcatgatctgtttatgcgataactcctttttgttacaatttttttaaaaaaagctatttttgttaatgtaaagtaaatatttcagagcaaattttttaaacttattgcactaaatacaggctctgtacaaaaaaaaaaaaaaaaaaaaagcctcagcattttatcattccatggaaggagaatcttttgaaagaaagcattgcctcctaccagaactagacagtgaattagatcggtattatggaaatgcatacaagtaatgtcactagggcttaataagcagccgtttgctaatgtgcttcctttcaaagggttggacctttaaattgctgcaaaaggtaaattgtatttttttttaagtattggtgttctttactctagctaggctaaaatttgctaaatgccttggtttcttttaaaagttcatgtaatatttctgatttttcagaatatttgcaataagagtctggattttaaaaaacacatgcatacacacaattaagagctcatgtcttagcaagatctgggaaaccaacattgcgagagtagctattttgaaagaataattctccagaagttaacatctaatatctagtatcaccaaacagtatcgctgttctcttttattcatttgaaatgaatataattatataactaacaattgtccaaatagatgagagagcaaatcatgtgagaaaattcagaataccatctgtttcatagccgcacagattttggactttcacaaacattgggaactaaatttagaattggcaaaagtctagaagatgggtatcaaaacagaagacattccaggagctagcaattttaagaggtgtccctccaaagtgacctgatggaagtcctgaacttggaaattaggttctactcacttggacatccctgcatcatggactgttgctgctccctgttccatatgctcgcaatctcagctatttggaagctaccaggaatgctttctaattatcatttgcaactagaactgtaatcagaaagaaattttgtatttttgtataacttgattgtgtgccattttatataacaggtcctgttttacaaataaattttgttttactaacattgtgtttagaaattataatctatgtgtaaccatgtcatttgagttgcaaattaattgccaggctgttttccttaagtaaattcatgtgccgtgtagaaatatgcagatatgcattacacaggcacacacagagagatatttaatatgtggaatatcactctttcatgagctttattccttgattaatttgataaagcctcacagaggattttaagcaatatttaaatgtgttgaggttatgtttggatattcctgctgcctcttttcattcatttcaagtcattcttcagctagctatgggctgccttattgctattcgctcactgcttccatcttctgcccaagtgagaagaatagatgaagaacagaaatttctctgtgaaatgtggatacccgaataatttcataaatcattgattctatgtggtggtttttgtcttcttctgtggtgaatcttcaaaactgtattcaggactcatatttctagagttttaattggggtcctctattgtcaattgtagtagtgaccagagtatcgtggtttttgccatcagataattaaggctctggtgcataatttagactttctaagctcctgcctgaagaataaggtcttccataatatggaagagaaaagttatatttcagtgtaaatccaagagacccatcttctatgagaggcttaccagtgcattagtaataaaacattagcaatttagctagagcactgagattgtataatccttgcatggatgagcagagctcaaagccagttgttcctttaaagcatttaatgcaatggctaatgtttaggattaaagtttttattttatcctataagataattaagtcctaagtcactacaacttaagtagcttaactgtatgttggtacccaaactttttctataatggttaaggaggaggcacttactgagtttattttaaagttatgctagaaatgtttttcttttgtagagatgctctctctctctctctctttttttttttttttttttttttttttccgtgagggcattaggctgctgattgtaagttatttccaataccactgatcttggtatctgccaagggcttccttgccttccctgggcagttttaggatttcaccctagtagggggtatgaggcactgacccctttattctggacccaaactgctttagagcagagttaatacctctccctccctcttcaaaacagctacaggaactgcaggcaccacatatgtgtgaggccacatcactgcccctgaggcttcaactatttccaccatgcactattactagctactaacagccattttaagagatctcctagcctgcaaggtagaattctgggatcagttccaaaaccagaactgccagtaatggtgacttgaatattttatttgatttttggtcagtaaccttgtcatttaaattggactttccaatagccttaacatggcctctgagaagtttcctccagaaaggtctttaagctttcgcttttcaataagtaagttctttactgcttttctactgctactttaaaaaaaaaacaacaacaacaaataaaactctcagagtctggaggcttatcagtgcacctgccacagttaatttctgtattcttttcatacattccatctgacacatacgagtgcactataatggcttgcctagaactggtaagaagtggtctgtgaatgtatattgaaaaaatgtgggttcataagtaaaagcgtaacgcagatatttgtgtattctgtattcacagcgtaggctgccttttgctttaaatgcatattcatgtatctttgtgtgctaagaatgcatgttagcccttttgaaaagtaggcactattcatacacagtagcttcttggaattaactcatctttgttaacttagtggcacatagtccaaatttttaaaaagcaagacccttgaatatgccaagagaaaatctaaagctagcaaacttaaaaaacaaaacaaaaattacacgtcgtgtacagttatgaatttagaatagcacactttttccattcagatttcatacatttgagccaaattcttatactccatgttttaattttaaaaggataattttaatccaagatttaaatctttgaaaatatctttcttatagaaaactttaatgcagtttttaaacttactgatttctgtggaaaacctttcttttctatagaaatactgtagtgccctttcttcccatcttgattttgtacatgtaaagacaaatgatgattcagtttcaatattgcatgaacaattgccactttgtaaattatatggacagaatgtgttctaaggaaattcgttagtaaatttgtgaaaaacatgtgagattgttcgagacctattaggctattcttcagttttgatgctcagttttacaacttaaatgattttctccaggacacggagctcagaataataaagcttttattaatggtctagtgaagatctagttgaacatggaaacattgtaatttacaaatgtctcagaaatttctcacttttatttgctaagacctgaatttaatatttgatattcaaaaacaagttattttgaagagacaatgggtctctttgagcttaagaaagctatggactatctttccttcaaatgcacatcacatgtctgtgaacactcaaaatgctcatagaatttcagggccctcagacggccagcttccacccctgtaccccctcaggggctaatgaacccaagtcaaaaggctgctctaaagttgttctgataatgtgttttgaaatgaggaagtgattaggcctccactagagatacttttgagatgatgcttaccaccttctgacctggaatcatttttataacttaaagactttatgtaatttagtagcaggttagggaatagaaaccacactaatctgaaggaataacaagatgatcaacactgaatcttcatgacagtaagattttctttccttggaggtatgagggtgtgtatgtgtgtgtgtgtgtgtgtgtgtttgtgtgtgtgtgtgtgtgtcctggcggttatttgggggcaaggtaccagattatttgcagtgagccaaaaaaaaaaaaatatccaagaagaaataaatagggaatccttgtaattaatccatctaccaaaacacttgattctttttattgtagctcagctatgacattatgacattatgtggcttagtgttatcagtatactactgtcttaaaatatatttgtcaacatgtccagttccaacaacagttgaagatgatgataaattagcaaactcaagggtagtccatagttggcaaaaaataaatttggtagaaagttggaggagcagatgctgaaggtagaaatgcaaaagatgttttttcttcctgcataaatcacggaggtgtgttctgttttagtgttttccagtcacccactagagcagcttcagattcctctgccaatagaactccacccccagtcccttacctactctatcttctttagggaagcatgtggatttcttcacatctgcaccttactattaggtaagggtgctgcatctacatggaaggctccctgggcccttgaaaaagcaggcagaaactcatcaaggggtttgaagttcttgtgaaatttgatcccagtggctcatgacttatagtcaggcatcaaaccatttcctactttttcaggctgaagaaagtggaaatataactggctggtgaagaaaggagaaaagtcagccccctaccccaccccacactcctagaaaagtttgggggttttttttgtttgtttttggtgtttttttgagacggagtctcgctctatcgccagcttagagtgcagtggctcaatcttagctcactgcaacctccacctcccaggttcaagtgattctcctgcatcagcctcctgagtagctgggaccacaggcatgtgccaccacacccagctaatttttgtatttttagtagagacggggtttcaccacgttggccaggccaatctcgaactcctgacctcaggtgatccacccgcctcagcctcccaaagtgctgggattacaggcatgagccaccgcgcccggcctagaagagttttaatgaaccttccacagtagtaaatgcagagaccactggtggaaattcccatgttggatagaaaagggcgtaagtccagtctaagtatctaaatgtgatatgcccttttgtcacagaagtgtaagacttaaagggaatattctgaccttcgtgtatgaatctgatccacccatcctgtcagctaggattataatttgaactgtcgtttcaggagcatgtgttaaatcatatgagtaaaaaaaaagtagacattgaaaagaagacttgggaataattgggcagatagaatgggttccatggatcattctagttgccactagaaaatgtgagctccttcttcatttaccatgttgataatccggtggtgactttttttttttttttgtaaattgtattagataccccacaggaatgtgacaataataggatagctttgggggctggtgatttgaaacagggactattaagtagattttcccccatcctctaggttcctgtagtctgtgctcagaacttggtttttggcccctattgtttttgcctattttgattttcagagatgatcacatggggacagttaacttttcttctgctgtgttgccttaatgctactagattgtgttgtgttgttggagttttctgacttcttccctataaaaagatactgagagctccataatgaaagaagttgttatactttctcagaatattctggaccactgaatgcacttctaatagagctttaatctaaagaagttagttcagtggttattaactgattttattacaggagaaaaaaactttaacaaaaaggcagggagaaaagtgtgaagggcatcaagcaaaatgacaggggcttcaaaaaacaaccaaagacaaaaccctatcttctgaagaccaaaggtccaactttacttactggctggcacagcctttctgaactccttgagtttagaatagagctcctagaataataaggcggccaaatttaaagatcagtcaatacagtagggacctgctattgatctctcaggcactgagtcttcacatccagtgtcaagcccagcccagcatatggggtgatatgagcagaaaacacacatcggtgtgtcttgatttctcgcagctgtgtaatgtggcatgagaagtatgttttggtgccacatatttctcaatctgatgcctttttgtctttttttttttttgccatttgcatcctatttcatagtgccaaaatgaatttttgtatcttgtcttgtctttgtccattataaactggaggatcacagttaagccttccatgaattcatagtttggaatcatttaccttaccattattttggatttttttcttattacagtgtcactacactgtattcatgtgggggaacaaacatgtaggtgcttgaacatgccccacagacacagttgtagccctagtatttgtgacggtcattattgacacagtgcagactttgcagatggagcattatgctctcagaggactttaaaaatatgtatattaagcaattaactttctggagttggagttatcaaatcttgctgggaaattaacttccaagagctctgaattggatggaattccatctggcttcagagaacaatcagcctatatgaaacggagctttgaaatgtttttcttgtgcagaaatacgaactagaaagaaaagtgctgatctaatgctaagttttctctgtgtactgactcagttgccagaattataatgaaaactgtattttagtctaacaaatgtatagaattttttatgtaataaataaaattttataggaaagaa

SEQ ID NO: 184303 - DNA, 9640 bp, Homo sapiens
  Payload ID: 16291
  Gene Symbol: SLC44A1
  Gene Name: solute carrier family 44 (choline transporter), member 1
  Uniprot ID: Q8WWI5
  ENST ID: ENST00000374723
  CDS Start-End: 248-2206
agcagctgctgcagcaggagcagagcaggagacgcgtagccgccgtcgccgccgccgggggatgtggccggcgcctgcctctagccgcgccgcctcttgagtaccagccgccgctgcagccgccgccgccgcctagccgtgcggtgccaggccgcgccctccccgggcgcccgccggctcgcatgccgaggggctccggggcgtagctgcgcgcccggcgccgcctccgggctccttcggccccgccatgggctgctgcagctccgcctcctccgccgcgcagagctccaaacgagaatggaagccgctggaggaccgtagctgcacagacataccatggctgctgctcttcatcctcttctgcattgggatgggatttatttgtggcttttcaatagcaacaggtgcagcagcaagactagtgtcaggatacgacagctatggaaatatctgtgggcagaaaaatacaaagttggaagcaataccaaacagtggcatggaccacacccagcggaagtatgtattctttttggatccatgcaacctggacttgataaaccggaagattaagtctgtagcactgtgtgtagcagcgtgtccaaggcaagaactgaaaactctgagtgatgttcagaagtttgcagagataaatggttcagccctatgtagctacaacctaaagccttctgaatacactacatctccaaaatcttctgttctctgccccaaactaccagttccagcgagtgcacctattccattcttccatcgctgtgctcctgtgaacatttcctgctatgccaagtttgcagaggccctgatcacctttgtcagtgacaatagtgtcttacacaggctgattagtggagtaatgaccagcaaagaaattatattgggactttgcttgttatcactagttctatccatgattttgatggtgataatcaggtatatatcaagagtacttgtgtggatcttaacgattctggtcatactcggttcacttggaggcacaggtgtactatggtggctgtatgcaaagcaaagaaggtctcccaaagaaactgttactcctgagcagcttcagatagctgaagacaatcttcgggccctcctcatttatgccatttcagctacagtgttcacagtgatcttattcctgataatgttggttatgcgcaaacgtgttgctcttaccatcgccttgttccacgtagctggcaaggtcttcattcacttgccactgctagtcttccaacccttctggactttctttgctcttgtcttgttttgggtgtactggatcatgacacttctttttcttggcactaccggcagtcctgttcagaatgagcaaggctttgtggagttcaaaatttctgggcctctgcagtacatgtggtggtaccatgtggtgggcctgatttggatcagtgaatttattctagcatgtcagcagatgacagtggcaggagctgtggtaacatactattttactagggataaaaggaatttgccatttacacctattttggcatcagtaaatcgccttattcgttaccacctaggtacggtggcaaaaggatctttcattatcacattagtcaaaattccgcgaatgatccttatgtatattcacagtcagctcaaaggaaaggaaaatgcttgtgcacgatgtgtgctgaaatcttgcatttgttgcctttggtgtcttgaaaagtgcctaaattatttaaatcagaatgcatacacagccacagctatcaacagcaccaacttctgcacctcagcaaaggatgcctttgtcattctggtggagaatgctttgcgagtggctaccatcaacacagtaggagattttatgttattccttggcaaggtgctgatagtctgcagcacaggtttagctgggattatgctgctcaactaccagcaggactacacagtatgggtgctgcctctgatcatcgtctgcctctttgctttcctagtcgctcattgcttcctgtctatttatgaaatggtagtggatgtattattcttgtgttttgccattgatacaaaatacaatgatgggagccctggcagagaattctatatggataaagtgctgatggagtttgtggaaaacagtaggaaagcaatgaaagaagctggtaagggaggcgtcgctgattccagagagctaaagccgatgattaagtaatgctgggaggaataaagaagggacagaaacatggaacataaagcattgaaaattccggtgcttgggcttcggcttcagagtaacgtcagtggcttagggttaaacggccattttattcaaatgcttgctatacaatctgaaaacacactggcaggtgctcctctccttggcaattcattgagtatccagagttctacgatgtttaactgaagaattggctaatgttttgatcctccagtgtgactgttgtttttgtttgggggtgggtttggggttttttgcttttttattcctgaagcttaccagatatgaatggctaatactccattgttctgcttgttgtaatggtgaatgctttaagaaaaaaaagtgtaatttgctaagaataattcatgatctgtttatgcgataactcctttttgttacaatttttttaaaaaaagctatttttgttaatgtaaagtaaatatttcagagcaaattttttaaacttattgcactaaatacaggctctgtacaaaaaaaaaaaaaaaaaaaaagcctcagcattttatcattccatggaaggagaatcttttgaaagaaagcattgcctcctaccagaactagacagtgaattagatcggtattatggaaatgcatacaagtaatgtcactagggcttaataagcagccgtttgctaatgtgcttcctttcaaagggttggacctttaaattgctgcaaaaggtaaattgtatttttttttaagtattggtgttctttactctagctaggctaaaatttgctaaatgccttggtttcttttaaaagttcatgtaatatttctgatttttcagaatatttgcaataagagtctggattttaaaaaacacatgcatacacacaattaagagctcatgtcttagcaagatctgggaaaccaacattgcgagagtagctattttgaaagaataattctccagaagttaacatctaatatctagtatcaccaaacagtatcgctgttctcttttattcatttgaaatgaatataattatataactaacaattgtccaaatagatgagagagcaaatcatgtgagaaaattcagaataccatctgtttcatagccgcacagattttggactttcacaaacattgggaactaaatttagaattggcaaaagtctagaagatgggtatcaaaacagaagacattccaggagctagcaattttaagaggtgtccctccaaagtgacctgatggaagtcctgaacttggaaattaggttctactcacttggacatccctgcatcatggactgttgctgctccctgttccatatgctcgcaatctcagctatttggaagctaccaggaatgctttctaattatcatttgcaactagaactgtaatcagaaagaaattttgtatttttgtataacttgattgtgtgccattttatataacaggtcctgttttacaaataaattttgttttactaacattgtgtttagaaattataatctatgtgtaaccatgtcatttgagttgcaaattaattgccaggctgttttccttaagtaaattcatgtgccgtgtagaaatatgcagatatgcattacacaggcacacacagagagatatttaatatgtggaatatcactctttcatgagctttattccttgattaatttgataaagcctcacagaggattttaagcaatatttaaatgtgttgaggttatgtttggatattcctgctgcctcttttcattcatttcaagtcattcttcagctagctatgggctgccttattgctattcgctcactgcttccatcttctgcccaagtgagaagaatagatgaagaacagaaatttctctgtgaaatgtggatacccgaataatttcataaatcattgattctatgtggtggtttttgtcttcttctgtggtgaatcttcaaaactgtattcaggactcatatttctagagttttaattggggtcctctattgtcaattgtagtagtgaccagagtatcgtggtttttgccatcagataattaaggctctggtgcataatttagactttctaagctcctgcctgaagaataaggtcttccataatatggaagagaaaagttatatttcagtgtaaatccaagagacccatcttctatgagaggcttaccagtgcattagtaataaaacattagcaatttagctagagcactgagattgtataatccttgcatggatgagcagagctcaaagccagttgttcctttaaagcatttaatgcaatggctaatgtttaggattaaagtttttattttatcctataagataattaagtcctaagtcactacaacttaagtagcttaactgtatgttggtacccaaactttttctataatggttaaggaggaggcacttactgagtttattttaaagttatgctagaaatgtttttcttttgtagagatgctctctctctctctctctttttttttttttttttttttttttttccgtgagggcattaggctgctgattgtaagttatttccaataccactgatcttggtatctgccaagggcttccttgccttccctgggcagttttaggatttcaccctagtagggggtatgaggcactgacccctttattctggacccaaactgctttagagcagagttaatacctctccctccctcttcaaaacagctacaggaactgcaggcaccacatatgtgtgaggccacatcactgcccctgaggcttcaactatttccaccatgcactattactagctactaacagccattttaagagatctcctagcctgcaaggtagaattctgggatcagttccaaaaccagaactgccagtaatggtgacttgaatattttatttgatttttggtcagtaaccttgtcatttaaattggactttccaatagccttaacatggcctctgagaagtttcctccagaaaggtctttaagctttcgcttttcaataagtaagttctttactgcttttctactgctactttaaaaaaaaaacaacaacaacaaataaaactctcagagtctggaggcttatcagtgcacctgccacagttaatttctgtattcttttcatacattccatctgacacatacgagtgcactataatggcttgcctagaactggtaagaagtggtctgtgaatgtatattgaaaaaatgtgggttcataagtaaaagcgtaacgcagatatttgtgtattctgtattcacagcgtaggctgccttttgctttaaatgcatattcatgtatctttgtgtgctaagaatgcatgttagcccttttgaaaagtaggcactattcatacacagtagcttcttggaattaactcatctttgttaacttagtggcacatagtccaaatttttaaaaagcaagacccttgaatatgccaagagaaaatctaaagctagcaaacttaaaaaacaaaacaaaaattacacgtcgtgtacagttatgaatttagaatagcacactttttccattcagatttcatacatttgagccaaattcttatactccatgttttaattttaaaaggataattttaatccaagatttaaatctttgaaaatatctttcttatagaaaactttaatgcagtttttaaacttactgatttctgtggaaaacctttcttttctatagaaatactgtagtgccctttcttcccatcttgattttgtacatgtaaagacaaatgatgattcagtttcaatattgcatgaacaattgccactttgtaaattatatggacagaatgtgttctaaggaaattcgttagtaaatttgtgaaaaacatgtgagattgttcgagacctattaggctattcttcagttttgatgctcagttttacaacttaaatgattttctccaggacacggagctcagaataataaagcttttattaatggtctagtgaagatctagttgaacatggaaacattgtaatttacaaatgtctcagaaatttctcacttttatttgctaagacctgaatttaatatttgatattcaaaaacaagttattttgaagagacaatgggtctctttgagcttaagaaagctatggactatctttccttcaaatgcacatcacatgtctgtgaacactcaaaatgctcatagaatttcagggccctcagacggccagcttccacccctgtaccccctcaggggctaatgaacccaagtcaaaaggctgctctaaagttgttctgataatgtgttttgaaatgaggaagtgattaggcctccactagagatacttttgagatgatgcttaccaccttctgacctggaatcatttttataacttaaagactttatgtaatttagtagcaggttagggaatagaaaccacactaatctgaaggaataacaagatgatcaacactgaatcttcatgacagtaagattttctttccttggaggtatgagggtgtgtatgtgtgtgtgtgtgtgtgtgtgtttgtgtgtgtgtgtgtgtgtcctggcggttatttgggggcaaggtaccagattatttgcagtgagccaaaaaaaaaaaaatatccaagaagaaataaatagggaatccttgtaattaatccatctaccaaaacacttgattctttttattgtagctcagctatgacattatgacattatgtggcttagtgttatcagtatactactgtcttaaaatatatttgtcaacatgtccagttccaacaacagttgaagatgatgataaattagcaaactcaagggtagtccatagttggcaaaaaataaatttggtagaaagttggaggagcagatgctgaaggtagaaatgcaaaagatgttttttcttcctgcataaatcacggaggtgtgttctgttttagtgttttccagtcacccactagagcagcttcagattcctctgccaatagaactccacccccagtcccttacctactctatcttctttagggaagcatgtggatttcttcacatctgcaccttactattaggtaagggtgctgcatctacatggaaggctccctgggcccttgaaaaagcaggcagaaactcatcaaggggtttgaagttcttgtgaaatttgatcccagtggctcatgacttatagtcaggcatcaaaccatttcctactttttcaggctgaagaaagtggaaatataactggctggtgaagaaaggagaaaagtcagccccctaccccaccccacactcctagaaaagtttgggggttttttttgtttgtttttggtgtttttttgagacggagtctcgctctatcgccagcttagagtgcagtggctcaatcttagctcactgcaacctccacctcccaggttcaagtgattctcctgcatcagcctcctgagtagctgggaccacaggcatgtgccaccacacccagctaatttttgtatttttagtagagacggggtttcaccacgttggccaggccaatctcgaactcctgacctcaggtgatccacccgcctcagcctcccaaagtgctgggattacaggcatgagccaccgcgcccggcctagaagagttttaatgaaccttccacagtagtaaatgcagagaccactggtggaaattcccatgttggatagaaaagggcgtaagtccagtctaagtatctaaatgtgatatgcccttttgtcacagaagtgtaagacttaaagggaatattctgaccttcgtgtatgaatctgatccacccatcctgtcagctaggattataatttgaactgtcgtttcaggagcatgtgttaaatcatatgagtaaaaaaaaagtagacattgaaaagaagacttgggaataattgggcagatagaatgggttccatggatcattctagttgccactagaaaatgtgagctccttcttcatttaccatgttgataatccggtggtgactttttttttttttttgtaaattgtattagataccccacaggaatgtgacaataataggatagctttgggggctggtgatttgaaacagggactattaagtagattttcccccatcctctaggttcctgtagtctgtgctcagaacttggtttttggcccctattgtttttgcctattttgattttcagagatgatcacatggggacagttaacttttcttctgctgtgttgccttaatgctactagattgtgttgtgttgttggagttttctgacttcttccctataaaaagatactgagagctccataatgaaagaagttgttatactttctcagaatattctggaccactgaatgcacttctaatagagctttaatctaaagaagttagttcagtggttattaactgattttattacaggagaaaaaaactttaacaaaaaggcagggagaaaagtgtgaagggcatcaagcaaaatgacaggggcttcaaaaaacaaccaaagacaaaaccctatcttctgaagaccaaaggtccaactttacttactggctggcacagcctttctgaactccttgagtttagaatagagctcctagaataataaggcggccaaatttaaagatcagtcaatacagtagggacctgctattgatctctcaggcactgagtcttcacatccagtgtcaagcccagcccagcatatggggtgatatgagcagaaaacacacatcggtgtgtcttgatttctcgcagctgtgtaatgtggcatgagaagtatgttttggtgccacatatttctcaatctgatgcctttttgtctttttttttttttgccatttgcatcctatttcatagtgccaaaatgaatttttgtatcttgtcttgtctttgtccattataaactggaggatcacagttaagccttccatgaattcatagtttggaatcatttaccttaccattattttggatttttttcttattacagtgtcactacactgtattcatgtgggggaacaaacatgtaggtgcttgaacatgccccacagacacagttgtagccctagtatttgtgacggtcattattgacacagtgcagactttgcagatggagcattatgctctcagaggactttaaaaatatgtatattaagcaattaactttctggagttggagttatcaaatcttgctgggaaattaacttccaagagctctgaattggatggaattccatctggcttcagagaacaatcagcctatatgaaacggagctttgaaatgtttttcttgtgcagaaatacgaactagaaagaaaagtgctgatctaatgctaagttttctctgtgtactgactcagttgccagaattataatgaaaactgtattttagtctaacaaatgtatagaattttttatgtaataaataaaattttataggaaagaa

SEQ ID NO: 184304 - DNA, 3088 bp, Homo sapiens
  Payload ID: 16291
  Gene Symbol: SLC44A1
  Gene Name: solute carrier family 44 (choline transporter), member 1
  Uniprot ID: Q8WWI5
  ENST ID: ENST00000374724
  CDS Start-End: 248-2212
agcagctgctgcagcaggagcagagcaggagacgcgtagccgccgtcgccgccgccgggggatgtggccggcgcctgcctctagccgcgccgcctcttgagtaccagccgccgctgcagccgccgccgccgcctagccgtgcggtgccaggccgcgccctccccgggcgcccgccggctcgcatgccgaggggctccggggcgtagctgcgcgcccggcgccgcctccgggctccttcggccccgccatgggctgctgcagctccgcctcctccgccgcgcagagctccaaacgagaatggaagccgctggaggaccgtagctgcacagacataccatggctgctgctcttcatcctcttctgcattgggatgggatttatttgtggcttttcaatagcaacaggtgcagcagcaagactagtgtcaggatacgacagctatggaaatatctgtgggcagaaaaatacaaagttggaagcaataccaaacagtggcatggaccacacccagcggaagtatgtattctttttggatccatgcaacctggacttgataaaccggaagattaagtctgtagcactgtgtgtagcagcgtgtccaaggcaagaactgaaaactctgagtgatgttcagaagtttgcagagataaatggttcagccctatgtagctacaacctaaagccttctgaatacactacatctccaaaatcttctgttctctgccccaaactaccagttccagcgagtgcacctattccattcttccatcgctgtgctcctgtgaacatttcctgctatgccaagtttgcagaggccctgatcacctttgtcagtgacaatagtgtcttacacaggctgattagtggagtaatgaccagcaaagaaattatattgggactttgcttgttatcactagttctatccatgattttgatggtgataatcaggtatatatcaagagtacttgtgtggatcttaacgattctggtcatactcggttcacttggaggcacaggtgtactatggtggctgtatgcaaagcaaagaaggtctcccaaagaaactgttactcctgagcagcttcagatagctgaagacaatcttcgggccctcctcatttatgccatttcagctacagtgttcacagtgatcttattcctgataatgttggttatgcgcaaacgtgttgctcttaccatcgccttgttccacgtagctggcaaggtcttcattcacttgccactgctagtcttccaacccttctggactttctttgctcttgtcttgttttgggtgtactggatcatgacacttctttttcttggcactaccggcagtcctgttcagaatgagcaaggctttgtggagttcaaaatttctgggcctctgcagtacatgtggtggtaccatgtggtgggcctgatttggatcagtgaatttattctagcatgtcagcagatgacagtggcaggagctgtggtaacatactattttactagggataaaaggaatttgccatttacacctattttggcatcagtaaatcgccttattcgttaccacctaggtacggtggcaaaaggatctttcattatcacattagtcaaaattccgcgaatgatccttatgtatattcacagtcagctcaaaggaaaggaaaatgcttgtgcacgatgtgtgctgaaatcttgcatttgttgcctttggtgtcttgaaaagtgcctaaattatttaaatcagaatgcatacacagccacagctatcaacagcaccaacttctgcacctcagcaaaggatgcctttgtcattctggtggagaatgctttgcgagtggctaccatcaacacagtaggagattttatgttattccttggcaaggtgctgatagtctgcagcacaggtttagctgggattatgctgctcaactaccagcaggactacacagtatgggtgctgcctctgatcatcgtctgcctctttgctttcctagtcgctcattgcttcctgtctatttatgaaatggtagtggatgtattattcttgtgttttgccattgatacaaaatacaatgatgggagccctggcagagaattctatatggataaagtgctgatggagtttgtggaaaacagtaggaaagcaatgaaagaagctggtaagggaggcgtcgctgattccagagagctaaagccgatgctgaagaaaaggtgactggtctcatgagccctgaagaatgaactcagaggaggttgtttacatgaggttctcccactcaccagctgttgagagtctgcgattatgaagagcaggatcttattacttcaatgaaagcatgtaacaagtttctcaaaccaccaacagccaagtggatttggtacagtgcggctgtctaataaataatcaaaagcatttgatagaaatctgtcttgcagcactgtcttcacatttaatgttgctttctcttctagtctcgggtatgtttaaatgattcccttttctcactctagcgccaatactggcctgaaggctagatccccagcgaaattcttgttcaggctgggtctgtcgactttgactctgctatttatagagccaatgtgggttaataactactatttattgagtgcccgttccatgccaagcattaggctgggtgctttacataagtttaatcctcacaatagccctgtaaggttgcacctattatctccactttgaccacgaagaaacggagactcagagagtttgtatcctatgtgtaagatcacacagttgtcagagtcaggattcaaatctagttctaactccaaagctctccacactaacattgttttgcttattattgctccaaagataattaccccaacaccttatcaatgctatacttcctctcataatggcagtgtaggtatgtgggaagtgtctgagatggaggaccagggagtctttagaggcgcaaaagaatcacagaattatcttctaaaaaaaaacacaatattctttgagatcaggagttgataaaatatggcccccagctatttttgtaaataaaggtttattgggaacacagccacacccaatccttca

SEQ ID NO: 184305 - DNA, 10433 bp, Homo sapiens
  Payload ID: 16291
  Gene Symbol: SLC44A1
  Gene Name: solute carrier family 44 (choline transporter), member 1
  Uniprot ID: Q8WWI5
  ENST ID: ENST00000470972
  CDS Start-End: 248-2221
agcagctgctgcagcaggagcagagcaggagacgcgtagccgccgtcgccgccgccgggggatgtggccggcgcctgcctctagccgcgccgcctcttgagtaccagccgccgctgcagccgccgccgccgcctagccgtgcggtgccaggccgcgccctccccgggcgcccgccggctcgcatgccgaggggctccggggcgtagctgcgcgcccggcgccgcctccgggctccttcggccccgccatgggctgctgcagctccgcctcctccgccgcgcagagctccaaacgagaatggaagccgctggaggaccgtagctgcacagacataccatggctgctgctcttcatcctcttctgcattgggatgggatttatttgtggcttttcaatagcaacaggtgcagcagcaagactagtgtcaggatacgacagctatggaaatatctgtgggcagaaaaatacaaagttggaagcaataccaaacagtggcatggaccacacccagcggaagtatgtattctttttggatccatgcaacctggacttgataaaccggaagattaagtctgtagcactgtgtgtagcagcgtgtccaaggcaagaactgaaaactctgagtgatgttcagaagtttgcagagataaatggttcagccctatgtagctacaacctaaagccttctgaatacactacatctccaaaatcttctgttctctgccccaaactaccagttccagcgagtgcacctattccattcttccatcgctgtgctcctgtgaacatttcctgctatgccaagtttgcagaggccctgatcacctttgtcagtgacaatagtgtcttacacaggctgattagtggagtaatgaccagcaaagaaattatattgggactttgcttgttatcactagttctatccatgattttgatggtgataatcaggtatatatcaagagtacttgtgtggatcttaacgattctggtcatactcggttcacttggaggcacaggtgtactatggtggctgtatgcaaagcaaagaaggtctcccaaagaaactgttactcctgagcagcttcagatagctgaagacaatcttcgggccctcctcatttatgccatttcagctacagtgttcacagtgatcttattcctgataatgttggttatgcgcaaacgtgttgctcttaccatcgccttgttccacgtagctggcaaggtcttcattcacttgccactgctagtcttccaacccttctggactttctttgctcttgtcttgttttgggtgtactggatcatgacacttctttttcttggcactaccggcagtcctgttcagaatgagcaaggctttgtggagttcaaaatttctgggcctctgcagtacatgtggtggtaccatgtggtgggcctgatttggatcagtgaatttattctagcatgtcagcagatgacagtggcaggagctgtggtaacatactattttactagggataaaaggaatttgccatttacacctattttggcatcagtaaatcgccttattcgttaccacctaggtacggtggcaaaaggatctttcattatcacattagtcaaaattccgcgaatgatccttatgtatattcacagtcagctcaaaggaaaggaaaatgcttgtgcacgatgtgtgctgaaatcttgcatttgttgcctttggtgtcttgaaaagtgcctaaattatttaaatcagaatgcatacacagccacagctatcaacagcaccaacttctgcacctcagcaaaggatgcctttgtcattctggtggagaatgctttgcgagtggctaccatcaacacagtaggagattttatgttattccttggcaaggtgctgatagtctgcagcacaggtttagctgggattatgctgctcaactaccagcaggactacacagtatgggtgctgcctctgatcatcgtctgcctctttgctttcctagtcgctcattgcttcctgtctatttatgaaatggtagtggatgtattattcttgtgttttgccattgatacaaaatacaatgatgggagccctggcagagaattctatatggataaagtgctgatggagtttgtggaaaacagtaggaaagcaatgaaagaagctggtaagggaggcgtcgctgattccagagagctaaagccgatggcttcgggagcaagttctgcttgaacctagccgacggttatggaaacccattgacattccaaaacaatatatacacacacacataaatcagccaaaatcagagaaaaggaacagggatttaataccttttttatgcttatttttgtcaaacatgtactcctttcatacgggtggcttttacaaggcaacttccgtcatttaatgttttcaactgtaattgtcttaatggaaatgttaaaattcatatctgattaacatttttaataacttagaggagattttaactttatttaaaaataggtaaaattattgtacctaattatgtctaaagtttattcaggggtaatttccctgatgtctgtataaaatcaagatcttattttactgatgcataagtcctagtgggtcaagactaggcatatgctttcagataaataaggaattactccaatcagttttccccaatcaaagaagccatgtcattttacttttagaaacatacaattgggcccaatatgggaattttcataatagttcatacatttgtcagccaacattaaaaggtaaccaactcctcaggtatttgtagtttaccctaacgcttctttaaaagaaagtaggtaaaaaaagaaaagggtagataatctttcgtatgcaaacttttcccttatattttgtctttctttcctttttgactttagtagcatcctccacacatttgtgtgcctgatttgaaaggaagctggggcacccagcgagtttagcctttaagtttctgtgtattgatttgcagattaagtaatgctgggaggaataaagaagggacagaaacatggaacataaagcattgaaaattccggtgcttgggcttcggcttcagagtaacgtcagtggcttagggttaaacggccattttattcaaatgcttgctatacaatctgaaaacacactggcaggtgctcctctccttggcaattcattgagtatccagagttctacgatgtttaactgaagaattggctaatgttttgatcctccagtgtgactgttgtttttgtttgggggtgggtttggggttttttgcttttttattcctgaagcttaccagatatgaatggctaatactccattgttctgcttgttgtaatggtgaatgctttaagaaaaaaaagtgtaatttgctaagaataattcatgatctgtttatgcgataactcctttttgttacaatttttttaaaaaaagctatttttgttaatgtaaagtaaatatttcagagcaaattttttaaacttattgcactaaatacaggctctgtacaaaaaaaaaaaaaaaaaaaaagcctcagcattttatcattccatggaaggagaatcttttgaaagaaagcattgcctcctaccagaactagacagtgaattagatcggtattatggaaatgcatacaagtaatgtcactagggcttaataagcagccgtttgctaatgtgcttcctttcaaagggttggacctttaaattgctgcaaaaggtaaattgtatttttttttaagtattggtgttctttactctagctaggctaaaatttgctaaatgccttggtttcttttaaaagttcatgtaatatttctgatttttcagaatatttgcaataagagtctggattttaaaaaacacatgcatacacacaattaagagctcatgtcttagcaagatctgggaaaccaacattgcgagagtagctattttgaaagaataattctccagaagttaacatctaatatctagtatcaccaaacagtatcgctgttctcttttattcatttgaaatgaatataattatataactaacaattgtccaaatagatgagagagcaaatcatgtgagaaaattcagaataccatctgtttcatagccgcacagattttggactttcacaaacattgggaactaaatttagaattggcaaaagtctagaagatgggtatcaaaacagaagacattccaggagctagcaattttaagaggtgtccctccaaagtgacctgatggaagtcctgaacttggaaattaggttctactcacttggacatccctgcatcatggactgttgctgctccctgttccatatgctcgcaatctcagctatttggaagctaccaggaatgctttctaattatcatttgcaactagaactgtaatcagaaagaaattttgtatttttgtataacttgattgtgtgccattttatataacaggtcctgttttacaaataaattttgttttactaacattgtgtttagaaattataatctatgtgtaaccatgtcatttgagttgcaaattaattgccaggctgttttccttaagtaaattcatgtgccgtgtagaaatatgcagatatgcattacacaggcacacacagagagatatttaatatgtggaatatcactctttcatgagctttattccttgattaatttgataaagcctcacagaggattttaagcaatatttaaatgtgttgaggttatgtttggatattcctgctgcctcttttcattcatttcaagtcattcttcagctagctatgggctgccttattgctattcgctcactgcttccatcttctgcccaagtgagaagaatagatgaagaacagaaatttctctgtgaaatgtggatacccgaataatttcataaatcattgattctatgtggtggtttttgtcttcttctgtggtgaatcttcaaaactgtattcaggactcatatttctagagttttaattggggtcctctattgtcaattgtagtagtgaccagagtatcgtggtttttgccatcagataattaaggctctggtgcataatttagactttctaagctcctgcctgaagaataaggtcttccataatatggaagagaaaagttatatttcagtgtaaatccaagagacccatcttctatgagaggcttaccagtgcattagtaataaaacattagcaatttagctagagcactgagattgtataatccttgcatggatgagcagagctcaaagccagttgttcctttaaagcatttaatgcaatggctaatgtttaggattaaagtttttattttatcctataagataattaagtcctaagtcactacaacttaagtagcttaactgtatgttggtacccaaactttttctataatggttaaggaggaggcacttactgagtttattttaaagttatgctagaaatgtttttcttttgtagagatgctctctctctctctctctttttttttttttttttttttttttttccgtgagggcattaggctgctgattgtaagttatttccaataccactgatcttggtatctgccaagggcttccttgccttccctgggcagttttaggatttcaccctagtagggggtatgaggcactgacccctttattctggacccaaactgctttagagcagagttaatacctctccctccctcttcaaaacagctacaggaactgcaggcaccacatatgtgtgaggccacatcactgcccctgaggcttcaactatttccaccatgcactattactagctactaacagccattttaagagatctcctagcctgcaaggtagaattctgggatcagttccaaaaccagaactgccagtaatggtgacttgaatattttatttgatttttggtcagtaaccttgtcatttaaattggactttccaatagccttaacatggcctctgagaagtttcctccagaaaggtctttaagctttcgcttttcaataagtaagttctttactgcttttctactgctactttaaaaaaaaaacaacaacaacaaataaaactctcagagtctggaggcttatcagtgcacctgccacagttaatttctgtattcttttcatacattccatctgacacatacgagtgcactataatggcttgcctagaactggtaagaagtggtctgtgaatgtatattgaaaaaatgtgggttcataagtaaaagcgtaacgcagatatttgtgtattctgtattcacagcgtaggctgccttttgctttaaatgcatattcatgtatctttgtgtgctaagaatgcatgttagcccttttgaaaagtaggcactattcatacacagtagcttcttggaattaactcatctttgttaacttagtggcacatagtccaaatttttaaaaagcaagacccttgaatatgccaagagaaaatctaaagctagcaaacttaaaaaacaaaacaaaaattacacgtcgtgtacagttatgaatttagaatagcacactttttccattcagatttcatacatttgagccaaattcttatactccatgttttaattttaaaaggataattttaatccaagatttaaatctttgaaaatatctttcttatagaaaactttaatgcagtttttaaacttactgatttctgtggaaaacctttcttttctatagaaatactgtagtgccctttcttcccatcttgattttgtacatgtaaagacaaatgatgattcagtttcaatattgcatgaacaattgccactttgtaaattatatggacagaatgtgttctaaggaaattcgttagtaaatttgtgaaaaacatgtgagattgttcgagacctattaggctattcttcagttttgatgctcagttttacaacttaaatgattttctccaggacacggagctcagaataataaagcttttattaatggtctagtgaagatctagttgaacatggaaacattgtaatttacaaatgtctcagaaatttctcacttttatttgctaagacctgaatttaatatttgatattcaaaaacaagttattttgaagagacaatgggtctctttgagcttaagaaagctatggactatctttccttcaaatgcacatcacatgtctgtgaacactcaaaatgctcatagaatttcagggccctcagacggccagcttccacccctgtaccccctcaggggctaatgaacccaagtcaaaaggctgctctaaagttgttctgataatgtgttttgaaatgaggaagtgattaggcctccactagagatacttttgagatgatgcttaccaccttctgacctggaatcatttttataacttaaagactttatgtaatttagtagcaggttagggaatagaaaccacactaatctgaaggaataacaagatgatcaacactgaatcttcatgacagtaagattttctttccttggaggtatgagggtgtgtatgtgtgtgtgtgtgtgtgtgtgtttgtgtgtgtgtgtgtgtgtcctggcggttatttgggggcaaggtaccagattatttgcagtgagccaaaaaaaaaaaaatatccaagaagaaataaatagggaatccttgtaattaatccatctaccaaaacacttgattctttttattgtagctcagctatgacattatgacattatgtggcttagtgttatcagtatactactgtcttaaaatatatttgtcaacatgtccagttccaacaacagttgaagatgatgataaattagcaaactcaagggtagtccatagttggcaaaaaataaatttggtagaaagttggaggagcagatgctgaaggtagaaatgcaaaagatgttttttcttcctgcataaatcacggaggtgtgttctgttttagtgttttccagtcacccactagagcagcttcagattcctctgccaatagaactccacccccagtcccttacctactctatcttctttagggaagcatgtggatttcttcacatctgcaccttactattaggtaagggtgctgcatctacatggaaggctccctgggcccttgaaaaagcaggcagaaactcatcaaggggtttgaagttcttgtgaaatttgatcccagtggctcatgacttatagtcaggcatcaaaccatttcctactttttcaggctgaagaaagtggaaatataactggctggtgaagaaaggagaaaagtcagccccctaccccaccccacactcctagaaaagtttgggggttttttttgtttgtttttggtgtttttttgagacggagtctcgctctatcgccagcttagagtgcagtggctcaatcttagctcactgcaacctccacctcccaggttcaagtgattctcctgcatcagcctcctgagtagctgggaccacaggcatgtgccaccacacccagctaatttttgtatttttagtagagacggggtttcaccacgttggccaggccaatctcgaactcctgacctcaggtgatccacccgcctcagcctcccaaagtgctgggattacaggcatgagccaccgcgcccggcctagaagagttttaatgaaccttccacagtagtaaatgcagagaccactggtggaaattcccatgttggatagaaaagggcgtaagtccagtctaagtatctaaatgtgatatgcccttttgtcacagaagtgtaagacttaaagggaatattctgaccttcgtgtatgaatctgatccacccatcctgtcagctaggattataatttgaactgtcgtttcaggagcatgtgttaaatcatatgagtaaaaaaaaagtagacattgaaaagaagacttgggaataattgggcagatagaatgggttccatggatcattctagttgccactagaaaatgtgagctccttcttcatttaccatgttgataatccggtggtgactttttttttttttttgtaaattgtattagataccccacaggaatgtgacaataataggatagctttgggggctggtgatttgaaacagggactattaagtagattttcccccatcctctaggttcctgtagtctgtgctcagaacttggtttttggcccctattgtttttgcctattttgattttcagagatgatcacatggggacagttaacttttcttctgctgtgttgccttaatgctactagattgtgttgtgttgttggagttttctgacttcttccctataaaaagatactgagagctccataatgaaagaagttgttatactttctcagaatattctggaccactgaatgcacttctaatagagctttaatctaaagaagttagttcagtggttattaactgattttattacaggagaaaaaaactttaacaaaaaggcagggagaaaagtgtgaagggcatcaagcaaaatgacaggggcttcaaaaaacaaccaaagacaaaaccctatcttctgaagaccaaaggtccaactttacttactggctggcacagcctttctgaactccttgagtttagaatagagctcctagaataataaggcggccaaatttaaagatcagtcaatacagtagggacctgctattgatctctcaggcactgagtcttcacatccagtgtcaagcccagcccagcatatggggtgatatgagcagaaaacacacatcggtgtgtcttgatttctcgcagctgtgtaatgtggcatgagaagtatgttttggtgccacatatttctcaatctgatgcctttttgtctttttttttttttgccatttgcatcctatttcatagtgccaaaatgaatttttgtatcttgtcttgtctttgtccattataaactggaggatcacagttaagccttccatgaattcatagtttggaatcatttaccttaccattattttggatttttttcttattacagtgtcactacactgtattcatgtgggggaacaaacatgtaggtgcttgaacatgccccacagacacagttgtagccctagtatttgtgacggtcattattgacacagtgcagactttgcagatggagcattatgctctcagaggactttaaaaatatgtatattaagcaattaactttctggagttggagttatcaaatcttgctgggaaattaacttccaagagctctgaattggatggaattccatctggcttcagagaacaatcagcctatatgaaacggagctttgaaatgtttttcttgtgcagaaatacgaactagaaagaaaagtgctgatctaatgctaagttttctctgtgtactgactcagttgccagaattataatgaaaactgtattttagtctaacaaatgtatagaattttttatgtaataaataaaattttataggaaagaa

SEQ ID NO: 184306 - DNA, 3671 bp, Homo sapiens
  Payload ID: 16292
  Gene Symbol: SLC44A2
  Gene Name: solute carrier family 44 (choline transporter), member 2
  Uniprot ID: Q8IWA5
  ENST ID: ENST00000335757
  CDS Start-End: 377-2497
ctcagtttccacacctgcaaaacgaagccacggaaacgccctttcagggtggccaggggttctaggcggcatcgcccggtggcagggtgttcccagggtgaagccgcagggttcccgggtgggggcggggaaggctaaatgcggccggccggtgagtggcgggagcagctgcagccccgcccgcgccctcccgggtcccttagtctgggcagctgcccagctcgggccggtctgaccggtttgggccgccccgcctggcgctgtgctgggaggagccgccgccagtcgcgcggtcagtgcctccctccagactcgggagggtcgagggggcgcgggagagagcgcgggcggccgccggggctggtcgcctgcagggatgggggacgagcggccccactactacgggaaacacggaacgccacagaagtatgatcccactttcaaaggacccatttacaataggggctgcacggatatcatatgctgtgtgttcctgctcctggccattgtgggctacgtggctgtaggcatcatagcctggactcatggagaccctcgaaaggtgatctaccccactgacagccggggcgagttctgcgggcagaagggcacaaaaaacgagaacaaaccctatctgttttatttcaacattgtgaaatgtgccagccccctggttctgctggaattccaatgtcccactccccagatctgcgtggaaaaatgccccgaccgctacctcacgtacctgaatgctcgcagctcccgggactttgagtactataagcagttctgtgttcctggcttcaagaacaataaaggagtggctgaggtgcttcaagatggtgactgccctgctgtcctcatccccagcaaacccttggcccggagatgcttccccgctatccacgcctacaagggtgtcctgatggtgggcaatgagacgacctatgaggatgggcatggctcccggaaaaacatcacagacctggtggagggcgccaagaaagccaatggagtcctagaggcgcggcaactcgccatgcgcatatttgaagattacaccgtctcttggtactggattatcataggcctggtcattgccatggcgatgagcctcctgttcatcatcctgcttcgcttcctggctggtattatggtctgggtgatgatcatcatggtgattctggtgctgggctacggaatatttcactgctacatggagtactcccgactgcgtggtgaggccggctctgatgtctctttggtggacctcggctttcagacggatttccgggtgtacctgcacttacggcagacctggttggcctttatgatcattctgagtatccttgaagtcattatcatcttgctgctcatctttctccggaagagaattctcatcgcgattgcactcatcaaagaagccagcagggctgtgggatacgtcatgtgctccttgctctacccactggtcaccttcttcttgctgtgcctctgcatcgcctactgggccagcactgctgtcttcctgtccacttccaacgaagcggtctataagatctttgatgacagcccctgcccatttactgcgaaaacctgcaacccagagaccttcccctcctccaatgagtcccgccaatgccccaatgcccgttgccagttcgccttctacggtggtgagtcgggctaccaccgggccctgctgggcctgcagatcttcaatgccttcatgttcttctggttggccaacttcgtgctggcgctgggccaggtcacgctggccggggcctttgcctcctactactgggccctgcgcaagccggacgacctgccggccttcccgctcttctctgcctttggccgggcgctcaggtaccacacaggctccctggcctttggcgcgctcatcctggccattgtgcagatcatccgtgtgatactcgagtacctggatcagcggctgaaagctgcagagaacaagtttgccaagtgcctcatgacctgtctcaaatgctgcttctggtgcctggagaagttcatcaaattccttaataggaatgcctacatcatgattgccatctacggcaccaatttctgcacctcggccaggaatgccttcttcctgctcatgagaaacatcatcagagtggctgtcctggataaagttactgacttcctcttcctgttgggcaaacttctgatcgttggtagtgtggggatcctggctttcttcttcttcacccaccgtatcaggatcgtgcaggatacagcaccacccctcaattattactgggttcctatactgacggtgatcgttggctcctacttgattgcacacggtttcttcagcgtctatggcatgtgtgtggacacgctgttcctctgcttcttggaggacctggagaggaatgacggctcggccgagaggccttacttcatgtcttccaccctcaagaaactcttgaacaagaccaacaagaaggcagcggagtcctgaaggccccgtgctccccacctctcaaggagtctcatgccgcagggtgctcagtagctgggtctgttcccccagccccttgggctcacctgaagtcctatcactgccgctctgcccctccccatgagccagatcccaccagtttctggacgtggagagtctggggcatctccttcttatgccaaggggcgcttggagttttcatggctgcccctccagactgcgagaaacaagtaaaaacccattggggcctcttgatgtctgggatggcacgtggcccgacctccacaagctccctcatgcttcctgtcccccgcttacacgacaacgggccagaccacaggaaggacggtgtttgtgtctgagggagctgctggccacagtgaacacccacgtttattcctgcctgctccggccaggactgaaccccttctccacacctgaacagttggctcaagggccaccagaagcatttctttattattattattttttaacctggacatgcattaaagggtctattagctttctttccgtctgtctcaacagctgagatggggccgccaaggagtgccttccttttgctccctcctagctgggagtgacgggtgggagtgtgtgtgcccaggtgggggtgtctcctggctgggaaggagggaaagggagggagagttttgcgggggttggcagtggagagcaggctggagaggagatggctaatagctgtttaatggaaacctgctgggctggagggagttaggctgaatttcccgacttcctctgccagttattgacacagctctctttgtaagagaggaaagaaactaaacccacccaagggatgatgtcagggggagaggtggagggcagatgtcctgggcaaaccgggcccctctgcccacacacctcacttgatccttttgccaaacttgtcaaactcaggggaactggcttcccagttgcccctttgccatattccaagtccccctcagacttcatgtctctgctcatcagcactgtcccaggatcctggagagggagaactcctggccccaggggaaagaggggggggtctcccgtttcctgtgcctgcaccagccctgcccccattgcgtctgcacacccctgcgtgtaactgcattccaaccactaataaagtgcctattgtacaggtcca

SEQ ID NO: 184307 - DNA, 3301 bp, Homo sapiens
  Payload ID: 16292
  Gene Symbol: SLC44A2
  Gene Name: solute carrier family 44 (choline transporter), member 2
  Uniprot ID: Q8IWA5
  ENST ID: ENST00000407327
  CDS Start-End: 22-2136
gctccccgccccgccgcggccatggaggacgagcggaaaaacggagcctacggaacgccacagaagtatgatcccactttcaaaggacccatttacaataggggctgcacggatatcatatgctgtgtgttcctgctcctggccattgtgggctacgtggctgtaggcatcatagcctggactcatggagaccctcgaaaggtgatctaccccactgacagccggggcgagttctgcgggcagaagggcacaaaaaacgagaacaaaccctatctgttttatttcaacattgtgaaatgtgccagccccctggttctgctggaattccaatgtcccactccccagatctgcgtggaaaaatgccccgaccgctacctcacgtacctgaatgctcgcagctcccgggactttgagtactataagcagttctgtgttcctggcttcaagaacaataaaggagtggctgaggtgcttcaagatggtgactgccctgctgtcctcatccccagcaaacccttggcccggagatgcttccccgctatccacgcctacaagggtgtcctgatggtgggcaatgagacgacctatgaggatgggcatggctcccggaaaaacatcacagacctggtggagggcgccaagaaagccaatggagtcctagaggcgcggcaactcgccatgcgcatatttgaagattacaccgtctcttggtactggattatcataggcctggtcattgccatggcgatgagcctcctgttcatcatcctgcttcgcttcctggctggtattatggtctgggtgatgatcatcatggtgattctggtgctgggctacggaatatttcactgctacatggagtactcccgactgcgtggtgaggccggctctgatgtctctttggtggacctcggctttcagacggatttccgggtgtacctgcacttacggcagacctggttggcctttatgatcattctgagtatccttgaagtcattatcatcttgctgctcatctttctccggaagagaattctcatcgcgattgcactcatcaaagaagccagcagggctgtgggatacgtcatgtgctccttgctctacccactggtcaccttcttcttgctgtgcctctgcatcgcctactgggccagcactgctgtcttcctgtccacttccaacgaagcggtctataagatctttgatgacagcccctgcccatttactgcgaaaacctgcaacccagagaccttcccctcctccaatgagtcccgccaatgccccaatgcccgttgccagttcgccttctacggtggtgagtcgggctaccaccgggccctgctgggcctgcagatcttcaatgccttcatgttcttctggttggccaacttcgtgctggcgctgggccaggtcacgctggccggggcctttgcctcctactactgggccctgcgcaagccggacgacctgccggccttcccgctcttctctgcctttggccgggcgctcaggtaccacacaggctccctggcctttggcgcgctcatcctggccattgtgcagatcatccgtgtgatactcgagtacctggatcagcggctgaaagctgcagagaacaagtttgccaagtgcctcatgacctgtctcaaatgctgcttctggtgcctggagaagttcatcaaattccttaataggaatgcctacatcatgattgccatctacggcaccaatttctgcacctcggccaggaatgccttcttcctgctcatgagaaacatcatcagagtggctgtcctggataaagttactgacttcctcttcctgttgggcaaacttctgatcgttggtagtgtggggatcctggctttcttcttcttcacccaccgtatcaggatcgtgcaggatacagcaccacccctcaattattactgggttcctatactgacggtgatcgttggctcctacttgattgcacacggtttcttcagcgtctatggcatgtgtgtggacacgctgttcctctgcttcttggaggacctggagaggaatgacggctcggccgagaggccttacttcatgtcttccaccctcaagaaactcttgaacaagaccaacaagaaggcagcggagtcctgaaggccccgtgctccccacctctcaaggagtctcatgccgcagggtgctcagtagctgggtctgttcccccagccccttgggctcacctgaagtcctatcactgccgctctgcccctccccatgagccagatcccaccagtttctggacgtggagagtctggggcatctccttcttatgccaaggggcgcttggagttttcatggctgcccctccagactgcgagaaacaagtaaaaacccattggggcctcttgatgtctgggatggcacgtggcccgacctccacaagctccctcatgcttcctgtcccccgcttacacgacaacgggccagaccacaggaaggacggtgtttgtgtctgagggagctgctggccacagtgaacacccacgtttattcctgcctgctccggccaggactgaaccccttctccacacctgaacagttggctcaagggccaccagaagcatttctttattattattattttttaacctggacatgcattaaagggtctattagctttctttccgtctgtctcaacagctgagatggggccgccaaggagtgccttccttttgctccctcctagctgggagtgacgggtgggagtgtgtgtgcccaggtgggggtgtctcctggctgggaaggagggaaagggagggagagttttgcgggggttggcagtggagagcaggctggagaggagatggctaatagctgtttaatggaaacctgctgggctggagggagttaggctgaatttcccgacttcctctgccagttattgacacagctctctttgtaagagaggaaagaaactaaacccacccaagggatgatgtcagggggagaggtggagggcagatgtcctgggcaaaccgggcccctctgcccacacacctcacttgatccttttgccaaacttgtcaaactcaggggaactggcttcccagttgcccctttgccatattccaagtccccctcagacttcatgtctctgctcatcagcactgtcccaggatcctggagagggagaactcctggccccaggggaaagaggggggggtctcccgtttcctgtgcctgcaccagccctgcccccattgcgtctgcacacccctgcgtgtaactgcattccaaccactaataaagtgcctattgt

SEQ ID NO: 184308 - DNA, 574 bp, Homo sapiens
  Payload ID: 16292
  Gene Symbol: SLC44A2
  Gene Name: solute carrier family 44 (choline transporter), member 2
  ENST ID: ENST00000590857
  CDS Start-End: 543-574
gtgctgggaggagccgccgccagtcgcgcggaacgccacagaagtatgatcccactttcaaaggacccatttacaataggggctgcacggatatcatatgctgtgtgttcctgctcctggccattgtgggctacgtggctgtaggcatcatagcctggactcatggagaccctcgaaaggtgatctaccccactgacagccggggcgagttctgcgggcagaagggcacaaaaaacgagaacaaaccctatctgttttatttcaacattgtgaaatgtgccagccccctggttctgctggaattccaatgtcccactccccagatctgcgtggaaaaatgccccgaccgctacctcacgtacctgaatgctcgcagctcccgggactttgagtactataagcagttctgtgttcctggcttcaagaacaataaaggagtggctgaggtgcttcaagatggtgactgccctgctgtcctcatccccagcaaacccttggcccggagatgcttccccgctatccacgcctacaagggtgtcctgatggtgggcaatgagacgacctatgaggatgg

SEQ ID NO: 184309 - DNA, 602 bp, Homo sapiens
  Payload ID: 16292
  Gene Symbol: SLC44A2
  Gene Name: solute carrier family 44 (choline transporter), member 2
  ENST ID: ENST00000591194
  CDS Start-End: 1-374
ctgcagagaacaagtttgccaagtgcctcatgacctgtctcaaatgctgcttctggtgcctggagaagttcatcaaattccttaataggaatgcctacatcatgattgccatctacggcaccaatttctgcacctcggccaggaatgccttcttcctgctcatgagaaacatcatcagggatcctggctttcttcttcttcacccaccgtatcaggatcgtgcaggatacagcaccacccctcaattattactgggttcctatactgacggtgatcgttggctcctacttgattgcacacggtttcttcagcgtctatggcatgtgtgtggacacgctgttcctctgcttcttggaggacctggagaggaatgacggctcggccgagaggccttacttcatgtcttccaccctcaagaaactcttgaacaagaccaacaagaaggcagcggagtcctgaaggccccgtgctccccacctctcaaggagtctcatgccgcagggtgctcagtagctgggtctgttcccccagccccttgggctcacctgaagtcctatcactgccgctctgcccctccccatgagccagatcccaccagtttc

SEQ ID NO: 184310 - DNA, 789 bp, Homo sapiens
  Payload ID: 16292
  Gene Symbol: SLC44A2
  Gene Name: solute carrier family 44 (choline transporter), member 2
  ENST ID: ENST00000592293
  CDS Start-End: 41-169
agagagcgcgggcggccgccggggctggtcgcctgcagggatgggggacgagcggccccactactacgggaaacacggaacgccacagaagtatgatcccactttcaaaggacccatttacaatagcctggactcatggagaccctcgaaaggtgatctaccccactgacagccggggcgagttctgcgggcagaagggcacaaaaaacgagaacaaaccctatctgttttatttcaacattgtgaaatgtgccagccccctggttctgctggaattccaatgtcccactccccagatctgcgtggaaaaatgccccgaccgctacctcacgtacctgaatgctcgcagctcccgggactttgagtactataagcagttctgtgttcctggcttcaagaacaataaaggagtggctgaggtgcttcaagatggtgactgccctgctgtcctcatccccagcaaacccttggcccggagatgcttccccgctatccacgcctacaagggtgtcctgatggtgggcaatgagacgacctatgaggatgggcatggctcccggaaaaacatcacagacctggtggagggcgccaagaaagccaatggagtcctagaggcgcggcaactcgccatgcgcatatttgaagattacaccgtctcttggtactggattatcataggcctggtcattgccatggcgatgagcctcctgttcatcatcctgcttcgcttcctggctggtattatggtctgggtgatgatcatcatggtgattctggtgctgggctacg

SEQ ID NO: 184311 - DNA, 3784 bp, Homo sapiens
  Payload ID: 16292
  Gene Symbol: SLC44A2
  Gene Name: solute carrier family 44 (choline transporter), member 2
  Uniprot ID: Q8IWA5
  ENST ID: ENST00000586078
  CDS Start-End: 110-2245
gggaggagccgccgccagtcgcgcggtcagtgcctccctccagactcgggagggtcgagggggcgcgggagagagcgcgggcggccgccggggctggtcgcctgcagggatgggggacgagcggccccactactacgggaaacacggaacgccacagaagtatgatcccactttcaaaggacccatttacaataggggctgcacggatatcatatgctgtgtgttcctgctcctggccattgtgggctacgtggctgtaggcatcatagcctggactcatggagaccctcgaaaggtgatctaccccactgacagccggggcgagttctgcgggcagaagggcacaaaaaacgagaacaaaccctatctgttttatttcaacattgtgaaatgtgccagccccctggttctgctggaattccaatgtcccactccccagatctgcgtggaaaaatgccccgaccgctacctcacgtacctgaatgctcgcagctcccgggactttgagtactataagcagttctgtgttcctggcttcaagaacaataaaggagtggctgaggtgcttcaagatggtgactgccctgctgtcctcatccccagcaaacccttggcccggagatgcttccccgctatccacgcctacaagggtgtcctgatggtgggcaatgagacgacctatgaggatgggcatggctcccggaaaaacatcacagacctggtggagggcgccaagaaagccaatggagtcctagaggcgcggcaactcgccatgcgcatatttgaagattacaccgtctcttggtactggattatcataggcctggtcattgccatggcgatgagcctcctgttcatcatcctgcttcgcttcctggctggtattatggtctgggtgatgatcatcatggtgattctggtgctgggctacggaatatttcactgctacatggagtactcccgactgcgtggtgaggccggctctgatgtctctttggtggacctcggctttcagacggatttccgggtgtacctgcacttacggcagacctggttggcctttatgatcattctgagtatccttgaagtcattatcatcttgctgctcatctttctccggaagagaattctcatcgcgattgcactcatcaaagaagccagcagggctgtgggatacgtcatgtgctccttgctctacccactggtcaccttcttcttgctgtgcctctgcatcgcctactgggccagcactgctgtcttcctgtccacttccaacgaagcggtctataagatctttgatgacagcccctgcccatttactgcgaaaacctgcaacccagagaccttcccctcctccaatgagtcccgccaatgccccaatgcccgttgccagttcgccttctacggtggtgagtcgggctaccaccgggccctgctgggcctgcagatcttcaatgccttcatgttcttctggttggccaacttcgtgctggcgctgggccaggtcacgctggccggggcctttgcctcctactactgggccctgcgcaagccggacgacctgccggccttcccgctcttctctgcctttggccgggcgctcaggtaccacacaggctccctggcctttggcgcgctcatcctggccattgtgcagatcatccgtgtgatactcgagtacctggatcagcggctgaaagctgcagagaacaagtttgccaagtgcctcatgacctgtctcaaatgctgcttctggtgcctggagaagttcatcaaattccttaataggaatgcctacatcatgattgccatctacggcaccaatttctgcacctcggccaggaatgccttcttcctgctcatgagaaacatcatcagagtggctgtcctggataaagttactgacttcctcttcctgttgggcaaacttctgatcgttggtagtgtggggatcctggctttcttcttcttcacccaccgtatcaggatcgtgcaggatacagcaccacccctcaattattactgggttcctatactgacggtgatcgttggctcctacttgattgcacacggtttcttcagcgtctatggcatgtgtgtggacacgctgttcctctgcttctgtgaggacctggaaaggaatgacggctctcaggagcgaccctacttcatgtcgcccgagctgagagacatcctgttgaaggggagtgcggaggaggggaagcgggcagaagccgaggagtagagagtgagggagactggcgtgggggccaggtttcctccatgtagactgggggtgcatgaagcgggggggttcctggcctgcgagtgtggggatcctgtgtgtccctcggagcccactacagtctgcccctctctggtcccagtgtgtctgctttctaaccctctgaggcttctctgtgaccctcatccacctaccctgtccttgaggcccctgcccgtgggctcccctcatgcctcctgctctgggacctctctccacagtggaggacctggagaggaatgacggctcggccgagaggccttacttcatgtcttccaccctcaagaaactcttgaacaagaccaacaagaaggcagcggagtcctgaaggccccgtgctccccacctctcaaggagtctcatgccgcagggtgctcagtagctgggtctgttcccccagccccttgggctcacctgaagtcctatcactgccgctctgcccctccccatgagccagatcccaccagtttctggacgtggagagtctggggcatctccttcttatgccaaggggcgcttggagttttcatggctgcccctccagactgcgagaaacaagtaaaaacccattggggcctcttgatgtctgggatggcacgtggcccgacctccacaagctccctcatgcttcctgtcccccgcttacacgacaacgggccagaccacaggaaggacggtgtttgtgtctgagggagctgctggccacagtgaacacccacgtttattcctgcctgctccggccaggactgaaccccttctccacacctgaacagttggctcaagggccaccagaagcatttctttattattattattttttaacctggacatgcattaaagggtctattagctttctttccgtctgtctcaacagctgagatggggccgccaaggagtgccttccttttgctccctcctagctgggagtgacgggtgggagtgtgtgtgcccaggtgggggtgtctcctggctgggaaggagggaaagggagggagagttttgcgggggttggcagtggagagcaggctggagaggagatggctaatagctgtttaatggaaacctgctgggctggagggagttaggctgaatttcccgacttcctctgccagttattgacacagctctctttgtaagagaggaaagaaactaaacccacccaagggatgatgtcagggggagaggtggagggcagatgtcctgggcaaaccgggcccctctgcccacacacctcacttgatccttttgccaaacttgtcaaactcaggggaactggcttcccagttgcccctttgccatattccaagtccccctcagacttcatgtctctgctcatcagcactgtcccaggatcctggagagggagaactcctggccccaggggaaagaggggggggtctcccgtttcctgtgcctgcaccagccctgcccccattgcgtctgcacacccctgcgtgtaactgcattccaaccactaataaagtgcctattgtacaggtc

SEQ ID NO: 184312 - DNA, 553 bp, Homo sapiens
  Payload ID: 16292
  Gene Symbol: SLC44A2
  Gene Name: solute carrier family 44 (choline transporter), member 2
  ENST ID: ENST00000588688
  CDS Start-End: 115-553
gtgctgggaggagccgccgccagtcgcgcggtcagtgcctccctccagactcgggagggtcgagggggcgcgggagagagcgcgggcggccgccggggctggtcgcctgcagggatgggggacgagcggccccactactacgggaaacacggaacgccacagaagtatgatcccactttcaaaggacccatttacaataggaacaaaccctatctgttttatttcaacattgtgaaatgtgccagccccctggttctgctggaattccaatgtcccactccccagatctgcgtggaaaaatgccccgaccgctacctcacgtacctgaatgctcgcagctcccgggactttgagtactataagcagttctgtgttcctggcttcaagaacaataaaggagtggctgaggtgcttcaagatggtgactgccctgctgtcctcatccccagcaaacccttggcccggagatgcttccccgctatccacgcctacaagggtgtcctgatggtgggcaatgagacgacctatgaggatgggcatggctcccggaaaa

SEQ ID NO: 184313 - DNA, 589 bp, Homo sapiens
  Payload ID: 16292
  Gene Symbol: SLC44A2
  Gene Name: solute carrier family 44 (choline transporter), member 2
  ENST ID: ENST00000588409
  CDS Start-End: 41-328
agagagcgcgggcggccgccggggctggtcgcctgcagggatgggggacgagcggccccactactacgggaaacacggaacgccacagaagtatgatcccactttcaaaggacccatttacaataggggctgcacggatatcatatgctgtgtgttcctgctcctggccattgtgggctacgtggctgtaggcatcatagcctggactcatggagaccctcgaaaggtgatctaccccactgacagccggggcgagttctgcgggcagaagggcacaaaaaacgagaatatttcactgctacatggagtactcccgactgcgtggtgaggccggctctgatgtctctttggtggacctcggctttcagacggatttccgggtgtacctgcacttacggcagacctggttggcctttatgatcattctgagtatccttgaagtcattatcatcttgctgctcatctttctccggaagagaattctcatcgcgattgcactcatcaaagaagccagcagggctgtgggatacgtcatgtgctccttgctctacccactggtcaccttcttcttgctgtgcctctgcatcgc

SEQ ID NO: 184314 - DNA, 586 bp, Homo sapiens
  Payload ID: 16292
  Gene Symbol: SLC44A2
  Gene Name: solute carrier family 44 (choline transporter), member 2
  ENST ID: ENST00000590382
  CDS Start-End: 75-586
agcccgcggagcctcccgcccgcccgggctggggtcgcgctggctcggactccgctccccgccccgccgcggccatggaggacgagcggaaaaacggagcctacggaacgccacagaagtatgatcccactttcaaaggacccatttacaataggaacaaaccctatctgttttatttcaacattgtgaaatgtgccagccccctggttctgctggaattccaatgtcccactccccagatctgcgtggaaaaatgccccgaccgctacctcacgtacctgaatgctcgcagctcccgggactttgagtactataagcagttctgtgttcctggcttcaagaacaataaaggagtggctgaggtgcttcaagatggtgactgccctgctgtcctcatccccagcaaacccttggcccggagatgcttccccgctatccacgcctacaagggtgtcctgatggtgggcaatgagacgacctatgaggatgggcatggctcccggaaaaacatcacagacctggtggagggcgccaagaaagccaatggagtcctagaggcgcggcaactcgccatgcgcatatttga

SEQ ID NO: 184315 - DNA, 1300 bp, Homo sapiens
  Payload ID: 16292
  Gene Symbol: SLC44A2
  Gene Name: solute carrier family 44 (choline transporter), member 2
  ENST ID: ENST00000586549
  CDS Start-End: 1-445
catgattgccatctacggcaccaatttctgcacctcggccaggaatgccttcttcctgctcatgagaaacatcatcagagtggctgtcctggataaagttactgacttcctcttcctgttgggcaaacttctgatcgttggtagtgtggggatcctggctttcttcttcttcacccaccgtatcaggatcgtgcaggatacagcaccacccctcaattattactgggttcctatactgacggtgatcgttggctcctacttgattgcacacggtttcttcagcgtctatggcatgtgtgtggacacgctgttcctctgcttctgtgaggacctggaaaggaatgacggctctcaggagcgaccctacttcatgtcgcccgagctgagagacatcctgttgaaggggagtgcggaggaggggaagcgggcagaagccgaggagtagagatggaggacctggagaggaatgacggctcggccgagaggccttacttcatgtcttccaccctcaagaaactcttgaacaagaccaacaagaaggcagcggagtcctgaaggccccgtgctccccacctctcaaggagtctcatgccgcagggtgctcagtagctgggtctgttcccccagccccttgggctcacctgaagtcctatcactgccgctctgcccctccccatgagccagatcccaccagtttctggacgtggagagtctggggcatctccttcttatgccaaggggcgcttggagttttcatggctgcccctccagactgcgagaaacaagtaaaaacccattggggcctcttgatgtctgggatggcacgtggcccgacctccacaagctccctcatgcttcctgtcccccgcttacacgacaacgggccagaccacaggaaggacggtgtttgtgtctgagggagctgctggccacagtgaacacccacgtttattcctgcctgctccggccaggactgaaccccttctccacacctgaacagttggctcaagggccaccagaagcatttctttattattattattttttaacctggacatgcattaaagggtctattagctttctttccgtctgtctcaacagctgagatggggccgccaaggagtgccttccttttgctccctcctagctgggagtgacgggtgggagtgtgtgtgcccaggtgggggtgtctcctggctgggaaggagggaaagggagggagagttttgcgggggttggcagtggagagcaggctggagaggagatggctaatagctgtttaatggaaacctgctgggct

SEQ ID NO: 184316 - DNA, 2388 bp, Homo sapiens
  Payload ID: 16293
  Gene Symbol: SLC44A3
  Gene Name: solute carrier family 44, member 3
  Uniprot ID: Q8N4M1
  ENST ID: ENST00000271227
  CDS Start-End: 103-2064
cagccccagccccggccccggccccggctcgcgggcgctgcgtctccgcgtacaggaggcggcggcggctcccagtcaccggcccccgccggcgagcgcacgatgcactgcctgggcgccgagtacctggtttctgcagaaggagcccctaggcaaagggagtggcgaccccagatttataggaaatgcacagatacggcatggttattcctgttctttctcttttggactggtttggtgtttatcatgggctactcggtggtggctggagccgcgggaagactcctctttggctatgacagctttggcaacatgtgtggcaagaagaactcccccgtggaaggggcccctctttcagggcaggacatgaccctaaaaaaacacgtgttctttatgaattcctgcaacctggaagtcaaaggtacgcagctcaaccgcatggccctctgtgtatccaactgccctgaagagcagcttgactccctggaagaggtccagttctttgcaaacaccagtgggtccttcctgtgtgtttatagtttgaattccttcaactatacccacagtccaaaagcagactcactgtgtcccaggctaccagttcctccaagcaagtcatttcccttatttaaccgatgtgtccctcaaacacctgagtgctactccctatttgcatctgttttgataaatgatgttgacaccctccaccgaattctaagtggaatcatgtcgggaagagatacaatccttggcctgtgtatcctcgcattagccttgtctttggccatgatgtttaccttcagattcatcaccacccttctggttcacattttcatttcattggttattttgggattgttgtttgtctgcggtgttttatggtggctgtattatgactataccaacgacctcagcatagaattggacacagaaagggaaaatatgaagtgcgtgctggggtttgctatcgtatccacaggcatcacggcagtgctgctcgtcttgatttttgttctcagaaagagaataaaattgacagttgagcttttccaaatcacaaataaagccatcagcagtgctcccttcctgctgttccagccactgtggacatttgccatcctcattttcttctgggtcctctgggtggctgtgctgctgagcctgggaactgcaggagctgcccaggttatggaaggcggccaagtggaatataagcccctttcgggcattcggtacatgtggtcgtaccatttaattggcctcatctggactagtgaattcatccttgcgtgccagcaaatgactatagctggggcagtggttacttgttatttcaacagaagtaaaaatgatcctcctgatcatcccatcctttcgtctctctccattctcttcttctaccatcaaggaaccgttgtgaaagggtcatttttaatctctgtggtgaggattccgagaatcattgtcatgtacatgcaaaacgcactgaaagaacagcagcatggtgcattgtccaggtacctgttccgatgctgctactgctgtttctggtgtcttgacaaatacctgctccatctcaaccagaatgcatatactacaactgctattaatgggacagatttctgtacatcagcaaaagatgcattcaaaatcttgtccaagaactcaagtcactttacatctattaactgctttggagacttcataatttttctaggaaaggtgttagtggtgtgtttcactgtttttggaggactcatggcttttaactacaatcgggcattccaggtgtgggcagtccctctgttattggtagctttttttgcctacttagtagcccatagttttttatctgtgtttgaaactgtgctggatgcacttttcctgtgttttgctgttgatctggaaacaaatgatggatcgtcagaaaagccctactttatggatcaagaatttctgagtttcgtaaaaaggagcaacaaattaaacaatgcaagggcacagcaggacaagcactcattaaggaatgaggagggaacagaactccaggccattgtgagatagatacccatttaggtatctgtacctggaaaacatttccttctaagagccatttacagaatagaagatgagaccactagagaaaagttagtgaatttttttttaaaagacctaataaaccctattcttcctcattgtctttgtcattattgtttgaccaggtaacaatactggaactatattagtttacctttttttgtacaaattaggacagaaaaactcttctaaaaccatgtttatatgcatcaacttacaaagtacactatgtaagaactgaggtaagtttgtaagtgcacaactaataaataaacctttttaagataagga

SEQ ID NO: 184317 - DNA, 2094 bp, Homo sapiens
  Payload ID: 16293
  Gene Symbol: SLC44A3
  Gene Name: solute carrier family 44, member 3
  Uniprot ID: Q8N4M1
  ENST ID: ENST00000446120
  CDS Start-End: 111-1964
cccagccccagccccagccccggccccggccccggctcgcgggcgctgcgtctccgcgtacaggaggcggcggcggctcccagtcaccggcccccgccggcgagcgcacgatgcactgcctgggcgccgagtacctggtgtttatcatgggctactcggtggtggctggagccgcgggaagactcctctttggctatgacagctttggcaacatgtgtggcaagaagaactcccccgtggaaggggcccctctttcagggcaggacatgaccctaaaaaaacacgtgttctttatgaattcctgcaacctggaagtcaaaggtacgcagctcaaccgcatggccctctgtgtatccaactgccctgaagagcagcttgactccctggaagaggtccagttctttgcaaacaccagtgggtccttcctgtgtgtttatagtttgaattccttcaactatacccacagtccaaaagcagactcactgtgtcccaggctaccagttcctccaagcaagtcatttcccttatttaaccgatgtgtccctcaaacacctgagtgctactccctatttgcatctgttttgataaatgatgttgacaccctccaccgaattctaagtggaatcatgtcgggaagagatacaatccttggcctgtgtatcctcgcattagccttgtctttggccatgatgtttaccttcagattcatcaccacccttctggttcacattttcatttcattggttattttgggattgttgtttgtctgcggtgttttatggtggctgtattatgactataccaacgacctcagcatagaattggacacagaaagggaaaatatgaagtgcgtgctggggtttgctatcgtatccacaggcatcacggcagtgctgctcgtcttgatttttgttctcagaaagagaataaaattgacagttgagcttttccaaatcacaaataaagccatcagcagtgctcccttcctgctgttccagccactgtggacatttgccatcctcattttcttctgggtcctctgggtggctgtgctgctgagcctgggaactgcaggagctgcccaggttatggaaggcggccaagtggaatataagcccctttcgggcattcggtacatgtggtcgtaccatttaattggcctcatctggactagtgaattcatccttgcgtgccagcaaatgactatagctggggcagtggttacttgttatttcaacagaagtaaaaatgatcctcctgatcatcccatcctttcgtctctctccattctcttcttctaccatcaaggaaccgttgtgaaagggtcatttttaatctctgtggtgaggattccgagaatcattgtcatgtacatgcaaaacgcactgaaagaacagcagcatggtgcattgtccaggtacctgttccgatgctgctactgctgtttctggtgtcttgacaaatacctgctccatctcaaccagaatgcatatactacaactgctattaatgggacagatttctgtacatcagcaaaagatgcattcaaaatcttgtccaagaactcaagtcactttacatctattaactgctttggagacttcataatttttctaggaaaggtgttagtggtgtgtttcactgtttttggaggactcatggcttttaactacaatcgggcattccaggtgtgggcagtccctctgttattggtagctttttttgcctacttagtagcccatagttttttatctgtgtttgaaactgtgctggatgcacttttcctgtgttttgctgttgatctggaaacaaatgatggatcgtcagaaaagccctactttatggatcaagaatttctgagtttcgtaaaaaggagcaacaaattaaacaatgcaagggcacagcaggacaagcactcattaaggaatgaggagggaacagaactccaggccattgtgagatagatacccatttaggtatctgtacctggaaaacatttccttctaagagccatttacagaatagaagatgagaccactagagaaaagttagtgaatttttttttaaaagacctaataaaccctattcttcctc

SEQ ID NO: 184318 - DNA, 684 bp, Homo sapiens
  Payload ID: 16293
  Gene Symbol: SLC44A3
  Gene Name: solute carrier family 44, member 3
  ENST ID: ENST00000422520
  CDS Start-End: 196-684
ctccagtgctggggcggaggcgggggagacgcgggccgcggggcgcaaacttggggtcgtcctcaggtgcacctccaggtttctgcagaaggagcccctaggcaaagggagtggcgaccccagatttataggaaatgcacagatacggcatggttattcctgttctttctcttttggactggtttggtgtttatcatgggctactcggtggtggctggagccgcgggaagactcctctttggctatgacagctttggcaacatgtgtggcaagaagaactcccccgtggaaggggcccctctttcagggcaggacatgaccctaaaaaaacacgtgttctttatgaattcctgcaacctggaagtcaaaggtacgcagctcaaccgcatggccctctgtgtatccaactgccctgaagagcagcttgactccctggaagaggtccagttctttgcaaacaccagtgggtccttcctgtgtgtttatagtttgaattccttcaactatacccacagtccaaaagcagactcactgtgtcccaggctaccagttcctccaagcaagtcatttcccttatttaaccgatgtgtccctcaaacacctgagtgctactccctatttgcatctgttttgataaatgatgttgacaccctccaccgaattctaagtggaatcatgtcggga

SEQ ID NO: 184319 - DNA, 2045 bp, Homo sapiens
  Payload ID: 16293
  Gene Symbol: SLC44A3
  Gene Name: solute carrier family 44, member 3
  Uniprot ID: Q8N4M1
  ENST ID: ENST00000529450
  CDS Start-End: 52-1914
acaggaggcggcggcggctcccagtcaccggcccccgccggcgagcgcacgatgcactgcctgggcgccgagtacctggtttctgcagaaggagcccctaggcaaagggagtggcgaccccagatttataggaaatgcacagatacggcatggttattcctgttctttctcttttggactggtttggtgtttatcatgggctactcggtggtggctggagccgcgggaagactcctctttggctatgacagctttggcaacatgtgtggcaagaagaactcccccgtggaaggggcccctctttcagggcaggacatgaccctaaaaaaacacgtgttctttatgaattcctgcaacctggaagtcaaagggtccttcctgtgtgtttatagtttgaattccttcaactatacccacagtccaaaagcagactcactgtgtcccaggctaccagttcctccaagcaagtcatttcccttatttaaccgatgtgtccctcaaacacctgagtgctactccctatttgcatctgttttgataaatgatgttgacaccctccaccgaattctaagtggaatcatgtcgggaagagatacaatccttggcctgtgtatcctcgcattagccttgtctttggccatgatgtttaccttcagattcatcaccacccttctggttcacattttcatttcattggttattttgggattgttgtttgtctgcggtgttttatggtggctgtattatgactataccaacgacctcagcatagaattggacacagaaagggaaaatatgaagtgcgtgctggggtttgctatcgtatccacaggcatcacggcagtgctgctcgtcttgatttttgttctcagaaagagaataaaattgacagttgagcttttccaaatcacaaataaagccatcagcagtgctcccttcctgctgttccagccactgtggacatttgccatcctcattttcttctgggtcctctgggtggctgtgctgctgagcctgggaactgcaggagctgcccaggttatggaaggcggccaagtggaatataagcccctttcgggcattcggtacatgtggtcgtaccatttaattggcctcatctggactagtgaattcatccttgcgtgccagcaaatgactatagctggggcagtggttacttgttatttcaacagaagtaaaaatgatcctcctgatcatcccatcctttcgtctctctccattctcttcttctaccatcaaggaaccgttgtgaaagggtcatttttaatctctgtggtgaggattccgagaatcattgtcatgtacatgcaaaacgcactgaaagaacagcatggtgcattgtccaggtacctgttccgatgctgctactgctgtttctggtgtcttgacaaatacctgctccatctcaaccagaatgcatatactacaactgctattaatgggacagatttctgtacatcagcaaaagatgcattcaaaatcttgtccaagaactcaagtcactttacatctattaactgctttggagacttcataatttttctaggaaaggtgttagtggtgtgtttcactgtttttggaggactcatggcttttaactacaatcgggcattccaggtgtgggcagtccctctgttattggtagctttttttgcctacttagtagcccatagttttttatctgtgtttgaaactgtgctggatgcacttttcctgtgttttgctgttgatctggaaacaaatgatggatcgtcagaaaagccctactttatggatcaagaatttctgagtttcgtaaaaaggagcaacaaattaaacaatgcaagggcacagcaggacaagcactcattaaggaatgaggagggaacagaactccaggccattgtgagatagatacccatttaggtatctgtacctggaaaacatttccttctaagagccatttacagaatagaagatgagaccactagagaaaagttagtgaatttttttttaaaagacctaataaaccctattcttcctca

SEQ ID NO: 184320 - DNA, 2061 bp, Homo sapiens
  Payload ID: 16293
  Gene Symbol: SLC44A3
  Gene Name: solute carrier family 44, member 3
  Uniprot ID: Q8N4M1
  ENST ID: ENST00000467909
  CDS Start-End: 113-1930
ctggcggggaggaacctggaccctgctccagtgctggggcggaggcgggggagacgcgggccgcggggcgcaaacttggggtcgtcctcaggtgcacctccaggtgtttatcatgggctactcggtggtggctggagccgcgggaagactcctctttggctatgacagctttggcaacatgtgtggcaagaagaactcccccgtggaaggggcccctctttcagggcaggacatgaccctaaaaaaacacgtgttctttatgaattcctgcaacctggaagtcaaaggtacgcagctcaaccgcatggccctctgtgtatccaactgccctgaagagcagcttgactccctggaagaggtccagttctttgcaaacaccagtgggtccttcctgtgtgtttatagtttgaattccttcaactatacccacagtccaaaagcagactcactgtgtcccaggctaccagttcctccaagcaagtcatttcccttatttaaccgatgtgtccctcaaacacctgagtgctactccctatttgcatctgttttgataaatgatgttgacaccctccaccgaattctaagtggaatcatgtcgggaagagatacaatccttggcctgtgtatcctcgcattagccttgtctttggccatgatgtttaccttcagattcatcaccacccttctggttcacattttcatttcattggttattttgggattgttgtttgtctgcggtgttttatggtggctgtattatgactataccaacgacctcagcatagaattggacacagaaagggaaaatatgaagtgcgtgctggggtttgctatcgtatccacaggcatcacggcagtgctgctcgtcttgatttttgttctcagaaagagaataaaattgacagttgagcttttccaaatcacaaataaagccatcagcagtgctcccttcctgctgttccagccactgtggacatttgccatcctcattttcttctgggtcctctgggtggctgtgctgctgagcctgggaactgcaggagctgcccaggttatggaaggcggccaagtggaatataagcccctttcgggcattcggtacatgtggtcgtaccatttaattggcctcatctggactagtgaattcatccttgcgtgccagcaaatgactatagctggggcagtggttacttgttatttcaacagaagtaaaaatgatcctcctgatcatcccatcctttcgtctctctccattctcttcttctaccatcaaggaaccgttgtgaaagggtcatttttaatctctgtggtgaggattccgagaatcattgtcatgtacatgcaaaacgcactgaaagaacagcagcatggtgcattgtccaggtacctgttccgatgctgctactgctgtttctggtgtcttgacaaatacctgctccatctcaaccagaatgcatatactacaactgctattaatgggacagatttctgtacatcagcaaaagatgcattcaaaatcttgtccaagaactcaagtcactttacatctattaactgctttggagacttcataatttttctaggaaaggtgttagtggtgtgtttcactgtttttggaggactcatggcttttaactacaatcgggcattccaggtgtgggcagtccctctgttattggtagctttttttgcctacttagtagcccatagttttttatctgtgtttgaaactgtgctggatgcacttttcctgtgttttgctgttgatctggaaacaaatgatggatcgtcagaaaagccctactttatggatcaagaatttctgagtttcgtaaaaaggagcaacaaattaaacaatgcaagggcacagcaggacaagcactcattaaggaatgaggagggaacagaactccaggccattgtgagatagatacccatttaggtatctgtacctggaaaacatttccttctaagagccatttacagaatagaagatgagaccactagagaaaagttagtgaatttttttttaaaagacctaataaaccctattcttcctca

SEQ ID NO: 184321 - DNA, 460 bp, Homo sapiens
  Payload ID: 16293
  Gene Symbol: SLC44A3
  Gene Name: solute carrier family 44, member 3
  ENST ID: ENST00000532670
  CDS Start-End: 1-330
cagcatggtgcattgtccaggtacctgttccgatgctgctactgctgtttctggtgtcttgacaaatacctgctccatctcaaccagaatgcatatactacaactgctattaatgggacagatttctgtacatcagcaaaagatgcattcaaaatcttgtccaagaactcaagtcactttacatctattaactgctttggagacttcataatttttctaggaaagagtttcgtaaaaaggagcaacaaattaaacaatgcaagggcacagcaggacaagcactcattaaggaatgaggagggaacagaactccaggccattgtgagatagatacccatttaggtatctgtacctggaaaacatttccttctaagagccatttacagaatagaagatgagaccactagagaaaagttagtgaatttttttttaaaagacctaataaaccctattcttcctc

SEQ ID NO: 184322 - DNA, 1943 bp, Homo sapiens
  Payload ID: 16293
  Gene Symbol: SLC44A3
  Gene Name: solute carrier family 44, member 3
  Uniprot ID: Q8N4M1
  ENST ID: ENST00000527077
  CDS Start-End: 56-1813
gcgtacaggaggcggcggcggctcccagtcaccggcccccgccggcgagcgcacgatgcactgcctgggcgccgagtacctggtgtttatcatgggctactcggtggtggctggagccgcgggaagactcctctttggctatgacagctttggcaacatgtgtggcaagaagaactcccccgtggaaggggcccctctttcagggcaggacatgaccctaaaaaaacacgtgttctttatgaattcctgcaacctggaagtcaaagggtccttcctgtgtgtttatagtttgaattccttcaactatacccacagtccaaaagcagactcactgtgtcccaggctaccagttcctccaagcaagtcatttcccttatttaaccgatgtgtccctcaaacacctgagtgctactccctatttgcatctgttttgataaatgatgttgacaccctccaccgaattctaagtggaatcatgtcgggaagagatacaatccttggcctgtgtatcctcgcattagccttgtctttggccatgatgtttaccttcagattcatcaccacccttctggttcacattttcatttcattggttattttgggattgttgtttgtctgcggtgttttatggtggctgtattatgactataccaacgacctcagcatagaattggacacagaaagggaaaatatgaagtgcgtgctggggtttgctatcgtatccacaggcatcacggcagtgctgctcgtcttgatttttgttctcagaaagagaataaaattgacagttgagcttttccaaatcacaaataaagccatcagcagtgctcccttcctgctgttccagccactgtggacatttgccatcctcattttcttctgggtcctctgggtggctgtgctgctgagcctgggaactgcaggagctgcccaggttatggaaggcggccaagtggaatataagcccctttcgggcattcggtacatgtggtcgtaccatttaattggcctcatctggactagtgaattcatccttgcgtgccagcaaatgactatagctggggcagtggttacttgttatttcaacagaagtaaaaatgatcctcctgatcatcccatcctttcgtctctctccattctcttcttctaccatcaaggaaccgttgtgaaagggtcatttttaatctctgtggtgaggattccgagaatcattgtcatgtacatgcaaaacgcactgaaagaacagcagcatggtgcattgtccaggtacctgttccgatgctgctactgctgtttctggtgtcttgacaaatacctgctccatctcaaccagaatgcatatactacaactgctattaatgggacagatttctgtacatcagcaaaagatgcattcaaaatcttgtccaagaactcaagtcactttacatctattaactgctttggagacttcataatttttctaggaaaggtgttagtggtgtgtttcactgtttttggaggactcatggcttttaactacaatcgggcattccaggtgtgggcagtccctctgttattggtagctttttttgcctacttagtagcccatagttttttatctgtgtttgaaactgtgctggatgcacttttcctgtgttttgctgttgatctggaaacaaatgatggatcgtcagaaaagccctactttatggatcaagaatttctgagtttcgtaaaaaggagcaacaaattaaacaatgcaagggcacagcaggacaagcactcattaaggaatgaggagggaacagaactccaggccattgtgagatagatacccatttaggtatctgtacctggaaaacatttccttctaagagccatttacagaatagaagatgagaccactagagaaaagttagtgaatttttttttaaaagacctaataaaccctattcttcctc

SEQ ID NO: 184323 - DNA, 2067 bp, Homo sapiens
  Payload ID: 16293
  Gene Symbol: SLC44A3
  Gene Name: solute carrier family 44, member 3
  ENST ID: ENST00000475883
  CDS Start-End: 1-251
tgtttatcatgggctactcggtggtggctggagccgcgggaagactcctctttggctatgacagctttggcaacatgtgtggcaagaagaactcccccgtggaaggggcccctctttcagggcaggacatgaccctaaaaaaagccacttacaaagaagacaggaggaggaagggcgacttagatgcccatgtgctcccatttcacattgtgttcataatgcagtgtcaacaaacagtcattcctggttgaaacacgtgttctttatgaattcctgcaacctggaagtcaaaggtacgcagctcaaccgcatggccctctgtgtatccaactgccctgaagagcagcttgactccctggaagaggtccagttctttgcaaacaccagtgggtccttcctgtgtgtttatagtttgaattccttcaactatacccacagtccaaaagcagactcactgtgtcccaggctaccagttcctccaagcaagtcatttcccttatttaaccgatgtgtccctcaaacacctgagtgctactccctatttgcatctgttttgataaatgatgttgacaccctccaccgaattctaagtggaatcatgtcgggaagagatacaatccttggcctgtgtatcctcgcattagccttgtctttggccatgatgtttaccttcagattcatcaccacccttctggttcacattttcatttcattggttattttgggattgttgtttgtctgcggtgttttatggtggctgtattatgactataccaacgacctcagcatagaattggacacagaaagggaaaatatgaagtgcgtgctggggtttgctatcgtatccacaggcatcacggcagtgctgctcgtcttgatttttgttctcagaaagagaataaaattgacagttgagcttttccaaatcacaaataaagccatcagcagtgctcccttcctgctgttccagccactgtggacatttgccatcctcattttcttctgggtcctctgggtggctgtgctgctgagcctgggaactgcaggagctgcccaggttatggaaggcggccaagtggaatataagcccctttcgggcattcggtacatgtggtcgtaccatttaattggcctcatctggactagtgaattcatccttgcgtgccagcaaatgactatagctggggcagtggttacttgttatttcaacagaagtaaaaatgatcctcctgatcatcccatcctttcgtctctctccattctcttcttctaccatcaaggaaccgttgtgaaagggtcatttttaatctctgtggtgaggattccgagaatcattgtcatgtacatgcaaaacgcactgaaagaacagcagcatggtgcattgtccaggtacctgttccgatgctgctactgctgtttctggtgtcttgacaaatacctgctccatctcaaccagaatgcatatactacaactgctattaatgggacagatttctgtacatcagcaaaagatgcattcaaaatcttgtccaagaactcaagtcactttacatctattaactgctttggagacttcataatttttctaggaaaggtgttagtggtgtgtttcactgtttttggaggactcatggcttttaactacaatcgggcattccaggtgtgggcagtccctctgttattggtagctttttttgcctacttagtagcccatagttttttatctgtgtttgaaactgtgctggatgcacttttcctgtgttttgctgttgatctggaaacaaatgatggatcgtcagaaaagccctactttatggatcaagaatttctgagtttcgtaaaaaggagcaacaaattaaacaatgcaagggcacagcaggacaagcactcattaaggaatgaggagggaacagaactccaggccattgtgagatagatacccatttaggtatctgtacctggaaaacatttccttctaagagccatttacagaatagaagatgagaccactagagaaaagttagtgaatttttttttaaaagacctaataaaccctattcttcctca

SEQ ID NO: 184324 - DNA, 1912 bp, Homo sapiens
  Payload ID: 16293
  Gene Symbol: SLC44A3
  Gene Name: solute carrier family 44, member 3
  ENST ID: ENST00000532427
  CDS Start-End: 84-1805
agtgctggggcggaggcgggggagacgcgggccgcggggcgcaaacttggggtcgtcctcaggtgcacctccaggtgtttatcatgggctactcggtggtggctggagccgcgggaagactcctctttggctatgacagctttggcaacatgtgtggcaagaagaactcccccgtggaaggggcccctctttcagggcaggacatgaccctaaaaaaacacgtgttctttatgaattcctgcaacctggaagtcaaagggtccttcctgtgtgtttatagtttgaattccttcaactatacccacagtccaaaagcagactcactgtgtcccaggctaccagttcctccaagcaagtcatttcccttatttaaccgatgtgtccctcaaacacctgagtgctactccctatttgcatctgttttgataaatgatgttgacaccctccaccgaattctaagtggaatcatgtcgggaagagatacaatccttggcctgtgtatcctcgcattagccttgtctttggccatgatgtttaccttcagattcatcaccacccttctggttcacattttcatttcattggttattttgggattgttgtttgtctgcggtgttttatggtggctgtattatgactataccaacgacctcagcatagaattggacacagaaagggaaaatatgaagtgcgtgctggggtttgctatcgtatccacaggcatcacggcagtgctgctcgtcttgatttttgttctcagaaagagaataaaattgacagttgagcttttccaaatcacaaataaagccatcagcagtgctcccttcctgctgttccagccactgtggacatttgccatcctcattttcttctgggtcctctgggtggctgtgctgctgagcctgggaactgcaggagctgcccaggttatggaaggcggccaagtggaatataagcccctttcgggcattcggtacatgtggtcgtaccatttaattggcctcatctggactagtgaattcatccttgcgtgccagcaaatgactatagctggggcagtggttacttgttatttcaacagaagtaaaaatgatcctcctgatcatcccatcctttcgtctctctccattctcttcttctaccatcaaggaaccgttgtgaaagggtcatttttaatctctgtggtgaggattccgagaatcattgtcatgtacatgcaaaacgcactgaaagaacagcagcatggtgcattgtccaggtacctgttccgatgctgctactgctgtttctggtgtcttgacaaatacctgctccatctcaaccagaatgcatatactacaactgctattaatgggacagatttctgtacatcagcaaaagatgcattcaaaatcttgtccaagaactcaagtcactttacatctattaactgctttggagacttcataatttttctaggaaaggtgttagtggtgtgtttcactgtttttggaggactcatggcttttaactacaatcgggcattccaggtgtgggcagtccctctgttattggtagctttttttgcctacttagtagcccatagttttttatctgtgtttgaaactgtgctggatgcacttttcctgtgttttgctgttgatctggaaacaaatgatggatcgtcagaaaagccctactttatggatcaagaatttctgagtttcgtaaaaaggagcaacaaattaaacaatgcaagggcacagcaggacaagcactcattaaggaatgaggagggaacagaactccaggccattgtgagatagatacccatttaggtatctgtacctggaaaacatttccttctaagagccatttacagaatagaagatgagaccactagagaaaagttagtgaatttttttttaaaaga

SEQ ID NO: 184325 - DNA, 2589 bp, Homo sapiens
  Payload ID: 16294
  Gene Symbol: SLC44A4
  Gene Name: solute carrier family 44, member 4
  Uniprot ID: Q53GD3
  ENST ID: ENST00000229729
  CDS Start-End: 22-2154
aatcactccggagactgagccatggggggaaagcagcgggacgaggatgacgaggcctacgggaagccagtcaaatacgacccctcctttcgaggccccatcaagaacagaagctgcacagatgtcatctgctgcgtcctcttcctgctcttcattctaggttacatcgtggtggggattgtggcctggttgtatggagacccccggcaagtcctctaccccaggaactctactggggcctactgtggcatgggggagaacaaagataagccgtatctcctgtacttcaacatcttcagctgcatcctgtccagcaacatcatctcagttgctgagaacggcctacagtgccccacaccccaggtgtgtgtgtcctcctgcccggaggacccatggactgtgggaaaaaacgagttctcacagactgttggggaagtcttctatacaaaaaacaggaacttttgtctgccaggggtaccctggaatatgacggtgatcacaagcctgcaacaggaactctgccccagtttcctcctcccctctgctccagctctggggcgctgctttccatggaccaacgttactccaccggcgctcccagggatcaccaatgacaccaccatacagcaggggatcagcggtcttattgacagcctcaatgcccgagacatcagtgttaagatctttgaagattttgcccagtcctggtattggattcttgttgccctgggggtggctctggtcttgagcctactgtttatcttgcttctgcgcctggtggctgggcccctggtgctggtgctgatcctgggagtgctgggcgtgctggcatacggcatctactactgctgggaggagtaccgagtgctgcgggacaagggcgcctccatctcccagctgggtttcaccaccaacctcagtgcctaccagagcgtgcaggagacctggctggccgccctgatcgtgttggcggtgcttgaagccatcctgctgctgatgctcatcttcctgcggcagcggattcgtattgccatcgccctcctgaaggaggccagcaaggctgtgggacagatgatgtctaccatgttctacccactggtcacctttgtcctcctcctcatctgcattgcctactgggccatgactgctctgtacctggctacatcggggcaaccccagtatgtgctctgggcatccaacatcagctcccccggctgtgagaaagtgccaataaatacatcatgcaaccccacggcccaccttgtgaactcctcgtgcccagggctgatgtgcgtcttccagggctactcatccaaaggcctaatccaacgttctgtcttcaatctgcaaatctatggggtcctggggctcttctggacccttaactgggtactggccctgggccaatgcgtcctcgctggagcctttgcctccttctactgggccttccacaagccccaggacatccctaccttccccttaatctctgccttcatccgcacactccgttaccacactgggtcattggcatttggagccctcatcctgacccttgtgcagatagcccgggtcatcttggagtatattgaccacaagctcagaggagtgcagaaccctgtagcccgctgcatcatgtgctgtttcaagtgctgcctctggtgtctggaaaaatttatcaagttcctaaaccgcaatgcatacatcatgatcgccatctacgggaagaatttctgtgtctcagccaaaaatgcgttcatgctactcatgcgaaacattgtcagggtggtcgtcctggacaaagtcacagacctgctgctgttctttgggaagctgctggtggtcggaggcgtgggggtcctgtccttcttttttttctccggtcgcatcccggggctgggtaaagactttaagagcccccacctcaactattactggctgcccatcatgacctccatcctgggggcctatgtcatcgccagcggcttcttcagcgttttcggcatgtgtgtggacacgctcttcctctgcttcctggaagacctggagcggaacaacggctccctggaccggccctactacatgtccaagagccttctaaagattctgggcaagaagaacgaggcgcccccggacaacaagaagaggaagaagtgacagctccggccctgatccaggactgcaccccacccccaccgtccagccatccaacctcacttcgccttacaggtctccattttgtggtaaaaaaaggttttaggccaggcgccgtggctcacgcctgtaatccaacactttgagaggctgaggcgggcggatcacctgagtcaggagttcgagaccagcctggccaacatggtgaaacctccgtctctattaaaaatacaaaaattagccgagagtggtggcatgcacctgtcatcccagctactcgggaggctgaggcaggagaatcgcttgaacccgggaggcagaggttgcagtgagccgagatcgcgccactgcactccaacctgggtgacagactctgtctccaaaacaaaacaaacaaacaaaaagattttattaaagatattttgttaactcagtaaa

SEQ ID NO: 184326 - DNA, 2505 bp, Homo sapiens
  Payload ID: 16294
  Gene Symbol: SLC44A4
  Gene Name: solute carrier family 44, member 4
  Uniprot ID: Q53GD3
  ENST ID: ENST00000375562
  CDS Start-End: 67-2073
agggcggggcgggcagcaggtgagacgccaggtctccagggctccaatcactccggagactgagccatggggggaaagcagcgggacgaggatgacgaggcctacgggaagccagtcaaatacgacccctcctttcgaggccccatcaagaacagaagctgcacagatgtcatctgctgcgtcctcttcctgctcttcattctaggttacatcgtggtggggattgtggcctggttgtatggagacccccggcaagtcctctaccccaggaactctactggggcctactgtggcatgggggagaacaaagataagccgtatctcctgtacttcaacatcttcagctgcatcctgtccagcaacatcatctcagttgctgagaacggcctacagtgccccacaccccagacggtgatcacaagcctgcaacaggaactctgccccagtttcctcctcccctctgctccagctctggggcgctgctttccatggaccaacgttactccaccggcgctcccagggatcaccaatgacaccaccatacagcaggggatcagcggtcttattgacagcctcaatgcccgagacatcagtgttaagatctttgaagattttgcccagtcctggtattggattcttgttgccctgggggtggctctggtcttgagcctactgtttatcttgcttctgcgcctggtggctgggcccctggtgctggtgctgatcctgggagtgctgggcgtgctggcatacggcatctactactgctgggaggagtaccgagtgctgcgggacaagggcgcctccatctcccagctgggtttcaccaccaacctcagtgcctaccagagcgtgcaggagacctggctggccgccctgatcgtgttggcggtgcttgaagccatcctgctgctgatgctcatcttcctgcggcagcggattcgtattgccatcgccctcctgaaggaggccagcaaggctgtgggacagatgatgtctaccatgttctacccactggtcacctttgtcctcctcctcatctgcattgcctactgggccatgactgctctgtacctggctacatcggggcaaccccagtatgtgctctgggcatccaacatcagctcccccggctgtgagaaagtgccaataaatacatcatgcaaccccacggcccaccttgtgaactcctcgtgcccagggctgatgtgcgtcttccagggctactcatccaaaggcctaatccaacgttctgtcttcaatctgcaaatctatggggtcctggggctcttctggacccttaactgggtactggccctgggccaatgcgtcctcgctggagcctttgcctccttctactgggccttccacaagccccaggacatccctaccttccccttaatctctgccttcatccgcacactccgttaccacactgggtcattggcatttggagccctcatcctgacccttgtgcagatagcccgggtcatcttggagtatattgaccacaagctcagaggagtgcagaaccctgtagcccgctgcatcatgtgctgtttcaagtgctgcctctggtgtctggaaaaatttatcaagttcctaaaccgcaatgcatacatcatgatcgccatctacgggaagaatttctgtgtctcagccaaaaatgcgttcatgctactcatgcgaaacattgtcagggtggtcgtcctggacaaagtcacagacctgctgctgttctttgggaagctgctggtggtcggaggcgtgggggtcctgtccttcttttttttctccggtcgcatcccggggctgggtaaagactttaagagcccccacctcaactattactggctgcccatcatgacctccatcctgggggcctatgtcatcgccagcggcttcttcagcgttttcggcatgtgtgtggacacgctcttcctctgcttcctggaagacctggagcggaacaacggctccctggaccggccctactacatgtccaagagccttctaaagattctgggcaagaagaacgaggcgcccccggacaacaagaagaggaagaagtgacagctccggccctgatccaggactgcaccccacccccaccgtccagccatccaacctcacttcgccttacaggtctccattttgtggtaaaaaaaggttttaggccaggcgccgtggctcacgcctgtaatccaacactttgagaggctgaggcgggcggatcacctgagtcaggagttcgagaccagcctggccaacatggtgaaacctccgtctctattaaaaatacaaaaattagccgagagtggtggcatgcacctgtcatcccagctactcgggaggctgaggcaggagaatcgcttgaacccgggaggcagaggttgcagtgagccgagatcgcgccactgcactccaacctgggtgacagactctgtctccaaaacaaaacaaacaaacaaaaagattttattaaagatattttgttaactcagt

SEQ ID NO: 184327 - DNA, 2589 bp, Homo sapiens; identical to SEQ ID NO: 184325
  Payload ID: 16294
  Gene Symbol: SLC44A4
  Gene Name: solute carrier family 44, member 4
  Uniprot ID: Q53GD3
  ENST ID: ENST00000383379
  CDS Start-End: 22-2154

SEQ ID NO: 184328 - DNA, 2589 bp, Homo sapiens
  Payload ID: 16294
  Gene Symbol: SLC44A4
  Gene Name: solute carrier family 44, member 4
  Uniprot ID: Q53GD3
  ENST ID: ENST00000417894
  CDS Start-End: 22-2154
aatcactccggagactgagccatggggggaaagcagcgggacgaggatgacgaggcctacgggaagccagtcaaatacgacccctcctttcgaggccccatcaagaacagaagctgcacagatgtcatctgctgcgtcctcttcctgctcttcattctaggttacatcgtggtggggattgtggcctggttgtatggagacccccggcaagtcctctaccccaggaactctactggggcctactgtggcatgggggagaacaaagataagccgtatctcctgtacttcaacatcttcagctgcatcctgtccagcaacatcatctcagttgctgagaacggcctacagtgccccacaccccaggtgtgtgtgtcctcctgcccggaggacccatggactgtgggaaaaaacgagttctcacagactgttggggaagtcttctatacaaaaaacaggaacttttgtctgccaggggtaccctggaatatgacggtgatcacaagcctgcaacaggaactctgccccagtttcctcctcccctctgctccagctctgggacgctgctttccatggaccaacattactccaccggcgctcccagggatcaccaatgacaccaccatacagcaggggatcagcggtcttattgacagcctcaatgcccgagacatcagtgttaagatctttgaagattttgcccagtcctggtattggattcttgttgccctgggggtggctctggtcttgagcctactgtttatcttgcttctgcgcctggtggctgggcccctggtgctggtgctgatcctgggagtgctgggcgtgctggcatatggcatctactactgctgggaggagtaccgagtgctgcgggacaagggcgcctccatctcccagctgggtttcaccaccaacctcagtgcctaccagagcgtgcaggagacctggctggccgccctgatcgtgttggcggtgcttgaagccatcctgctgctggtgctcatcttcctgcggcagcggattcgtattgccatcgccctcctgaaggaggccagcaaggctgtgggacagatgatgtctaccatgttctacccactggtcacctttgtcctcctcctcatctgcattgcctactgggccatgactgctctgtacctggctacatcggggcaaccccagtatgtgctctgggcatccaacatcagctcccccggctgtgagaaagtgccaataaatacatcatgcaaccccacggcccaccttgtgaactcctcgtgcccagggctgatgtgcgtcttccagggctactcatccaaaggcctaatccaacgttctgtcttcaatctgcaaatctatggggtcctggggctcttctggacccttaactgggtactggccctgggccaatgcgtcctcgctggagcctttgcctccttctactgggccttccacaagccccaggacatccctaccttccccttaatctctgccttcatccgcacactccgttaccacactgggtcattggcatttggagccctcatcctgacccttgtgcagatagcccgggtcatcttggagtatattgaccacaagctcagaggagtgcagaaccctgtagcccgctgcatcatgtgctgtttcaagtgctgcctctggtgtctggaaaaatttatcaagttcctaaaccgcaatgcatacatcatgatcgccatctacgggaagaatttctgtgtctcagccaaaaatgcgttcatgctactcatgcgaaacattgtcagggtggtcgtcctggacaaagtcacagacctgctgctgttctttgggaagctgctggtggtcggaggcgtgggggtcctgtccttcttttttttctccggtcgcatcccggggctgggtaaagactttaagagcccccacctcaactattactggctgcccatcatgacctccatcctgggggcctatgtcatcgccagcggcttcttcagcgttttcggcatgtgtgtggacacgctcttcctctgcttcctggaagacctggagcggaacaacggctccctggaccggccctactacatgtccaagagccttctaaagattctgggcaagaagaacgaggcgcccccggacaacaagaagaggaagaagtgacagctccggccctgatccaggactgcaccccacccccaccgtccagccatccaacctcacttcgccttacaggtctccattttgtggtaaaaaaaggttttaggccaggcgccgtggctcacgcctgtaatccaacactttgagaggctgaggcgggcggatcacctgagtcaggagttcgagaccagcctggccaacatggtgaaacctccgtctctattaaaaatacaaaaattagccgagagtggtggcatgcacctgtcatcccagctactcgggaggctgaggcaggagaatcgcttgaacccgggaggcagaggttgcagtgagccgagatcgcgccactgcactccaacctgggtgacagactctgtctccaaaacaaaacaaacaaacaaaaagattttattaaagatattttgttaactcagtaaa

SEQ ID NO: 184329 - DNA, 1233 bp, Homo sapiens
  Payload ID: 16294
  Gene Symbol: SLC44A4
  Gene Name: solute carrier family 44, member 4
  ENST ID: ENST00000458130
  CDS Start-End: 1-1233
agcgggacgaggatgacgaggcctacgggaagccagtcaaatacgacccctcctttcgaggccccatcaagaacagaagctgcacagatgtcatctgctgcgtcctcttcctgctcttcattctaggttacatcgtggtggggattgtggcctggttgtatggagacccccggcaagtcctctaccccaggaactctactggggcctactgtggcatgggggagaacaaagataagccgtatctcctgtacttcaacatcttcagctgcatcctgtccagcaacatcatctcagttgctgagaacggcctacagtgccccacaccccaggtgtgtgtgtcctcctgcccggaggacccatggactgtgggaaaaaacgagttctcacagactgttggggaagtcttctatacaaaaaacaggaacttttgtctgccaggggtaccctggaatatgacggtgatcacaagcctgcaacaggaactctgccccagtttcctcctcccctctgctccagctctggggcgctgctttccatggaccaacgttactccaccggcgctcccagggatcaccaatgacaccaccatacagcaggggatcagcggtcttattgacagcctcaatgcccgagacatcagtgttaagatctttgaagattttgcccagtcctggtattggattcttgtggctgtgggacagatgatgtctaccatgttctacccactggtcacctttgtcctcctcctcatctgcattgcctactgggccatgactgctctgtacctggctacatcggggcaaccccagtatgtgctctgggcatccaacatcagctcccccggctgtgagaaagtgccaataaatacatcatgcaaccccacggcccaccttgtgaactcctcgtgcccagggctgatgtgcgtcttccagggctactcatccaaaggcctaatccaacgttctgtcttcaatctgcaaatctatggggtcctggggctcttctggacccttaactgggtactggccctgggccaatgcgtcctcgctggagcctttgcctccttctactgggccttccacaagccccaggacatccctaccttccccttaatctctgccttcatccgcacactccgttaccacactgggtcattggcatttggagccctcatcctgacccttgtgcagatagcccgggtcatcttggagtatattgaccacaagctcagag

SEQ ID NO: 184330 - DNA, 2589 bp, Homo sapiens; identical to SEQ ID NO: 184325
  Payload ID: 16294
  Gene Symbol: SLC44A4
  Gene Name: solute carrier family 44, member 4
  Uniprot ID: Q53GD3
  ENST ID: ENST00000453831
  CDS Start-End: 22-2154

SEQ ID NO: 184331 - DNA, 1233 bp, Homo sapiens; identical to SEQ ID NO: 184329
  Payload ID: 16294
  Gene Symbol: SLC44A4
  Gene Name: solute carrier family 44, member 4
  ENST ID: ENST00000431710
  CDS Start-End: 1-1233

SEQ ID NO: 184332 - DNA, 2589 bp, Homo sapiens; identical to SEQ ID NO: 184328
  Payload ID: 16294
  Gene Symbol: SLC44A4
  Gene Name: solute carrier family 44, member 4
  Uniprot ID: Q53GD3
  ENST ID: ENST00000442152
  CDS Start-End: 22-2154

SEQ ID NO: 184333 - DNA, 1233 bp, Homo sapiens; identical to SEQ ID NO: 184329
  Payload ID: 16294
  Gene Symbol: SLC44A4
  Gene Name: solute carrier family 44, member 4
  ENST ID: ENST00000414427
  CDS Start-End: 1-1233

SEQ ID NO: 184334 - DNA, 2589 bp, Homo sapiens; identical to SEQ ID NO: 184325
  Payload ID: 16294
  Gene Symbol: SLC44A4
  Gene Name: solute carrier family 44, member 4
  Uniprot ID: Q53GD3
  ENST ID: ENST00000425238
  CDS Start-End: 22-2154

SEQ ID NO: 184335 - DNA, 1233 bp, Homo sapiens
  Payload ID: 16294
  Gene Symbol: SLC44A4
  Gene Name: solute carrier family 44, member 4
  ENST ID: ENST00000450933
  CDS Start-End: 1-1233
agcgggacgaggatgacgaggcctacgggaagccagtcaaatacgacccctcctttcgaggccccatcaagaacagaagctgcacagatgtcatctgctgcgtcctcttcctgctcttcattctaggttacatcgtggtggggattgtggcctggttgtatggagacccccggcaagtcctctaccccaggaactctactggggcctactgtggcatgggggagaacaaagataagccgtatctcctgtacttcaacatcttcagctgcatcctgtccagcaacatcatctcagttgctgagaacggcctacagtgccccacaccccaggtgtgtgtgtcctcctgcccggaggacccatggactgtgggaaaaaacgagttctcacagactgttggggaagtcttctatacaaaaaacaggaacttttgtctgccaggggtaccctggaatatgacggtgatcacaagcctgcaacaggaactctgccccagtttcctcctcccctctgctccagctctgggacgctgctttccatggaccaacattactccaccggcgctcccagggatcaccaatgacaccaccatacagcaggggatcagcggtcttattgacagcctcaatgcccgagacatcagtgttaagatctttgaagattttgcccagtcctggtattggattcttgtggctgtgggacagatgatgtctaccatgttctacccactggtcacctttgtcctcctcctcatctgcattgcctactgggccatgactgctctgtacctggctacatcggggcaaccccagtatgtgctctgggcatccaacatcagctcccccggctgtgagaaagtgccaataaatacatcatgcaaccccacggcccaccttgtgaactcctcgtgcccagggctgatgtgcgtcttccagggctactcatccaaaggcctaatccaacgttctgtcttcaatctgcaaatctatggggtcctggggctcttctggacccttaactgggtactggccctgggccaatgcgtcctcgctggagcctttgcctccttctactgggccttccacaagccccaggacatccctaccttccccttaatctctgccttcatccgcacactccgttaccacactgggtcattggcatttggagccctcatcctgacccttgtgcagatagcccgggtcatcttggagtatattgaccacaagctcagag

SEQ ID NO: 184336 - DNA, 1233 bp, Homo sapiens; identical to SEQ ID NO: 184329
  Payload ID: 16294
  Gene Symbol: SLC44A4
  Gene Name: solute carrier family 44, member 4
  ENST ID: ENST00000433046
  CDS Start-End: 1-1233

SEQ ID NO: 184337 - DNA, 2589 bp, Homo sapiens; identical to SEQ ID NO: 184328
  Payload ID: 16294
  Gene Symbol: SLC44A4
  Gene Name: solute carrier family 44, member 4
  Uniprot ID: Q53GD3
  ENST ID: ENST00000415517
  CDS Start-End: 22-2154

SEQ ID NO: 184338 - DNA, 1233 bp, Homo sapiens; identical to SEQ ID NO: 184335
  Payload ID: 16294
  Gene Symbol: SLC44A4
  Gene Name: solute carrier family 44, member 4
  ENST ID: ENST00000441920
  CDS Start-End: 1-1233

SEQ ID NO: 184339 - DNA, 1233 bp, Homo sapiens; identical to SEQ ID NO: 184335
  Payload ID: 16294
  Gene Symbol: SLC44A4
  Gene Name: solute carrier family 44, member 4
  ENST ID: ENST00000414684
  CDS Start-End: 1-1233

SEQ ID NO: 184340 - DNA, 2634 bp, Homo sapiens
  Payload ID: 16294
  Gene Symbol: SLC44A4
  Gene Name: solute carrier family 44, member 4
  Uniprot ID: Q53GD3
  ENST ID: ENST00000544672
  CDS Start-End: 298-2202
actgaggtcccaccagagtgaggatgtacagggccgcttccctccccaggccctgctggggttgacacctttgtctccagtttctttccccatagccttgaaccagaggggaagccagtcaaatacgacccctcctttcgaggccccatcaagaacagaagctgcacagatgtcatctgctgcgtcctcttcctgctcttcattctaggttacatcgtggtggggattgtggcctggttgtatggagacccccggcaagtcctctaccccaggaactctactggggcctactgtggcatgggggagaacaaagataagccgtatctcctgtacttcaacatcttcagctgcatcctgtccagcaacatcatctcagttgctgagaacggcctacagtgccccacaccccaggtgtgtgtgtcctcctgcccggaggacccatggactgtgggaaaaaacgagttctcacagactgttggggaagtcttctatacaaaaaacaggaacttttgtctgccaggggtaccctggaatatgacggtgatcacaagcctgcaacaggaactctgccccagtttcctcctcccctctgctccagctctggggcgctgctttccatggaccaacgttactccaccggcgctcccagggatcaccaatgacaccaccatacagcaggggatcagcggtcttattgacagcctcaatgcccgagacatcagtgttaagatctttgaagattttgcccagtcctggtattggattcttgttgccctgggggtggctctggtcttgagcctactgtttatcttgcttctgcgcctggtggctgggcccctggtgctggtgctgatcctgggagtgctgggcgtgctggcatacggcatctactactgctgggaggagtaccgagtgctgcgggacaagggcgcctccatctcccagctgggtttcaccaccaacctcagtgcctaccagagcgtgcaggagacctggctggccgccctgatcgtgttggcggtgcttgaagccatcctgctgctgatgctcatcttcctgcggcagcggattcgtattgccatcgccctcctgaaggaggccagcaaggctgtgggacagatgatgtctaccatgttctacccactggtcacctttgtcctcctcctcatctgcattgcctactgggccatgactgctctgtacctggctacatcggggcaaccccagtatgtgctctgggcatccaacatcagctcccccggctgtgagaaagtgccaataaatacatcatgcaaccccacggcccaccttgtgaactcctcgtgcccagggctgatgtgcgtcttccagggctactcatccaaaggcctaatccaacgttctgtcttcaatctgcaaatctatggggtcctggggctcttctggacccttaactgggtactggccctgggccaatgcgtcctcgctggagcctttgcctccttctactgggccttccacaagccccaggacatccctaccttccccttaatctctgccttcatccgcacactccgttaccacactgggtcattggcatttggagccctcatcctgacccttgtgcagatagcccgggtcatcttggagtatattgaccacaagctcagaggagtgcagaaccctgtagcccgctgcatcatgtgctgtttcaagtgctgcctctggtgtctggaaaaatttatcaagttcctaaaccgcaatgcatacatcatgatcgccatctacgggaagaatttctgtgtctcagccaaaaatgcgttcatgctactcatgcgaaacattgtcagggtggtcgtcctggacaaagtcacagacctgctgctgttctttgggaagctgctggtggtcggaggcgtgggggtcctgtccttcttttttttctccggtcgcatcccggggctgggtaaagactttaagagcccccacctcaactattactggctgcccatcatgacctccatcctgggggcctatgtcatcgccagcggcttcttcagcgttttcggcatgtgtgtggacacgctcttcctctgcttcctggaagacctggagcggaacaacggctccctggaccggccctactacatgtccaagagccttctaaagattctgggcaagaagaacgaggcgcccccggacaacaagaagaggaagaagtgacagctccggccctgatccaggactgcaccccacccccaccgtccagccatccaacctcacttcgccttacaggtctccattttgtggtaaaaaaaggttttaggccaggcgccgtggctcacgcctgtaatccaacactttgagaggctgaggcgggcggatcacctgagtcaggagttcgagaccagcctggccaacatggtgaaacctccgtctctattaaaaatacaaaaattagccgagagtggtggcatgcacctgtcatcccagctactcgggaggctgaggcaggagaatcgcttgaacccgggaggcagaggttgcagtgagccgagatcgcgccactgcactccaacctgggtgacagactctgtctccaaaacaaaacaaacaaacaaaaagattttattaaagatattttgttaactcagt

SEQ ID NO: 184341 - DNA, 2634 bp, Homo sapiens
  Payload ID: 16294
  Gene Symbol: SLC44A4
  Gene Name: solute carrier family 44, member 4
  ENST ID: ENST00000547288
  CDS Start-End: 298-2202
actgaggtcccaccagagtgaggatgtacagggccgcttccctccccaggccctgctggggttgacacctttgtctccagtttctttccccatagccttgaaccagaggggaagccagtcaaatacgacccctcctttcgaggccccatcaagaacagaagctgcacagatgtcatctgctgcgtcctcttcctgctcttcattctaggttacatcgtggtggggattgtggcctggttgtatggagacccccggcaagtcctctaccccaggaactctactggggcctactgtggcatgggggagaacaaagataagccgtatctcctgtacttcaacatcttcagctgcatcctgtccagcaacatcatctcagttgctgagaacggcctacagtgccccacaccccaggtgtgtgtgtcctcctgcccggaggacccatggactgtgggaaaaaacgagttctcacagactgttggggaagtcttctatacaaaaaacaggaacttttgtctgccaggggtaccctggaatatgacggtgatcacaagcctgcaacaggaactctgccccagtttcctcctcccctctgctccagctctgggacgctgctttccatggaccaacattactccaccggcgctcccagggatcaccaatgacaccaccatacagcaggggatcagcggtcttattgacagcctcaatgcccgagacatcagtgttaagatctttgaagattttgcccagtcctggtattggattcttgttgccctgggggtggctctggtcttgagcctactgtttatcttgcttctgcgcctggtggctgggcccctggtgctggtgctgatcctgggagtgctgggcgtgctggcatatggcatctactactgctgggaggagtaccgagtgctgcgggacaagggcgcctccatctcccagctgggtttcaccaccaacctcagtgcctaccagagcgtgcaggagacctggctggccgccctgatcgtgttggcggtgcttgaagccatcctgctgctggtgctcatcttcctgcggcagcggattcgtattgccatcgccctcctgaaggaggccagcaaggctgtgggacagatgatgtctaccatgttctacccactggtcacctttgtcctcctcctcatctgcattgcctactgggccatgactgctctgtacctggctacatcggggcaaccccagtatgtgctctgggcatccaacatcagctcccccggctgtgagaaagtgccaataaatacatcatgcaaccccacggcccaccttgtgaactcctcgtgcccagggctgatgtgcgtcttccagggctactcatccaaaggcctaatccaacgttctgtcttcaatctgcaaatctatggggtcctggggctcttctggacccttaactgggtactggccctgggccaatgcgtcctcgctggagcctttgcctccttctactgggccttccacaagccccaggacatccctaccttccccttaatctctgccttcatccgcacactccgttaccacactgggtcattggcatttggagccctcatcctgacccttgtgcagatagcccgggtcatcttggagtatattgaccacaagctcagaggagtgcagaaccctgtagcccgctgcatcatgtgctgtttcaagtgctgcctctggtgtctggaaaaatttatcaagttcctaaaccgcaatgcatacatcatgatcgccatctacgggaagaatttctgtgtctcagccaaaaatgcgttcatgctactcatgcgaaacattgtcagggtggtcgtcctggacaaagtcacagacctgctgctgttctttgggaagctgctggtggtcggaggcgtgggggtcctgtccttcttttttttctccggtcgcatcccggggctgggtaaagactttaagagcccccacctcaactattactggctgcccatcatgacctccatcctgggggcctatgtcatcgccagcggcttcttcagcgttttcggcatgtgtgtggacacgctcttcctctgcttcctggaagacctggagcggaacaacggctccctggaccggccctactacatgtccaagagccttctaaagattctgggcaagaagaacgaggcgcccccggacaacaagaagaggaagaagtgacagctccggccctgatccaggactgcaccccacccccaccgtccagccatccaacctcacttcgccttacaggtctccattttgtggtaaaaaaaggttttaggccaggcgccgtggctcacgcctgtaatccaacactttgagaggctgaggcgggcggatcacctgagtcaggagttcgagaccagcctggccaacatggtgaaacctccgtctctattaaaaatacaaaaattagccgagagtggtggcatgcacctgtcatcccagctactcgggaggctgaggcaggagaatcgcttgaacccgggaggcagaggttgcagtgagccgagatcgcgccactgcactccaacctgggtgacagactctgtctccaaaacaaaacaaacaaacaaaaagattttattaaagatattttgttaactcagt

SEQ ID NO: 184342 - DNA, 2634 bp, Homo sapiens; identical to SEQ ID NO: 184340
  Payload ID: 16294
  Gene Symbol: SLC44A4
  Gene Name: solute carrier family 44, member 4
  Uniprot ID: Q53GD3
  ENST ID: ENST00000548188
  CDS Start-End: 298-2202

SEQ ID NO: 184343 - DNA, 2505 bp, Homo sapiens
  Payload ID: 16294
  Gene Symbol: SLC44A4
  Gene Name: solute carrier family 44, member 4
  Uniprot ID: Q53GD3
  ENST ID: ENST00000553121
  CDS Start-End: 67-2073
agggcggggcgggcagcaggtgagacgccaggtctccagggctccaatcactccggagactgagccatggggggaaagcagcgggacgaggatgacgaggcctacgggaagccagtcaaatacgacccctcctttcgaggccccatcaagaacagaagctgcacagatgtcatctgctgcgtcctcttcctgctcttcattctaggttacatcgtggtggggattgtggcctggttgtatggagacccccggcaagtcctctaccccaggaactctactggggcctactgtggcatgggggagaacaaagataagccgtatctcctgtacttcaacatcttcagctgcatcctgtccagcaacatcatctcagttgctgagaacggcctacagtgccccacaccccagacggtgatcacaagcctgcaacaggaactctgccccagtttcctcctcccctctgctccagctctgggacgctgctttccatggaccaacattactccaccggcgctcccagggatcaccaatgacaccaccatacagcaggggatcagcggtcttattgacagcctcaatgcccgagacatcagtgttaagatctttgaagattttgcccagtcctggtattggattcttgttgccctgggggtggctctggtcttgagcctactgtttatcttgcttctgcgcctggtggctgggcccctggtgctggtgctgatcctgggagtgctgggcgtgctggcatatggcatctactactgctgggaggagtaccgagtgctgcgggacaagggcgcctccatctcccagctgggtttcaccaccaacctcagtgcctaccagagcgtgcaggagacctggctggccgccctgatcgtgttggcggtgcttgaagccatcctgctgctggtgctcatcttcctgcggcagcggattcgtattgccatcgccctcctgaaggaggccagcaaggctgtgggacagatgatgtctaccatgttctacccactggtcacctttgtcctcctcctcatctgcattgcctactgggccatgactgctctgtacctggctacatcggggcaaccccagtatgtgctctgggcatccaacatcagctcccccggctgtgagaaagtgccaataaatacatcatgcaaccccacggcccaccttgtgaactcctcgtgcccagggctgatgtgcgtcttccagggctactcatccaaaggcctaatccaacgttctgtcttcaatctgcaaatctatggggtcctggggctcttctggacccttaactgggtactggccctgggccaatgcgtcctcgctggagcctttgcctccttctactgggccttccacaagccccaggacatccctaccttccccttaatctctgccttcatccgcacactccgttaccacactgggtcattggcatttggagccctcatcctgacccttgtgcagatagcccgggtcatcttggagtatattgaccacaagctcagaggagtgcagaaccctgtagcccgctgcatcatgtgctgtttcaagtgctgcctctggtgtctggaaaaatttatcaagttcctaaaccgcaatgcatacatcatgatcgccatctacgggaagaatttctgtgtctcagccaaaaatgcgttcatgctactcatgcgaaacattgtcagggtggtcgtcctggacaaagtcacagacctgctgctgttctttgggaagctgctggtggtcggaggcgtgggggtcctgtccttcttttttttctccggtcgcatcccggggctgggtaaagactttaagagcccccacctcaactattactggctgcccatcatgacctccatcctgggggcctatgtcatcgccagcggcttcttcagcgttttcggcatgtgtgtggacacgctcttcctctgcttcctggaagacctggagcggaacaacggctccctggaccggccctactacatgtccaagagccttctaaagattctgggcaagaagaacgaggcgcccccggacaacaagaagaggaagaagtgacagctccggccctgatccaggactgcaccccacccccaccgtccagccatccaacctcacttcgccttacaggtctccattttgtggtaaaaaaaggttttaggccaggcgccgtggctcacgcctgtaatccaacactttgagaggctgaggcgggcggatcacctgagtcaggagttcgagaccagcctggccaacatggtgaaacctccgtctctattaaaaatacaaaaattagccgagagtggtggcatgcacctgtcatcccagctactcgggaggctgaggcaggagaatcgcttgaacccgggaggcagaggttgcagtgagccgagatcgcgccactgcactccaacctgggtgacagactctgtctccaaaacaaaacaaacaaacaaaaagattttattaaagatattttgttaactcagt

SEQ ID NO: 184344 - DNA, 2505 bp, Homo sapiens; identical to SEQ ID NO: 184326
  Payload ID: 16294
  Gene Symbol: SLC44A4
  Gene Name: solute carrier family 44, member 4
  Uniprot ID: Q53GD3
  ENST ID: ENST00000551168
  CDS Start-End: 67-2073

SEQ ID NO: 184345 - DNA, 2634 bp, Homo sapiens; identical to SEQ ID NO: 184341
  Payload ID: 16294
  Gene Symbol: SLC44A4
  Gene Name: solute carrier family 44, member 4
  ENST ID: ENST00000553147
  CDS Start-End: 298-2202

SEQ ID NO: 184346 - DNA, 2505 bp, Homo sapiens; identical to SEQ ID NO: 184343
  Payload ID: 16294
  Gene Symbol: SLC44A4
  Gene Name: solute carrier family 44, member 4
  Uniprot ID: Q53GD3
  ENST ID: ENST00000550401
  CDS Start-End: 67-2073

SEQ ID NO: 184347 - DNA, 2634 bp, Homo sapiens; identical to SEQ ID NO: 184340
  Payload ID: 16294
  Gene Symbol: SLC44A4
  Gene Name: solute carrier family 44, member 4
  Uniprot ID: Q53GD3
  ENST ID: ENST00000546461
  CDS Start-End: 298-2202

SEQ ID NO: 184348 - DNA, 2634 bp, Homo sapiens; identical to SEQ ID NO: 184340
  Payload ID: 16294
  Gene Symbol: SLC44A4
  Gene Name: solute carrier family 44, member 4
  Uniprot ID: Q53GD3
  ENST ID: ENST00000547684
  CDS Start-End: 298-2202

SEQ ID NO: 184349 - DNA, 2505 bp, Homo sapiens; identical to SEQ ID NO: 184343
  Payload ID: 16294
  Gene Symbol: SLC44A4
  Gene Name: solute carrier family 44, member 4
  Uniprot ID: Q53GD3
  ENST ID: ENST00000547493
  CDS Start-End: 67-2073

SEQ ID NO: 184350 - DNA, 2505 bp, Homo sapiens; identical to SEQ ID NO: 184326
  Payload ID: 16294
  Gene Symbol: SLC44A4
  Gene Name: solute carrier family 44, member 4
  Uniprot ID: Q53GD3
  ENST ID: ENST00000549677
  CDS Start-End: 67-2073

SEQ ID NO: 184351 - DNA, 2505 bp, Homo sapiens; identical to SEQ ID NO: 184326
  Payload ID: 16294
  Gene Symbol: SLC44A4
  Gene Name: solute carrier family 44, member 4
  Uniprot ID: Q53GD3
  ENST ID: ENST00000549663
  CDS Start-End: 67-2073

SEQ ID NO: 184352 - DNA, 2634 bp, Homo sapiens; identical to SEQ ID NO: 184341
  Payload ID: 16294
  Gene Symbol: SLC44A4
  Gene Name: solute carrier family 44, member 4
  ENST ID: ENST00000550821
  CDS Start-End: 298-2202

SEQ ID NO: 184353 - DNA, 4406 bp, Homo sapiens
  Payload ID: 16295
  Gene Symbol: SLC44A5
  Gene Name: solute carrier family 44, member 5
  ENST ID: ENST00000370855
  CDS Start-End: 115-2274
aggttcagtgttgatggagttattgaagaaatgatggagtaagagactcttttctaagcaactcaagtttgcagtgattcaggcctacttctgaagagacagccttttatctcaatgaatgacacagaaaaaccagcagatactccctctgaggaagaggactttggtgatccaaggacatatgacccagatttcaaggggcctgttgccaacaggagttgtacagatgttctgtgctgtatgatcttcctactgtgtattattggctacattgttttaggacttgtggcctgggtacatggggaccccagaagagcagcctatcctacagacagccagggccacttttgtggccagaagggcactcccaatgagaacaagaccattttgttttactttaacctgttacgctgtaccagtccctccgtgttgctaaacctacagtgccctaccacacagatctgtgtctccaagtgcccagaaaaatttttaacctatgtggaaatgcaacttttgtacacaaaagacaaaagctactgggaagactaccgtcagttctgtaagaccactgctaagcctgtgaagtctctcacacagcttttactggatgatgattgtccaacagcgatttttcccagcaaaccttttctccagagatgtttccctgacttctctaccaaaaatggcactttaacaataggaagtaagatgatgtttcaagatggaaatggagggacaagaagtgttgtagaactcgggattgctgcaaatggtatcaataaacttcttgatgcaaagtcacttggattgaaagtgtttgaagactatgcaagaacttggtattggattctcattggcctgacgattgccatggtccttagttggatatttttgatacttctgaggttcatagctggatgcctcttctgggtcttcatgattggtgtgattggaattataggttatggaatatggcactgttaccagcagtacaccaatcttcaggaacgcccaagttctgtattaactatctatgacatcgggattcagactaacataagcatgtactttgaactgcaacaaacatggttcacatttatgataatactctgcatcattgaagtgattgtcatcctcatgctgatcttcctcaggaatcgaatccgagtcgccattatcctgctgaaggaaggaagcaaagccattggatatgttcctagtacattagtctatccagctttaactttcattttgctctcaatctgcatttgctactgggtcgtgacagcagttttcttggcgacatcgggggtacctgtatacaaagtcatagctccaggggggcattgtatacatgaaaatcaaacctgtgacccagagatttttaatacaactgaaattgccaaagcttgccctggggctctgtgtaactttgctttctatggtggaaagagcttgtaccatcagtacatccctaccttccatgtatacaacttatttgtctttctctggcttataaacttcgtcattgcattaggtcagtgcgcccttgctggtgcattcgctacttattactgggccatgaaaaaacctgatgacatcccacgatatccactttttactgcatttggacgagccatacgatatcacacaggatccctagcatttggatctttaattattgcattaattcaaatgtttaaaattgtactagaatacttggaccaccgtcttaaacgtacccagaacacattgtctaaattcctacaatgctgcctgagatgctgcttctggtgtttggaaaatgcaataaagtttttaaacagaaatgcctatattatgattgcaatatatggcagaaacttctgcaggtcagcaaaagatgctttcaatctgctgatgagaaatgttttgaaagttgcagttacagatgaagttacatactttgtattattcctggggaaacttctagttgctggaagtataggtgttctggccttcctattcttcacacaaagactgccagtgattgcacaaggaccagcatctttaaattactactgggtacctttgctgacagtcatttttgggtcttacctgattgcacatgggttcttcagcgtctatgcaatgtgtgttgaaacaattttcatctgcttctgtgaagatctggaaagaaatgatggatctacagaaaaaccctacttcgtaacccctaacctgcatggaattctgatcaagaagcaactagttccccagaagcagaaagagtagaaaagctccaaacagtgtcactcatttttaagtagaagttgtgtaaattaggttgattgtaatttggaaatgttgcttttgagtaatgtgaaatttctgtgcttaattctaagaagtcagcacctggtactacctgaggtgtcaggtatttgatgacattagctgctgtctactttatagacagtggtcccagctaaagatcaaaatgttaatgtcaaacgttttttaaaatctgtagccgagagtgttttaataacttttataactcagcgtgctgtttccattgcagcactttaatagcctttctttttataagtgtatatttgtaaaggatattcaggcaatttttgaaaacactataaatgtgtaattaattagccataaaatattgatttatagttaaccagcatatggtactaaatttgtaaatatggtgctatggttatatttatactgttcaagctggtggacaactctctaaactgtgattaaacttgtattaatggttccctaggaagtatatttcagtgagtcatgtccataacaaacatagatgttaatgttatataggttctacggagagcattactgggtaaaaaatactatggaaccttcagagcccattctgttttagtgaaatcatgtttatattgaagtcgaatctgagttctggagtgtcatttccaacaacatgaacctctgtccatggtgaaaatattctgaacaaaactgaaattgttacataactcatgccttttgtctttaacccaaatttcttattcccactatatagaaaatcaatatgaatttgtttcagaagagtgattatatcttttcatgagtatacctgtatttctagattaaagagattgtgtggctttgttctacagaaggtttgattttgtctcacctttcagtgaggaaagagaaaagaaagacacttcagattttaccctaaggaaatatactgttggcgctccatcatctaatacctttatgaggggcatactgtgggttaggaactctctctctgcagggcttaggaggaaagttgttgccacctgccaccgctggccgcctgaggtttctgatagtcatgtgtaagttttgaatggcagaacaaagcatgaatcagacacacatcttgcctagccatcccctgtgtgcaaatgtgtatgatgtggttaaccatgtaaaaatgcaccccaaaaggagcattgaatcaatttgtattttcttggcttttaccttaaacttgtatataaggattatttatatattgacagaaaggaacatgttgatctgaatatcactcatatatccaagaaaagagtcagaaatgtattgttgtgttatagattgatctaaatacgtattaattatcttcaagtgtagacacctagatttaaactgactctgtggcagattaattaatagcaataagccaatgaatagggaagatttttaatatataatgactaccagcttgttcttggcttacattcttgagattattgtattcaaaagtgtcagttggcttcacattttggcaaagagccttctgcattcttattctccttgaagcataatgcagataatgacaacttatctttctagattagtcttttattattcaacaagacaaaggccacaacaaaggactagtagaatagtgacctctacctgagaatttgttataactatagatgtttgtgctctgcccaagagattctgatatactgtgatttgatgtgagccacgatgtgaattattataaagttctctagttgattctgatacacataaaagttgaaaaattggccatgtgtggtgtctcacgcctgtaatcccagcactttgggagtccaagatggacagatcactggagcctaggagttccagaccagtctaggcaacatggtgaaaccccatctatctttataaaaaatataaaagttagccaagtgtggtggtgcacacctgtagtctcagctacttgggaggctgaaatgtgagggtcacttgagcccaagagatcgaggctgcagtgagccatgatcacaccactgcactccagcctgggtgacagagcaaaaccctgtttaaaaaaaaaaagttgaaaaaatcacttg

SEQ ID NO: 184354 - DNA, 3896 bp, Homo sapiens
  Payload ID: 16295
  Gene Symbol: SLC44A5
  Gene Name: solute carrier family 44, member 5
  Uniprot ID: Q8NCS7
  ENST ID: ENST00000370859
  CDS Start-End: 147-2300
acagtagtgaatcgtagcatgttagagttagaaggttcagtgttgatggagttattgaagaaatgatggagtaagagactcttttctaagcaactcaagtttgcagtgattcaggcctacttctgaagagacagccttttatctcaatgaatgacacagaaaaaccagcagatactccctctgaggaagaggactttggtgatccaaggacatatgacccagatttcaaggggcctgttgccaacaggagttgtacagatgttctgtgctgtatgatcttcctactgtgtattattggctacattgttttaggacttgtggcctgggtacatggggaccccagaagagcagcctatcctacagacagccagggccacttttgtggccagaagggcactcccaatgagaacaagaccattttgttttactttaacctgttacgctgtaccagtccctccgtgttgctaaacctacagtgccctaccacacagatctgtgtctccaagtgcccagaaaaatttttaacctatgtggaaatgcaacttttgtacacaaaagacaaaagctactgggaagactaccgtcagttctgtaagaccactgctaagcctgtgaagtctctcacacagcttttactggatgatgattgtccaacagcgatttttcccagcaaaccttttctccagagatgtttccctgacttctctaccaaaaatggcactttaacaataggaagtaagatgatgtttcaagatggaaatggagggacaagaagtgttgtagaactcgggattgctgcaaatggtatcaataaacttcttgatgcaaagtcacttggattgaaagtgtttgaagactatgcaagaacttggtattggattctcattggcctgacgattgccatggtccttagttggatatttttgatacttctgaggttcatagctggatgcctcttctgggtcttcatgattggtgtgattggaattataggttatggaatatggcactgttaccagcagtacaccaatcttcaggaacgcccaagttctgtattaactatctatgacatcgggattcagactaacataagcatgtactttgaactgcaacaaacatggttcacatttatgataatactctgcatcattgaagtgattgtcatcctcatgctgatcttcctcaggaatcgaatccgagtcgccattatcctgctgaaggaaggaagcaaagccattggatatgttcctagtacattagtctatccagctttaactttcattttgctctcaatctgcatttgctactgggtcgtgacagcagttttcttggcgacatcgggggtacctgtatacaaagtcatagctccaggggggcattgtatacatgaaaatcaaacctgtgacccagagatttttaatacaactgaaattgccaaagcttgccctggggctctgtgtaactttgctttctatggtggaaagagcttgtaccatcagtacatccctaccttccatgtatacaacttatttgtctttctctggcttataaacttcgtcattgcattaggtcagtgcgcccttgctggtgcattcgctacttattactgggccatgaaaaaacctgatgacatcccacgatatccactttttactgcatttggacgagccatacgatatcacacaggatccctagcatttggatctttaattattgcattaattcaaatgtttaaaattgtactagaatacttggaccaccgtcttaaacgtacccagaacacattgtctaaattcctacaatgctgcctgagatgctgcttctggtgtttggaaaatgcaataaagtttttaaacagaaatgcctatattatgattgcaatatatggcagaaacttctgcaggtcagcaaaagatgctttcaatctgctgatgagaaatgttttgaaagttgcagttacagatgaagttacatactttgtattattcctggggaaacttctagttgctggaagtataggtgttctggccttcctattcttcacacaaagactgccagtgattgcacaaggaccagcatctttaaattactactgggtacctttgctgacagtcatttttgggtcttacctgattgcacatgggttcttcagcgtctatgcaatgtgtgttgaaacaattttcatctgcttcttggaagatttagaaagaaatgatggttctactgcaagaccttattatgtgagtcaacctttgctgaagattttccaggaggaaaatccacaaactaggaagcagtagaagagcaaactggtcgtcctacagctgtgtgttaccttttctccatctgctgtgtctgtgcaacatttgtttcataagtgctttgtgtttagcaacactgtattcacgaccttgttggcttgcatttgcatgttttataccaaagcttatactgtactatgtgaagccatcagaagtcgcaagggaattgttaataacataaaacatttttatactaagatcatttgttttgtaattcgtttttaaagagtggcttggatgttttgaaaatactactgaatatgttaatattcttttaaatcttagattgaaaaatgatacattacttaaattgatagctcctaatatatttttaaaattacaactaaaagaagacttcttctgcagggaaaattggtcagcaaagtgaaattaaaaattttaaagtttttcccactctcgttggacagtaaatcagtgaaaggactgccccagttgagagtttgctctctttaagtatagaatgtttcctcttaaacaaattgccaatcatccagcctttactacttagccctctgacaaagtgccttactggctatttaatattacccagcttttatgggcaagtttacaaacattgttttttaaaaaattaaaacctgcaatgtttcgtgattaaaacaagtcttattgcatttgtttcactcttagctcactgattggaaaacatttgtcattttgctctgtttgatatcctcactattatggaatacattgtgcagctaaacaatttcccttgcgcctagtggacattcatgaatgtgtactacacgcaagaagaaacaaaccccgaaagaacacttgttggatttctttgtttttttttttactaaaagagaagttttaaaatgaaatgttttctatagtagatctttgaaaatacaataggtataatactgcatttctcagtgttttacaaagatcagaaagagaaacttctaggaattgcaaagggaaactttactcctcgaaagggtgctcacagatgtcatgtactgaatagctcccttttaaatgatcatttattttcatcaaagcctgttctatatatgccacttcattttctaacttttggtatgaaaaaatcagtttacttacagtatgttaattgtattgtactactataaacaggaacataatttccaattcagttttaaataattttaccagtactactaacttttaaggaaattaattcagttggttactcagtgtttgttacagaaagagtccagaaaagtattcaccctaagagaatgtcaatcatataatgataatttgtgaaagctttgagaatcaatcatcagtaagttactatcagtttataaaatattatcacatttgtttaaatgtgactttagatacttttatgccaaaaataaactcacatgagcacatgacagtctgagctctataatcagtgtgcttctgctgtgcagaaatgttagaaacgtattgtctaaatatctttgataattaaaatgtttaatatttaatgaaatttgttgttacttgttttaaatcttttttcttttaataaagatttaaataagaaat

SEQ ID NO: 184355 - DNA, 2401 bp, Homo sapiens
  Payload ID: 16296
  Gene Symbol: SLC45A1
  Gene Name: solute carrier family 45, member 1
  Uniprot ID: Q9Y2W3
  ENST ID: ENST00000289877
  CDS Start-End: 1-2247
atgatccccgcagccagcagcaccccgccgggagatgccctcttccccagcgtggccccacaggacttctggaggtcccaggtcacgggctactcggggtccgtgacacgacacctcagtcaccgggccaacaacttcaaacgacaccccaagaggaggaagtgcattcgtccctccccacccccgccccccaacaccccgtgcccgcttgagctggtggacttcggggacctgcacccccagaggtccttccgggagctgcttttcaacggctgcattctctttggcatcgagttcagctacgccatggagacggcgtacgtgaccccggtgctcctgcagatgggcctgcccgaccagctctacagcctggtgtggttcatcagccccatcctcggattcctactgcagcctctgttgggtgcttggagtgaccggtgtacctcaaggtttggaaggagacgccctttcattcttgtcctggctataggggcactgctgggcctctcgctcttgctgaatggccgggacattggcatcgccctggctgacgtgaccgggaaccacaagtggggcctgctgctgaccgtgtgcggtgtggtgctgatggactttagcgccgactcggcggacaaccccagccacgcctacatgatggacgtgtgcagccccgcagaccaggaccgaggcctgaacatccacgccctcctggcaggtctcggaggaggctttggatacgtggtcggcggaatccactgggataaaacgggcttcgggagggccctggggggacagctccgagtcatttacctcttcactgcggtcaccctgagcgtcaccaccgtcctgaccctggtcagcatccctgagaggccgctgcggccgccgagtgagaagcgggcagccatgaagagccccagcctcccgctgcccccgtccccacccgtcctgccagaggaaggccctggcgacagcctcccgtcgcacacggccaccaacttctccagccccatctcgccgcccagccccctcacgcccaagtacggcagcttcatcagcagggacagctccctgacgggcatcagcgagttcgcctcatcctttggcacggccaacatagacagcgtcctcattgactgcttcacgggcggccacgacagctacctggccatccctggcagcgtccccaggccgcccatcagcgtcagcttcccccgggcccccgacggcttctaccgccaggaccgtggacttctggagggcagagagggtgccctgacctccggctgtgacggggacattctgagggtgggctccttggacacctctaagccgaggtcatcagggattctgaagagacctcagaccttggccatcccggacgcagccggaggagggggtcccgaaaccagcaggagaaggaatgtgaccttcagtcagcaggtggccaatatcctgctcaacggcgtgaagtatgagagcgagctgacgggctccagcgagcgcgcggagcagcctctgtccgtggggcgcctctgctccaccatctgcaacatgcccaaggcgctacgcaccctctgcgtcaaccacttcctggggtggctctcattcgaggggatgttgctcttctacacagacttcatgggcgaggtggtgtttcagggggaccccaaggccccgcacacatcagaggcgtatcagaagtacaacagcggcgtgaccatgggctgctggggcatgtgtatctacgccttcagtgctgccttctactcagctatcctggagaagctggaggagttcctcagcgtccgcaccctctacttcatcgcctatctcgccttcggcctggggaccgggcttgccaccctctccaggaacctctacgtggtcctgtcgctctgcataacctacgggattttattttccaccctgtgcaccttgccttactcgctgctctgcgattactatcagagtaagaagtttgcagggtccagtgcggacggcacccggcggggcatgggcgtggacatctctctgctgagctgccagtacttcctggctcagattctggtctccctggtcctggggcccctgacctcggccgtgggcagtgccaacggggtgatgtacttctccagcctcgtgtccttcctgggctgcctgtactcctccctgtttgtcatttatgaaattcctcccagcgacgctgcagacgaggagcaccggcccctcctgctgaacgtctgacatcgcggagcctcgactccggacacgcgcctgcacctgggggtctggagcaggccgaccagtgaggaccaaagggccttgttggacagggggactggctgcctactggaatgtaaatatgtgataaaataataaatgacagcggcaaagccta

SEQ ID NO: 184356 - DNA, 2784 bp, Homo sapiens
  Payload ID: 16296
  Gene Symbol: SLC45A1
  Gene Name: solute carrier family 45, member 1
  ENST ID: ENST00000471889
  CDS Start-End: 284-2632
tttatacatgaagacacgaaaatgtatttatttcttttaaaatcagaagaaaacggtgagaactgtgaggccggggggacgttttcctccgggatcctggcagatcctgcagaccgcgccgtcgtgcgcgaagcaccgggacgggcctcccgcgggaagggcccaggaggacaccgggctcccctcccgcccgcggggccccagacgcggcgccgctttaaggctccgggccccgcgcggatgcggaggctgcggccgtgacgtcagcgccccgccccgggtgatgctgcagcagccgggaccgcggccgggcaggcagcagcccagcggggacagggatgcctgccgtctccacccacagggacgcccaccagccctccccacgatgatccccgcagccagcagcaccccgccgggagatgccctcttccccagcgtggccccacaggacttctggaggtcccaggtcacgggctactcggggtccgtgacacgacacctcagtcaccgggccaacaacttcaaacgacaccccaagaggaggaagtgcattcgtccctccccacccccgccccccaacaccccgtgcccgcttgagctggtggacttcggggacctgcacccccagaggtccttccgggagctgcttttcaacggctgcattctctttggcatcgagttcagctacgccatggagacggcgtacgtgaccccggtgctcctgcagatgggcctgcccgaccagctctacagcctggtgtggttcatcagccccatcctcggattcctactgcagcctctgttgggtgcttggagtgaccggtgtacctcaaggtttggaaggagacgccctttcattcttgtcctggctataggggcactgctgggcctctcgctcttgctgaatggccgggacattggcatcgccctggctgacgtgaccgggaaccacaagtggggcctgctgctgaccgtgtgcggtgtggtgctgatggactttagcgccgactcggcggacaaccccagccacgcctacatgatggacgtgtgcagccccgcagaccaggaccgaggcctgaacatccacgccctcctggcaggtctcggaggaggctttggatacgtggtcggcggaatccactgggataaaacgggcttcgggagggccctggggggacagctccgagtcatttacctcttcactgcggtcaccctgagcgtcaccaccgtcctgaccctggtcagcatccctgagaggccgctgcggccgccgagtgagaagcgggcagccatgaagagccccagcctcccgctgcccccgtccccacccgtcctgccagaggaaggccctggcgacagcctcccgtcgcacacggccaccaacttctccagccccatctcgccgcccagccccctcacgcccaagtacggcagcttcatcagcagggacagctccctgacgggcatcagcgagttcgcctcatcctttggcacggccaacatagacagcgtcctcattgactgcttcacgggcggccacgacagctacctggccatccctggcagcgtccccaggccgcccatcagcgtcagcttcccccgggcccccgacggcttctaccgccaggaccgtggacttctggagggcagagagggtgccctgacctccggctgtgacggggacattctgagggtgggctccttggacacctctaagccgaggtcatcagggattctgaagagacctcagaccttggccatcccggacgcagccggaggagggggtcccgaaaccagcaggagaaggaatgtgaccttcagtcagcaggtggccaatatcctgctcaacggcgtgaagtatgagagcgagctgacgggctccagcgagcgcgcggagcagcctctgtccgtggggcgcctctgctccaccatctgcaacatgcccaaggcgctacgcaccctctgcgtcaaccacttcctggggtggctctcattcgaggggatgttgctcttctacacagacttcatgggcgaggtggtgtttcagggggaccccaaggccccgcacacatcagaggcgtatcagaagtacaacagcggcgtgaccatgggctgctggggcatgtgtatctacgccttcagtgctgccttctactcagctatcctggagaagctggaggagttcctcagcgtccgcaccctctacttcatcgcctatctcgccttcggcctggggaccgggcttgccaccctctccaggaacctctacgtggtcctgtcgctctgcataacctacgggattttattttccaccctgtgcaccttgccttactcgctgctctgcgattactatcagagtaagaagtttgcagggtccagtgcggacggcacccggcggggcatgggcgtggacatctctctgctgagctgccagtacttcctggctcagattctggtctccctggtcctggggcccctgacctcggccgtgggcagtgccaacggggtgatgtacttctccagcctcgtgtccttcctgggctgcctgtactcctccctgtttgtcatttatgaaattcctcccagcgacgctgcagacgaggagcaccggcccctcctgctgaacgtctgacatcgcggagcctcgactccggacacgcgcctgcacctgggggtctggagcaggccgaccagtgaggaccaaagggccttgttggacagggggactggctgcctactggaatgtaaatatgtgataaaataataaatgacagcggcaaagcc

SEQ ID NO: 184357 - DNA, 1772 bp, Homo sapiens
  Payload ID: 16297
  Gene Symbol: SLC45A2
  Gene Name: solute carrier family 45, member 2
  Uniprot ID: Q9UMX9
  ENST ID: ENST00000296589
  CDS Start-End: 148-1740
ggcaggaaagaatttgagcccctcccccagcctgaccatctctgttggttgctcggccaggctccacgtcaaatccagtttgaaacacagaccctaggaccacgcaggaggtggtgggctcgcaggaaggttcctctcccagtggccatgggtagcaacagtgggcaggctggccgccacatctataaatccctagctgatgatggcccctttgactctgtggagccgcctaaaagacccaccagcagactcatcatgcacagcatggccatgttcggaagagagttctgctacgcggtggaggcagcgtatgtgaccccagtcctgctcagcgtaggtctgcccagcagcctgtacagcattgtgtggttcctcagccccatcctgggattcctgctgcagcccgtggtcggatcggccagcgaccactgccggtccaggtggggccgccggagaccctacatcctcaccctgggagtcatgatgctcgtgggcatggctctgtacctcaatggggctactgttgtagcagctttgattgctaacccaaggaggaagctggtttgggccataagtgtcaccatgataggtgtcgttctctttgattttgctgccgacttcattgatgggcccatcaaagcctacttatttgatgtctgctcccatcaggacaaggagaagggcctccactaccatgccctcttcacaggttttggaggtgccctgggttaccttttgggtgctatagactgggcccatctggagctgggaagactgttgggtacagaattccaggtcatgttcttcttctctgcattggtgctcactttgtgttttactgttcatctgtgcagtatctctgaagccccacttacagaggttgcaaagggcattcccccacagcaaacccctcaggaccctccattgtcatcagatggaatgtacgagtatggttctatcgagaaagttaaaaatggttacgtaaatccagagctggcaatgcagggagcaaaaaacaaaaatcatgctgaacagactcgcagggcaatgacattaaagtcactgctgagagcactggtgaacatgcctcctcactaccgctacctttgcatcagccacctcattggatggacagccttcctgtccaacatgctgttcttcacagatttcatgggccagattgtgtaccgcggggatccctatagtgcacacaactccacagagtttctcatctacgaaagaggagtcgaggttggatgttggggcttgtgcatcaactccgtgttttcctcactttattcttactttcagaaagttttggtatcctacattggattaaagggtctttacttcacgggatatttgctgtttggcctggggacgggatttattgggctcttcccgaatgtctactccaccctggtcctgtgcagcctgtttggtgtaatgtccagcaccctgtacactgtgccctttaacctcattactgagtaccaccgcgaggaagaaaaggagaggcagcaggccccaggaggggacccagacaacagcgtgagagggaagggcatggactgcgccaccctcacatgcatggtgcagctggctcagatcctggtcggaggtggcctgggctttctggtcaacacagccgggaccgttgtcgtcgtggtgatcacagcgtctgcggtggcactgataggctgttgctttgtcgctctctttgttagatatgtggattaggtcaataaagagacaatgaccctaacctcaga

SEQ ID NO: 184358 - DNA, 2723 bp, Homo sapiens
  Payload ID: 16297
  Gene Symbol: SLC45A2
  Gene Name: solute carrier family 45, member 2
  Uniprot ID: Q9UMX9
  ENST ID: ENST00000382102
  CDS Start-End: 59-1441
gaccctaggaccacgcaggaggtggtgggctcgcaggaaggttcctctcccagtggccatgggtagcaacagtgggcaggctggccgccacatctataaatccctagctgatgatggcccctttgactctgtggagccgcctaaaagacccaccagcagactcatcatgcacagcatggccatgttcggaagagagttctgctacgcggtggaggcagcgtatgtgaccccagtcctgctcagcgtaggtctgcccagcagcctgtacagcattgtgtggttcctcagccccatcctgggattcctgctgcagcccgtggtcggatcggccagcgaccactgccggtccaggtggggccgccggagaccctacatcctcaccctgggagtcatgatgctcgtgggcatggctctgtacctcaatggggctactgttgtagcagctttgattgctaacccaaggaggaagctggtttgggccataagtgtcaccatgataggtgtcgttctctttgattttgctgccgacttcattgatgggcccatcaaagcctacttatttgatgtctgctcccatcaggacaaggagaagggcctccactaccatgccctcttcacaggttttggaggtgccctgggttaccttttgggtgctatagactgggcccatctggagctgggaagactgttgggtacagaattccaggtcatgttcttcttctctgcattggtgctcactttgtgttttactgttcatctgtgcagtatctctgaagccccacttacagaggttgcaaagggcattcccccacagcaaacccctcaggaccctccattgtcatcagatggaatgtacgagtatggttctatcgagaaagttaaaaatggttacgtaaatccagagctggcaatgcagggagcaaaaaacaaaaatcatgctgaacagactcgcagggcaatgacattaaagtcactgctgagagcactggtgaacatgcctcctcactaccgctacctttgcatcagccacctcattggatggacagccttcctgtccaacatgctgttcttcacagatttcatgggccagattgtgtaccgcggggatccctatagtgcacacaactccacagagtttctcatctacgaaagaggagtcgaggttggatgttggggcttgtgcatcaactccgtgttttcctcactttattcttactttcagaaagttttggtatcctacattggattaaagggtctttacttcacgggatatttgctgtttggcctggggacgggatttattgggctcttcccgaatgtctactccaccctggtcctgtgcagcctgtttggtgtaatgtccagcaccctgtacactgtgccctttaacctcattactgagtaccaccgcgaggaagaaaaggaggtgtgctgtcattgaacctctgccttgggtaacatccagactcatctgaaggctggggaggatttggtagcaatgtgtagagcagagctggaaaataagggttcttgaaacagcaacagtcaaatgcccaaccaactgcaaccatgatctggtacaggcatgctcaccagcccagcccagcccagctgtcctgtcctccttattctcaactcctgctcacttagggagctgtagggcaagaagtgttactcccatttttctaattagaaaaaggcttggtgaggctgagaaaccagcccacaattacacaaagacaaaaaaagggggacccaggtcttctgtaaccacctcataggtctccctggtgccacctgcagcatttctagataccgacaataagggtctccctatccccaactttcagaggtacatagtggaatttcttggcattatttgctgagggtaggaaagtcctaggcaatggagtccagattttagtaagtcagaccccatgtgtgagaaggaaagctggaatcatgggtggtaatccccactttgctgccctgagcgggacctgtgccatttaaaccttggaacgcaactagtgaacaagcgcctatgcagtgcttataacagagttggtgtttccactctaaaattaccacctcttcttatcaaaatttgcaactttcttcctgtgaaaataggcttatagttccttaactggagcaatgatataaaagctacagagataactccaagtttaatccagctcagcatgaaactgcaaaaacactgaacatataaccatcagactataattctggccatgtttttcatcatttgatctggcagcagggcagaggtgcaccaggagtaaaaacctttcaaaaaagaggtgtggctttcctcatcccctggcaaacattgtcaccaaggtgggatgttgctgctaatgggagagtcatcataaaaaactgtccctacaaggagagtgttacatggtgttgggggaagaaaacctacgcttcaggctcagagaaacctggattcaaatcctgcctctctcacttggaagctgtgttacactggggatgttatttacttgtttattagttagcacttagaatgagttcatttttaggtgagataatatattcacaatgatacacaaaagtgcacactgtgtgctccctttaccatttactatctccctccagccccaacgtgttaccactcttactagttttttgttaatctttccggcatttttaaataaaaaccaagcaaatgtaaa

SEQ ID NO: 184359 - DNA, 1040 bp, Homo sapiens
  Payload ID: 16297
  Gene Symbol: SLC45A2
  Gene Name: solute carrier family 45, member 2
  ENST ID: ENST00000509381
  CDS Start-End: 62-793
acagaccctaggaccacgcaggaggtggtgggctcgcaggaaggttcctctcccagtggccatgggtagcaacagtgggcaggctggccgccacatctataaatccctagctgatgatggcccctttgactctgtggagccgcctaaaagacccaccagcagactcatcatgcacagcatggccatgttcggaagagagttctgctacgcggtggaggcagcgtatgtgaccccagtcctgctcagcgtaggtctgcccagcagcctgtacagcattgtgtggttcctcagccccatcctgggattcctgctgcagcccgtggtcggatcggccagcgaccactgccggtccaggtggggccgccggagaccctacatcctcaccctgggagtcatgatgctcgtgggcatggctctgtacctcaatggggctactgttgtagcagctttgattgctaacccaaggaggaagctggtttgggccataagtgtcaccatgataggtgtcgttctctttgattttgctgccgacttcattgatgggcccatcaaagcctacttatttgatgtctgctcccatcaggacaaggagaagggcctccactaccatgccctcttcacagactcgcagggcaatgacattaaagtcactgctgagagcactggtgaacatgcctcctcactaccgctacctttgcatcagccacctcattggatggacagccttcctgtccaacatgctgttcttcacagatttcatgggccagattgtgtaccgcggggatccctatagtgcacacaactccacagagtttctcatctacgaaagaggagtcgaggttggatgttggggcttgtgcatcaactccgtgttttcctcactttattcttgtaagtctttctctctcctaaggatgtcttctaaaagtttctggtctagcacaacttggatttgatatttctatgtgtatttcctactgtttaaaataccagattcttaataaatctatggacgtcaggaaaaactatcaccttaaaaa

SEQ ID NO: 184360 - DNA, 740 bp, Homo sapiens
  Payload ID: 16297
  Gene Symbol: SLC45A2
  Gene Name: solute carrier family 45, member 2
  ENST ID: ENST00000510600
  CDS Start-End: 3-740
gcatggctctgtacctcaatggggctactgttgtagcaggttttggaggtgccctgggttaccttttgggtgctatagactgggcccatctggagctgggaagactgttgggtacagaattccaggtcatgttcttcttctctgcattggtgctcactttgtgttttactgttcatctgtgcagtatctctgaagccccacttacagaggttgcaaagggcattcccccacagcaaacccctcaggaccctccattgtcatcagatggaatgtacgagtatggttctatcgagaaagttaaaaatggttacgtaaatccagagctggcaatgcagggagcaaaaaacaaaaatcatgctgaacagactcgcagggcaatgacattaaagtcactgctgagagcactggtgaacatgcctcctcactaccgctacctttgcatcagccacctcattggatggacagccttcctgtccaacatgctgttcttcacagatttcatgggccagattgtgtaccgcggggatccctatagtgcacacaactccacagagtttctcatctacgaaagaggagtcgaggttggatgttggggcttgtgcatcaactccgtgttttcctcactttattcttactttcagaaagttttggtatcctacattggattaaagggtctttacttcacgggatatttgctgtttggcctggggacgggatttattgggctcttcccgaatgtc

SEQ ID NO: 184361 - DNA, 1777 bp, Homo sapiens
  Payload ID: 16297
  Gene Symbol: SLC45A2
  Gene Name: solute carrier family 45, member 2
  ENST ID: ENST00000626332
  CDS Start-End: 1-495
actcgcagggcaatgacattaaagtcactgctgagagcactggtgaacatgcctcctcactaccgctacctttgcatcagccacctcattggatggacagccttcctgtccaacatgctgttcttcacagatttcatgggccagattgtgtaccgcggggatccctatagtgcacacaactccacagagtttctcatctacgaaagaggagtcgaggttggatgttggggcttgtgcatcaactccgtgttttcctcactttattcttactttcagaaagttttggtatcctacattggattaaagggtctttacttcacgggatatttgctgtttggcctggggacgggatttattgggctcttcccgaatgtctactccaccctggtcctgtgcagcctgtttggtgtaatgtccagcaccctgtacactgtgccctttaacctcattactgagtaccaccgcgaggaagaaaaggaggtgtgctgtcattgaacctctgccttgggtaacatccagactcatctgaaggctggggaggatttggtagcaatgtgtagagcagagctggaaaataagggttcttgaaacagcaacagtcaaatgcccaaccaactgcaaccatgatctggtacaggcatgctcaccagcccagcccagcccagctgtcctgtcctccttattctcaactcctgctcacttagggagctgtagggcaagaagtgttactcccatttttctaattagaaaaaggcttggtgaggctgagaaaccagcccacaattacacaaagacaaaaaaagggggacccaggtcttctgtaaccacctcataggtctccctggtgccacctgcagcatttctagataccgacaataagggtctccctatccccaactttcagaggtacatagtggaatttcttggcattatttgctgagggtaggaaagtcctaggcaatggagtccagattttagtaagtcagaccccatgtgtgagaaggaaagctggaatcatgggtggtaatccccactttgctgccctgagcgggacctgtgccatttaaaccttggaacgcaactagtgaacaagcgcctatgcagtgcttataacagagttggtgtttccactctaaaattaccacctcttcttatcaaaatttgcaactttcttcctgtgaaaataggcttatagttccttaactggagcaatgatataaaagctacagagataactccaagtttaatccagctcagcatgaaactgcaaaaacactgaacatataaccatcagactataattctggccatgtttttcatcatttgatctggcagcagggcagaggtgcaccaggagtaaaaacctttcaaaaaagaggtgtggctttcctcatcccctggcaaacattgtcaccaaggtgggatgttgctgctaatgggagagtcatcataaaaaactgtccctacaaggagagtgttacatggtgttgggggaagaaaacctacgcttcaggctcagagaaacctggattcaaatcctgcctctctcacttggaagctgtgttacactggggatgttatttacttgtttattagttagcacttagaatgagttcatttttaggtgagataatatattcacaatgatacacaaaagtgcacactgtgtgctccctttaccatttactatctccctccagccccaacgtgttaccactcttactagttttttgttaatctttccggcatttttaaataaaaaccaagcaaatgtaaa

SEQ ID NO: 184362 - DNA, 417 bp, Homo sapiens
  Payload ID: 16297
  Gene Symbol: SLC45A2
  Gene Name: solute carrier family 45, member 2
  ENST ID: ENST00000631273
  CDS Start-End: 1-170
actcgcagggcaatgacattaaagtcactgctgagagcactggtgaacatgcctcctcactaccgctacctttgcatcagccacctcattggatggacagccttcctgtccaacatgctgttcttcacagatttcatgggccagattgtgtaccgcggggatccctatagtgcacacaactccacagagtttctcatctacgaaagaggagtcgaggttggatgttggggcttgtgcatcaactccgtgttttcctcactttattcttgtaagtctttctctctcctaaggatgtcttctaaaagtttctggtctagcacaacttggatttgatatttctatgtgtatttcctactgtttaaaataccagattcttaataaatctatggacgtcaggaaaaactatcaccttaaaaa

SEQ ID NO: 184363 - DNA, 375 bp, Homo sapiens
  Payload ID: 16297
  Gene Symbol: SLC45A2
  Gene Name: solute carrier family 45, member 2
  ENST ID: ENST00000626082
  CDS Start-End: 1-375
actcgcagggcaatgacattaaagtcactgctgagagcactggtgaacatgcctcctcactaccgctacctttgcatcagccacctcattggatggacagccttcctgtccaacatgctgttcttcacagatttcatgggccagattgtgtaccgcggggatccctatagtgcacacaactccacagagtttctcatctacgaaagaggagtcgaggttggatgttggggcttgtgcatcaactccgtgttttcctcactttattcttactttcagaaagttttggtatcctacattggattaaagggtctttacttcacgggatatttgctgtttggcctggggacgggatttattgggctcttcccgaatgtc

SEQ ID NO: 184364 - DNA, 737 bp, Homo sapiens
  Payload ID: 16297
  Gene Symbol: SLC45A2
  Gene Name: solute carrier family 45, member 2
  ENST ID: ENST00000631255
  CDS Start-End: 1-705
actcgcagggcaatgacattaaagtcactgctgagagcactggtgaacatgcctcctcactaccgctacctttgcatcagccacctcattggatggacagccttcctgtccaacatgctgttcttcacagatttcatgggccagattgtgtaccgcggggatccctatagtgcacacaactccacagagtttctcatctacgaaagaggagtcgaggttggatgttggggcttgtgcatcaactccgtgttttcctcactttattcttactttcagaaagttttggtatcctacattggattaaagggtctttacttcacgggatatttgctgtttggcctggggacgggatttattgggctcttcccgaatgtctactccaccctggtcctgtgcagcctgtttggtgtaatgtccagcaccctgtacactgtgccctttaacctcattactgagtaccaccgcgaggaagaaaaggagaggcagcaggccccaggaggggacccagacaacagcgtgagagggaagggcatggactgcgccaccctcacatgcatggtgcagctggctcagatcctggtcggaggtggcctgggctttctggtcaacacagccgggaccgttgtcgtcgtggtgatcacagcgtctgcggtggcactgataggctgttgctttgtcgctctctttgttagatatgtggattaggtcaataaagagacaatgaccctaacctcaga

SEQ ID NO: 184365 - DNA, 3341 bp, Homo sapiens
  Payload ID: 16298
  Gene Symbol: SLC45A3
  Gene Name: solute carrier family 45, member 3
  Uniprot ID: Q96JT2
  ENST ID: ENST00000367145
  CDS Start-End: 297-1958
aaggaagggggggcggaaccagcctgcacgcgctggctccgggtgacagccgcgcgcctcggccaggatctgagtgatgagacgtgtccccactgaggtgccccacagcagcaggtgttgagcatgggctgagaagctggaccggcaccaaagggctggcagaaatgggcgcctggctgattcctaggcagttggcggcagcaaggaggagaggccgcagcttctggagcagagccgagacgaagcagttctggagtgcctgaacggccccctgagccctacccgcctggcccactatggtccagaggctgtgggtgagccgcctgctgcggcaccggaaagcccagctcttgctggtcaacctgctaacctttggcctggaggtgtgtttggccgcaggcatcacctatgtgccgcctctgctgctggaagtgggggtagaggagaagttcatgaccatggtgctgggcattggtccagtgctgggcctggtctgtgtcccgctcctaggctcagccagtgaccactggcgtggacgctatggccgccgccggcccttcatctgggcactgtccttgggcatcctgctgagcctctttctcatcccaagggccggctggctagcagggctgctgtgcccggatcccaggcccctggagctggcactgctcatcctgggcgtggggctgctggacttctgtggccaggtgtgcttcactccactggaggccctgctctctgacctcttccgggacccggaccactgtcgccaggcctactctgtctatgccttcatgatcagtcttgggggctgcctgggctacctcctgcctgccattgactgggacaccagtgccctggccccctacctgggcacccaggaggagtgcctctttggcctgctcaccctcatcttcctcacctgcgtagcagccacactgctggtggctgaggaggcagcgctgggccccaccgagccagcagaagggctgtcggccccctccttgtcgccccactgctgtccatgccgggcccgcttggctttccggaacctgggcgccctgcttccccggctgcaccagctgtgctgccgcatgccccgcaccctgcgccggctcttcgtggctgagctgtgcagctggatggcactcatgaccttcacgctgttttacacggatttcgtgggcgaggggctgtaccagggcgtgcccagagctgagccgggcaccgaggcccggagacactatgatgaaggcgttcggatgggcagcctggggctgttcctgcagtgcgccatctccctggtcttctctctggtcatggaccggctggtgcagcgattcggcactcgagcagtctatttggccagtgtggcagctttccctgtggctgccggtgccacatgcctgtcccacagtgtggccgtggtgacagcttcagccgccctcaccgggttcaccttctcagccctgcagatcctgccctacacactggcctccctctaccaccgggagaagcaggtgttcctgcccaaataccgaggggacactggaggtgctagcagtgaggacagcctgatgaccagcttcctgccaggccctaagcctggagctcccttccctaatggacacgtgggtgctggaggcagtggcctgctcccacctccacccgcgctctgcggggcctctgcctgtgatgtctccgtacgtgtggtggtgggtgagcccaccgaggccagggtggttccgggccggggcatctgcctggacctcgccatcctggatagtgccttcctgctgtcccaggtggccccatccctgtttatgggctccattgtccagctcagccagtctgtcactgcctatatggtgtctgccgcaggcctgggtctggtcgccatttactttgctacacaggtagtatttgacaagagcgacttggccaaatactcagcgtagaaaacttccagcacattggggtggagggcctgcctcactgggtcccagctccccgctcctgttagccccatggggctgccgggctggccgccagtttctgttgctgccaaagtaatgtggctctctgctgccaccctgtgctgctgaggtgcgtagctgcacagctgggggctggggcgtccctctcctctctccccagtctctagggctgcctgactggaggccttccaagggggtttcagtctggacttatacagggaggccagaagggctccatgcactggaatgcggggactctgcaggtggattacccaggctcagggttaacagctagcctcctagttgagacacacctagagaagggtttttgggagctgaataaactcagtcacctggtttcccatctctaagccccttaacctgcagcttcgtttaatgtagctcttgcatgggagtttctaggatgaaacactcctccatgggatttgaacatatgaaagttatttgtaggggaagagtcctgaggggcaacacacaagaaccaggtcccctcagcccacagcactgtctttttgctgatccacccccctcttaccttttatcaggatgtggcctgttggtccttctgttgccatcacagagacacaggcatttaaatatttaacttatttatttaacaaagtagaagggaatccattgctagcttttctgtgttggtgtctaatatttgggtagggtgggggatccccaacaatcaggtcccctgagatagctggtcattgggctgatcattgccagaatcttcttctcctggggtctggccccccaaaatgcctaacccaggaccttggaaattctactcatcccaaatgataattccaaatgctgttacccaaggttagggtgttgaaggaaggtagagggtggggcttcaggtctcaacggcttccctaaccacccctcttctcttggcccagcctggttccccccacttccactcccctctactctctctaggactgggctgatgaaggcactgcccaaaatttcccctacccccaactttcccctacccccaactttccccaccagctccacaaccctgtttggagctactgcaggaccagaagcacaaagtgcggtttcccaagcctttgtccatctcagcccccagagtatatctgtgcttggggaatctcacacagaaactcaggagcaccccctgcctgagctaagggaggtcttatctctcagggggggtttaagtgccgtttgcaataatgtcgtcttatttatttagcggggtgaatattttatactgtaagtgagcaatcagagtataatgtttatggtgacaaaattaaaggctttcttatatgttta

SEQ ID NO: 184366 - DNA, 3546 bp, Homo sapiens
  Payload ID: 16299
  Gene Symbol: SLC45A4
  Gene Name: solute carrier family 45, member 4
  Uniprot ID: Q5BKX6
  ENST ID: ENST00000024061
  CDS Start-End: 309-2705
tgatagggcagagaggagcccatgctccagctgcggggagtgcctgcccgaggagctggccagtgaagacaggtgcctgccagtgaagacaggtgcccacaagctggacacagggtcggccctgagacaggacagcagctgcggaatgttcccgctggctttctggagcgccagcgtcctgcttgggtctggccaggggcctctagccaggctgttgaggcgcccctccttgttgaagaggagaaacagtggccccctgggagttgctgggaggtgcctggcacagggcggcagggacagcatcatctatggggaaagcaagcccagcctcagggctgtcccgtccaaagacccttgtgagtccactgaggtcaaatcaatggagtcttcagaaaggccttccggagcagtactacagcctcacctggttcctgagccccatccttggcctcatcttcacacctctcattgggtctgcgagtgaccggtgcaccctgagctggggccgccggcggcccttcatcctcgccctctgcgttggcgtcctctttggcgttgcacttttccttaacggctctgccatcggtctggccctcggcgatgtccccaaccggcagcccattggcatcgtgctcacggtgctgggagtggtggtcctggacttcagcgccgatgccaccgaggggcccatccgtgcctatctgctggacgtggtggacagcgaggagcaggacatggccctcaacatccacgccttctctgccggcctcggcggagccatcggctacgtgctgggtgggctggactggacccagaccttcctgggcagctggttccggacccagaaccaggtgctcttcttctttgccgccatcatcttcacggtgtccgtggccctgcacctgttcagcatcgacgaggagcagtacagcccgcagcaggagcgcagcgctgaggagcccggcgccctggatgggggcgagccgcacggcgtccctgccttcccagacgaggtacagtcggagcacgagctggccctggactacccggacgtggacatcatgcgcagcaaaagcgactcggcattgcacgtgccggacaccgcgctggacctggagcccgagctgctgttcctgcacgacatcgagccctccatcttccacgacgcctcctaccccgccaccccccgcagcaccagccaggagctcgccaagaccaagctgccccgcctggccaccttcctcaaggaagccgccaaggaggacgagaccttgctggataatcacttgaatgaagctaaagtcccaaacggaagtggctcccccacaaaagacgccctcggcggctacaccagggtggacacgaagccctcggccacgtcgagctccatgcggcggcggcggcacgcgttccgcaggcaggcctccagcaccttctcctactacggcaagcttgggtcccactgctaccgctaccggcgcgccaacgccgtggtgctgatcaagccgtcgcgcagcatgagcgacctgtacgacatgcagaagcggcagcggcagcaccggcaccggaaccagagcggggccaccacctccagcggggacaccgagagtgaggagggggagggcgagaccacggtgcgcctgctgtggctctccatgctgaagatgcccagggagctgatgcggctgtgcctctgccacctcctcacctggttctctgtcatcgccgaggccgtgttctacaccgacttcatgggccaggtcatcttcgaaggcgaccccaaggccccctcgaactcgaccgcctggcaagcctacaacgccggggtcaagatgggctgctggggcctggtcatttatgccgccactggtgctatttgttcagccctgttacagaagtacttggacaactacgacctgagcgtcagggtgatctacgtgctggggacgctgggcttctctgtcggcacagccgtgatggccatgtttcccaacgtctacgtcgccatggtcaccatcagcaccatgggcatcgtctccatgagcatctcctactgcccgtacgccctgctgggccagtaccatgacatcaagcagtacatccaccacagccccgggaactccaagcgagggtttggcatagattgtgccatcctgtcctgccaagtgtacatctcgcagatcctggtggcctctgcccttgggggcgtggtcgacgccgtggggactgtccgcgtcatccccatggtggcctctgtgggctctttcctgggcttcctgacggccacattcctggtgatctatcccaacgtgtcagaggaggccaaggaggagcagaaaggcctgtcttccccgttggccggcgaaggcagggccggtgggaacagcgaaaagcccaccgtgctgaagctcacgcggaaggagggcctgcagggaccggtggagacagaacgcctgcaggtattgacgtctgtcagatctcgtcacattggctggtgccgcagctgttggagagtatttttctttatgattattttagaaaaaaaattttcttttccacaatgtggttctcttagaagaatgacgtatcttcttttcctcagcgagttggacacattgtgcccagggcagccctgtccttgggcagcgaccgcacaccaaagctgggaggaggctggtccggggggcctgggcagaagacagtgatttgcaggggtggctcccagacaccctgcccagggatgggctgggcaccacctgggggcggagcgtgagctccagacgagctcctgcgtgcgcgtgtgagtgtgtctgcgcccagccatgtgaccccgctcgtcccgtctgaaggactctcctaggaggccaggttgcccctccagaccgctcccaacgtcagggggaaggaaacgttgactttcactgcactttgattcgtctctaaaccatttgctggggattcctgagagcagagctcccagcgggccctgcctcccaagtcccgccgcaaggctacctcgggtgtgtggatgtgcgagggcctcccccgcttgcgaaggggacatgcgtgctggaacctgtcggaactccatgccttcctcgcctgctcacctgctcgacgctggaatcgggacaggtgcaaagggacgcagacgtctgggacagctaaggcccgtgtcaccggagggctccgcacagtcgttctggtttcaacgaataagcaaaactcgggcaagtactgcagctatttggaaatgttttccaaaccacagtctctttagaactaagcctatttgaaacggtcggtgtaggcttactgagatcaggagacagggaggccccgcacatcacacagataaagtcagacaattgtaattaatacttttgctgcctcaagttgttttttaaataaagtactttgaaatgcatgagaatcatgctgcaatatgatcattctagagcaaatatatatatacacgtatatatatttcaagatgaaactaaagcagtttttaaataaattacttgaattttctgtgtatttaaa

SEQ ID NO: 184367 - DNA, 3470 bp, Homo sapiens
  Payload ID: 16299
  Gene Symbol: SLC45A4
  Gene Name: solute carrier family 45, member 4
  ENST ID: ENST00000517878
  CDS Start-End: 1-2427
atgaaaatggctccgcagaatgccgacccggaatctatgcaagttcaagagttatccgtgcccctgccggacccgcagaaagccggaggcgcagaggccgagaactgcgagaccatcagcgaggggtccatagaccgaatccccatgcgcctgtgggtgatgcacggggcggtgatgtttggcagggagttctgttacgccatggaaaccgctctggtcacaccaatactgttgcagattggccttccggagcagtactacagcctcacctggttcctgagccccatccttggcctcatcttcacacctctcattgggtctgcgagtgaccggtgcaccctgagctggggccgccggcggcccttcatcctcgccctctgcgttggcgtcctctttggcgttgcacttttccttaacggctctgccatcggtctggccctcggcgatgtccccaaccggcagcccattggcatcgtgctcacggtgctgggagtggtggtcctggacttcagcgccgatgccaccgaggggcccatccgtgcctatctgctggacgtggtggacagcgaggagcaggacatggccctcaacatccacgccttctctgccggcctcggcggagccatcggctacgtgctgggtgggctggactggacccagaccttcctgggcagctggttccggacccagaaccaggtgctcttcttctttgccgccatcatcttcacggtgtccgtggccctgcacctgttcagcatcgacgaggagcagtacagcccgcagcaggagcgcagcgctgaggagcccggcgccctggatgggggcgagccgcacggcgtccctgccttcccagacgaggtacagtcggagcacgagctggccctggactacccggacgtggacatcatgcgcagcaaaagcgactcggcattgcacgtgccggacaccgcgctggacctggagcccgagctgctgttcctgcacgacatcgagccctccatcttccacgacgcctcctaccccgccaccccccgcagcaccagccaggagctcgccaagaccaagctgccccgcctggccaccttcctcaaggaagccgccaaggaggacgagaccttgctggataatcacttgaatgaagctaaagtcccaaacggaagtggctcccccacaaaagacgccctcggcggctacaccagggtggacacgaagccctcggccacgtcgagctccatgcggcggcggcggcacgcgttccgcaggcaggcctccagcaccttctcctactacggcaagcttgggtcccactgctaccgctaccggcgcgccaacgccgtggtgctgatcaagccgtcgcgcagcatgagcgacctgtacgacatgcagaagcggcagcggcagcaccggcaccggaaccagagcggggccaccacctccagcggggacaccgagagtgaggagggggagggcgagaccacggtgcgcctgctgtggctctccatgctgaagatgcccagggagctgatgcggctgtgcctctgccacctcctcacctggttctctgtcatcgccgaggccgtgttctacaccgacttcatgggccaggtcatcttcgaaggcgaccccaaggccccctcgaactcgaccgcctggcaagcctacaacgccggggtcaagatgggctgctggggcctggtcatttatgccgccactggtgctatttgttcagccctgttacagaagtacttggacaactacgacctgagcgtcagggtgatctacgtgctggggacgctgggcttctctgtcggcacagccgtgatggccatgtttcccaacgtctacgtcgccatggtcaccatcagcaccatgggcatcgtctccatgagcatctcctactgcccgtacgccctgctgggccagtaccatgacatcaagcagtacatccaccacagccccgggaactccaagcgagggtttggcatagattgtgccatcctgtcctgccaagtgtacatctcgcagatcctggtggcctctgcccttgggggcgtggtcgacgccgtggggactgtccgcgtcatccccatggtggcctctgtgggctctttcctgggcttcctgacggccacattcctggtgatctatcccaacgtgtcagaggaggccaaggaggagcagaaaggcctgtcttccccgttggccggcgaaggcagggccggtgggaacagcgaaaagcccaccgtgctgaagctcacgcggaaggagggcctgcagggaccggtggagacagagtccgtgacgcctgcaggtattgacgtctgtcagatctcgtcacattggctggtgccgcagctgttggagagtatttttctttatgattattttagaaaaaaaattttcttttccacaatgtggttctcttagaagaatgacgtatcttcttttcctcagcgagttggacacattgtgcccagggcagccctgtccttgggcagcgaccgcacaccaaagctgggaggaggctggtccggggggcctgggcagaagacagtgatttgcaggggtggctcccagacaccctgcccagggatgggctgggcaccacctgggggcggagcgtgagctccagacgagctcctgcgtgcgcgtgtgagtgtgtctgcgcccagccatgtgaccccgctcgtcccgtctgaaggactctcctaggaggccaggttgcccctccagaccgctcccaacgtcagggggaaggaaacgttgactttcactgcactttgattcgtctctaaaccatttgctggggattcctgagagcagagctcccagcgggccctgcctcccaagtcccgccgcaaggctacctcgggtgtgtggatgtgcgagggcctcccccgcttgcgaaggggacatgcgtgctggaacctgtcggaactccatgccttcctcgcctgctcacctgctcgacgctggaatcgggacaggtgcaaagggacgcagacgtctgggacagctaaggcccgtgtcaccggagggctccgcacagtcgttctggtttcaacgaataagcaaaactcgggcaagtactgcagctatttggaaatgttttccaaaccacagtctctttagaactaagcctatttgaaacggtcggtgtaggcttactgagatcaggagacagggaggccccgcacatcacacagataaagtcagacaattgtaattaatacttttgctgcctcaagttgttttttaaataaagtactttgaaatgcatgagaatcatgctgcaatatgatcattctagagcaaatatatatatacacgtatatatatttcaagatgaaactaaagcagtttttaaataaattacttgaattttctgtgtatttaaaggaacgactgtttaatgtacttgatgggcctctggtcttgccgtgtctcctgccgctggtggcactttgtag

SEQ ID NO: 184368 - DNA, 835 bp, Homo sapiens
  Payload ID: 16299
  Gene Symbol: SLC45A4
  Gene Name: solute carrier family 45, member 4
  ENST ID: ENST00000520137
  CDS Start-End: 549-835
gtctccgcgcgccggccgcagcctcgcagcgctctctccgcgcccgcgtcgctgactgaccgcccggccggccggccgagggagcagcccccgcccggacccgcagccgcctcccgaccccggtgcgcccggggctccgcgcccccgtagcccctgcccggcccggcccggccgccccgccgcccccgcggccccggccggaggagacaggccttccggagcagtactacagcctcacctggttcctgagccccatccttggcctcatcttcacacctctcattgggtctgcgagtgaccggtgcaccctgagctggggccgccggcggcccttcatcctcgccctctgcgttggcgtcctctttggcgttgcacttttccttaacggctctgccatcggtctggccctcggcgatgtccccaaccggcagcccattggcatcgtgctcacggtgctgggagtggtggtcctggacttcagcgccgatgccaccgaggggcccatccgtgcctatctgctggacgtggtggacagcgaggagcaggacatggccctcaacatccacgccttctctgccggcctcggcggagccatcggctacgtgctgggtgggctggactggacccagaccttcctgggcagctggttccggacccagaaccaggtgctcttcttctttgccgccatcatcttcacggtgtccgtggccctgcacctgttcagcatcgacgaggagcagtacagcccgcagcaggagcgcagcgctgaggagcccggcgccctggatgggggcgagccgcacggcgtccctgccttcccagacgaggtacagtc

SEQ ID NO: 184369 - DNA, 7483 bp, Homo sapiens
  Payload ID: 16299
  Gene Symbol: SLC45A4
  Gene Name: solute carrier family 45, member 4
  Uniprot ID: Q5BKX6
  ENST ID: ENST00000519067
  CDS Start-End: 305-2458
agggcagagaggagcccatgctccagctgcggggagtgcctgcccgaggagctggccagtgaagacaggtgcctgccagtgaagacaggtgcccacaagctggacacagggtcggccctgagacaggacagcagctgcggaatgttcccgctggctttctggagcgccagcgtcctgcttgggtctggccaggggcctctagccaggctgttgaggcgcccctccttgttgaagaggagaaacagtggccccctgggagttgctgggaggtgcctggcacagggcggcagggacagcatcatctatggggaaagcaagcccagcctcagggctgtcccgtccaaagacccttgtgagtccactgaggtcaaatcaatggagtcttcagaaaggccttccggagcagtactacagcctcacctggttcctgagccccatccttggcctcatcttcacacctctcattgggtctgcgagtgaccggtgcaccctgagctggggccgccggcggcccttcatcctcgccctctgcgttggcgtcctctttggcgttgcacttttccttaacggctctgccatcggtctggccctcggcgatgtccccaaccggcagcccattggcatcgtgctcacggtgctgggagtggtggtcctggacttcagcgccgatgccaccgaggggcccatccgtgcctatctgctggacgtggtggacagcgaggagcaggacatggccctcaacatccacgccttctctgccggcctcggcggagccatcggctacgtgctgggtgggctggactggacccagaccttcctgggcagctggttccggacccagaaccaggtgctcttcttctttgccgccatcatcttcacggtgtccgtggccctgcacctgttcagcatcgacgaggagcagtacagcccgcagcaggagcgcagcgctgaggagcccggcgccctggatgggggcgagccgcacggcgtccctgccttcccagacgaggtacagtcggagcacgagctggccctggactacccggacgtggacatcatgcgcagcaaaagcgactcggcattgcacgtgccggacaccgcgctggacctggagcccgagctgctgttcctgcacgacatcgagccctccatcttccacgacgcctcctaccccgccaccccccgcagcaccagccaggagctcgccaagaccaagctgccccgcctggccaccttcctcaaggaagccgccaaggaggacgagaccttgctggataatcacttgaatgaagctaaagtcccaaacggaagtggctcccccacaaaagacgccctcggcggctacaccagggtggacacgaagccctcggccacgtcgagctccatgcggcggcggcggcacgcgttccgcaggcaggcctccagcaccttctcctactacggcaagcttgggtcccactgctaccgctaccggcgcgccaacgccgtggtgctgatcaagccgtcgcgcagcatgagcgacctgtacgacatgcagaagcggcagcggcagcaccggcaccggaaccagagcggggccaccacctccagcggggacaccgagagtgaggagggggagggcgagaccacggtgcgcctgctgtggctctccatgctgaagatgcccagggagctgatgcggctgtgcctctgccacctcctcacctggttctctgtcatcgccgaggccgtgttctacaccgacttcatgggccaggtcatcttcgaaggcgaccccaaggccccctcgaactcgaccgcctggcaagcctacaacgccggggtcaagatgggctgctggggcctggtcatttatgccgccactggtgctatttgttcagccctgttacagaagtacttggacaactacgacctgagcgtcagggtgatctacgtgctggggacgctgggcttctctgtcggcacagccgtgatggccatgtttcccaacgtctacgtcgccatggtcaccatcagcaccatgggcatcgtctccatgagcatctcctactgcccgtacgccctgctgggccagtaccatgacatcaagcagtacatccaccacagccccgggaactccaagcgagggtttggcatagattgtgccatcctgtcctgccaagtgtacatctcgcagatcctggtggcctctgcccttgggggcgtggtcgacgccgtggggactgtccgcgtcatccccatggtggcctctgtgggctctttcctgggcttcctgacggccacattcctggtgatctatcccaacgtgtcagaggaggccaaggaggagcagaaaggcctgtcttccccgttggccggcgaaggcagggccggtgggaacagcgaaaagcccaccgtgctgaagctcacgcggaaggagggcctgcagggaccggtggagacagagtccgtggtctgagccgcactcccgtttacacacattccagtgggcgggtgggcgggcgggcgggcggcggggccaggccatgggcgggagcagagacaccgcggaaccctgcagatgctgtggccgacccggcagtgcgggccagagcccctccgcccccatagccacaattcagtagtcgtagggtaggtttgagctactaagcaaataccacactaaccactttttcgataattaaaagaatcatttgaaatattttttttaattgaaaaagatattttaatttcagctcttttattctgcaggtgtattattctgcatgtttttaaatgatataaaacatttatatagacaataagcaacttagaaaaaataagattttgcatttctaaaattataattgaaaacaaaatctgacattctctgctaagtcttatctgaatgcttcagataatggtagtgtagtcagtgactaaaatatttttatcaaatttcctctctgtagacgcctgcaggtattgacgtctgtcagatctcgtcacattggctggtgccgcagctgttggagagtatttttctttatgattattttagaaaaaaaattttcttttccacaatgtggttctcttagaagaatgacgtatcttcttttcctcagcgagttggacacattgtgcccagggcagccctgtccttgggcagcgaccgcacaccaaagctgggaggaggctggtccggggggcctgggcagaagacagtgatttgcaggggtggctcccagacaccctgcccagggatgggctgggcaccacctgggggcggagcgtgagctccagacgagctcctgcgtgcgcgtgtgagtgtgtctgcgcccagccatgtgaccccgctcgtcccgtctgaaggactctcctaggaggccaggttgcccctccagaccgctcccaacgtcagggggaaggaaacgttgactttcactgcactttgattcgtctctaaaccatttgctggggattcctgagagcagagctcccagcgggccctgcctcccaagtcccgccgcaaggctacctcgggtgtgtggatgtgcgagggcctcccccgcttgcgaaggggacatgcgtgctggaacctgtcggaactccatgccttcctcgcctgctcacctgctcgacgctggaatcgggacaggtgcaaagggacgcagacgtctgggacagctaaggcccgtgtcaccggagggctccgcacagtcgttctggtttcaacgaataagcaaaactcgggcaagtactgcagctatttggaaatgttttccaaaccacagtctctttagaactaagcctatttgaaacggtcggtgtaggcttactgagatcaggagacagggaggccccgcacatcacacagataaagtcagacaattgtaattaatacttttgctgcctcaagttgttttttaaataaagtactttgaaatgcatgagaatcatgctgcaatatgatcattctagagcaaatatatatatacacgtatatatatttcaagatgaaactaaagcagtttttaaataaattacttgaattttctgtgtatttaaaggaacgactgtttaatgtacttgatgggcctctggtcttgccgtgtctcctgccgctggtggcactttgtagattgtgtgtttgtgtccgggtggcagttgggtacctgctcacgcacggtgtgtctgccaggccacggtgtcccaggatcgcagagggctgactttcaagacttcaagaacattttctggatgtgtggaaacttgagaatggccttgtgaatctcgtgcttggacagggcaagtccgactactgaaagtgctgccagctttgctgcgagccctccggccagcgggagccccgtgggctgggcactgtggcccttcttctctgggggacggcacccctggcttcctcacctcggccgggcgtccgtggcagctcactctatgcaacttgatcctctagcggctttaagactgtagatcccctctctgagacctggctgtacttgtcaggatctcgaggcgcagctcccgtcttagctggtttctccggcttctcgtcctgacgactataaaacagttggaggcaagaaagcagcggatgtggggtggcagtggcctgacccgaatcaagatccgacccaaaccacaccaaatgtgggttcatctgggggccaccccttgcctgaggcttcccaccctcatctgaaggcccaggggccggatccagggctcaccaaagccgattcctcgccagctgggagtgcagaagtctcagggcctggctgcgacttgatttttaggaggaagaggggcttcgcaacccccctctgaatagtgtgttaacccttgagatcccagcctcgactaatctgaagtaaggacaacaaaggccattcagtgccctccacatggccttgccacagtcactgtcagggtatgaacgtgccggaagccagtgccagccagggacaggcgtgactgttgtgtgctcctcggtgacaggagtcggtggctgcacactttgtagactcgtcaagctgtcagcacttcaggtgtttgcaagcaaagcccttcttagtgtgcaggtcagtgtgcagagcccaaatgaggggaccgcaggggctggggtccagggtcagtagagtcggtttctggagctgccttcctgggaggcaggtgtgggtgaccggggctctggcggtgcgtgtgggcccggcctggccacagcggggaccaggtcacgacatctttggcctcaacccctcccctgcactgagattatttccagattgcactcacttgaaaccgtccgtgtcgtcaccttgtgtcttaagggaagccgagaagaagggcagacgggcaggctgtcttgtctgcaaagcgccattgcgcccgcagcttgtgtgggtcaggctgcagctcgggtgtctgtggcttctaaccttgtacctcagacggatgcagtaacaaggcggggctggggacgccggtcagtgtcaaaggggaggtgctctggctgatagccttgcccgagagggacgaggaggccgtgcgggtgccccctggggaagctggccagccatccagtgctgaggacgcagctggagttgggctcgtggcacccttggggtgtgggctgtgcaggctggtggcctgggtgcctctgcacactgagtggagtgtcaggcagggtgtgtcggttggtcgagtcttgtgtaatgtgcgcagaccagttaccaaactaggataatgttggtctcatttgtggtggttttgttccctatacaagtcagctaagtaaagactcttttaacgagcttccccttaacacatggcagaagtttccaggtgcaggaatgcgagctggcgggaaggggcagaggccgtgagctctcagctgggccggcctgcctgtgtcccctttcctgggtctgtcggcagactggcatcatgacgttccctggtggctgaagagctagctttggagtgttgtttttctcactctcaggcaggggccttagctggaatcctccaacctgccactgaacacgtcagtgctgtgtgctgcctcttggacacctgcccttgaaagcctcaggcccctgggagaagcactctgtccagtcctgtccccgggggggaggcagggccactgagccctcctcagatggttagtggcttccaacagccatcaggagtgtttcttgaatgccccaggtgtggaggacttggtctgtgaccacctagaaccccagagctgaacaggaagccgtccctgcagcaacaagagggctggaagggggagctgcaggccaccctcggctctcccactgctggggcggtgatgttcgggtgacatgtttgaaaaatactcttaaagataccaactgttcccttatatggctaatggtttgtgcagccaccagcgatggcggcccctattagagaccaggtttgttaaaacaccaaatattgctgtccacactagacattaaccggcttcagaaaagatggacaccttttcccacgctgtttcgcttcttaactttggtccagctttagccaccacacagcgtgtgagggactgctgctgcggagtcagcctcgtttgtccctccgcctcccaccagcacgcgccgcttctgagagacaccagctccctgcctccaagcctggtgccacaggcctgtcgtgagggacccctgcttccgagagctcctgggggggttctgcccttcaccacctgggagaggtgtcagttcagttccgagttgaacaaggcccgtgcacacagcatgttgggggcccagcccaaagttcttgtcacctcctcatgcaaagccagccatcaccctccggccagagctcaaggtggccccttggccagcccctccttgggtcctccaggaggactgagcacccctcctagcggcatcccttgccctccacagtgctgccaggggcacgtcgctctgtgccgtggactgagaccatcccctggtgacagaatgacccgtttgttggaaatgcctcgttgccagagaaactccccaggcatctcggaacgaaactatttagttccattgtgaactggccacgggacagctttttatcaacttattaagttggagcactgtaatcgcgcttgctgagttagcagtggtggtaagcgtgtgttaaacacataatgttacgttttaggagagagaggtcgtaaggaagtgtcgtgtcgctcatgactctcttctattagttgggtaacagtggcctcatgtttgtgtctgtgtgtacacagagcccttaggttctgctctgtttctttgccaggtgaatgtttgtggcatgcgctgctgtccgcgcccctctgtcctgcgcagggttcagctgtgcggcgccctgatttcctccatgcacacagaacctccttgtgtctgtttctctgttcctctgtggctgactcaataaacttttccctctgacatgatga

SEQ ID NO: 184370 - DNA, 542 bp, Homo sapiens
  Payload ID: 16299
  Gene Symbol: SLC45A4
  Gene Name: solute carrier family 45, member 4
  ENST ID: ENST00000519986
  CDS Start-End: 237-542
ctgagaggctttctgatggaagggcggggacttcaggagcggccctcccttgttgagatggggtgctctgacagcacctttaactttaaagacctccagggcccagccctgacagccacagtgggtcttatttgagtcggtgatgcagaaacagaggcctgtgcttcttcagcttctgggaaacctacttccaagagtctactcaccgggccggctgtgttgtggaaaatagtctaatgcggcctctgacatgtaattcatttaccgagagccttccggagcagtactacagcctcacctggttcctgagccccatccttggcctcatcttcacacctctcattgggtctgcgagtgaccggtgcaccctgagctggggccgccggcggcccttcatcctcgccctctgcgttggcgtcctctttggcgttgcacttttccttaacggctctgccatcggtctggccctcggcgatgtccccaaccggcagcccattggcatcgtgctcacggtgctgggagtggtggtcctggacttcagc

SEQ ID NO: 184371 - DNA, 844 bp, Homo sapiens
  Payload ID: 16300
  Gene Symbol: SLC46A1
  Gene Name: solute carrier family 46 (folate transporter), member 1
  ENST ID: ENST00000581516
  CDS Start-End: 747-844
gatcctagggcaggagtggagcaagtgacagcttgttttttattttatttttattttatattttttgagacagggtcttgctctgtcacccaggctggagtgcagtggtgcgatctcagcccactgcaacctctgcctcctgggctcaattgatcctcccacctcagccacccgagtacctgggactacaggtatctgctactacgcctggctaatttttgtgtattttttgtagagacagggttttaccatgttgcccagattggtctcgaactcctgggttcaagcgatccatgcgcctcagcctccaaaagtgctgggattacaggtgtgagccaccactcccagacgtgacagcctgttaatagcaataatagcactttgaatataccagacactgcttttccacaactttttgagacatgttttgttagcaactccattttacagatgaaaaaacagaggctcagggtgcgcagaacatcagcagcatcaggagtcatgtgctcttccagctctgccttgagtacccgatgacctcgtttcctcagcggtagatagcgatggttaatattggctagcctgtagagttatcgggagaccaacgcacaaaaagggtttaataccgtgcccagcacataggcccgctcaccacgcagtatctgtggcaccgcttcagcgccgacctcggctacaatggcacccgccaaagggggggctgcagcaaccgcagcgcggaccccaccatgcaggaagtggagacccttacctcccactggaccctctacatgaacgtgggcggcttcctggtggggctcttctcgtccaccctgctgggagcttg

SEQ ID NO: 184372 - DNA, 574 bp, Homo sapiens
  Payload ID: 16300
  Gene Symbol: SLC46A1
  Gene Name: solute carrier family 46 (folate transporter), member 1
  ENST ID: ENST00000582735
  CDS Start-End: 1-373
actaagcacacccctctgctgggactccaaactaatcggctatggttctgcagctcagcatctcccctacctcaccagcctgctggccctgaagctcctgcagtactgcctggccgatgcctgggtagctgagatcggcctggccttcaacatcctggggatggtggtctttgcctttgccactatcacgcctctcatgttcacaggatgctggaaaaggctgatcctcacctcgagttccagcagtttccccagagcccctgatctgcctggaccagaagacagagggcaagaggagcaaagtgaacaccaagcaactggaggtctgcagctggaagcccagcccacagcaggacaagcaactcttgtctaagggcagtgctctctttggacgaggtagtcaagagagaccaaggcaccaccccatccacagctgacccagcctctgtctaggatctagaatcataacccacacaggcccactgcaggacaggtggcagaggagctatttgggacaggagtcagttctccctttctgctatccatcacttataaccccacaggccagaggaga

SEQ ID NO: 184373 - DNA, 1030 bp, Homo sapiens
  Payload ID: 16300
  Gene Symbol: SLC46A1
  Gene Name: solute carrier family 46 (folate transporter), member 1
  ENST ID: ENST00000584995
  CDS Start-End: 280-1030
gttacagcgcagaacatcagcagcatcaggagtcatgtgctcttccagctctgccttgagtacccgatgacctcgtttcctcagcggtagatagcgatggttaatattggctagcctgtagagttatcgggagaccaacgcacaaaaagggtttaataccgtgcccagcacataggcccgctcaccacgcagtatctgtggcaccgcttcagcgccgacctcggctacaatggcacccgccaaagggggggctgcagcaaccgcagcgcggaccccaccatgcaggaagtggagacccttacctcccactggaccctctacatgaacgtgggcggcttcctggtggggctcttctcgtccaccctgctgggagcttggagcgacagtgtgggccgccgcccgctgctagtgctggcctcgctgggcctgctgctccaggccctagtgtccgtttttgtggtgcagctgcagctccacgtcggctacttcgtgctgggtcgcatcctttgtgccctcctcggcgacttcggtggccttctggctgctagctttgcgtccgtggcagatgtcagctccagtcgcagccgcaccttccggatggccctgctggaagccagcatcggggtggctgggatgctggcaagcctcctcgggggccactggctccgggcccagggttatgccaaccccttctggctggccttggccttgctgatagccatgactctctatgcagctttctgctttggtgagaccttaaaggagccaaagtccacccggctcttcacgttccgtcaccaccgatccattgtccagctctatgtggctcccgccccagagaagtccaggaaacatttagccctctactcactggccatcttcgtggtgatcactgtgcactttggggcccaggacatcttaaccctttatgaactaagcacacccctctgctgggactccaaactaatcggctatggttctgcagctcagcatctcccctacctcaccagcctgctggccctgaagctcc

SEQ ID NO: 184374 - DNA, 564 bp, Homo sapiens
  Payload ID: 16300
  Gene Symbol: SLC46A1
  Gene Name: solute carrier family 46 (folate transporter), member 1
  ENST ID: ENST00000584426
  CDS Start-End: 180-564
gtcatgtgctcttccagctctgccttgagtacccgatgacctcgtttcctcagcggtagatagcgatggttaatattggctagcctgtagagttatcgggagaccaacgcacaaaaagggtttaataccgtgcccagcacatagaagtggagacccttacctcccactggaccctctacatgaacgtgggcggcttcctggtggggctcttctcgtccaccctgctgggagcttggagcgacagtgtgggccgccgcccgctgctagtgctggcctcgctgggcctgctgctccaggccctagtgtccgtttttgtggtgcagctgcagctccacgtcggctacttcgtgctgggtcgcatcctttgtgccctcctcggcgacttcggtggccttctggctgctagctttgcgtccgtggcagatgtcagctccagtcgcagccgcaccttccggatggccctgctggaagccagcatcggggtggctgggatgctggcaagcctcctcgggggccactggctccgggcccagggttatgccaaccccttctggctggccttgg

SEQ ID NO: 184375 - DNA, 6376 bp, Homo sapiens
  Payload ID: 16300
  Gene Symbol: SLC46A1
  Gene Name: solute carrier family 46 (folate transporter), member 1
  Uniprot ID: Q96NT5
  ENST ID: ENST00000612814
  CDS Start-End: 97-1476
acagcgcaagccccacgccacgcgtcgctggtcccaggcagcgagtcgctcgcgcgccccgccgcccgcctggcgacagctccgccgcgcacgcacatggaggggagcgcgagccccccggaaaagccccgcgcccgccctgcggctgccgtgctgtgccggggcccggtagagccgctggtcttcctggccaactttgccttggtcctgcagggcccgctcaccacgcagtatctgtggcaccgcttcagcgccgacctcggctacaatggcacccgccaaagggggggctgcagcaaccgcagcgcggaccccaccatgcaggaagtggagacccttacctcccactggaccctctacatgaacgtgggcggcttcctggtggggctcttctcgtccaccctgctgggagcttggagcgacagtgtgggccgccgcccgctgctagtgctggcctcgctgggcctgctgctccaggccctagtgtccgtttttgtggtgcagctgcagctccacgtcggctacttcgtgctgggtcgcatcctttgtgccctcctcggcgacttcggtggccttctggctgctagctttgcgtccgtggcagatgtcagctccagtcgcagccgcaccttccggatggccctgctggaagccagcatcggggtggctgggatgctggcaagcctcctcgggggccactggctccgggcccagggttatgccaaccccttctggctggccttggccttgctgatagccatgactctctatgcagctttctgctttggtgagaccttaaaggagccaaagtccacccggctcttcacgttccgtcaccaccgatccattgtccagctctatgtggctcccgccccagagaagtccaggaaacatttagccctctactcactggccatcttcgtggtgatcactgtgcactttggggcccaggacatcttaaccctttatgaactaagcacacccctctgctgggactccaaactaatcggctatggttctgcagctcagcatctcccctacctcaccagcctgctggccctgaagctcctgcagtactgcctggccgatgcctgggtagctgagatcggcctggccttcaacatcctggggatggtggtctttgcctttgccactatcacgcctctcatgttcacaggatatgggttgcttttcctgtcattagtcatcacacctgtcatccgggctaaactctccaagctggtgagagagacagagcagggtgctctcttttctgctgtggcctgtgtgaatagcctggccatgctgacggcctccggcatcttcaactcactctacccagccactctgaactttatgaaggggttccccttcctcctgggagctggcctcctgctcatcccggctgttctgattgggatgctggaaaaggctgatcctcacctcgagttccagcagtttccccagagcccctgatctgcctggaccagaagacagagggcaagaggagcaaagtgaacaccaagcaactggaggtctgcagctggaagcccagcccacagcaggacaagcaactcttgtctaagggcagtgctctctttggacgaggtagtcaagagagaccaaggcaccaccccatccacagctgacccagcctctgtctaggatctagaatcataacccacacaggcccactgcaggacaggtggcagaggagctatttgggacaggagtcagttctccctttctgctatccatcacttataaccccacaggccagaggagaggtcctgagagaggtgacacttcagggaccagaggcagcacgagggctggcatctctccttccagcccaaactgcacagccccaaccaggttcccaacacgtgtagcagtcatcagccattccttaacaatgaatgtggtacctggttagtgccagccttgggaaggagggagggaggtaagaggggcttggtgatctctggaggaagagtgttgcctttgctgtggttggggaatcgatccttggctatggcctacccactcccctggctgaagagtgccaatcattacaaatcagcttcagcaaactgaaacaaaccttctggtgccttgggctttggggccctctgttttcctgctcccagtctgcctgccatacgttagacaacagaagctgctgggctgggcaggagccctgagctgcctggtggattggtaccaagtggggccagccagggcttctactgactcgctgtgcaaccttgagcaagccccactaggaacggctagatcagcaatgccccaaattgttgaatcgtggtgatcacatttggatggacaagttaggaaacttagctgattctctgagatacttcccacttcctcatacattctacaatgagatgcctctcttcatgggcctggggaaaggatgaatgagtgtggctggacttttgacctttaatgtccctgagcagttcttggcccttggggagaagtagggggaggatctggctgactcagccccaaccgaggggtagcagctgcagcccagccaagcagaacaccctggccctacagacctgtgtctgagcaggctttggaggaaaggccacttctgagtcctctgtctcaggagaagccaggcctaggtgcttgacctggtgatctgagctgtgtttgtcctagtatgggtggcagtcacctctgaacacactggccttggcttagaggaggcttgtgacttcagctgttccagctggggctggatgctggactctgattccctcagagagacagaagatcgggcagaggtcaaccagaaggccacacagggcagtggacaacagtggagggtataccaaatagaaataaaacgcaggaaacctctctgaatactgcccttggggacctcaggagggagtgggactgattggagacaaagagccagaaatcatcccctggagatactcagacactgtattgttattggcgctgtcctgtgagggcagtgtccaggctgccctgcttgtcatatccatgccctggctctggccccggtgagcacttgtgctgcatgaggaaaggaggatcaggtggggtcaaaaccaaagcatcgaggctggcactggccaagacagactctggcagggaggggagtggaaggaaggagccccaaacctggagtgagacctttgactttctgatgatgtggccaagaactaggagtcacctggccagcacagccaagagtggggctgggggcgcagccagctttaaggtgtcaacacctggcccttgcggggaaagagccttcagcagcccccacggcctggagcctgggtttattggagggtgctttcttaccctctgaacccagtggaggagggggcaatgggatattcctgctctgtatggcctctgggtcagctttttgttgcaaaatcctatcccccgctgctagattctttgaagcaagggagaagcaatagcccagcctcagaatgattctcaggaaagcaattccactgccagtggactgggtgccaggaggcctaggtctggatctggggctgccactaatgacaggaaagtgggcttatcctcaacctttctgagcctcagtgtcattatctgtaaaatggggatgataataccaggtagagttgctctgatgactggagaccatggagcggagtgtttgggaaatggcaaagatttgtgagggcttcgtgctttagagatttgctacccttaaccaccagcatcagctcacctgggaatctgtaagaaatgcagagtcctaggccccaccccagatctcctgattttaacaacattcccaggtgacttggatgcatgttaaagttggagaagctgccctaagtgacaaccctttgccttttcaggactttgcctctttccacagagctgcaggttctgtctaggctgcttttactgccatgggggctgcctggtccctgagtaagcagtgggtagccctggatggctgaggggctggggaagccagctgggccagaccaggaaggagcctgaggcacagcaccaaggcatggggtagggtgggctttgaggcacggcctccccatgcccagacccaggcccaaacaggaggctcctgtgcaccagcaagtgcagcaaagctggctgcagtgacaaggaagtcagagggagggctggtttgcctcaaccctcgccctggatgtggcaaaagataccacaccgaaggaagctgtaggggatctgggacttagtcaggctagctaagggcactgagtgattacagggcaaggccacagagcggcaggaagttgtaagtgcaggggccaggcacagtctgagtggagagccatgatggcactcatccctggctggctcctgggcccaggcccttgctcagaatacagtgcccaggcccgcctgggcattgccttaattcctgtctgaggctgccttccgtcatcctcctcaagctgactgctatcagcaggagaagggaatgcagaaccacccccaccccaactccagtgtctccagaactgagcagggaccctccccatgacggagacagacaacccaatggcagggcctgggggagttctaacctcccgtgcccaagcctgacttcccttccctctccagatactgaggaaagtgggttggaggtgggccatgagggtgggggacagggggagggagagccatttcctaagaagagcccaggttgtctcagcccagggagactggtttcaggagctgttccttcagaaaggacgatggaaatggaagtcacagcagggctggggaactggggactggttaggttggacccatgggtgcagcaccctccaaactggtgtcagagcctgcagatgagtcccgggaggagcggccctgcaggaagcggatgatcttctcaatggtggcctcctggtattcgtgggaccacctgtgggcacaggagccaatgtggttcagacagctgggcagagggagctgctagtcagctgtttgcccacactctgcctgtcatggtgatttgtaccctacccccctggtcccagggccctggggctcacttgataccgttgaaagtaagcacagcctgcatgtcctcaggcaggacctggggctcaggccactcgaagccatcaatgatgggcacaatgttcttgccgcagcttaaagcagtcacaatctcctggagaaagaaaggaaaggaggaagatacccctgtacccatctagggacccttgtagccaggcaggtgctgggaggcccactggcccgaggctgggcccagggcaggacaccagtcctgatgtccaccttgatgtctaccttaacccttgtagtgtaataaaaaataaatatttttcctttgcccagagttcctggcacagagctgctaaaacccttggaatctcttgagtgatgagtgtctttgtatgctaaagagatgattccccactgggggcccggggggtgctatgggggtagcctagatagtttcaggaagagggctggtcaccagggagaccagggcatgactagaggattggaactttcagccccacctcccagcctccagagaggtgctggagattgagttcaatcaccaatggccaatgatttaatcaatcatgcctacataatggaacctccataaaaacccccaaacaaggggttttgaagagcctccaggttgataaacaggtgtaggtgctgggaaggtggtagaaggcatggcatccacacctccaccctccatacgtagagatcctatgtatctcttccatttggctattcttgagctgtgtcctttataactgtgaaattaaataattcagctgggcatggtgggtcacgcctgtaatcccaacactttgggaggctgaggcaggaggatcacttgagcccaggattttgagattaataatattatttattactattattcaagctttgttaaatcaaacctaaagctcttggaactttaagttattctgagccttgacaggaattggtctctgcagcctgagtcatggggcatgcagctgcaacttccacctattttttttttttctgtaattacttaggaagaccaaatggcaccagagataagactcccttagatccccacttagatcaccaccctttctcagggggtaataaagtcatcttccttggaatgtagcaatctataaccaatcaaagcactgtaacatacgcactggtcttgtatggaaaatgttgtaatcctgctaaaattcctctctctttgcctgtggaagtgaaaccttaacttctccagtttggaatgctcaccccatgcctttggagtcaatgc

SEQ ID NO: 184376 - DNA, 5363 bp, Homo sapiens
  Payload ID: 16300
  Gene Symbol: SLC46A1
  Gene Name: solute carrier family 46 (folate transporter), member 1
  Uniprot ID: Q96NT5
  ENST ID: ENST00000618626
  CDS Start-End: 88-1383
gccccacgccacgcgtcgctggtcccaggcagcgagtcgctcgcgcgccccgccgcccgcctggcgacagctccgccgcgcacgcacatggaggggagcgcgagccccccggaaaagccccgcgcccgccctgcggctgccgtgctgtgccggggcccggtagagccgctggtcttcctggccaactttgccttggtcctgcagggcccgctcaccacgcagtatctgtggcaccgcttcagcgccgacctcggctacaatggcacccgccaaagggggggctgcagcaaccgcagcgcggaccccaccatgcaggaagtggagacccttacctcccactggaccctctacatgaacgtgggcggcttcctggtggggctcttctcgtccaccctgctgggagcttggagcgacagtgtgggccgccgcccgctgctagtgctggcctcgctgggcctgctgctccaggccctagtgtccgtttttgtggtgcagctgcagctccacgtcggctacttcgtgctgggtcgcatcctttgtgccctcctcggcgacttcggtggccttctggctgctagctttgcgtccgtggcagatgtcagctccagtcgcagccgcaccttccggatggccctgctggaagccagcatcggggtggctgggatgctggcaagcctcctcgggggccactggctccgggcccagggttatgccaaccccttctggctggccttggccttgctgatagccatgactctctatgcagctttctgctttggtgagaccttaaaggagccaaagtccacccggctcttcacgttccgtcaccaccgatccattgtccagctctatgtggctcccgccccagagaagtccaggaaacatttagccctctactcactggccatcttcgtggtgatcactgtgcactttggggcccaggacatcttaaccctttatgaactaagcacacccctctgctgggactccaaactaatcggctatggttctgcagctcagcatctcccctacctcaccagcctgctggccctgaagctcctgcagtactgcctggccgatgcctgggtagctgagatcggcctggccttcaacatcctggggatggtggtctttgcctttgccactatcacgcctctcatgttcacaggtgctctcttttctgctgtggcctgtgtgaatagcctggccatgctgacggcctccggcatcttcaactcactctacccagccactctgaactttatgaaggggttccccttcctcctgggagctggcctcctgctcatcccggctgttctgattgggatgctggaaaaggctgatcctcacctcgagttccagcagtttccccagagcccctgatctgcctggaccagaagacagagggcaagaggagcaaagtgaacaccaagcaactggaggtctgcagctggaagcccagcccacagcaggacaagcaactcttgtctaagggcagtgctctctttggacgaggtagtcaagagagaccaaggcaccaccccatccacagctgacccagcctctgtctaggatctagaatcataacccacacaggcccactgcaggacaggtggcagaggagctatttgggacaggagtcagttctccctttctgctatccatcacttataaccccacaggccagaggagaggtcctgagagaggtgacacttcagggaccagaggcagcacgagggctggcatctctccttccagcccaaactgcacagccccaaccaggttcccaacacgtgtagcagtcatcagccattccttaacaatgaatgtggtacctggttagtgccagccttgggaaggagggagggaggtaagaggggcttggtgatctctggaggaagagtgttgcctttgctgtggttggggaatcgatccttggctatggcctacccactcccctggctgaagagtgccaatcattacaaatcagcttcagcaaactgaaacaaaccttctggtgccttgggctttggggccctctgttttcctgctcccagtctgcctgccatacgttagacaacagaagctgctgggctgggcaggagccctgagctgcctggtggattggtaccaagtggggccagccagggcttctactgactcgctgtgcaaccttgagcaagccccactaggaacggctagatcagcaatgccccaaattgttgaatcgtggtgatcacatttggatggacaagttaggaaacttagctgattctctgagatacttcccacttcctcatacattctacaatgagatgcctctcttcatgggcctggggaaaggatgaatgagtgtggctggacttttgacctttaatgtccctgagcagttcttggcccttggggagaagtagggggaggatctggctgactcagccccaaccgaggggtagcagctgcagcccagccaagcagaacaccctggccctacagacctgtgtctgagcaggctttggaggaaaggccacttctgagtcctctgtctcaggagaagccaggcctaggtgcttgacctggtgatctgagctgtgtttgtcctagtatgggtggcagtcacctctgaacacactggccttggcttagaggaggcttgtgacttcagctgttccagctggggctggatgctggactctgattccctcagagagacagaagatcgggcagaggtcaaccagaaggccacacagggcagtggacaacagtggagggtataccaaatagaaataaaacgcaggaaacctctctgaatactgcccttggggacctcaggagggagtgggactgattggagacaaagagccagaaatcatcccctggagatactcagacactgtattgttattggcgctgtcctgtgagggcagtgtccaggctgccctgcttgtcatatccatgccctggctctggccccggtgagcacttgtgctgcatgaggaaaggaggatcaggtggggtcaaaaccaaagcatcgaggctggcactggccaagacagactctggcagggaggggagtggaaggaaggagccccaaacctggagtgagacctttgactttctgatgatgtggccaagaactaggagtcacctggccagcacagccaagagtggggctgggggcgcagccagctttaaggtgtcaacacctggcccttgcggggaaagagccttcagcagcccccacggcctggagcctgggtttattggagggtgctttcttaccctctgaacccagtggaggagggggcaatgggatattcctgctctgtatggcctctgggtcagctttttgttgcaaaatcctatcccccgctgctagattctttgaagcaagggagaagcaatagcccagcctcagaatgattctcaggaaagcaattccactgccagtggactgggtgccaggaggcctaggtctggatctggggctgccactaatgacaggaaagtgggcttatcctcaacctttctgagcctcagtgtcattatctgtaaaatggggatgataataccaggtagagttgctctgatgactggagaccatggagcggagtgtttgggaaatggcaaagatttgtgagggcttcgtgctttagagatttgctacccttaaccaccagcatcagctcacctgggaatctgtaagaaatgcagagtcctaggccccaccccagatctcctgattttaacaacattcccaggtgacttggatgcatgttaaagttggagaagctgccctaagtgacaaccctttgccttttcaggactttgcctctttccacagagctgcaggttctgtctaggctgcttttactgccatgggggctgcctggtccctgagtaagcagtgggtagccctggatggctgaggggctggggaagccagctgggccagaccaggaaggagcctgaggcacagcaccaaggcatggggtagggtgggctttgaggcacggcctccccatgcccagacccaggcccaaacaggaggctcctgtgcaccagcaagtgcagcaaagctggctgcagtgacaaggaagtcagagggagggctggtttgcctcaaccctcgccctggatgtggcaaaagataccacaccgaaggaagctgtaggggatctgggacttagtcaggctagctaagggcactgagtgattacagggcaaggccacagagcggcaggaagttgtaagtgcaggggccaggcacagtctgagtggagagccatgatggcactcatccctggctggctcctgggcccaggcccttgctcagaatacagtgcccaggcccgcctgggcattgccttaattcctgtctgaggctgccttccgtcatcctcctcaagctgactgctatcagcaggagaagggaatgcagaaccacccccaccccaactccagtgtctccagaactgagcagggaccctccccatgacggagacagacaacccaatggcagggcctgggggagttctaacctcccgtgcccaagcctgacttcccttccctctccagatactgaggaaagtgggttggaggtgggccatgagggtgggggacagggggagggagagccatttcctaagaagagcccaggttgtctcagcccagggagactggtttcaggagctgttccttcagaaaggacgatggaaatggaagtcacagcagggctggggaactggggactggttaggttggacccatgggtgcagcaccctccaaactggtgtcagagcctgcagatgagtcccgggaggagcggccctgcaggaagcggatgatcttctcaatggtggcctcctggtattcgtgggaccacctgtgggcacaggagccaatgtggttcagacagctgggcagagggagctgctagtcagctgtttgcccacactctgcctgtcatggtgatttgtaccctacccccctggtcccagggccctggggctcacttgataccgttgaaagtaagcacagcctgcatgtcctcaggcaggacctggggctcaggccactcgaagccatcaatgatgggcacaatgttcttgccgcagcttaaagcagtcacaatctcctggagaaagaaaggaaaggaggaagatacccctgtacccatctagggacccttgtagccaggcaggtgctgggaggcccactggcccgaggctgggcccagggcaggacaccagtcctgatgtccaccttgatgtctaccttaacccttgtagtgtaataaaaaataaatatttttcctttgcccagagttcctggcacagagctgctaaaacccttggaatctcttg

SEQ ID NO: 184377 - DNA, 2502 bp, Homo sapiens
  Payload ID: 16301
  Gene Symbol: SLC46A2
  Gene Name: solute carrier family 46, member 2
  Uniprot ID: Q9BY10
  ENST ID: ENST00000374228
  CDS Start-End: 233-1660
ctcgggaggtcactcggctgctgggcgggctgctgtcacaggcgctgcgtgccctggctctgctcgccactggccggcgcgctcccggcgcacggagcacactcgcgctcccggcgcacggagcacactcgcgctccgggactgaaacctgagcagccgtagcagccgaatttgggagcatatccttgtcactgcagccagaaagcccttcgatccccatcagagaggtcacatgagccccgaggtcacctgcccgcggaggggccacctgcctcgcttccacccgaggacctgggttgagcccgtggtggcctcgtcccaggtggctgcctccctctacgatgcggggctactcctcgtggtgaaggcgtcctacggaaccggaggctcctccaaccacagtgccagcccatcgccccggggggctctagaggaccaacagcagagagccatctccaatttctacattatctacaaccttgtggtgggcctgtcccccctgctgtccgcctacgggctgggatggctcagcgaccgctaccaccgaaagatctccatctgcatgtcgctgctgggcttcctgctctcccgcctcgggctgctgctcaaggtgctgctggactggccagtggaggtgctgtacggggcggcggcgctgaacgggctattcggcggcttctccgccttctggtccggggtcatggcgctgggatcgctgggctcctccgagggccgccgctctgtgcgcctcatcctcattgacctgatgctgggcttggcggggttctgcgggagcatggcttccgggcatctcttcaagcagatggctgggcactctgggcagggcctgatactgacggcctgcagcgtgagctgtgcctcgtttgccctgctctacagccttttggtgctaaaggtccctgagtcggtggccaaacccagccaggagctccccgccgtggataccgtgtctggcacggttggcacataccgcactctggatcctgatcagttggaccaacagtatgcagtggggcaccctccatctcctggaaaagcaaaaccccataaaaccaccattgccttgctctttgtgggtgctatcatatatgacctggcggtggtgggcacagtggacgtgatccctctttttgtgctgagggagcctctcggttggaaccaagtgcaggtgggctatggtatggctgcagggtacaccatcttcatcaccagcttcctgggtgtcctggtcttctcccgctgctttcgggacaccaccatgatcatgattgggatggtctcctttgggtcaggagccctcctcttggcttttgtgaaagagacatacatgttctatattgctcgagccgtcatgctgtttgctctcatccccgtcacaaccatccgatcagctatgtccaaactcataaagggctcctcttatggaaaggtgttcgtcatactgcagctgtccttggctctgaccggcgtggtgacatccaccttgtacaacaagatctaccagctcaccatggacatgtttgtgggctcctgctttgctctctcctcctttctctccttcctggccatcattccaattagcatcgtggcctataaacaagtcccattgtcaccatatggagacatcatagagaaatgaagatgcttacctgcaggaactgaaaacatcagccatggccaggcccccagaagacaaaagaagggaccagggaactggtgacctaagcaacccactgcttaagaaacctgcgttccagccagagttggcctcagaatgacctgctctggctcagggatccctggtggatggggaaaagcactttcctggtgatggaaaaacgttctcagctttaagacacccccattaggcagacactgggttctgtgacagcagagcatgaccttaagggttacaggcaggctgcacacagcagtcccaggccctgtgaggggcttcagactccagctacagcgagcctgccccttttcttcaagggactgtcttgagggctccaaagtatagctaactagtcacctgggtgctgtgctgaaagtcccatgggagaactcaaagcgtgcattatcacagcctgaggggaatgtggaagggatgttttgtaagaactaccaacagttttgcacgaacaatgtcttttaaattaaaataaaaccttgaaaaaagtcagctttctttcctgagtcttccttacctacaaacactcaggagggggatggagctcaggcccttgtcttctgggtagttttgttactactgttgcttttaagaagcaaatgtcacaaggctttcttcaatgggatgttcaattgagtacttccagtcaacagtgcttcccaaagtgggtggtgtgaaggaagaggaggtacattaagagctattttatttgaggtagtcatttttataaccttgtttacttggatttataaaagcagactcacctaataaaatcaacattcattgta

SEQ ID NO: 184378 - DNA, 1890 bp, Homo sapiens
  Payload ID: 16301
  Gene Symbol: SLC46A2
  Gene Name: solute carrier family 46, member 2
  ENST ID: ENST00000491462
  CDS Start-End: 130-1155
cgcgctcccggcgcacggagcacactcgcgctccgggactgaaacctgagcagccgtagcagccgaatttgggagcatatccttgtcactgcagccagaaagcccttcgatccccatcagagaggtcacatgagccccgaggtcacctgcccgcggaggggccacctgcctcgcttccacccgaggacctgggttgagcccgtggtggcctcgtcccaggtggctgcctccctctacgatgcggggctactcctcgtggtgaaggcgtcctacggaaccggaggctcctccaaccacagtgccagcccatcgccccggggggctctagaggaccaacagcagagagccatctccaatttctacattatctacaaccttgtggtgggcctgtcccccctgctgtccgcctacgggctgggatggctcagcgaccgctaccaccgaaagatctccatctgcatgtcgctgctgggcttcctgctctcccgcctcgggctgctgctcaaggtgctgctggactggccagtggaggtgctgtacggggcggcggcgctgaacgggctattcggcggcttctccgccttctggtccggggtcatggcgctgggatcgctgggctcctccgagggccgccgctctgtgcgcctcatcctcattgacctgatgctgggcttggcggggttctgcgggagcatggcttccgggcatctcttcaagcagatggctgggcactctgggcagggcctgatactgacggcctgcagcgtgagctgtgcctcgtttgccctgctctacagccttttggtgctaaaggtccctgagtcggtggccaaacccagccaggagctccccgccgtggataccgtgtctggcacggttggcacataccgcactctggatcctgatcagttggaccaacagtatgcagtggggcaccctccatctcctggaaaagcaaaaccccataaaaccaccattgccttgctctttgtgggtgctatcatatatgacctggcggtggtgggcacagtggacgtgatccctctttttgtgctgagggagcctctcggttggaaccaagtgcagctcgagccgtcatgctgtttgctctcatccccgtcacaaccatccgatcagctatgtccaaactcataaagggctcctcttatggaaaggtgttcgtcatactgcagctgtccttggctctgaccggcgtggtgacatccaccttgtacaacaagatctaccagctcaccatggacatgtttgtgggctcctgctttgctctctcctcctttctctccttcctggccatcattccaattagcatcgtggcctataaacaagtcccattgtcaccatatggagacatcatagagaaatgaagatgcttacctgcaggaactgaaaacatcagccatggccaggcccccagaagacaaaagaagggaccagggaactggtgacctaagcaacccactgcttaagaaacctgcgttccagccagagttggcctcagaatgacctgctctggctcagggatccctggtggatggggaaaagcactttcctggtgatggaaaaacgttctcagctttaagacacccccattaggcagacactgggttctgtgacagcagagcatgaccttaagggttacaggcaggctgcacacagcagtcccaggccctgtgaggggcttcagactccagctacagcgagcctgccccttttcttcaagggactgtcttgagggctccaaagtatagctaactagtcacctgggtgctgtgctgaaagtcccatgggagaactcaaagcgtgcattatcacagcctgaggggaatgtggaagggatgttttgtaagaactaccaacagttttgcacga

SEQ ID NO: 184379 - DNA, 3173 bp, Homo sapiens
  Payload ID: 16302
  Gene Symbol: SLC46A3
  Gene Name: solute carrier family 46, member 3
  Uniprot ID: Q7Z3Q1
  ENST ID: ENST00000266943
  CDS Start-End: 371-1756
gcgccgcgctgaggccgaggtccgcagggccgcggggaagccgagggctgccggagaaccctgcaggtgtcactcgggacgcggaagtgcgcttgccgaggtttgctttacaatacgcttgagactccccgacaagcgtaatttggtcgagttcgacgggaaagtactctccccaccccagcgccggccgcgtagtccgaggttactgtccccggcgcgtcctctgttgccccagtccagaggctgcccttgaacccgggcgcgcacgagcgcagggcatccgaggcgacagcccctggcacggcccgacctgtacccagcctggcaggaagactgtaatcgtgggaatacagctacctacccaggcaatatgaagattttatttgtagaacctgccattttccttagtgcatttgctatgactttgaccggtccactgacaacgcaatatgtttatcggagaatatgggaagaaactggcaactacactttttcatctgatagcaatatttctgagtgtgaaaaaaacaaaagcagcccaatttttgcattccaggaggaagttcagaaaaaagtgtcacgttttaatctgcagatggacataagtggattaattcctggtctagtgtctacattcatacttttgtctattagtgatcactacggacgaaaattccctatgattttgtcttccgttggtgctcttgcaaccagcgtttggctctgtttgctttgctattttgcctttccattccagcttttgattgcatctaccttcattggtgcattttgtggcaattataccacattttggggagcttgctttgcctatatagttgatcagtgtaaagaacacaaacaaaaaacaattcgaatagctatcattgactttctacttggacttgttactggactaacaggactgtcatctggctattttattagagagctaggttttgagtggtcgtttctaattattgctgtgtctcttgctgttaatttgatctatattttattttttctcggagatccagtgaaagagtgttcatctcagaatgttactatgtcatgtagtgaaggcttcaaaaacctattttaccgaacttacatgctttttaagaatgcttctggtaagagacgatttttgctctgtttgttactttttacagtaatcacttatttttttgtggtaattggcattgccccaatttttatcctttatgaattggattcaccactctgctggaatgaagtttttataggttatggatcagctttgggtagtgcctcttttttgactagtttcctaggaatatggcttttttcttattgtatggaagatattcatatggccttcattgggatttttaccacgatgacaggaatggctatgaccgcgtttgccagtacaacactgatgatgtttttagccagggtgccgttccttttcactattgtgccattctctgttctacggtccatgttgtcaaaagtggttcgttcgactgaacaaggtaccctgtttgcttgtattgctttcttagaaacacttggaggagtcactgcagtttctacttttaatggaatttactcagccactgttgcttggtaccctggcttcactttcctgctgtctgctggtctgttactacttccagccatcagtctatgtgttgtcaagtgtaccagctggaatgagggaagctatgaacttcttatacaagaagaatccagtgaagatgcttcagacaggtgactgtgatttaaacaaacaaaaaaaatctatgaatgcacatatcatataccatgacttctgaagactataaatgaattccacaatcagtgcttcactgagaaccaattttacctatcttttcttctaaactgaacagtcagagagacagctcctggctttagcttcttgtggtaccacgcactttgagcactttgtgcgtatcatgcaatatacttgcaatacacagaacaaatttcaaatacgcctcacttttagacttagaagagaaacattaaaacttaagggtgtaaggagggatcaagaaacttgataaggtcaaaagcaataatctctctgacatattccaggctcttacactgagaccaaagagaaatctttacctcagtttcttcatcagcagaatgggtttctggcctctctcagggataattttgaaggcataatgaaaattatgatgaatcactcattggtaggaaaataatgatataagtttcaaatatgtatgattttacctatacttggtaatgctttattttatagagcctgttaagctgctattgatagtcggagcttatatactgtgacttctgaagactatacatgaattccacaatcagtgctttgttgatacaaaatccttaaaagggaggcactttaaagaatatgtatttttcacttttcttaatatgtttcatcggtgacaggcatgataatatttctatatgtaatgggtaattgggaaaaaatagatgataaataaaattgctctaaagaagttaaaaaactgaatgaacagctaatactggtataaagtaactaatgtttggagccaacatttgttccttgtgtcagcaaaaggatattcacattccatgatccctggctgagaattctgcctctagtctttcttacccagctgttgtctatccttgttcaattataaatactgctaagggcatttttaaaatacgatcttgtactccttaaatttgaatccgtcaacacggtcactcataggaaaatgatcaaacaagcaagccagtcatgatttgactccttcccatctcatttcttactgccttacgctcatcctgaggtccaccttggtctctaaaaacaccatgtgttctcatgcctccatgtcttttcacacactgttccatttgctcttcctcccacattacattgaaactttcaagcctcagtcgaaacattgcttcttctggatagcagccttcttgacatccctcctcactccccagtccctacagggcttccatagctctttgtgtgcacttcgatcccagcattttccatcgacttgtaattgtttctgctacctgacaatcatcgccttgagtactgggacaacctttgattactcattatatcctcaataaatatttgttgaactaaa

SEQ ID NO: 184380 - DNA, 2121 bp, Homo sapiens
  Payload ID: 16302
  Gene Symbol: SLC46A3
  Gene Name: solute carrier family 46, member 3
  Uniprot ID: Q7Z3Q1
  ENST ID: ENST00000380814
  CDS Start-End: 500-1891
ggacagcgatgctcagctggctgcggccgagtcatcgcctagcgctggcagggccgctgaccgaccgacggaggcgccgattggccgattgtccactgcgcagaaggagcagctgctccgcgccccgccgcgccgcgctgaggccgaggtccgcagggccgcggggaagccgagggctgccggagaaccctgcaggtgtcactcgggacgcggaagtgcgcttgccgaggtttgctttacaatacgcttgagactccccgacaagcgtaatttggtcgagttcgacgggaaagtactctccccaccccagcgccggccgcgtagtccgaggttactgtccccggcgcgtcctctgttgccccagtccagaggctgcccttgaacccgggcgcgcacgagcgcagggcatccgaggcgacagcccctggcacggcccgacctgtacccagcctggcaggaagactgtaatcgtgggaatacagctacctacccaggcaatatgaagattttatttgtagaacctgccattttccttagtgcatttgctatgactttgaccggtccactgacaacgcaatatgtttatcggagaatatgggaagaaactggcaactacactttttcatctgatagcaatatttctgagtgtgaaaaaaacaaaagcagcccaatttttgcattccaggaggaagttcagaaaaaagtgtcacgttttaatctgcagatggacataagtggattaattcctggtctagtgtctacattcatacttttgtctattagtgatcactacggacgaaaattccctatgattttgtcttccgttggtgctcttgcaaccagcgtttggctctgtttgctttgctattttgcctttccattccagcttttgattgcatctaccttcattggtgcattttgtggcaattataccacattttggggagcttgctttgcctatatagttgatcagtgtaaagaacacaaacaaaaaacaattcgaatagctatcattgactttctacttggacttgttactggactaacaggactgtcatctggctattttattagagagctaggttttgagtggtcgtttctaattattgctgtgtctcttgctgttaatttgatctatattttattttttctcggagatccagtgaaagagtgttcatctcagaatgttactatgtcatgtagtgaaggcttcaaaaacctattttaccgaacttacatgctttttaagaatgcttctggtaagagacgatttttgctctgtttgttactttttacagtaatcacttatttttttgtggtaattggcattgccccaatttttatcctttatgaattggattcaccactctgctggaatgaagtttttataggttatggatcagctttgggtagtgcctcttttttgactagtttcctaggaatatggcttttttcttattgtatggaagatattcatatggccttcattgggatttttaccacgatgacaggaatggctatgaccgcgtttgccagtacaacactgatgatgtttttagccagggtgccgttccttttcactattgtgccattctctgttctacggtccatgttgtcaaaagtggttcgttcgactgaacaaggtaccctgtttgcttgtattgctttcttagaaacacttggaggagtcactgcagtttctacttttaatggaatttactcagccactgttgcttggtaccctggcttcactttcctgctgtctgctggtctgttactacttccagccatcagtctatgtgttgtcaagtgtaccagctggaatgagggaagctatgaacttcttatacaagaagaatccagtgaagatgcttcagacagagcctgttaagctgctattgatagtcggagcttatatactgtgacttctgaagactatacatgaattccacaatcagtgctttgttgatacaaaatccttaaaagggaggcactttaaagaatatgtatttttcacttttcttaatatgtttcatcggtgacaggcatgataatatttctatatgtaatgggtaattgggaaaaaatagatgataaataaaattgctctaaagaagttaa

SEQ ID NO: 184381 - DNA, 3280 bp, Homo sapiens
  Payload ID: 16303
  Gene Symbol: SLC47A1
  Gene Name: solute carrier family 47 (multidrug and toxin extrusion), member 1
  Uniprot ID: Q96FL8
  ENST ID: ENST00000270570
  CDS Start-End: 87-1799
actgccggcctgcgcggtactcactgccggcctccgcggtacccactgccggcctccgcgctacccggccgcagcgcgcgagtcacatggaagctcctgaggagcccgcgccagtgcgcggaggcccggaggccacccttgaggtccgtgggtcgcgctgcttgcggctgtccgccttccgagaagagctgcgggcgctcttggtcctggctggccccgcgttcttggttcagctgatggtgttcctgatcagcttcataagctccgtgttctgtggccacctgggcaagctggagctggatgcagtcacgctggcaatcgcggttatcaatgtcactggtgtctcagtgggattcggcttatcttctgcctgtgacaccctcatctcccagacgtacgggagccagaacctgaagcacgtgggcgtgatcctgcagcggagtgcgctcgtcctgctcctctgctgcttcccctgctgggcgctctttctcaacacccagcacatcctgctgctcttcaggcaggacccagatgtgtccaggcttacccagacctatgtcacgatcttcattccagctcttcctgcaacctttctttatatgttacaagttaaatatttgctcaaccagggaattgtactgccccagatcgtaactggagttgcagccaaccttgtcaatgccctcgccaactatctgtttctccatcaactgcatcttggggtgataggctctgcactggcaaacttgatttcccagtacaccctggctctactcctctttctctacatcctcgggaaaaaactgcatcaagctacatggggaggctggtccctcgagtgcctgcaggactgggcctccttcctccgcctggccatccccagcatgctcatgctgtgcatggagtggtgggcctatgaggtcgggagcttcctcagtggcatcctcggcatggtggagctgggcgctcagtccatcgtgtatgaactggccatcattgtgtacatggtccctgcaggcttcagtgtggctgccagtgtccgggtaggaaacgctctgggtgctggagacatggagcaggcacggaagtcctctaccgtttccctgctgattacagtgctctttgctgtagccttcagtgtcctgctgttaagctgtaaggatcacgtggggtacatttttactaccgaccgagacatcattaatctggtggctcaggtggttccaatttatgctgtttcccacctctttgaagctcttgcttgcacgagtggtggtgttctgagggggagtggaaatcagaaggttggagccattgtgaataccattgggtactatgtggttggcctccccatcgggatcgcgctgatgtttgcaaccacacttggagtgatgggtctgtggtcagggatcatcatctgtacagtctttcaagctgtgtgttttctaggctttattattcagctaaattggaaaaaagcctgtcagcaggctcaggtacacgccaatttgaaagtaaacaacgtgcctcggagtgggaattctgctctccctcaggatccgcttcacccagggtgccctgaaaaccttgaaggaattttaacgaacgatgttggaaagacaggcgagcctcagtcagatcagcagatgcgccaagaagaacctttgccggaacatccacaggacggcgctaaattgtccaggaaacagctggtgctgcggcgagggcttctgctcctgggggtcttcttaatcttgctggtggggattttagtgagattctatgtcagaattcagtgacgtggtaggaaagaaagtcaggtcaagtgatgcttttgagcttacacacaattcacaggcccaccagtgacaatttactgtgagttaatgtcattcaggtgtgcccatggattttgagggctggaaatgcaaagacacatttttctataaaaagaaaaagcaactaaggttaaaagctatattgtggcccaagacactgtctgaaagatgacatgagtagtaattcaccactatctgaaccaagcaaggatcaatgtgctgactgcattggccaatggctttgatacttctgctatttttttagacacaaacccataaactaactgcttaagaattcatactgcttgaattatgtaaaatatattttacagtatatctttccttgggccttagattactattcactgggcaaatggtatttgtttttgttttaattttttttttaatagacggaagtcttgctctgtcatgcaggctggagtgcggtggtgcgatcatagctcactgcagcctcgaactcttgggcttcaagcaatcctcctgtgtcagccaccagagtagctgagactacaggggtatgccaccatgcccagctggcatttgttaatcttcatttgaggtctagatctaggcactgtggacactgaaaaacagttgggaaatctttcgagctgtggaaatccaaacaaagactgataattcctggtaggggtgtgtgcgtgacgtactgcagcctcaacctcctgggctcaagtgatcctcccacctcagcctcctgagtagctgagaccacaggcgtgtgccaccacgcctagctaattttttataccagggtctaccctttgtttcccaggctggtcttgaattcctgggatcaagcaatccttccaccttgccctcccaaagtgttgggattataggcatgagccaccacgactggccagaggacaaaattttaataaaggtcttagcttaagcagtaatcctacttcattaagccttcctggggtgcggtacacaccgttaattcagcaaccctcagtacatactaagtatgctcagtgctgtgaaagtggattacaccaaattaagtcattcttatcacacccaatcaaaagtcaagaagccagggataaaagcacctcaggcacataacattaatctagtaatgtaattctctgcacatccagctggtgaaactgcgtgctgtaagctgggaccagctttgtccataactgctgagagaacttgctgaagctctaggaataattttgcctgcccggttgctcaccagttgtagcttgccagctcccaacacccttcctggtgccaataaactttctcaaagagcaatactgacatttcttttgataaaacctccagccttctctgtgttgttccgacataccgaggaccaactggtctacatggatgccctgaacatgcaattctttcttccaaaataaaacattaaatagaga

SEQ ID NO: 184382 - DNA, 1998 bp, Homo sapiens
  Payload ID: 16303
  Gene Symbol: SLC47A1
  Gene Name: solute carrier family 47 (multidrug and toxin extrusion), member 1
  Uniprot ID: Q96FL8
  ENST ID: ENST00000395585
  CDS Start-End: 61-1821
ccggcctccgcggtacccactgccggcctccgcgctacccggccgcagcgcgcgagtcacatggaagctcctgaggagcccgcgccagtgcgcggaggcccggaggccacccttgaggtccgtgggtcgcgctgcttgcggctgtccgccttccgagaagagctgcgggcgctcttggtcctggctggccccgcgttcttggttcagctgatggtgttcctgatcagcttcataagctccgtgttctgtggccacctgggcaagctggagctggatgcagtcacgctggcaatcgcggttatcaatgtcactggtgtctcagtgggattcggcttatcttctgcctgtgacaccctcatctcccagacgtacgggagccagaacctgaagcacgtgggcgtgatcctgcagcggagtgcgctcgtcctgctcctctgctgcttcccctgctgggcgctctttctcaacacccagcacatcctgctgctcttcaggcaggacccagatgtgtccaggcttacccagacctatgtcacgatcttcattccagctcttcctgcaacctttctttatatgttacaagttaaatatttgctcaaccagggaattgtactgccccagatcgtaactggagttgcagccaaccttgtcaatgccctcgccaactatctgtttctccatcaactgcatcttggggtgataggctctgcactggcaaacttgatttcccagtacaccctggctctactcctctttctctacatcctcgggaaaaaactgcatcaagctacatggggaggctggtccctcgagtgcctgcaggactgggcctccttcctccgcctggccatccccagcatgctcatgctgtgcatggagtggtgggcctatgaggtcgggagcttcctcagtggcatcctcggcatggtggagctgggcgctcagtccatcgtgtatgaactggccatcattgtgtacatggtccctgcaggcttcagtgtggctgccagtgtccgggtaggaaacgctctgggtgctggagacatggagcaggcacggaagtcctctaccgtttccctgctgattacagtgctctttgctgtagccttcagtgtcctgctgttaagctgtaaggatcacgtggggtacatttttactaccgaccgagacatcattaatctggtggctcaggtggttccaatttatgctgtttcccacctctttgaagctcttgcttgcacgagtggtggtgttctgagggggagtggaaatcagaaggttggagccattgtgaataccattgggtactatgtggttggcctccccatcgggatcgcgctgatgtttgcaaccacacttggagtgatgggtctgtggtcagggatcatcatctgtacagtctttcaagctgtgtgttttctaggctttattattcagctaaattggaaaaaagcctgtcagcaggctcaggtacacgccaatttgaaagtaaacaacgtgcctcggagtgggaattctgctctccctcaggatccgcttcacccagggtgccctgaaaaccttgaaggaattttaacgaacgatgttggaaagacaggcgagcctcagtcagatcagcagatgcgccaagaagaacctttgccggaacatccacaggacggcgctaaattgtccaggaaacagctggtgctgcggcgagggcttctgctcctgggggtcttcttaatcttgctggctggagtgcggtggtgcgatcatagctcactgcagcctcgaactcttgggcttcaagcaatcctcctgtgtcagccaccagagtagctgagactacagggctggtgaaactgcgtgctgtaagctgggaccagctttgtccataactgctgagagaacttgctgaagctctaggaataattttgcctgcccggttgctcaccagttgtagcttgccagctcccaacacccttcctggtgccaataaactttctcaaagagcaa

SEQ ID NO: 184383 - DNA, 1719 bp, Homo sapiens
  Payload ID: 16303
  Gene Symbol: SLC47A1
  Gene Name: solute carrier family 47 (multidrug and toxin extrusion), member 1
  ENST ID: ENST00000436810
  CDS Start-End: 113-1444
agagcaggctgcactgcgcggtacccactgccggcctgcgcggtactcactgccggcctccgcggtacccactgccggcctccgcgctacccggccgcagcgcgcgagtcacatggaagctcctgaggagcccgcgccagtgcgcggaggcccggaggccacccttgaggtccgtgggtcgcgctgcttgcggctgtccgccttccgagaagagctgcgggcgctcttggtcctggctggccccgcgttcttggttcagctgatggtgttcctgatcagcttcataagctccgtgttctgtggccacctgggcaagctggagctggatgcagtcacgctggcaatcgcgacgtacgggagccagaacctgaagcacgtgggcgtgatcctgcagcggagtgcgctcgtcctgctcctctgctgcttcccctgctgggcgctctttctcaacacccagcacatcctgctgctcttcaggcaggacccagatgtgtccaggcttacccagacctatgtcacgatcttcattccagctcttcctgcaacctttctttatatgttacaagttaaatatttgctcaaccagggaattgtactgccccagatcgtaactggagttgcagccaaccttgtcaatgccctcgccaactatctgtttctccatcaactgcatcttggggtgataggctctgcactggcaaacttgatttcccagtacaccctggctctactcctctttctctacatcctcgggaaaaaactgcatcaagctacatggggaggctggtccctcgagtgcctgcaggactgggcctccttcctccgcctggccatccccagcatgctcatgctgtgcatggagtggtgggcctatgaggtcgggagcttcctcagtggcatcctcggcatggtggagctgggcgctcagtccatcgtgtatgaactggccatcattgtgtacatggtccctgcaggcttcagtgtggctgccagtgtccgggtaggaaacgctctgggtgctggagacatggagcaggcacggaagtcctctaccgtttccctgctgattacagtgctctttgctgtagccttcagtgtcctgctgttaagctgtaaggatcacgtggggtacatttttactaccgaccgagacatcattaatctggtggctcaggtggttccaatttatgctgtttcccacctctttgaagctcttgcttgcacgagtggtggtgttctgagggggagtggaaatcagaaggttggagccattgtgaataccattgggtactatgtggttggcctccccatcgggatcgcgctgatgtttgcaaccacacttggagtgatgggctcaggtacacgccaatttgaaagtaaacaacgtgcctcggagtgggaattctgctctccctcaggatccgcttcacccagggtgccctgaaaaccttgaaggaattttaacgaacgatgttggaaagacaggcgagcctcagtcagatcagcagatgcgccaagaagaacctttgccggaacatccacaggacggcgctaaattgtccaggaaacagctggtgctgcggcgagggcttctgctcctgggggtcttcttaatcttgctggtggggattttagtgagattctatgtcagaattcagtgacgtggtaggaaagaaagtcaggtcaagtgatgcttttgagcttacacacaattcacag

SEQ ID NO: 184384 - DNA, 2224 bp, Homo sapiens
  Payload ID: 16303
  Gene Symbol: SLC47A1
  Gene Name: solute carrier family 47 (multidrug and toxin extrusion), member 1
  ENST ID: ENST00000575023
  CDS Start-End: 65-871
actgccggcctccgcggtacccactgccggcctccgcgctacccggccgcagcgcgcgagtcacatggaagctcctgaggagcccgcgccagtgcgcggaggcccggaggccacccttgaggtccgtgggtcgcgctgcttgcggctgtccgccttccgagaagagctgcgggcgctcttggtcctggctggccccgcgttcttggttcagctgatggtgttcctgatcagcttcataagctccgtgttctgtggccacctgggcaagctggagctggatgcagtcacgctggcaatcgcggttatcaatgtcactggtgtctcagtgggattcggcttatcttctgcctgtgacaccctcatctcccagacgtacgggagccagaacctgaagcacgtgggcgtgatcctgcagcggagtgcgctcgtcctgctcctctgctgcttcccctgctgggcgctctttctcaacacccagcacatcctgctgctcttcaggcaggacccagatgtgtccaggcttacccagacctatgtcacgatcttcattccagctcttcctgctcaggtacacgccaatttgaaagtaaacaacgtgcctcggagtgggaattctgctctccctcaggatccgcttcacccagggtgccctgaaaaccttgaaggaattttaacgaacgatgttggaaagacaggcgagcctcagtcagatcagcagatgcgccaagaagaacctttgccggaacatccacaggacggcgctaaattgtccaggaaacagctggtgctgcggcgagggcttctgctcctgggggtcttcttaatcttgctggtggggattttagtgagattctatgtcagaattcagtgacgtggtaggaaagaaagtcaggtcaagtgatgcttttgagcttacacacaattcacaggcccaccagtgacaatttactgtgagttaatgtcattcaggtgtgcccatggattttgagggctggaaatgcaaagacacatttttctataaaaagaaaaagcaactaaggttaaaagctatattgtggcccaagacactgtctgaaagatgacatgagtagtaattcaccactatctgaaccaagcaaggatcaatgtgctgactgcattggccaatggctttgatacttctgctatttttttagacacaaacccataaactaactgcttaagaattcatactgcttgaattatgtaaaatatattttacagtatatctttccttgggccttagattactattcactgggcaaatggtatttgtttttgttttaattttttttttaatagacggaagtcttgctctgtcatgcaggctggagtgcggtggtgcgatcatagctcactgcagcctcgaactcttgggcttcaagcaatcctcctgtgtcagccaccagagtagctgagactacaggggtatgccaccatgcccagctggcatttgttaatcttcatttgaggtctagatctaggcactgtggacactgaaaaacagttgggaaatctttcgagctgtggaaatccaaacaaagactgataattcctggtaggggtgtgtgcgtgacgtactgcagcctcaacctcctgggctcaagtgatcctcccacctcagcctcctgagtagctgagaccacaggcgtgtgccaccacgcctagctaattttttataccagggtctaccctttgtttcccaggctggtcttgaattcctgggatcaagcaatccttccaccttgccctcccaaagtgttgggattataggcatgagccaccacgactggccagaggacaaaattttaataaaggtcttagcttaagcagtaatcctacttcattaagccttcctggggtgcggtacacaccgttaattcagcaaccctcagtacatactaagtatgctcagtgctgtgaaagtggattacaccaaattaagtcattcttatcacacccaatcaaaagtcaagaagccagggataaaagcacctcaggcacataacattaatctagtaatgtaattctctgcacatccagctggtgaaactgcgtgctgtaagctgggaccagctttgtccataactgctgagagaacttgctgaagctctaggaataattttgcctgcccggttgctcaccagttgtagcttgccagctcccaacacccttcctggtgccaataaactttctcaaagagcaa

SEQ ID NO: 184385 - DNA, 414 bp, Homo sapiens
  Payload ID: 16303
  Gene Symbol: SLC47A1
  Gene Name: solute carrier family 47 (multidrug and toxin extrusion), member 1
  ENST ID: ENST00000581558
  CDS Start-End: 1-298
tttgaaagtaaacaacgtgcctcggagtgggaattctgctctccctcaggatccgcttcacccagggtgccctgaaaaccttgaaggaattttaacgaacgatgttggaaagacaggcgagcctcagtcagatcagcagatgcgccaagaagaacctttgccggaacatccacaggacggcgctaaattgtccaggaaacagctggtgctgcggcgagggcttctgctcctgggggtcttcttaatcttgctgctggtgaaactgcgtgctgtaagctgggaccagctttgtccataactgctgagagaacttgctgaagctctaggaataattttgcctgcccggttgctcaccagttgtagcttgccagctcccaacacccttcctggtgccaataaactttctcaaagagc

SEQ ID NO: 184386 - DNA, 1415 bp, Homo sapiens
  Payload ID: 16303
  Gene Symbol: SLC47A1
  Gene Name: solute carrier family 47 (multidrug and toxin extrusion), member 1
  ENST ID: ENST00000571335
  CDS Start-End: 421-1371
aaccccacacaccccgcggggtgctaaccgagtcacggctcgaggcctctgggtccttccacgccaggtcattcagaacctgaaacccccagcggaggtggagagccgggttcttggttcagctgatggtgttcctgatcagcttcataagctccgtgttctgtggccacctgggcaagctggagctggatgcagtcacgctggcaatcgcggttatcaatgtcactggtgtctcagtgggattcggcttatcttctgcctgtgacaccctcatctcccagacgtacgggagccagaacctgaagcacgtgggcgtgatcctgcagcggagtgcgctcgtcctgctcctctgctgcttcccctgctgggcgctctttctcaacacccagcacatcctgctgctcttcaggcaggacccagatgtgtccaggcttacccagacctatgtcacgatcttcattccagctcttcctgcaacctttctttatatgttacaagttaaatatttgctcaaccaggttgagttccagcccgatggccagatctcctggaaatgtgtgtgtcccccccacaggctggtccctcgagtgcctgcaggactgggcctccttcctccgcctggccatccccagcatgctcatgctgtgcatggagtggtgggcctatgaggtcgggagcttcctcagtggcatcctcggcatggtggagctgggcgctcagtccatcgtgtatgaactggccatcattgtgtacatggtccctgcaggcttcagtgtggctgccagtgtccgggtaggaaacgctctgggtgctggagacatggagcaggcacggaagtcctctaccgtttccctgctgattacagtgctctttgctgtagccttcagtgtcctgctgttaagctgtaaggatcacgtggggtacatttttactaccgaccgagacatcattaatctggtggctcaggtggttccaatttatgctgtttcccacctctttgaagctcttgcttgcacgagtggtggtgttctgagggggagtggaaatcagaaggttggagccattgtgaataccattgggtactatgtggttggcctccccatcgggatcgcgctgatgtttgcaaccacacttggagtgatggggtgccctgaaaaccttgaaggaattttaacgaacgatgttggaaagacaggcgagcctcagtcagatcagcagatgcgccaagaagaacctttgccggaacatccacaggacggcgctaaattgtccaggaaacagctggtgctgcggcgagggcttctgctcctgggggtcttcttaatcttgctggtggggattttagtgagattctatgtcagaattcagtgacgtggtaggaaagaaagtcaggtcaagtgatgcttttgagctta

SEQ ID NO: 184387 - DNA, 2258 bp, Homo sapiens
  Payload ID: 16304
  Gene Symbol: SLC47A2
  Gene Name: solute carrier family 47 (multidrug and toxin extrusion), member 2
  Uniprot ID: Q86VL8
  ENST ID: ENST00000325411
  CDS Start-End: 52-1860
ctggccgtgcaggcgctcaggcgtgcagggtagccagtgccccggccaggaatggacagcctccaggacacagtggccctggaccatgggggctgctgccctgccctcagcaggctggttcccagaggctttgggactgagatgtggactctctttgccctttctggacccctgttcctgttccaggtgctgacttttatgatctacatcgtgagcactgtgttctgcgggcacctgggcaaggtggagctggcatcggtgaccctcgcggtggcctttgtcaatgtctgcggagtttctgtaggagttggtttgtcttcggcatgtgacaccttgatgtctcagagcttcggcagccccaacaagaagcacgtgggcgtgatcctgcagcggggcgcgctggtcctgctcctctgctgcctcccttgctgggcgctcttcctcaacacccagcacatcctgctgctcttccggcaggacccggacgtgtccaggttgacccaggactatgtaatgattttcattccaggacttccggtgatttttctttacaatctgctggcaaaatatttgcaaaatcagggatggctgaaggggcaggaggaggagtccccattccaaaccccgggtttgtccatcctccatccatctcactcacaccttagcagggccagttttcatttatttcagaagatcacctggccccaagtcctcagtggtgtggtgggcaactgtgtcaacggtgtggccaactatgccctggtttctgtgctgaacctgggggtcaggggctccgcctatgccaacatcatctcccagtttgcacagaccgtcttcctccttctctacattgtgctgaagaagctgcacctggagacgtgggcaggttggtccagccagtgcctgcaggactggggccccttcttctccctggctgtccccagcatgctcatgatctgtgttgagtggtgggcctatgagatcgggagcttcctcatggggctgctcagtgtggtggatctctctgcccaggctgtcatctacgaggtggccactgtgacctacatgattcccttggggctcagcatcggggtctgtgtccgagtggggatggctctgggggctgcggatactgtgcaggccaagcgctcggccgtctcgggcgtgctcagcatagttggcatttccctggtcctgggcaccctgataagcatcctgaaaaatcagctggggcatatttttaccaatgatgaagatgtcattgccctggtgagccaggtcttgccggtttatagtgtctttcacgtgtttgaggccatctgttgtgtctatggcggagttctgagaggaactgggaagcaggcctttggtgccgctgtgaatgccatcacatattacatcatcggcctaccactgggcatccttctgacctttgtggtcagaatgagaatcatgggcctctggctgggcatgctggcctgtgtcttcctggcaactgctgcctttgttgcttatactgcccggctggactggaagcttgctgcagaggaggctaagaaacattcaggccggcagcagcagcagagagcagagagcactgcaaccagacctgggcctgagaaagcagtcctatcttcagtggctacaggcagttcccctggcattaccttgacaacgtattcaaggtctgagtgccacgtggacttcttcaggactccagaggaggcccacgccctttcagctcctaccagcagactatcagtgaaacagctggtcatccgccgtggggctgctctgggggcggcgtcagccacactgatggtggggctcacggtcaggatcctagccaccaggcactagcaaagaagcttggaaatagaaagccaggagtggctgtccccagtatgcaaacacaccacggtctgccctgcaaaaacaccaatggggtctagtgcaggtggacactttgaaccactcctcaaaaaaagaactttggctgattccttgtggtgacactcagaggggtctgaacagacttgacaattctgttctggtcaagctggagttttcttctgtgacttggactgctctacagaagacatcagccaactgcacgagtcagagtccagggattgtcactattattaataatgtaaatggcttcaaatgggacactgcagataaaatcacaaaaaccactgttatattaaagattacacatttcctgggcacagcctgctgctcaagtctgtcataaa

SEQ ID NO: 184388 - DNA, 2285 bp, Homo sapiens
  Payload ID: 16304
  Gene Symbol: SLC47A2
  Gene Name: solute carrier family 47 (multidrug and toxin extrusion), member 2
  Uniprot ID: Q86VL8
  ENST ID: ENST00000350657
  CDS Start-End: 176-1918
agtgccctaggaggcagggctcatcccacaagttgccatggtagcccctcctcctgccccttactcatcagccaggctgtaccgacacgggctgcccaggcagggggtggctcgctggacaaagctggccgtgcaggcgctcaggcgtgcagggtagccagtgccccggccaggaatggacagcctccaggacacagtggccctggaccatgggggctgctgccctgccctcagcaggctggttcccagaggctttgggactgagatgtggactctctttgccctttctggacccctgttcctgttccaggtgctgacttttatgatctacatcgtgagcactgtgttctgcgggcacctgggcaaggtggagctggcatcggtgaccctcgcggtggcctttgtcaatgtctgcggagtttctgtaggagttggtttgtcttcggcatgtgacaccttgatgtctcagagcttcggcagccccaacaagaagcacgtgggcgtgatcctgcagcggggcgcgctggtcctgctcctctgctgcctcccttgctgggcgctcttcctcaacacccagcacatcctgctgctcttccggcaggacccggacgtgtccaggttgacccaggactatgtaatgattttcattccaggacttccggtgatttttctttacaatctgctggcaaaatatttgcaaaatcagaagatcacctggccccaagtcctcagtggtgtggtgggcaactgtgtcaacggtgtggccaactatgccctggtttctgtgctgaacctgggggtcaggggctccgcctatgccaacatcatctcccagtttgcacagaccgtcttcctccttctctacattgtgctgaagaagctgcacctggagacgtgggcaggttggtccagccagtgcctgcaggactggggccccttcttctccctggctgtccccagcatgctcatgatctgtgttgagtggtgggcctatgagatcgggagcttcctcatggggctgctcagtgtggtggatctctctgcccaggctgtcatctacgaggtggccactgtgacctacatgagacacagccatcgtcttgcttatgcagcccatgtcactcggattcccttggggctcagcatcggggtctgtgtccgagtggggatggctctgggggctgcggatactgtgcaggccaagcgctcggccgtctcgggcgtgctcagcatagttggcatttccctggtcctgggcaccctgataagcatcctgaaaaatcagctggggcatatttttaccaatgatgaagatgtcattgccctggtgagccaggtcttgccggtttatagtgtctttcacgtgtttgaggccatctgttgtgtctatggcggagttctgagaggaactgggaagcaggcctttggtgccgctgtgaatgccatcacatattacatcatcggcctaccactgggcatccttctgacctttgtggtcagaatgagaatcatgggcctctggctgggcatgctggcctgtgtcttcctggcaactgctgcctttgttgcttatactgcccggctggactggaagcttgctgcagaggaggctaagaaacattcaggccggcagcagcagcagagagcagagagcactgcaaccagacctgggcctgagaaagcagtcctatcttcagtggctacaggcagttcccctggcattaccttgacaacgtattcaaggtctgagtgccacgtggacttcttcaggactccagaggaggcccacgccctttcagctcctaccagcagactatcagtgaaacagctggtcatccgccgtggggctgctctgggggcggcgtcagccacactgatggtggggctcacggtcaggatcctagccaccaggcactagcaaagaagcttggaaatagaaagccaggagtggctgtccccagtatgcaaacacaccacggtctgccctgcaaaaacaccaatggggtctagtgcaggtggacactttgaaccactcctcaaaaaaagaactttggctgattccttgtggtgacactcagaggggtctgaacagacttgacaattctgttctggtcaagctggagttttcttctgtgacttggactgctctacagaagacatcagccaactgcacgagtcagagtccagggattgtcactattattaataatgtaaatggcttcaaatgggacactgcagataaaatcacaaaaaccactgttatattaaagattacacatttcctg

SEQ ID NO: 184389 - DNA, 1264 bp, Homo sapiens
  Payload ID: 16304
  Gene Symbol: SLC47A2
  Gene Name: solute carrier family 47 (multidrug and toxin extrusion), member 2
  ENST ID: ENST00000433844
  CDS Start-End: 176-1264
agtgccctaggaggcagggctcatcccacaagttgccatggtagcccctcctcctgccccttactcatcagccaggctgtaccgacacgggctgcccaggcagggggtggctcgctggacaaagctggccgtgcaggcgctcaggcgtgcagggtagccagtgccccggccaggaatggacagcctccaggacacagtggccctggaccatgggggctgctgccctgccctcagcaggctggttcccagaggctttgggactgagatgtggactctctttgccctttctggacccctgttcctgttccaggtgctgacttttatgatctacatcgtgagcactgtgttctgcgggcacctgggcaaggtggagctggcatcggtgaccctcgcggtggcctttgtcaatgtctgcggagtttctgtaggagttggtttgtcttcggcatgtgacaccttgatgtctcagagcttcggcagccccaacaagaagcacgtgggcgtgatcctgcagcggggcgcgctggtcctgctcctctgctgcctcccttgctgggcgctcttcctcaacacccagcacatcctgctgctcttccggcaggacccggacgtgtccaggttgacccaggactatgtaatgattttcattccaggacttccggtgatttttctttacaatctgctggcaaaatatttgcaaaatcagaagatcacctggccccaagtcctcagtggtgtggtgggcaactgtgtcaacggtgtggccaactatgccctggtttctgtgctgaacctgggggtcaggggctccgcctatgccaacatcatctcccagtttgcacagaccgtcttcctccttctctacattgtgctgaagaagctgcacctggagacgtgggcaggttggtccagccagtgcctgcaggactggggccccttcttctccctggctgtccccagcatgctcatgatctgtgttgagtggtgggcctatgagatcgggagcttcctcatggggctgctcagtgtggtggatctctctgcccaggctgtcatctacgaggtggccactgtgacctacatgattcccttggggctcagcatcggggtctgtgtccgagtggggatggctctgggggctgcggatactgtgcaggccaagcgctcggccgtctcgggcgtgctcagcatagttggcatttccctggtcctgggcaccctgataagcatcctgaaaaatcagctggggcatatttttaccaat

SEQ ID NO: 184390 - DNA, 1962 bp, Homo sapiens
  Payload ID: 16304
  Gene Symbol: SLC47A2
  Gene Name: solute carrier family 47 (multidrug and toxin extrusion), member 2
  Uniprot ID: Q86VL8
  ENST ID: ENST00000574239
  CDS Start-End: 19-678
ccagtgccccggccaggaatggacagcctccaggacacagtggccctggaccatgggggctgctgccctgccctcagcaggctggttcccagaggctttgggactgagatgtggactctctttgccctttctggacccctgttcctgttccaggtgctgacttttatgatctacatcgtgagcactgtgttctgcgggcacctgggcaaggtggagctggcatcggtgaccctcgcggtggcctttgtcaatgtctgcggagtttctgtaggagttggtttgtcttcggcatgtgacaccttgatgtctcagagcttcggcagccccaacaagaagcacgtgggcgtgatcctgcagcggggcgcgctggtcctgctcctctgctgcctcccttgctgggcgctcttcctcaacacccagcacatcctgctgctcttccggcaggacccggacgtgtccaggttgacccaggactatgtaatgattttcattccaggacttccggtgatttttctttacaatctgctggcaaaatatttgcaaaatcaggcaggtgagaggctgtgcgtcccagcctcttccaactcctcaacagggatggctgaaggggcaggaggaggagtccccattccaaaccccgggtttgtccatcctccatccatctcactcacaccttagcagggccagttttcatttatttcagaagatcacctggccccaagtcctcagtggtgtggtgggcaactgtgtcaacggtgtggccaactatgccctggtttctgtgctgaacctgggggtcaggggctccgcctatgccaacatcatctcccagtttgcacagaccgtcttcctccttctctacattgtgctgaagaagctgcacctggagacgtgggcaggttggtccagccagtgcctgcaggactggggccccttcttctccctggctgtccccagcatgctcatgatctgtgttgagtggtgggcctatgagatcgggagcttcctcatggggctgctcagtgtggtggatctctctgcccaggctgtcatctacgaggtggccactgtgacctacatgattcccttggggctcagcatcggggtctgtgtccgagtggggatggctctgggggctgcggatactgtgcaggccaagcgctcggccgtctcgggcgtgctcagcatagagatgtcattgccctggtgagccaggtcttgccggtttatagtgtctttcacgtgtttgaggccatctgttgtgtctatggcggagttctgagaggaactgggaagcaggcctttggtgccgctgtgaatgccatcacatattacatcatcggcctaccactgggcatccttctgacctttgtggtcagaatgagaatcatgggcctctggctgggcatgctggcctgtgtcttcctggcaactgctgcctttgttgcttatactgcccggctggactggaagcttgctgcagaggaggctaagaaacattcaggccggcagcagcagcagagagcagagagcactgcaaccagacctgggcctgagaaagcagtcctatcttcagtggctacaggcagttcccctggcattaccttgacaacgtattcaaggtctgagtgccacgtggacttcttcaggactccagaggaggcccacgccctttcagctcctaccagcagactatcagtgaaacagctggtcatccgccgtggggctgctctgggggcggcgtcagccacactgatggtggggctcacggtcaggatcctagccaccaggcactagcaaagaagcttggaaatagaaagccaggagtggctgtccccagtatgcaaacacaccacggtctgccctgcaaaaacaccaatggggtctagtgcaggtggacactttgaaccactcctcaaaaaaagaactttggctgattccttgtggtgacactcagagggg

SEQ ID NO: 184391 - DNA, 1024 bp, Homo sapiens
  Payload ID: 16305
  Gene Symbol: SLC48A1
  Gene Name: solute carrier family 48 (heme transporter), member 1
  Uniprot ID: Q6P1K1
  ENST ID: ENST00000442892
  CDS Start-End: 213-482
gggaaaaggaggaagagggagttaaggtatatgatgggcctccccatgtggatccttagtgctgtggcagagcccttgttattgtgctgggattttccctccagctcccggccggaagctgggctcacgtgggagctcagtgccctcctgctacagatctgtctcttccttacaatggggtgctggcactgtgggtcctggtgacgcacgtgatgtacatgcaagattattggaggacctggctcaaggggctgcgcggcttcttcttcgtgggcgtcctcttctcggccgtctccatcgctgccttctgcaccttcctcgtgctggccatcacccggcatcagagcctcacagaccccaccagctactacctctccagcgtctggagcttcatttccttcaagtgggccttcctgctcagcctctatgcccaccgctaccgggctgactttgctgacatcagcatcctcagcgatttctgacccagggggctcagtgtatgcttaatcaggcatggtgcatcagagcgggaaggagccatcaacagtgtatacttctggagccttctactgataaacagaggccccagaagacgatttgacttacctgagctcccagctgggacttaaacccaggtgtgtctgagtcacaactcttcggggatgccgtggtgagctggggctgagctcctgtattcccactcccccaccccacccccactcctgccatatcagggctggtctctgtggactcagcccagggctgcctcctctttgtcaccccaaagtggggcagccagggacagccagggtgtgttcagaatgggttcttcctgcagggcaggaagggcagattgttaaaggggctgcggcccagaccaccctggtccctcctccggcagtgactcagacccacactgtgccgtgcagctgtgtgccctgcacacccgcttgacggcgcactgctcacttctggggggccctttcagaggcacttttaaagcaaataaaacatttattgttca

SEQ ID NO: 184392 - DNA, 3010 bp, Homo sapiens
  Payload ID: 16305
  Gene Symbol: SLC48A1
  Gene Name: solute carrier family 48 (heme transporter), member 1
  Uniprot ID: Q6P1K1
  ENST ID: ENST00000442218
  CDS Start-End: 98-538
gctctggcggctcccgcggctccggctggcggcttcgggccctgcacctgtgactctcggccgcgctcgccctcggcccgcccggcgccgcagccccatggccccgtccaggctgcagctcggcctccgcgccgcctactccggcatcagctccgtggccggcttctccatcttcctcgtctggacggtggtctaccgacagccggggaccgcggccatgggagggctcgcaggggtgctggcactgtgggtcctggtgacgcacgtgatgtacatgcaagattattggaggacctggctcaaggggctgcgcggcttcttcttcgtgggcgtcctcttctcggccgtctccatcgctgccttctgcaccttcctcgtgctggccatcacccggcatcagagcctcacagaccccaccagctactacctctccagcgtctggagcttcatttccttcaagtgggccttcctgctcagcctctatgcccaccgctaccgggctgactttgctgacatcagcatcctcagcgatttctgacccagggggtgaggtctctgcaccctgggggggccttaggacctggactcagcctctgagatgttgggagaggctactcccaccccctggtgaccccagaactgtggcagaaaatacacagcaggacgagtgtggtctcccaggaagctgtcctgcccgtcccctttcgaggaaacctgagtgtggtagagaggggatcctgccatgttgctcctcatcagcctggccagagggcagctttagaccttttcaaatgaatctgttttcttttctttcttttttttttcttttttttttttttttgagatggagtcttactctgtcacccaggctggagtgcagtagtgcgatctcagctcactgcaacctccgcctcccaggttcaagcaattctcctgccttggcctctcaagtagctgggattacaggcatctgccaccatgcccggcaaatttttgtgtttttagtagagacagggttttgccatgttggccaggctggtctcgaactcctgatctcaggtgattcacccgcctcagccttccaaagtgctgggattataggtgtgagccaccgtgcccggcctggatctgttttcttagcacgcagtgaggaatctttgtacttaaggccagggcaacaaagtcaagaggtcaaggtgtagggccatgaggcctggacctatgctgcaggcaagggtttccatccccgctgccctaggcactctcttcccaaggccaggttgggcacctggggaggtcagttcagaaatatctagcagagacctcttaaacccccatcccagcaccccatcctgttgttcccagagctggtctcccatgagtgtgctagagccagatagccgtggccccccacccatctcactcacacacacaggcatccatacaccccagaagacttcccaaatgaggccagactcagggtcacggggaatgtgcttctgcccctgtaagggctttggggaagggggcaacatagtagaggctggaaagagcccccaaacctgtacccatgcccctccagccctgcgtttccattctgccttctcagagtgcccttgctgcacccagaccaccggccaggagagaccttctctcccactccagcccctctcactgcccttcaactagagctttcacctttttacatttcccttctgaaggacacaaatctgcttttctgcccatacactggcccaagggctcacctaacttgggagggaaggggctgttggtacaaggatgattttctgttagactgccattttgcacggtctcccccttcccatctgatgtgtcctgcccctcagctctttgccttatctgtgtcactgtcactttagcaaaaatacagcggccatttgtatcagcctctggtggttgcttgtgaggtgggactcttgcgggaacaggtggactttgggaggagtgggcagggagggagtggtagtggcagttctcgagctatctgattaagccattccgctagttcagttgtgccctggagggcaggggacagagtcagtatctctggggctgcaggccctcttgccttggccctcctggcatggggtaaccaccagctcagctctcctcctccagctttcctctctctagcacaccccagccagggcaaggatgcccacgggcatagctacagcaacccctgcgggatttggtgtccacacccgagaggccaggccagatgggaaagggattagcgcctcttccctcacactctgccaggctgccaggagcttgggccaggtctaaggtaatgaggtgctcctcttcctgctggaaaaaccggacagactcagaaccacaaaggcaggtgctgccagcctggcgccttcctctctgcttaggctgggtgagcttgtccaggcctgtgcctcaccccttctctcttctaggctcagtgtatgcttaatcaggcatggtgcatcagagcgggaaggagccatcaacagtgtatacttctggagccttctactgataaacagaggccccagaagacgatttgacttacctgagctcccagctgggacttaaacccaggtgtgtctgagtcacaactcttcggggatgccgtggtgagctggggctgagctcctgtattcccactcccccaccccacccccactcctgccatatcagggctggtctctgtggactcagcccagggctgcctcctctttgtcaccccaaagtggggcagccagggacagccagggtgtgttcagaatgggttcttcctgcagggcaggaagggcagattgttaaaggggctgcggcccagaccaccctggtccctcctccggcagtgactcagacccacactgtgccgtgcagctgtgtgccctgcacacccgcttgacggcgcactgctcacttctggggggccctttcagaggcacttttaaagcaaataaaacatttattgttcaga

SEQ ID NO: 184393 - DNA, 577 bp, Homo sapiens
  Payload ID: 16305
  Gene Symbol: SLC48A1
  Gene Name: solute carrier family 48 (heme transporter), member 1
  ENST ID: ENST00000549243
  CDS Start-End: 529-577
cgtaggggaagggggccggcactggcaggctttggagtccgcacccgggggtaccagagtggacatccgcctgagcccagagtatccccagggggcaggagcggccccgaagtgtgtggaggaggccgcaacggccggggtgtcagggatccggcggtcatctgctgtgtccacacattaagaaacgctggtggagttttaaatgcctctccggggaaggaggaaagcctgagaatgaatctgacctcagacccaaatccattcaacggagttctggtaatttggaagaaggaagagcaacctggaaactgacaggaaaggatgacaagttgggagtcacaggtatatgatgggcctccccatgtggatccttagtgctgtggcagagcccttgttattgtgctgggattttccctccagctcccggccggaagctgggctcacgtgggagctcagtgccctcctgctacagatctgtctcttccttacaatggggtgctggcactgtgggtcctggtgacgcacgtgatgtacatgcaagattattggaggacctggctcaaggggctgcgcggct

SEQ ID NO: 184394 - DNA, 751 bp, Homo sapiens
  Payload ID: 16305
  Gene Symbol: SLC48A1
  Gene Name: solute carrier family 48 (heme transporter), member 1
  Uniprot ID: Q6P1K1
  ENST ID: ENST00000547002
  CDS Start-End: 456-725
gccgtgcaggctctagcaaaaggctggggggtccccagcgacccccatcagctttgataaggggatccggagggtgccagtgggtcatctgctgtgtccacacattaagaaacgctggtggagttttaaatgcctctccggggaaggaggaaagcctgagaatgaatctgacctcagacccaaatccattcaacggagttctggtaatttggaagaaggaagagcaacctggaaactgacaggaaaggatgacaagttgggagtcacaggtatatgatgggcctccccatgtggatccttagtgctgtggcagagcccttgttattgtgctgggattttccctccagctcccggccggaagctgggctcacgtgggagctcagtgccctcctgctacagatctgtctcttccttacaatggggtgctggcactgtgggtcctggtgacgcacgtgatgtacatgcaagattattggaggacctggctcaaggggctgcgcggcttcttcttcgtgggcgtcctcttctcggccgtctccatcgctgccttctgcaccttcctcgtgctggccatcacccggcatcagagcctcacagaccccaccagctactacctctccagcgtctggagcttcatttccttcaagtgggccttcctgctcagcctctatgcccaccgctaccgggctgactttgctgacatcagcatcctcagcgatttctgacccagggggtgaggtctctgcaccct

SEQ ID NO: 184395 - DNA, 1070 bp, Homo sapiens
  Payload ID: 16305
  Gene Symbol: SLC48A1
  Gene Name: solute carrier family 48 (heme transporter), member 1
  ENST ID: ENST00000551301
  CDS Start-End: 91-249
cggctcccgcggctccggctggcggcttcgggccctgcacctgtgactctcggccgcgctcgccctcggcccgcccggcgccgcagccccatggccccgtccaggctgcagctcggcctccgcgccgcctactccggcatcagctccgtggccggcttctccatcttcctcgtctggacggtggtctaccgacagccggggaccgcggccatgggagggctcgggtgctggcactgtgggtcctggtgacgcacgtgatgtacatgcaagattattggaggacctggctcaaggggctgcgcggcttcttcttcgtgggcgtcctcttctcggccgtctccatcgctgccttctgcaccttcctcgtgctggccatcacccggcatcagagcctcacagaccccaccagctactacctctccagcgtctggagcttcatttccttcaagtgggccttcctgctcagcctctatgcccaccgctaccgggctgactttgctgacatcagcatcctcagcgatttctgacccagggggtgaggtctctgcaccctgggggggccttaggacctggactcagcctctgagatgttgggagaggctactcccaccccctggtgaccccagaactgtggcagaaaatacacagcaggacgagtgtggtctcccaggaagctgtcctgcccgtcccctttcgaggaaacctgagtgtggtagagaggggatcctgccatgttgctcctcatcagcctggccagagggcagctttagaccttttcaaatgaatctgttttcttttctttcttttttttttcttttttttttttttttgagatggagtcttactctgtcacccaggctggagtgcagtagtgcgatctcagctcactgcaacctccgcctcccaggttcaagcaattctcctgccttggcctctcaagtagctgggattacaggcatctgccaccatgcccggcaaatttttgtgtttttagtagagacagggttttgccatgttggccaggctggtctcgaactcctgatctcaggtgattcacccgcctcagcctt

SEQ ID NO: 184396 - DNA, 618 bp, Homo sapiens
  Payload ID: 16305
  Gene Symbol: SLC48A1
  Gene Name: solute carrier family 48 (heme transporter), member 1
  ENST ID: ENST00000548498
  CDS Start-End: 510-618
aggtcagagaatggccctagtccatgagcactgaggaagggactttaaggaatccctctcattttgacaaggaaagcaaaagcccagagagatcacacaactatttagaaaggtaggaacagaaagagctgtcttcagacttcttctctgggaggttgatgggttttccccttggctttcgaagagggaggtctggcctcaataactggcagtgctgtcttcctgggactcgggctccaccccttcaccatgggcgtgcatgctcacagctggcactcattccctcacggaagccttccctgggctaaaggcatcatcaagaggtatatgatgggcctccccatgtggatccttagtgctgtggcagagcccttgttattgtgctgggattttccctccagctcccggccggaagctgggctcacgtgggagctcagtgccctcctgctacagatctgtctcttccttacaatggggtgctggcactgtgggtcctggtgacgcacgtgatgtacatgcaagattattggaggacctggctcaaggggctgcgcggcttcttcttcgtgggcgtcctcttctcggccgtctccatcgctgccttctgcaccttcctcg

SEQ ID NO: 184397 - DNA, 2030 bp, Homo sapiens
  Payload ID: 16306
  Gene Symbol: SLC5A4
  Gene Name: solute carrier family 5 (glucose activated ion channel), member 4
  Uniprot ID: Q9NY91
  ENST ID: ENST00000266086
  CDS Start-End: 13-1992
ctgcctgcagccatggccagtacggttagccccagcaccatagctgagaccccagagccacctccattgtctgaccacatccgaaatgctgctgacatctcagtcattgtcatctattttctggtggtgatggctgttgggctgtgggcgatgctgaagaccaaccgaggtactataggaggcttcttcctcgctggtcgtgatatggcctggtggccgatgggcgcctctctctttgccagtaacatcggcagcaaccactatgtggggctggctgggacaggagcagcttcaggagtcgccaccgtaacatttgaatggacttcctcagtaatgttgctgattcttgggtggatctttgtccctatctacatcaagtcgggggtgatgaccatgccggaatatctcaagaagcggtttggtggggagcgactccaggtctacctctccatcctctccctcttcatctgtgtggttttgttaatttctgcagacatatttgctggagccatattcatcaagctggccttgggattggacctttacctggcaatcttcatcctcttggctatgactgctgtttacaccaccactgggggcttggcctcggtgatttacacagacaccctccagaccatcatcatgctgattggctcttttattctcatggggtttgcatttaacgaagttggaggttatgagagctttaccgagaagtacgtgaatgccaccccatccgtagtcgagggggacaacttgacaatcagtgccagttgctacacacctcgggcggactccttccacatcttccgagatgctgtgactggggacattccatggccaggaattatatttggaatgcccattacagctttgtggtactggtgcacaaatcaggtcattgtgcagcgctgcctgtgtggcaaggacatgtctcacgtgaaggccgcttgcattatgtgtgcttacctgaagctgctgcccatgttcctcatggtgatgccggggatgatcagccgcatcctgtacacagatatggtagcatgtgtggtaccttctgaatgcgtgaaacactgtggcgttgatgttggctgcaccaactacgcataccccacgatggtgctggaactgatgccccaaggactgcgaggcctgatgctttcggtcatgctggcctctctcatgagctccctgacctccatcttcaacagcgccagcaccctcttcaccattgacctctacaccaagatgcggaagcaagcgtcggagaaagagctcctgatagctggacggatatttgttcttctattaactgttgtgagcattgtgtgggtcccactggtacaagtttctcaaaatggacaactaatccattacacagaatcaatttctagctaccttgggcctccaattgcagctgtctttgtgcttgccatcttctgtaaaagagtcaatgaacagggagcattctggggtctaatggttggacttgcaatgggcctcattcgtatgataacagagtttgcttatggaacagggagttgcttggctcccagtaactgtcccaagattatctgtggagtgcactatctgtacttttccatcgttctcttttttgggtccatgctggtcaccctgggaatttccctcttaacaaaacccattcctgatgtacatctgtaccgcctgtgctgggttcttcggaacagtacagaggagcgaatcgatatagatgcagaagagaaaagtcaggaagaaacagatgatggtgttgaagaagattatcctgagaaatcacgtggatgcctcaagaaagcttatgacttgttctgcggtttgcagaagggacccaagctaaccaaggaggaggaggaagccttgagcaagaagctcacagacacgtctgagaggccctcgtggaggacaatagtgaacatcaacgccatcctcctcctggctgtggtggtctttattcacggctactatgcctgaactctatctgagccattagaataatgaataattcttaa

SEQ ID NO: 184398 - DNA, 5152 bp, Homo sapiens
  Payload ID: 16307
  Gene Symbol: SLC5A7
  Gene Name: solute carrier family 5 (sodium/choline cotransporter), member 7
  Uniprot ID: Q9GZV3
  ENST ID: ENST00000264047
  CDS Start-End: 277-2019
ctgcgccgcgcgccctccgccggcgccaacacctgtcaactctgcgcgctcccaggttcttggagacgccgagtgaggagccgccctgaccgcccggccccgctccgcactgcaccccgacccaccccgcaccctccctttctgcaccctcgcacccacacccctcgcggttccagggggcggcggccccgggcggagcgctttcgcgtgcagccaccactccagaagacttaatgaagtagccagctgcagaagaatctggatcattagataaaaatggctttccatgtggaaggactgatagctatcatcgtgttctaccttctaattttgctggttggaatatgggctgcctggagaaccaaaaacagtggcagcgcagaagagcgcagcgaagccatcatagttggtggccgagatattggtttattggttggtggatttaccatgacagctacctgggtcggaggagggtatatcaatggcacagctgaagcagtttatgtaccaggttatggcctagcttgggctcaggcaccaattggatattctcttagtctgattttaggtggcctgttctttgcaaaacctatgcgttcaaaggggtatgtgaccatgttagacccgtttcagcaaatctatggaaaacgcatgggcggactcctgtttattcctgcactgatgggagaaatgttctgggctgcagcaattttctctgctttgggagccaccatcagcgtgatcatcgatgtggatatgcacatttctgtcatcatctctgcactcattgccactctgtacacactggtgggagggctctattctgtggcctacactgatgtcgttcagctcttttgcatttttgtagggctgtggatcagcgtcccctttgcattgtcacatcctgcagtcgcagacatcgggttcactgctgtgcatgccaaataccaaaagccgtggctgggaactgttgactcatctgaagtctactcttggcttgatagttttctgttgttgatgctgggtggaatcccatggcaagcatactttcagagggttctctcttcttcctcagccacctatgctcaagtgctgtccttcctggcagctttcgggtgcctggtgatggccatcccagccatactcattggggccattggagcatcaacagactggaaccagactgcatatgggcttccagatcccaagactacagaagaggcagacatgattttaccaattgttctgcagtatctctgccctgtgtatatttctttctttggtcttggtgcagtttctgctgctgttatgtcatcagcagattcttccatcttgtcagcaagttccatgtttgcacggaacatctaccagctttccttcagacaaaatgcttcggacaaagaaatcgtttgggttatgcgaatcacagtgtttgtgtttggagcatctgcaacagccatggccttgctgacgaaaactgtgtatgggctctggtacctcagttctgaccttgtttacatcgttatcttcccccagctgctttgtgtactctttgttaagggaaccaacacctatggggccgtggcaggttatgtttctggcctcttcctgagaataactggaggggagccatatctgtatcttcagcccttgatcttctaccctggctattaccctgatgataatggtatatataatcagaaatttccatttaaaacacttgccatggttacatcattcttaaccaacatttgcatctcctatctagccaagtatctatttgaaagtggaaccttgccacctaaattagatgtatttgatgctgttgttgcaagacacagtgaagaaaacatggataagacaattcttgtcaaaaatgaaaatattaaattagatgaacttgcacttgtgaagccacgacagagcatgaccctcagctcaactttcaccaataaagaggccttccttgatgttgattccagtccagaagggtctgggactgaagataatttacagtgaccccatctaaataaaatactgcttttgcaaacagaacactgtaatagggtagttctggagagatggtatgcagcatacaaaaatatattaaaaatataaacaatgttcaggagagtaaaaattcatataaagtgcaattgcacaaatacaagccaagctagaaggaagcacctatgaaagcaacaactttgtttctcatccatagtagtattgattttgatgctagatagttttgctaggtataaaaaataagtaaagttccacttagagaacaaagggccaaatagagtttttatatttgttatgataaaaggaagtagatgtgaaaaagcctaagaaaaaggaaattggacagttttgatacaaactttgtttgctaatgcactgatgagtctagtttcattatagcacgaagctatgagaataacttcagtcactcccttgaatggtgcaatgaattaaccagctgatttttcttagtgtgatgattaaccccttctttcatgttctgagctataacatttgctgaatatgcaatttgttattcttttattaatggcatgtaatattctgagcacgggcaaagaaaacacacaaaagattatgtattggcatttatttatgtgcaaggtgataggaaaactgaatccatctttgtagaagagcactgggctaatttgtatgtttccatagctactatatgcataaacaacagtacctgaaggattattaagcaaccttaaagcaataagttcattaaacagaaggtaataggaagaacagtacatttttgtctttatctcaagtatataaagttttgccccatgataaaataagtaacatataaattaatacataagttaatattggaagtgaaattaggccttatgtaaggagaggtagctacacagcatctgttacggttaatgagaggcacactgctaaatttacgtatatttcattgaatactttatgggaagcctccacaacacctcctgatagtagtaaaattagaaaaaaacaaactctactaatttttagatattcattaataggaaagatttaatgttacagcatctactctttggcactttttcacataagccagccttagagactagacaaataactactgcaaaaagtacatagtgaattttaaaatgtagaagaaagcaaaaaataaaataagtcctaaagtgaagaagccatcaattttaacatttgatgtctagataacattcatgagattggtcattaaatactattttgctccttttctggtgttacacatacacactcatacgtgtgtgtgtgtgtatgtgtgtgtgtgtatgtgtaatgatttgtgtccatttcaagtgttttcacaccagtcacacattatagaaattactggagccatgtctacaaaagcaaagtgaagtgatgagctgaaaagtgatcagggaatctgatcccataaagaaagtgagtctgaattgttgaaactaaagcacttcttttccaaaaatacttctgcaactcatgaacaaaatgaagttaacttagtgtttagcattaaaaataaaagttgtaccttgaccctagaattccttttataagatttaattgtaattgtctcaaagcatcaaataatacatctttatcattaaacatgaatttaatgtctaggataatttttaaaagaggaaattaaataattttacatgtctcatattttcagtgctttctcaaaatttgatggtgaatattacattgcattcaaaatcttcactgaatatcatatgtatctaaatgaaaagagaattacttatattcatctattttctcagaatctattcagtaccctatggagtacatggaagaagtatatttttggaaccagtaagtatgggagtccacgattctcaggtattgattgaaaaaagagaaaggggcaagaaattcattaaagaaaaaccacagatactgaaacatttgacacataaaagtaattaattgctggagactacaattcctggcaaacaccattattccagatgcaccatgctacccagcatgctacctgaatggcggtttttatccatcctgtcaccctgagcatctgtctcaacctgctgaggcacagacttccaccatgtgcatcaggaaacacctcactcatactgtcatataatgcaacagggaggcatagtctctctacaggtctctctctttacgttgtaccattctgttgggcaacaattgtcccaacaaccacacttaaatccagtggggaaaaaaaggttaacagtaaaaatttcttccacgtaattcaatttctcacaatagacagaaacagggggaaaatgtttgccctgttcaaagtactaaaactagataacttaaataatttaagccaataaataatattatattgtatttaacccattattcctcacctaccctcaaagtaggtatacaaaagactagtttgttattaatccacaaatatgctaaatgttagcaagatgatttttaagtacaaaaaagtttaagattgcaaggaaggaaacaatggtcacaaggtctttacttatgcacatttgtgcataaatttccacccaatttccaagacagttgtatcacaaagctgtgaaatgtgcaagagtatactttgtacccatcatgtgctctgttttgacataatgagtaatgcagacatttacatgttcttccagcttcaatcagtagacctgattttcaaaatctgccctcagatgaaaataaaataaacgaaacatttagacaatggctatattaatctgggaaggcaacacctgtggataaaacattagaagaaaacatatattttattttcatacttttgatatgattgtaacatatttcttgagtaatttaaatgctttgttttcccacacatattcaaatcagcaagcttgtagctggactgcaatatcaacaacaagttgtttcaaacagcatcaaaatacaacttcattgctacacttacaagtaatgaattttatgtgactatgaaacgaatataagcttaaaataagtgaatctaataaaatggctattcctctttttacttggaaataataaattaacattatattttaaacataaa

SEQ ID NO: 184399 - DNA, 2032 bp, Homo sapiens
  Payload ID: 16307
  Gene Symbol: SLC5A7
  Gene Name: solute carrier family 5 (sodium/choline cotransporter), member 7
  Uniprot ID: Q9GZV3
  ENST ID: ENST00000409059
  CDS Start-End: 290-2032
cgattcccacctcgccctgcgccgcgcgccctccgccggcgccaacacctgtcaactctgcgcgctcccaggttcttggagacgccgagtgaggagccgccctgaccgcccggccccgctccgcactgcaccccgacccaccccgcaccctccctttctgcaccctcgcacccacacccctcgcggttccagggggcggcggccccgggcggagcgctttcgcgtgcagccaccactccagacttaatgaagtagccagctgcagaagaatctggatcattagataaaaatggctttccatgtggaaggactgatagctatcatcgtgttctaccttctaattttgctggttggaatatgggctgcctggagaaccaaaaacagtggcagcgcagaagagcgcagcgaagccatcatagttggtggccgagatattggtttattggttggtggatttaccatgacagctacctgggtcggaggagggtatatcaatggcacagctgaagcagtttatgtaccaggttatggcctagcttgggctcaggcaccaattggatattctcttagtctgattttaggtggcctgttctttgcaaaacctatgcgttcaaaggggtatgtgaccatgttagacccgtttcagcaaatctatggaaaacgcatgggcggactcctgtttattcctgcactgatgggagaaatgttctgggctgcagcaattttctctgctttgggagccaccatcagcgtgatcatcgatgtggatatgcacatttctgtcatcatctctgcactcattgccactctgtacacactggtgggagggctctattctgtggcctacactgatgtcgttcagctcttttgcatttttgtagggctgtggatcagcgtcccctttgcattgtcacatcctgcagtcgcagacatcgggttcactgctgtgcatgccaaataccaaaagccgtggctgggaactgttgactcatctgaagtctactcttggcttgatagttttctgttgttgatgctgggtggaatcccatggcaagcatactttcagagggttctctcttcttcctcagccacctatgctcaagtgctgtccttcctggcagctttcgggtgcctggtgatggccatcccagccatactcattggggccattggagcatcaacagactggaaccagactgcatatgggcttccagatcccaagactacagaagaggcagacatgattttaccaattgttctgcagtatctctgccctgtgtatatttctttctttggtcttggtgcagtttctgctgctgttatgtcatcagcagattcttccatcttgtcagcaagttccatgtttgcacggaacatctaccagctttccttcagacaaaatgcttcggacaaagaaatcgtttgggttatgcgaatcacagtgtttgtgtttggagcatctgcaacagccatggccttgctgacgaaaactgtgtatgggctctggtacctcagttctgaccttgtttacatcgttatcttcccccagctgctttgtgtactctttgttaagggaaccaacacctatggggccgtggcaggttatgtttctggcctcttcctgagaataactggaggggagccatatctgtatcttcagcccttgatcttctaccctggctattaccctgatgataatggtatatataatcagaaatttccatttaaaacacttgccatggttacatcattcttaaccaacatttgcatctcctatctagccaagtatctatttgaaagtggaaccttgccacctaaattagatgtatttgatgctgttgttgcaagacacagtgaagaaaacatggataagacaattcttgtcaaaaatgaaaatattaaattagatgaacttgcacttgtgaagccacgacagagcatgaccctcagctcaactttcaccaataaagaggccttccttgatgttgattccagtccagaagggtctgggactgaagataatttacagtga

SEQ ID NO: 184400 - DNA, 5061 bp, Homo sapiens
  Payload ID: 16308
  Gene Symbol: SLC5A1
  Gene Name: solute carrier family 5 (sodium/glucose cotransporter), member 1
  Uniprot ID: P13866
  ENST ID: ENST00000266088
  CDS Start-End: 251-2245
ccccattcgcaggacagctcttacctgccgggccgccgccccagccaacagctcagccgggtgctccttcctgggctccacgcccggagctgcttcctgacggtgcagccgcaaggcatcgcaggggccccgcgctactgccctgctccctcaaagtcccaggtcccctcccctggtgctgatcattaaccaggaggccgtataaggagctagcggccctggcgagagggaaggacgcaacgctgccaccatggacagtagcacctggagccccaagaccaccgcggtcacccggcctgttgagacccacgagctcattcgcaatgcagccgatatctccatcatcgttatctacttcgtggtagtgatggccgtcggactgtgggctatgttttccaccaatcgtgggactgttggaggcttcttcctggcaggccgaagtatggtgtggtggccgattggagcctccctctttgctagtaacattggaagtggccactttgtggggctggccgggactggggcagcttcaggcatcgccattggaggctttgaatggaatgccctggttttggtggttgtgctgggctggctgtttgtccccatctatattaaggctggggtggtgacaatgccagagtacctgaggaagcggtttggaggccagcggatccaggtctacctttcccttctgtccctgctgctctacattttcaccaagatctcggcagacatcttctcgggggccatattcatcaatctggccttaggcctgaatctgtatttagccatctttctcttattggcaatcactgccctttacacaattacagggggcctggcggcggtgatttacacggacaccttgcagacggtgatcatgctggtggggtctttaatcctgactgggtttgcttttcacgaagtgggaggctatgacgccttcatggaaaagtacatgaaagccattccaaccatagtgtctgatggcaacaccacctttcaggaaaaatgctacactccaagggccgactccttccacatcttccgagatcccctcacgggagacctcccatggcctgggttcatctttgggatgtccatccttaccttgtggtactggtgcacagatcaggtcattgtgcagcgctgcctctcagccaagaatatgtctcacgtgaagggtggctgcatcctgtgtgggtatctaaagctgatgcccatgttcatcatggtgatgccaggaatgatcagccgcattctgtacacagaaaaaattgcctgtgtcgtcccttcagaatgtgagaaatattgcggtaccaaggttggctgtaccaacatcgcctatccaaccttagtggtggagctcatgcccaatggactgcgaggcctgatgctatcagtcatgctggcctccctcatgagctccctgacctccatcttcaacagcgccagcaccctcttcaccatggacatctacgccaaggtccgcaagagagcatctgagaaagagctcatgattgccggaaggttgtttatcctggtgctgattggcatcagcatcgcctgggtgcccattgtgcagtcagcacaaagtgggcaactcttcgattacatccagtccatcaccagttacttgggaccacccattgcggctgtcttcctgcttgctattttctggaagagagtcaatgagccaggagccttttggggactgatcctaggacttctgattgggatttcacgtatgattactgagtttgcttatggaaccgggagctgcatggagcccagcaactgtcccacgattatctgtggggtgcactacttgtactttgccattatcctcttcgccatttctttcatcaccatcgtggtcatctccctcctcaccaaacccattccggatgtgcatctctaccgtctgtgttggagcctgcgcaacagcaaagaggagcgtattgacctggatgcggaagaggagaacatccaagaaggccctaaggagaccattgaaatagaaacacaagttcctgagaagaaaaaaggaatcttcaggagagcctatgacctattttgtgggctagagcagcacggtgcacccaagatgactgaggaagaggagaaagccatgaagatgaagatgacggacacctctgagaagcctttgtggaggacagtgttgaacgtcaatggcatcatcctggtgaccgtggctgtcttttgccatgcatattttgcctgagtcctaccttttgctgtagatttaccatggctggactcttactcaccttcctttagtctcgtcctgtggtgttgaagggaaatcagccagttgtaaattttgcccaggtggataaatgtgtacatgtgtaattataggctagctggaagaaaaccattagtttgctgttaatttatgcatttgaagccagtgtgatacagccatctgtacctactggagctgcagaagggaagtccactcagtcacatccagaaaaaggcagactaagaatcagaagccatgtgattgatgtctgacgtgagtctgtctcaggtagattccgggtgtcagtgtggtttataatccttgaatattgttttagaaactttggtctccctggttcctgccacttttcctgtccgtcctcctccccattttttttttaaaagaaagctgttttcccctcatcatatccctcttgagttttgcctggactttccctctcaagtgtgtcaatcaggtaaactgaggaatgcatggaagctgaggatggagcttgatgggctccctgtcctgggtgtttgctctctgaagtggaggcctgaggaaggtagtacttccacaaaagggagggacccgggccccagcctcaagctagtgggggaggcagatagcctgaatccaggggattttctgggcttcttaaaatgtccattgtgagttccccgtgtttgggattccactcattttggcattcacagtgcctggaatgtcttagattttcagcaatgcgtgttgaataaatgaatgacataggcatttatttttaaatctttgcttgctttttacatgagcctggcccttagttaaccttttcttgtggctacacaaagtatgctcactggttactaatgacttgggatgcatttgtcaaactgattatattagttttctagggatgccataacaaagtagcacagaccagatggctcaagcagcagacatttattttctcacagttctagaggctagaagttggaggccaagatgtcagcagggttggtttcttctgaggcctctctccttggttgcagatggtcatatctcactctgtcttccgtggccttccttttgtctgtgtcctaaatctactcttctgataaggacatcagtcatattggaataggacccaccctaatgtcttcattttaatcacctctttaaagcccctacctccaaatacagtcacactgtgagaaactgagggttaggaagtcagcaagtgagtcttgaagagatactaaacaaacccacaacacagataaagtatgcattttggagatttccaagccagagtctcccgtgaaaaaggtaaacggaagcagttattgtgcagcaaaaggaaaaagaattacaaactgaacgtatgtaggtgaggcaaggcagggtagggcagggcctttgggtaggctgatcagagggtttttcaacaataaatcaatgggaatgcatttgttgctcccaggaccctggcaccttgactctggtactatagcatgtcagcaaatacaagcaaagcccaacactctgatttgcatttatgccaatctaaactatccggtgtttagtttgattttttgagtgcaggttcattcaaggaccaggttcccttgtgctcagggtgaagtagaaccagaaaacatcgttatccattcccagaagttttggaagagccttggtagaaaagcagaagctgctttgaccgtgaaaatatttgactcctatcagtttttggtcaggagaagatatccacctagaccaacctgaggagaaggctcagagtacagatataccccgagcaacgtgatcaatgtccttgaaccttcatttttcatctgaaaacagagacataaatgcctggctcacagatttaaatgttatacattgacagcatttatcagtataacatttatttaaataagtaggtgctcaataggtgttggtcttctaacttgtctacatcccatccccattccagggtcttcagaattgaaggagagatgttgtatcactgttagaaggctgctttgggacattctgcagcagggaggagggactgtcaacccctacaccatgaccaccaagttcctcaccttggctgagtccctaaaactctctgaacctcaggttcctccaagcataatgcagacttcacagagctgttgtaaagattaggtgaggtcaattgatactgcttaaaaggcccggtccgtagaaaatgcccaataaacattactgctttccccctcaccctactgcctgaaaaaatattacacctgtgagactgactttgagaaccagtgtgggtggggagttgtgcatataaactatttaatgagtaccaaacacaaaagtcaagcttgtaaaatatcaggccttgccccagaaagacaaataccacatgatctcactgatatgtagaatcttaaaaagtcaaactcagaagcagagagtagaatgatggttatcaagggctgggggagggagggactggggagatgttggtcaaatgatacaaaggtttagttaggtggaataagttcagaaaatcaattgtacaatgtatcaattatagttaatagcaatataacatatacttgaaaattgctgagagtagtgtgagtgttctaccacaaaaaaatatgtgcagtaatagatgttaattaccttaatttagtcatttcacaatatgtacatatataaaaatatgttgtatgccatgagtatatataattattatttgtgaatttaaaaaataaaaataatttccaaaaaaa

SEQ ID NO: 184401 - DNA, 4752 bp, Homo sapiens
  Payload ID: 16308
  Gene Symbol: SLC5A1
  Gene Name: solute carrier family 5 (sodium/glucose cotransporter), member 1
  Uniprot ID: P13866
  ENST ID: ENST00000543737
  CDS Start-End: 350-1963
acagtgagccgagatcatgccactgcactcctgcctgggcgacagaaaaagactctgtcccaaaagtgggctctttgaaggctagaaggtatttggggcagcagacttgtgtggaagcagttatcaaagtggggatgtgacacgcaccaggagaggggaacagacaacacatgagattggagcctccctctttgctagtaacattggaagtggccactttgtggggctggccgggactggggcagcttcaggcatcgccattggaggctttgaatggaatgccctggttttggtggttgtgctgggctggctgtttgtccccatctatattaaggctggggtggtgacaatgccagagtacctgaggaagcggtttggaggccagcggatccaggtctacctttcccttctgtccctgctgctctacattttcaccaagatctcggcagacatcttctcgggggccatattcatcaatctggccttaggcctgaatctgtatttagccatctttctcttattggcaatcactgccctttacacaattacagggggcctggcggcggtgatttacacggacaccttgcagacggtgatcatgctggtggggtctttaatcctgactgggtttgcttttcacgaagtgggaggctatgacgccttcatggaaaagtacatgaaagccattccaaccatagtgtctgatggcaacaccacctttcaggaaaaatgctacactccaagggccgactccttccacatcttccgagatcccctcacgggagacctcccatggcctgggttcatctttgggatgtccatccttaccttgtggtactggtgcacagatcaggtcattgtgcagcgctgcctctcagccaagaatatgtctcacgtgaagggtggctgcatcctgtgtgggtatctaaagctgatgcccatgttcatcatggtgatgccaggaatgatcagccgcattctgtacacagaaaaaattgcctgtgtcgtcccttcagaatgtgagaaatattgcggtaccaaggttggctgtaccaacatcgcctatccaaccttagtggtggagctcatgcccaatggactgcgaggcctgatgctatcagtcatgctggcctccctcatgagctccctgacctccatcttcaacagcgccagcaccctcttcaccatggacatctacgccaaggtccgcaagagagcatctgagaaagagctcatgattgccggaaggttgtttatcctggtgctgattggcatcagcatcgcctgggtgcccattgtgcagtcagcacaaagtgggcaactcttcgattacatccagtccatcaccagttacttgggaccacccattgcggctgtcttcctgcttgctattttctggaagagagtcaatgagccaggagccttttggggactgatcctaggacttctgattgggatttcacgtatgattactgagtttgcttatggaaccgggagctgcatggagcccagcaactgtcccacgattatctgtggggtgcactacttgtactttgccattatcctcttcgccatttctttcatcaccatcgtggtcatctccctcctcaccaaacccattccggatgtgcatctctaccgtctgtgttggagcctgcgcaacagcaaagaggagcgtattgacctggatgcggaagaggagaacatccaagaaggccctaaggagaccattgaaatagaaacacaagttcctgagaagaaaaaaggaatcttcaggagagcctatgacctattttgtgggctagagcagcacggtgcacccaagatgactgaggaagaggagaaagccatgaagatgaagatgacggacacctctgagaagcctttgtggaggacagtgttgaacgtcaatggcatcatcctggtgaccgtggctgtcttttgccatgcatattttgcctgagtcctaccttttgctgtagatttaccatggctggactcttactcaccttcctttagtctcgtcctgtggtgttgaagggaaatcagccagttgtaaattttgcccaggtggataaatgtgtacatgtgtaattataggctagctggaagaaaaccattagtttgctgttaatttatgcatttgaagccagtgtgatacagccatctgtacctactggagctgcagaagggaagtccactcagtcacatccagaaaaaggcagactaagaatcagaagccatgtgattgatgtctgacgtgagtctgtctcaggtagattccgggtgtcagtgtggtttataatccttgaatattgttttagaaactttggtctccctggttcctgccacttttcctgtccgtcctcctccccattttttttttaaaagaaagctgttttcccctcatcatatccctcttgagttttgcctggactttccctctcaagtgtgtcaatcaggtaaactgaggaatgcatggaagctgaggatggagcttgatgggctccctgtcctgggtgtttgctctctgaagtggaggcctgaggaaggtagtacttccacaaaagggagggacccgggccccagcctcaagctagtgggggaggcagatagcctgaatccaggggattttctgggcttcttaaaatgtccattgtgagttccccgtgtttgggattccactcattttggcattcacagtgcctggaatgtcttagattttcagcaatgcgtgttgaataaatgaatgacataggcatttatttttaaatctttgcttgctttttacatgagcctggcccttagttaaccttttcttgtggctacacaaagtatgctcactggttactaatgacttgggatgcatttgtcaaactgattatattagttttctagggatgccataacaaagtagcacagaccagatggctcaagcagcagacatttattttctcacagttctagaggctagaagttggaggccaagatgtcagcagggttggtttcttctgaggcctctctccttggttgcagatggtcatatctcactctgtcttccgtggccttccttttgtctgtgtcctaaatctactcttctgataaggacatcagtcatattggaataggacccaccctaatgtcttcattttaatcacctctttaaagcccctacctccaaatacagtcacactgtgagaaactgagggttaggaagtcagcaagtgagtcttgaagagatactaaacaaacccacaacacagataaagtatgcattttggagatttccaagccagagtctcccgtgaaaaaggtaaacggaagcagttattgtgcagcaaaaggaaaaagaattacaaactgaacgtatgtaggtgaggcaaggcagggtagggcagggcctttgggtaggctgatcagagggtttttcaacaataaatcaatgggaatgcatttgttgctcccaggaccctggcaccttgactctggtactatagcatgtcagcaaatacaagcaaagcccaacactctgatttgcatttatgccaatctaaactatccggtgtttagtttgattttttgagtgcaggttcattcaaggaccaggttcccttgtgctcagggtgaagtagaaccagaaaacatcgttatccattcccagaagttttggaagagccttggtagaaaagcagaagctgctttgaccgtgaaaatatttgactcctatcagtttttggtcaggagaagatatccacctagaccaacctgaggagaaggctcagagtacagatataccccgagcaacgtgatcaatgtccttgaaccttcatttttcatctgaaaacagagacataaatgcctggctcacagatttaaatgttatacattgacagcatttatcagtataacatttatttaaataagtaggtgctcaataggtgttggtcttctaacttgtctacatcccatccccattccagggtcttcagaattgaaggagagatgttgtatcactgttagaaggctgctttgggacattctgcagcagggaggagggactgtcaacccctacaccatgaccaccaagttcctcaccttggctgagtccctaaaactctctgaacctcaggttcctccaagcataatgcagacttcacagagctgttgtaaagattaggtgaggtcaattgatactgcttaaaaggcccggtccgtagaaaatgcccaataaacattactgctttccccctcaccctactgcctgaaaaaatattacacctgtgagactgactttgagaaccagtgtgggtggggagttgtgcatataaactatttaatgagtaccaaacacaaaagtcaagcttgtaaaatatcaggccttgccccagaaagacaaataccacatgatctcactgatatgtagaatcttaaaaagtcaaactcagaagcagagagtagaatgatggttatcaagggctgggggagggagggactggggagatgttggtcaaatgatacaaaggtttagttaggtggaataagttcagaaaatcaattgtacaatgtatcaattatagttaatagcaatataacatatacttgaaaattgctgagagtagtgtgagtgttctaccacaaaaaaatatgtgcagtaatagatgttaattaccttaatttagtcatttcacaatatgtacatatataaaaatatgttgtatgccatgagtatatataattattatttgtgaattt

SEQ ID NO: 184402 - DNA, 2271 bp, Homo sapiens
  Payload ID: 16309
  Gene Symbol: SLC5A2
  Gene Name: solute carrier family 5 (sodium/glucose cotransporter), member 2
  Uniprot ID: P31639
  ENST ID: ENST00000330498
  CDS Start-End: 20-2038
ggggcagatcctggggagaatggaggagcacacagaggcaggctcggcaccagagatgggggcccagaaggccctgattgacaatcctgctgacatcctagtcattgctgcatatttcctgctggtcattggcgttggcttgtggtccatgtgcagaaccaacagaggcactgtgggcggctacttcctggcaggacgcagcatggtgtggtggccggttggggcctctctcttcgccagcaacatcggcagtggccactttgtgggcctggcagggactggcgctgcaagtggcttggctgttgctggattcgagtggaatgcgctcttcgtggtgctgctactgggctggctgtttgcacccgtgtacctgacagcgggggtcatcacgatgccacagtacctgcgcaagcgcttcggcggccgccgcatccgcctctacctgtctgtgctctcccttttcctgtacatcttcaccaagatctcagtggacatgttctccggagctgtattcatccagcaggctctgggctggaacatctatgcctccgtcatcgcgcttctgggcatcaccatgatttacacggtgacaggagggctggccgcgctgatgtacacggacacggtacagaccttcgtcattctggggggcgcctgcatcctcatgggttacgccttccacgaggtgggcgggtattcgggtctcttcgacaaatacctgggagcagcgacttcgctgacggtgtccgaggatccagccgtgggaaacatctccagcttctgctatcgaccccggcccgactcctaccacctgctccggcaccccgtgaccggggatctgccgtggcccgcgctgctcctcggactcacaatcgtctcgggctggtactggtgcagcgaccaggtcatcgtgcagcgctgcctggccgggaagagcctgacccacatcaaggcgggctgcatcctgtgtgggtacctgaagctgacgcccatgtttctcatggtcatgccaggcatgatcagccgcattctgtacccagacgaggtggcgtgcgtggtgcctgaggtgtgcaggcgcgtgtgcggcacggaggtgggctgctccaacatcgcctacccgcggctcgtcgtgaagctcatgcccaacggtctgcgcggactcatgctggcggtcatgctggccgcgctcatgtcctcgctggcctccatcttcaacagcagcagcacgctcttcaccatggacatctacacgcgcctgcggccacgcgccggcgaccgcgagctgctgctggtgggacggctctgggtggtgttcatcgtggtagtgtcggtggcctggcttcccgtggtgcaggcggcacagggcgggcagctcttcgattacatccaggcagtctctagctacctggcaccgcccgtgtccgccgtcttcgtgctggcgctcttcgtgccgcgcgttaatgagcagggcgccttctggggactcatcgggggcctgctgatgggcctggcacgcctgattcccgagttctccttcggctcgggcagctgtgtgcagccctcggcgtgcccagctttcctctgcggcgtgcactacctctacttcgccattgtgctgttcttctgctctggcctcctcaccctcacggtctccctgtgcaccgcgcccatccccagaaagcacctccaccgcctggtcttcagtctccggcatagcaaggaggaacgggaggacctggatgctgatgagcagcaaggctcctcactccctgtacagaatgggtgcccagagagtgccatggagatgaatgagccccaggccccggcaccaagcctcttccgccagtgcctgctctggttttgtggaatgagcagaggtggggtgggcagtcctccgccccttacccaggaggaggcagcggcagcagccaggcggctggaggacatcagcgaggacccgagctgggcccgtgtggtcaacctcaatgccctgctcatgatggcagtggccgtgttcctctggggcttctatgcctaagaccaactgcgttggacaccataagccacagcctcacaggaagtgggggtgaggagcctgcggtgctccccagaaaaggggaaggggcagtggggtgagaaggtcctggctccccttctcccggccttcctctgcctggggcccactgcatctgattggcagtcacttcccatgagggcctggcccacccgctgcagttgccctaaggaaaaataaagctgcctttcccctgt

SEQ ID NO: 184403 - DNA, 1852 bp, Homo sapiens
  Payload ID: 16309
  Gene Symbol: SLC5A2
  Gene Name: solute carrier family 5 (sodium/glucose cotransporter), member 2
  Uniprot ID: P31639
  ENST ID: ENST00000419665
  CDS Start-End: 20-1396
ggggcagatcctggggagaatggaggagcacacagaggcaggctcggcaccagagatgggggcccagaaggccctgattgacaatcctgctgacatcctagtcattgctgcatatttcctgctggtcattggcgttggcttgtggtccatgtgcagaaccaacagaggcactgtgggcggctacttcctggcaggacgcagcatggtgtggtggccggttggggcctctctcttcgccagcaacatcggcagtggccactttgtgggcctggcagggactggcgctgcaagtggcttggctgttgctggattcgagtggaatgcgctcttcgtggtgctgctactgggctggctgtttgcacccgtgtacctgacagcgggggtcatcacgatgccacagtacctgcgcaagcgcttcggcggccgccgcatccgcctctacctgtctgtgctctcccttttcctgtacatcttcaccaagatctcagtggacatgttctccggagctgtattcatccagcaggctctgggctggaacatctatgcctccgtcatcgcgcttctgggcatcaccatgatttacacggtgacaggagggctggccgcgctgatgtacacggacacggtacagaccttcgtcattctggggggcgcctgcatcctcatgggttacgccttccacgaggtgggcgggtattcgggtctcttcgacaaatacctgggagcagcgacttcgctgacggtgtccgaggatccagccgtgggaaacatctccagcttctgctatcgaccccggcccgactcctaccacctgctccggcaccccgtgaccggggatctgccgtggcccgcgctgctcctcggactcacaatcgtctcgggctggtactggtgcagcgaccaggtcatcgtgcagcgctgcctggccgggaagagcctgacccacatcaaggcgggctgcatcctgtgtgggtacctgaagctgacgcccatgtttctcatggtcatgccaggcatgatcagccgcattctgtacccagacgaggtggcgtgcgtggtgcctgaggtgtgcaggcgcgtgtgcggcacggaggtgggctgctccaacatcgcctacccgcggctcgtcgtgaagctcatgcccaacgggcgccttctggggactcatcgggggcctgctgatgggcctggcacgcctgattcccgagttctccttcggctcgggcagctgtgtgcagccctcggcgtgcccagctttcctctgcggcgtgcactacctctacttcgccattgtgctgttcttctgctctggcctcctcaccctcacggtctccctgtgcaccgcgcccatccccagaaagcacctccaccgcctggtcttcagtctccggcatagcaaggaggaacgggaggacctggatgctgatgagcagcaaggctcctcactccctgtacagaatgggtgcccagagagtgccatggagatgaatgagccccaggccccggcaccaagcctcttccgccagtgcctgctctggttttgtggaatgagcagaggtggggtgggcagtcctccgccccttacccaggaggaggcagcggcagcagccaggcggctggaggacatcagcgaggacccgagctgggcccgtgtggtcaacctcaatgccctgctcatgatggcagtggccgtgttcctctggggcttctatgcctaagaccaactgcgttggacaccataagccacagcctcacaggaagtgggggtgaggagcctgcggtgctccccagaaaaggggaaggggcagtggggtgagaaggtcctggctccccttctcccggccttcctctg

SEQ ID NO: 184404 - DNA, 516 bp, Homo sapiens
  Payload ID: 16309
  Gene Symbol: SLC5A2
  Gene Name: solute carrier family 5 (sodium/glucose cotransporter), member 2
  ENST ID: ENST00000569576
  CDS Start-End: 71-516
attcagctaaacaaagctggggagcgggaatgagacctgggggacttgtcggctcagtgcccctgagtccatgtgcagaaccaacagaggcactgtgggcggctacttcctggcaggacgcagcatggtgtggtggccggttggggcctctctcttcgccagcaacatcggcagtggccactttgtgggcctggcagggactggcgctgcaagtggcttggctgttgctggattcgagtggaatgcgctcttcgtggtgctgctactgggctggctgtttgcacccgtgtacctgacagcgggggtcatcacgatgccacagtacctgcgcaagcgcttcggcggccgccgcatccgcctctacctgtctgtgctctcccttttcctgtacatcttcaccaagatctcagtggacatgttctccggagctgtattcatccagcaggctctgggctggaacatctatgcctccgtcatcgcgcttctgggcatcaccatgatttacacggtgacagg

SEQ ID NO: 184405 - DNA, 2745 bp, Homo sapiens
  Payload ID: 16310
  Gene Symbol: SLC5A11
  Gene Name: solute carrier family 5 (sodium/inositol cotransporter), member 11
  Uniprot ID: Q8WWX8
  ENST ID: ENST00000347898
  CDS Start-End: 623-2650
ggttgctgttcctgttgctgccactgcggtgagggctgtggctggacgtccctcctggcactttgcctctgtcccctccatccgccgccagcatttttcctcccctccccttcctccagctcgtcccaagcctgcctgtccccagcgtggaggcgggacagtggaagactgggtgagtgaagcaggatggtgccttgggctccagcgtctccccaacccctccatgccatgggtccccacgcaggtgaggaccctggtggaggacggtgtgggcagagcgtgggacatgtcaccttccccacctgctcagagttcaagggtcctgggctgggccccgttctctcttctgccctggggagatcattcacgcttcctttaatccccgctgcagctgaggctggagtttggagtttgacccgcttggaggctctctcagcagcgggcatataggaggaagggtcactgctgtctccggaagctcttggctgcaaagagagaggatcccgggtatctccctccttacaaccaccgccacctcctagtgccttagaagccactgacagcccccagggcaggtgagccctgcatctggaataaggatccagaggtctcgttcaggaccatggagagcggcaccagcagccctcagcctccacagttagatcccctggatgcgtttccccagaagggcttggagcctggggacatcgcggtgctagttctgtacttcctctttgtcctggctgttggactatggtccacagtgaagaccaaaagagacacagtgaaaggctacttcctggctggaggggacatggtgtggtggccagtgggtgcatccttgtttgccagcaatgttggaagtggacatttcattggcctggcagggtcaggtgctgctacgggcatttctgtatcagcttatgaacttaatggcttgttttctgtgctgatgttggcctggatcttcctacccatctacattgctggtcaggtcaccacgatgccagaatacctacggaagcgcttcggtggcatcagaatccccatcatcctggctgtactctacctatttatctacatcttcaccaagatctcggtagacatgtatgcaggtgccatcttcatccagcagtctttgcacctggatctgtacctggccatagttgggctactggccatcactgctgtatacacggttgctggtggcctggctgctgtgatctacacggatgccctgcagacgctgatcatgcttataggagcgctcaccttgatgggctacagtttcgccgcggttggtgggatggaaggactgaaggagaagtacttcttggccctggctagcaaccggagtgagaacagcagctgcgggctgccccgggaagatgccttccatattttccgagatccgctgacatctgatctcccgtggccgggggtcctatttggaatgtccatcccatccctctggtactggtgcacggatcaggtgattgtccagcggactctggctgccaagaacctgtcccatgccaaaggaggtgctctgatggctgcatacctgaaggtgctgcccctcttcataatggtgttccctgggatggtcagccgcatcctcttcccagatcaagtggcctgtgcagatccagagatctgccagaagatctgcagcaacccctcaggctgttcggacatcgcgtatcccaaactcgtgctggaactcctgcccacagggctccgtgggctgatgatggctgtgatggtggcggctctcatgtcctccctcacctccatctttaacagtgccagcaccatcttcaccatggacctctggaatcacctccggcctcgggcatctgagaaggagctcatgattgtgggcagggtgtttgtgctgctgctggtcctggtctccatcctctggatccctgtggtccaggccagccagggcggccagctcttcatctatatccagtccatcagctcctacctgcagccgcctgtggcggtggtcttcatcatgggatgtttctggaagaggaccaatgaaaagggtgccttctggggcctgatctcgggcctgctcctgggcttggttaggctggtcctggactttatttacgtgcagcctcgatgcgaccagccagatgagcgcccggtcctggtgaagagcattcactacctctacttctccatgatcctgtccacggtcaccctcatcactgtctccaccgtgagctggttcacagagccaccctccaaggagatggtcagccacctgacctggtttactcgtcacgaccccgtggtccagaaggaacaagcaccaccagcagctcccttgtctcttaccctctctcagaacgggatgccagaggccagcagcagcagcagcgtccagttcgagatggttcaagaaaacacgtctaaaacccacagctgtgacatgaccccaaagcagtccaaagtggtgaaggccatcctgtggctctgtggaatacaggagaagggcaaggaagagctcccggccagagcagaagccatcatagtttccctggaagaaaaccccttggtgaagaccctcctggacgtcaacctcattttctgcgtgagctgcgccatctttatctggggctattttgcttagtgtggggtgaacccaggggtccaaactctgtttctcttcagtgctccatttttttaatgaaagaaaaaataataaagcttttgtttaccacaagg

SEQ ID NO: 184406 - DNA, 2069 bp, Homo sapiens
  Payload ID: 16310
  Gene Symbol: SLC5A11
  Gene Name: solute carrier family 5 (sodium/inositol cotransporter), member 11
  Uniprot ID: Q8WWX8
  ENST ID: ENST00000449109
  CDS Start-End: 415-1974
actgcggtgagggctgtggctggacgtccctcctggcactttgcctctgtcccctccatccgccgccagcatttttcctcccctccccttcctccagctcgtcccaagcctgcctgtccccagcgtggaggcgggacagtggaagactggctgaggctggagtttggagtttgacccgcttggaggctctctcagcagcgggcatataggaggaagggtcactgctgtctccggaagctcttggctgcaaagagagaggatcccgggtatctccctccttacaaccaccgccacctcctagtgccttagaagccactgacagcccccagggcaggtgagccctgcatctggaataagtccacagtgaagaccaaaagagacacagtgaaaggctacttcctggctggaggggacatggtgtggtggccagtgggtgcatccttgtttgccagcaatgttggaagtggacatttcattggcctggcagggtcaggtgctgctacgggcatttctgtatcagcttatgaacttaatggcttgttttctgtgctgatgttggcctggatcttcctacccatctacattgctggtcaggtcaccacgatgccagaatacctacggaagcgcttcggtggcatcagaatccccatcatcctggctgtactctacctatttatctacatcttcaccaagatctcggtagacatgtatgcaggtgccatcttcatccagcagtctttgcacctggatctgtacctggccatagttgggctactggccatcactgctgtatacacggttgctggtggcctggctgctgtgatctacacggatgccctgcagacgctgatcatgcttataggagcgctcaccttgatgggctacagtgattgtccagcggactctggctgccaagaacctgtcccatgccaaaggaggtgctctgatggctgcatacctgaaggtgctgcccctcttcataatggtgttccctgggatggtcagccgcatcctcttcccagatcaagtggcctgtgcagatccagagatctgccagaagatctgcagcaacccctcaggctgttcggacatcgcgtatcccaaactcgtgctggaactcctgcccacagtgccagcaccatcttcaccatggacctctggaatcacctccggcctcgggcatctgagaaggagctcatgattgtgggcagggtgtttgtgctgctgctggtcctggtctccatcctctggatccctgtggtccaggccagccagggcggccagctcttcatctatatccagtccatcagctcctacctgcagccgcctgtggcggtggtcttcatcatgggatgtttctggaagaggaccaatgaaaagggtgccttctggggcctgatctcgggcctgctcctgggcttggttaggctggtcctggactttatttacgtgcagcctcgatgcgaccagccagatgagcgcccggtcctggtgaagagcattcactacctctacttctccatgatcctgtccacggtcaccctcatcactgtctccaccgtgagctggttcacagagccaccctccaaggagatggtcagccacctgacctggtttactcgtcacgaccccgtggtccagaaggaacaagcaccaccagcagctcccttgtctcttaccctctctcagaacgggatgccagaggccagcagcagcagcagcgtccagttcgagatggttcaagaaaacacgtctaaaacccacagctgtgacatgaccccaaagcagtccaaagtggtgaaggccatcctgtggctctgtggaatacaggagaagggcaaggaagagctcccggccagagcagaagccatcatagtttccctggaagaaaaccccttggtgaagaccctcctggacgtcaacctcattttctgcgtgagctgcgccatctttatctggggctattttgcttagtgtggggtgaacccaggggtccaaactctgtttctcttcagtgctccatttttttaatgaaagaaaaaataataaagcttttgtttaccacaagg

SEQ ID NO: 184407 - DNA, 2399 bp, Homo sapiens
  Payload ID: 16310
  Gene Symbol: SLC5A11
  Gene Name: solute carrier family 5 (sodium/inositol cotransporter), member 11
  Uniprot ID: Q8WWX8
  ENST ID: ENST00000424767
  CDS Start-End: 382-2304
actgcggtgagggctgtggctggacgtccctcctggcactttgcctctgtcccctccatccgccgccagcatttttcctcccctccccttcctccagctcgtcccaagcctgcctgtccccagcgtggaggcgggacagtggaagactggctgaggctggagtttggagtttgacccgcttggaggctctctcagcagcgggcatataggaggaagggtcactgctgtctccggaagctcttggctgcaaagagagaggatcccgggtatctccctccttacaaccaccgccacctcctagtgccttagaagccactgacagcccccagggcaggtgagccctgcatctggaataaggatccagaggtctcgttcaggaccatggagagcggcaccagcagccctcagcctccacagttagatcccctggatgcgtttccccagaagggcttggagcctggggacatcgcggtgctagttctgtacttcctctttgtcctggctgttggactatggtccacagtgaagaccaaaagagacacagtgaaaggctacttcctggctggaggggacatggtgtggtggccagtgggtgcatccttgtttgccagcaatgttggaagtggacatttcattggcctggcagggtcaggtgctgctacgggcatttctgtatcagcttatgaacttaatggcttgttttctgtgctgatgttggcctggatcttcctacccatctacattgctggtcaggtagacatgtatgcaggtgccatcttcatccagcagtctttgcacctggatctgtacctggccatagttgggctactggccatcactgctgtatacacggttgctggtggcctggctgctgtgatctacacggatgccctgcagacgctgatcatgcttataggagcgctcaccttgatgggctacagtttcgccgcggttggtgggatggaaggactgaaggagaagtacttcttggccctggctagcaaccggagtgagaacagcagctgcgggctgccccgggaagatgccttccatattttccgagatccgctgacatctgatctcccgtggccgggggtcctatttggaatgtccatcccatccctctggtactggtgcacggatcaggtgattgtccagcggactctggctgccaagaacctgtcccatgccaaaggaggtgctctgatggctgcatacctgaaggtgctgcccctcttcataatggtgttccctgggatggtcagccgcatcctcttcccagatcaagtggcctgtgcagatccagagatctgccagaagatctgcagcaacccctcaggctgttcggacatcgcgtatcccaaactcgtgctggaactcctgcccacagggctccgtgggctgatgatggctgtgatggtggcggctctcatgtcctccctcacctccatctttaacagtgccagcaccatcttcaccatggacctctggaatcacctccggcctcgggcatctgagaaggagctcatgattgtgggcagggtgtttgtgctgctgctggtcctggtctccatcctctggatccctgtggtccaggccagccagggcggccagctcttcatctatatccagtccatcagctcctacctgcagccgcctgtggcggtggtcttcatcatgggatgtttctggaagaggaccaatgaaaagggtgccttctggggcctgatctcgggcctgctcctgggcttggttaggctggtcctggactttatttacgtgcagcctcgatgcgaccagccagatgagcgcccggtcctggtgaagagcattcactacctctacttctccatgatcctgtccacggtcaccctcatcactgtctccaccgtgagctggttcacagagccaccctccaaggagatggtcagccacctgacctggtttactcgtcacgaccccgtggtccagaaggaacaagcaccaccagcagctcccttgtctcttaccctctctcagaacgggatgccagaggccagcagcagcagcagcgtccagttcgagatggttcaagaaaacacgtctaaaacccacagctgtgacatgaccccaaagcagtccaaagtggtgaaggccatcctgtggctctgtggaatacaggagaagggcaaggaagagctcccggccagagcagaagccatcatagtttccctggaagaaaaccccttggtgaagaccctcctggacgtcaacctcattttctgcgtgagctgcgccatctttatctggggctattttgcttagtgtggggtgaacccaggggtccaaactctgtttctcttcagtgctccatttttttaatgaaagaaaaaataataaagcttttgtttaccacaagg

SEQ ID NO: 184408 - DNA, 2294 bp, Homo sapiens
  Payload ID: 16310
  Gene Symbol: SLC5A11
  Gene Name: solute carrier family 5 (sodium/inositol cotransporter), member 11
  Uniprot ID: Q8WWX8
  ENST ID: ENST00000545376
  CDS Start-End: 382-2199
actgcggtgagggctgtggctggacgtccctcctggcactttgcctctgtcccctccatccgccgccagcatttttcctcccctccccttcctccagctcgtcccaagcctgcctgtccccagcgtggaggcgggacagtggaagactggctgaggctggagtttggagtttgacccgcttggaggctctctcagcagcgggcatataggaggaagggtcactgctgtctccggaagctcttggctgcaaagagagaggatcccgggtatctccctccttacaaccaccgccacctcctagtgccttagaagccactgacagcccccagggcaggtgagccctgcatctggaataaggatccagaggtctcgttcaggaccatggagagcggcaccagcagccctcagcctccacagttagatcccctggatgcgtttccccagaagggcttggagcctggggacatcgcggtgctagttctgtacttcctctttgtcctggctgttggactatggtccacagtgaagaccaaaagagacacagtgaaaggctacttcctggctggaggggacatggtgtggtggccaggcttgttttctgtgctgatgttggcctggatcttcctacccatctacattgctggtcaggtagacatgtatgcaggtgccatcttcatccagcagtctttgcacctggatctgtacctggccatagttgggctactggccatcactgctgtatacacggttgctggtggcctggctgctgtgatctacacggatgccctgcagacgctgatcatgcttataggagcgctcaccttgatgggctacagtttcgccgcggttggtgggatggaaggactgaaggagaagtacttcttggccctggctagcaaccggagtgagaacagcagctgcgggctgccccgggaagatgccttccatattttccgagatccgctgacatctgatctcccgtggccgggggtcctatttggaatgtccatcccatccctctggtactggtgcacggatcaggtgattgtccagcggactctggctgccaagaacctgtcccatgccaaaggaggtgctctgatggctgcatacctgaaggtgctgcccctcttcataatggtgttccctgggatggtcagccgcatcctcttcccagatcaagtggcctgtgcagatccagagatctgccagaagatctgcagcaacccctcaggctgttcggacatcgcgtatcccaaactcgtgctggaactcctgcccacagggctccgtgggctgatgatggctgtgatggtggcggctctcatgtcctccctcacctccatctttaacagtgccagcaccatcttcaccatggacctctggaatcacctccggcctcgggcatctgagaaggagctcatgattgtgggcagggtgtttgtgctgctgctggtcctggtctccatcctctggatccctgtggtccaggccagccagggcggccagctcttcatctatatccagtccatcagctcctacctgcagccgcctgtggcggtggtcttcatcatgggatgtttctggaagaggaccaatgaaaagggtgccttctggggcctgatctcgggcctgctcctgggcttggttaggctggtcctggactttatttacgtgcagcctcgatgcgaccagccagatgagcgcccggtcctggtgaagagcattcactacctctacttctccatgatcctgtccacggtcaccctcatcactgtctccaccgtgagctggttcacagagccaccctccaaggagatggtcagccacctgacctggtttactcgtcacgaccccgtggtccagaaggaacaagcaccaccagcagctcccttgtctcttaccctctctcagaacgggatgccagaggccagcagcagcagcagcgtccagttcgagatggttcaagaaaacacgtctaaaacccacagctgtgacatgaccccaaagcagtccaaagtggtgaaggccatcctgtggctctgtggaatacaggagaagggcaaggaagagctcccggccagagcagaagccatcatagtttccctggaagaaaaccccttggtgaagaccctcctggacgtcaacctcattttctgcgtgagctgcgccatctttatctggggctattttgcttagtgtggggtgaacccaggggtccaaactctgtttctcttcagtgctccatttttttaatgaaagaaaaaataataaagcttttgtttaccacaagg

SEQ ID NO: 184409 - DNA, 2246 bp, Homo sapiens
  Payload ID: 16310
  Gene Symbol: SLC5A11
  Gene Name: solute carrier family 5 (sodium/inositol cotransporter), member 11
  Uniprot ID: Q8WWX8
  ENST ID: ENST00000567758
  CDS Start-End: 233-2155
gctgaggctggagtttggagtttgacccgcttggaggctctctcagcagcgggcatataggaggaagggtcactgctgtctccggaagctcttggctgcaaagagagaggatcccgggtatctccctccttacaaccaccgccacctcctagtgccttagaagccactgacagcccccagggcaggtgagccctgcatctggaataaggatccagaggtctcgttcaggaccatggagagcggcaccagcagccctcagcctccacagttagatcccctggatgcgtttccccagaagggcttggagcctggggacatcgcggtgctagttctgtacttcctctttgtcctggctgttggactatggtccacagtgaagaccaaaagagacacagtgaaaggctacttcctggctggaggggacatggtgtggtggccagtgggtgcatccttgtttgccagcaatgttggaagtggacatttcattggcctggcagggtcaggtgctgctacgggcatttctgtatcagcttatgaacttaatggcttgttttctgtgctgatgttggcctggatcttcctacccatctacattgctggtcaggtagacatgtatgcaggtgccatcttcatccagcagtctttgcacctggatctgtacctggccatagttgggctactggccatcactgctgtatacacggttgctggtggcctggctgctgtgatctacacggatgccctgcagacgctgatcatgcttataggagcgctcaccttgatgggctacagtttcgccgcggttggtgggatggaaggactgaaggagaagtacttcttggccctggctagcaaccggagtgagaacagcagctgcgggctgccccgggaagatgccttccatattttccgagatccgctgacatctgatctcccgtggccgggggtcctatttggaatgtccatcccatccctctggtactggtgcacggatcaggtgattgtccagcggactctggctgccaagaacctgtcccatgccaaaggaggtgctctgatggctgcatacctgaaggtgctgcccctcttcataatggtgttccctgggatggtcagccgcatcctcttcccagatcaagtggcctgtgcagatccagagatctgccagaagatctgcagcaacccctcaggctgttcggacatcgcgtatcccaaactcgtgctggaactcctgcccacagggctccgtgggctgatgatggctgtgatggtggcggctctcatgtcctccctcacctccatctttaacagtgccagcaccatcttcaccatggacctctggaatcacctccggcctcgggcatctgagaaggagctcatgattgtgggcagggtgtttgtgctgctgctggtcctggtctccatcctctggatccctgtggtccaggccagccagggcggccagctcttcatctatatccagtccatcagctcctacctgcagccgcctgtggcggtggtcttcatcatgggatgtttctggaagaggaccaatgaaaagggtgccttctggggcctgatctcgggcctgctcctgggcttggttaggctggtcctggactttatttacgtgcagcctcgatgcgaccagccagatgagcgcccggtcctggtgaagagcattcactacctctacttctccatgatcctgtccacggtcaccctcatcactgtctccaccgtgagctggttcacagagccaccctccaaggagatggtcagccacctgacctggtttactcgtcacgaccccgtggtccagaaggaacaagcaccaccagcagctcccttgtctcttaccctctctcagaacgggatgccagaggccagcagcagcagcagcgtccagttcgagatggttcaagaaaacacgtctaaaacccacagctgtgacatgaccccaaagcagtccaaagtggtgaaggccatcctgtggctctgtggaatacaggagaagggcaaggaagagctcccggccagagcagaagccatcatagtttccctggaagaaaaccccttggtgaagaccctcctggacgtcaacctcattttctgcgtgagctgcgccatctttatctggggctattttgcttagtgtggggtgaacccaggggtccaaactctgtttctcttcagtgctccatttttttaatgaaagaaaaaataataaagcttttgtttaccac

SEQ ID NO: 184410 - DNA, 591 bp, Homo sapiens
  Payload ID: 16310
  Gene Symbol: SLC5A11
  Gene Name: solute carrier family 5 (sodium/inositol cotransporter), member 11
  ENST ID: ENST00000569520
  CDS Start-End: 319-591
acagtggaagactgggtgagtgaagcaggatggtgccttgggctccagcgtctccccaacccctccatgccatgggtccccacgcagctgaggctggagtttggagtttgacccgcttggaggctctctcagcagcgggcatataggaggaagggtcactgctgtctccggaagctcttggctgcaaagagagaggatcccgggtatctccctccttacaaccaccgccacctcctagtgccttagaagccactgacagcccccagggcaggtgagccctgcatctggaataaggatccagaggtctcgttcaggaccatggagagcggcaccagcagccctcagcctccacagttagatcccctggatgcgtttccccagaagggcttggagcctggggacatcgcggtgctagttctgtacttcctctttgtcctggctgttggactatggtccacagtgaagaccaaaagagacacagtgaaaggctacttcctggctggaggggacatggtgtggtggccagtgggtgcatccttgtttgccagcaatgttggaagtggacatttcattggcctggcagggtcaggt

SEQ ID NO: 184411 - DNA, 2139 bp, Homo sapiens
  Payload ID: 16310
  Gene Symbol: SLC5A11
  Gene Name: solute carrier family 5 (sodium/inositol cotransporter), member 11
  Uniprot ID: Q8WWX8
  ENST ID: ENST00000568579
  CDS Start-End: 233-2050
gctgaggctggagtttggagtttgacccgcttggaggctctctcagcagcgggcatataggaggaagggtcactgctgtctccggaagctcttggctgcaaagagagaggatcccgggtatctccctccttacaaccaccgccacctcctagtgccttagaagccactgacagcccccagggcaggtgagccctgcatctggaataaggatccagaggtctcgttcaggaccatggagagcggcaccagcagccctcagcctccacagttagatcccctggatgcgtttccccagaagggcttggagcctggggacatcgcggtgctagttctgtacttcctctttgtcctggctgttggactatggtccacagtgaagaccaaaagagacacagtgaaaggctacttcctggctggaggggacatggtgtggtggccaggcttgttttctgtgctgatgttggcctggatcttcctacccatctacattgctggtcaggtagacatgtatgcaggtgccatcttcatccagcagtctttgcacctggatctgtacctggccatagttgggctactggccatcactgctgtatacacggttgctggtggcctggctgctgtgatctacacggatgccctgcagacgctgatcatgcttataggagcgctcaccttgatgggctacagtttcgccgcggttggtgggatggaaggactgaaggagaagtacttcttggccctggctagcaaccggagtgagaacagcagctgcgggctgccccgggaagatgccttccatattttccgagatccgctgacatctgatctcccgtggccgggggtcctatttggaatgtccatcccatccctctggtactggtgcacggatcaggtgattgtccagcggactctggctgccaagaacctgtcccatgccaaaggaggtgctctgatggctgcatacctgaaggtgctgcccctcttcataatggtgttccctgggatggtcagccgcatcctcttcccagatcaagtggcctgtgcagatccagagatctgccagaagatctgcagcaacccctcaggctgttcggacatcgcgtatcccaaactcgtgctggaactcctgcccacagggctccgtgggctgatgatggctgtgatggtggcggctctcatgtcctccctcacctccatctttaacagtgccagcaccatcttcaccatggacctctggaatcacctccggcctcgggcatctgagaaggagctcatgattgtgggcagggtgtttgtgctgctgctggtcctggtctccatcctctggatccctgtggtccaggccagccagggcggccagctcttcatctatatccagtccatcagctcctacctgcagccgcctgtggcggtggtcttcatcatgggatgtttctggaagaggaccaatgaaaagggtgccttctggggcctgatctcgggcctgctcctgggcttggttaggctggtcctggactttatttacgtgcagcctcgatgcgaccagccagatgagcgcccggtcctggtgaagagcattcactacctctacttctccatgatcctgtccacggtcaccctcatcactgtctccaccgtgagctggttcacagagccaccctccaaggagatggtcagccacctgacctggtttactcgtcacgaccccgtggtccagaaggaacaagcaccaccagcagctcccttgtctcttaccctctctcagaacgggatgccagaggccagcagcagcagcagcgtccagttcgagatggttcaagaaaacacgtctaaaacccacagctgtgacatgaccccaaagcagtccaaagtggtgaaggccatcctgtggctctgtggaatacaggagaagggcaaggaagagctcccggccagagcagaagccatcatagtttccctggaagaaaaccccttggtgaagaccctcctggacgtcaacctcattttctgcgtgagctgcgccatctttatctggggctattttgcttagtgtggggtgaacccaggggtccaaactctgtttctcttcagtgctccatttttttaatgaaagaaaaaataataaagcttttgtttacc

SEQ ID NO: 184412 - DNA, 1919 bp, Homo sapiens
  Payload ID: 16310
  Gene Symbol: SLC5A11
  Gene Name: solute carrier family 5 (sodium/inositol cotransporter), member 11
  Uniprot ID: Q8WWX8
  ENST ID: ENST00000569071
  CDS Start-End: 266-1825
gctgaggctggagtttggagtttgacccgcttggaggctctctcagcagcgggcatataggaggaagggtcactgctgtctccggaagctcttggctgcaaagagagaggatcccgggtatctccctccttacaaccaccgccacctcctagtgccttagaagccactgacagcccccagggcaggtgagccctgcatctggaataagtccacagtgaagaccaaaagagacacagtgaaaggctacttcctggctggaggggacatggtgtggtggccagtgggtgcatccttgtttgccagcaatgttggaagtggacatttcattggcctggcagggtcaggtgctgctacgggcatttctgtatcagcttatgaacttaatggcttgttttctgtgctgatgttggcctggatcttcctacccatctacattgctggtcaggtcaccacgatgccagaatacctacggaagcgcttcggtggcatcagaatccccatcatcctggctgtactctacctatttatctacatcttcaccaagatctcggtagacatgtatgcaggtgccatcttcatccagcagtctttgcacctggatctgtacctggccatagttgggctactggccatcactgctgtatacacggttgctggtggcctggctgctgtgatctacacggatgccctgcagacgctgatcatgcttataggagcgctcaccttgatgggctacagtgattgtccagcggactctggctgccaagaacctgtcccatgccaaaggaggtgctctgatggctgcatacctgaaggtgctgcccctcttcataatggtgttccctgggatggtcagccgcatcctcttcccagatcaagtggcctgtgcagatccagagatctgccagaagatctgcagcaacccctcaggctgttcggacatcgcgtatcccaaactcgtgctggaactcctgcccacagtgccagcaccatcttcaccatggacctctggaatcacctccggcctcgggcatctgagaaggagctcatgattgtgggcagggtgtttgtgctgctgctggtcctggtctccatcctctggatccctgtggtccaggccagccagggcggccagctcttcatctatatccagtccatcagctcctacctgcagccgcctgtggcggtggtcttcatcatgggatgtttctggaagaggaccaatgaaaagggtgccttctggggcctgatctcgggcctgctcctgggcttggttaggctggtcctggactttatttacgtgcagcctcgatgcgaccagccagatgagcgcccggtcctggtgaagagcattcactacctctacttctccatgatcctgtccacggtcaccctcatcactgtctccaccgtgagctggttcacagagccaccctccaaggagatggtcagccacctgacctggtttactcgtcacgaccccgtggtccagaaggaacaagcaccaccagcagctcccttgtctcttaccctctctcagaacgggatgccagaggccagcagcagcagcagcgtccagttcgagatggttcaagaaaacacgtctaaaacccacagctgtgacatgaccccaaagcagtccaaagtggtgaaggccatcctgtggctctgtggaatacaggagaagggcaaggaagagctcccggccagagcagaagccatcatagtttccctggaagaaaaccccttggtgaagaccctcctggacgtcaacctcattttctgcgtgagctgcgccatctttatctggggctattttgcttagtgtggggtgaacccaggggtccaaactctgtttctcttcagtgctccatttttttaatgaaagaaaaaataataaagcttttgtttaccacaag

SEQ ID NO: 184413 - DNA, 2214 bp, Homo sapiens
  Payload ID: 16310
  Gene Symbol: SLC5A11
  Gene Name: solute carrier family 5 (sodium/inositol cotransporter), member 11
  Uniprot ID: Q8WWX8
  ENST ID: ENST00000565769
  CDS Start-End: 289-2124
ggaggcgggacagtggaagactggctgaggctggagtttggagtttgacccgcttggaggctctctcagcagcgggcatataggaggaagggtcactgctgtctccggaagctcttggctgcaaagagagaggatcccgggtatctccctccttacaaccaccgccacctcctagtgccttagaagccactgacagcccccagggcaggtgagccctgcatctggaataagtccacagtgaagaccaaaagagacacagtgaaaggctacttcctggctggaggggacatggtgtggtggccagtgggtgcatccttgtttgccagcaatgttggaagtggacatttcattggcctggcagggtcaggtgctgctacgggcatttctgtatcagcttatgaacttaatggcttgttttctgtgctgatgttggcctggatcttcctacccatctacattgctggtcaggtcaccacgatgccagaatacctacggaagcgcttcggtggcatcagaatccccatcatcctggctgtactctacctatttatctacatcttcaccaagatctcggtagacatgtatgcaggtgccatcttcatccagcagtctttgcacctggatctgtacctggccatagttgggctactggccatcactgctgtatacacggttgctggtggcctggctgctgtgatctacacggatgccctgcagacgctgatcatgcttataggagcgctcaccttgatgggctacagtttcgccgcggttggtgggatggaaggactgaaggagaagtacttcttggccctggctagcaaccggagtgagaacagcagctgcgggctgccccgggaagatgccttccatattttccgagatccgctgacatctgatctcccgtggccgggggtcctatttggaatgtccatcccatccctctggtactggtgcacggatcaggtgattgtccagcggactctggctgccaagaacctgtcccatgccaaaggaggtgctctgatggctgcatacctgaaggtgctgcccctcttcataatggtgttccctgggatggtcagccgcatcctcttcccagatcaagtggcctgtgcagatccagagatctgccagaagatctgcagcaacccctcaggctgttcggacatcgcgtatcccaaactcgtgctggaactcctgcccacagggctccgtgggctgatgatggctgtgatggtggcggctctcatgtcctccctcacctccatctttaacagtgccagcaccatcttcaccatggacctctggaatcacctccggcctcgggcatctgagaaggagctcatgattgtgggcagggtgtttgtgctgctgctggtcctggtctccatcctctggatccctgtggtccaggccagccagggcggccagctcttcatctatatccagtccatcagctcctacctgcagccgcctgtggcggtggtcttcatcatgggatgtttctggaagaggaccaatgaaaagggtgccttctggggcctgatctcgggcctgctcctgggcttggttaggctggtcctggactttatttacgtgcagcctcgatgcgaccagccagatgagcgcccggtcctggtgaagagcattcactacctctacttctccatgatcctgtccacggtcaccctcatcactgtctccaccgtgagctggttcacagagccaccctccaaggagatggtcagccacctgacctggtttactcgtcacgaccccgtggtccagaaggaacaagcaccaccagcagctcccttgtctcttaccctctctcagaacgggatgccagaggccagcagcagcagcagcgtccagttcgagatggttcaagaaaacacgtctaaaacccacagctgtgacatgaccccaaagcagtccaaagtggtgaaggccatcctgtggctctgtggaatacaggagaagggcaaggaagagctcccggccagagcagaagccatcatagtttccctggaagaaaaccccttggtgaagaccctcctggacgtcaacctcattttctgcgtgagctgcgccatctttatctggggctattttgcttagtgtggggtgaacccaggggtccaaactctgtttctcttcagtgctccatttttttaatgaaagaaaaaataataaagcttttgtttacca

SEQ ID NO: 184414 - DNA, 2703 bp, Homo sapiens
  Payload ID: 16310
  Gene Symbol: SLC5A11
  Gene Name: solute carrier family 5 (sodium/inositol cotransporter), member 11
  ENST ID: ENST00000488922
  CDS Start-End: 382-570
actgcggtgagggctgtggctggacgtccctcctggcactttgcctctgtcccctccatccgccgccagcatttttcctcccctccccttcctccagctcgtcccaagcctgcctgtccccagcgtggaggcgggacagtggaagactggctgaggctggagtttggagtttgacccgcttggaggctctctcagcagcgggcatataggaggaagggtcactgctgtctccggaagctcttggctgcaaagagagaggatcccgggtatctccctccttacaaccaccgccacctcctagtgccttagaagccactgacagcccccagggcaggtgagccctgcatctggaataaggatccagaggtctcgttcaggaccatggagagcggcaccagcagccctcagcctccacagttagatcccctggatgcgtttccccagaagggcttggagcctggggacatcgcggtgctagttctgtacttcctctttgtcctggctgttggactatgggtgggatctccctctgttgctcagggtactagaacgcagtggtggcaatcatagctcactccggcctcgacttcttgggctcaagtgatcctctcacctcggctgccagacacagaggaggtactatctacgaggaacaggctctcaccagacaccaaacctctcggtgccttgatattgaacttccaagtctccagaatttccacagtgaagaccaaaagagacacagtgaaaggctacttcctggctggaggggacatggtgtggtggccagtgggtgcatccttgtttgccagcaatgttggaagtggacatttcattggcctggcagggtcaggtgctgctacgggcatttctgtatcagcttatgaacttaatggcttgttttctgtgctgatgttggcctggatcttcctacccatctacattgctggtcaggtcaccacgatgccagaatacctacggaagcgcttcggtggcatcagaatccccatcatcctggctgtactctacctatttatctacatcttcaccaagatctcggtagacatgtatgcaggtgccatcttcatccagcagtctttgcacctggatctgtacctggccatagttgggctactggccatcactgctgtatacacggttgctggtggcctggctgctgtgatctacacggatgccctgcagacgctgatcatgcttataggagcgctcaccttgatgggctacagtttcgccgcggttggtgggatggaaggactgaaggagaagtacttcttggccctggctagcaaccggagtgagaacagcagctgcgggctgccccgggaagatgccttccatattttccgagatccgctgacatctgatctcccgtggccgggggtcctatttggaatgtccatcccatccctctggtactggtgcacggatcaggtgattgtccagcggactctggctgccaagaacctgtcccatgccaaaggaggtgctctgatggctgcatacctgaaggtgctgcccctcttcataatggtgttccctgggatggtcagccgcatcctcttcccagatcaagtggcctgtgcagatccagagatctgccagaagatctgcagcaacccctcaggctgttcggacatcgcgtatcccaaactcgtgctggaactcctgcccacagggctccgtgggctgatgatggctgtgatggtggcggctctcatgtcctccctcacctccatctttaacagtgccagcaccatcttcaccatggacctctggaatcacctccggcctcgggcatctgagaaggagctcatgattgtgggcagggtgtttgtgctgctgctggtcctggtctccatcctctggatccctgtggtccaggccagccagggcggccagctcttcatctatatccagtccatcagctcctacctgcagccgcctgtggcggtggtcttcatcatgggatgtttctggaagaggaccaatgaaaagggtgccttctggggcctgatctcgggcctgctcctgggcttggttaggctggtcctggactttatttacgtgcagcctcgatgcgaccagccagatgagcgcccggtcctggtgaagagcattcactacctctacttctccatgatcctgtccacggtcaccctcatcactgtctccaccgtgagctggttcacagagccaccctccaaggagatggtcagccacctgacctggtttactcgtcacgaccccgtggtccagaaggaacaagcaccaccagcagctcccttgtctcttaccctctctcagaacgggatgccagaggccagcagcagcagcagcgtccagttcgagatggttcaagaaaacacgtctaaaacccacagctgtgacatgaccccaaagcagtccaaagtggtgaaggccatcctgtggctctgtggaatacaggagaagggcaaggaagagctcccggccagagcagaagccatcatagtttccctggaagaaaaccccttggtgaagaccctcctggacgtcaacctcattttctgcgtgagctgcgccatctttatctggggctattttgcttagtgtggggtgaacccaggggtccaaactctgtttctcttcagtgctccatttttttaatgaaagaaaaaataataaagcttttgtttaccacaa

SEQ ID NO: 184415 - DNA, 3576 bp, Homo sapiens
  Payload ID: 16311
  Gene Symbol: SLC5A5
  Gene Name: solute carrier family 5 (sodium/iodide cotransporter), member 5
  Uniprot ID: Q92911
  ENST ID: ENST00000222248
  CDS Start-End: 348-2279
gctgtcagcgctgagcacagcgcccagggagagggacagacagccggctgcatgggacagcggaacccagagtgagaggggaggtggcaggacagacagacagcaggggcggacgcagagacagacagcggggacagggaggccgacacggacatcgacagcccatagattcctaacccagggagccccggcccctctcgccgcttcccaccccagacggagcggggacaggctgccgagcatcctcccacccgccctccccgtcctgcctcctcggcccctgccagcttcccccgcttgagcacgcagggcgtccgaggacgcgctgggcctccgcacccgccctcatggaggccgtggagaccggggaacggcccaccttcggagcctgggactacggggtctttgccctcatgctcctggtgtccactggcatcgggctgtgggtcgggctggctcggggcgggcagcgcagcgctgaggacttcttcaccgggggccggcgcctggcggccctgcccgtgggcctgtcgctgtctgccagcttcatgtcggccgtgcaggtgctgggcgtgccgtcggaggcctatcgctatggcctcaagttcctctggatgtgcctgggccagcttctgaactcggtcctcaccgccctgctcttcatgcccgtcttctaccgcctgggcctcaccagcacctacgagtacctggagatgcgcttcagccgcgcagtgcggctctgcgggactttgcagtacattgtagccacgatgctgtacaccggcatcgtaatctacgcaccggccctcatcctgaaccaagtgaccgggctggacatctgggcgtcgctcctgtccaccggaattatctgcaccttctacacggctgtgggcggcatgaaggctgtggtctggactgatgtgttccaggtcgtggtgatgctaagtggcttctgggttgtcctggcacgcggtgtcatgcttgtgggcgggccccgccaggtgctcacgctggcccagaaccactcccggatcaacctcatggactttaaccctgacccgaggagccgctatacattctggacttttgtggtgggtggcacgttggtgtggctctccatgtatggcgtgaaccaggcgcaggtgcagcgctacgtggcttgccgcacagagaagcaggccaagctggccctgctcatcaaccaggtcggcctgttcctgatcgtgtccagcgctgcctgctgtggcatcgtcatgtttgtgttctacactgactgcgaccctctcctcctggggcgcatctctgccccagaccagtacatgcctctgctggtgctggacatcttcgaagatctgcctggagtccccgggcttttcctggcctgtgcttacagtggcaccctcagcacagcatccaccagcatcaatgctatggctgcagtcactgtagaagacctcatcaaacctcggctgcggagcctggcacccaggaaactcgtgattatctccaaggggctctcactcatctacggatcggcctgtctcaccgtggcagccctgtcctcactgctcggaggaggtgtccttcagggctccttcaccgtcatgggagtcatcagcggccccctgctgggagccttcatcttgggaatgttcctgccggcctgcaacacaccgggcgtcctcgcgggactaggcgcgggcttggcgctgtcgctgtgggtggccttgggcgccacgctgtacccacccagcgagcagaccatgagggtcctgccatcgtcggctgcccgctgcgtggctctctcagtcaacgcctctggcctcctggacccggctctcctccctgctaacgactccagcagggcccccagctcaggaatggacgccagccgacccgccttagctgacagcttctatgccatctcctatctctattacggtgccctgggcacgctgaccactgtgctgtgcggagccctcatcagctgcctgacaggccccaccaagcgcagcaccctggccccgggattgttgtggtgggacctcgcacggcagacagcatcagtggcccccaaggaagaagtggccatcctggatgacaacttggtcaagggtcctgaagaactccccactggaaacaagaagccccctggcttcctgcccaccaatgaggatcgtctgtttttcttggggcagaaggagctggagggggctggctcttggaccccctgtgttggacatgatggtggtcgagaccagcaggagacaaacctctgaggacagggccagccgcgggactgacaccctgggatggaacctcaggatgggccaaacccagacaacgggcccatggccttgggctctgattggctggattgccttgtatgcaaatgagttcaggactacaataccctaccctatggggaggccctgcctccgggaggtcattttttaaatccagccccttgcttcaaccgtccccagtattagacgctgcagccctgacggctccccccaaataaggctgggtttttctctctctcttttttttttttttttttttttgagacagggtcatgctctgtcacccaggctggagtgcagtggtgtgatctcggctcactgcaacctctgcctcccaggctcaagtgattctcctgcctcagcctcttgagtagctgggattgtaggtgcccaccaccatgcccagccaactttttgtatttttagtagagacagggtttcaccatgttggtcaggctggtctcgaactcctgacctcaagtgatccacctgcctcggcctcccaaagtgctgggttacaggcgtaagctaccatgcccagcctaccgtttttctcaatctataatagaaagccaccacgcccaggtaatttttgtaattttgtatttttgtagagacggggttttgccatgttggccaggctggtctcaaactcctgatctcaggtgatcctcctgccttggcctcccaaagggctgggattacaggggtgagccaccgcgccccacctctttcttattttcttcctgggattggggaggggatgattcagaccccacatggcctccaaccttggcccacacacctgccatggctcccatcatcctgagcatgctagcgtcccctcctcacctgacaatggaggctctcgaattgggttgtgtccccccaaaatttatgtctacccagaacctcagaacatgagcttacttggaaatagggtctttgcaggtgtaactggttaaattaaaagaggtattactggaggaggatggatgaatccagtgactggttcctcatatgaagtagagaagagatgcagagaaacacatggggaagatgccacgtgaagacagaggcagtggttggatcaatgcatctacgagtcggagaacccaaggattgccagcaacaaccagaaatcaggaggggggcatgagatgcattatttcttagagcctttagagggaacatggccctactgacaccttgatgtcagacttctggctgctagaactgtcagagaataaatttctgttgtttgatgcca

SEQ ID NO: 184416 - DNA, 2269 bp, Homo sapiens
  Payload ID: 16312
  Gene Symbol: SLC5A12
  Gene Name: solute carrier family 5 (sodium/monocarboxylate cotransporter), member 12
  Uniprot ID: Q1EHB4
  ENST ID: ENST00000280467
  CDS Start-End: 286-1476
ctttaggagaggagcagacagctcttagctagggtcagatttcaaattctcatctcttggtgccaataccaccaccagattcttctttgaagtcaacttttgagatcttcactaagtacacgttggtgtctgaagattcacacgagtgcctctggtaatcattttcttcagggaatcacagtctctcctctcagcaaagcatccactgtactgaactttgcttttggaaacatcttcttcctgagacctcgttgaaagaaactctctggtgtcatactttccaatatggaggtgaagaactttgcagtttgggattatgttgtatttgcagccctctttttcatttcctctggaattggggtgttctttgccattaaggagagaaaaaaggcaacttcccgagagttcctggttgggggaaggcaaatgagctttggccctgtcggcttgtctctgacagccagcttcatgtcagctgtcacggtcctggggaccccttctgaagtctaccgctttggggcatccttcctagtcttcttcattgcttacctatttgtcatcctcttaacatcagagctctttctccctgtgttctacagatctggtatcaccagcacttatgagtacttacaactacgattcaacaaaccagttcgctatgctgccacggtcatctacattgtacagacgattctctacacaggagtggtggtgtatgctcctgccctggcactcaatcaagtgactgggtttgatctctggggctctgtgtttgcaacaggaattgtttgcacattctactgtaccctgggaggattaaaagcagtggtgtggacagatgcatttcagatggttgtcatgattgtgggcttcttaacggttctcattcaaggatcaactcatgctgggggattccacaatgtattagagcaatcaacaaatggatctcgactacatatatttgactttgatgtagatcctctcaggcgacacactttttggactatcacagtgggaggaacttttacttggctcggaatctatggggtcaatcaatcaactattcagcgatgcatctcttgcaaaacagaaaagcatgctaagcttgccttgtattttaacttgctgggtctctggatcattctggtgtgtgctgtcttctctggcttaatcatgtactctcactttaaagactgtgacccttggacttctggcatcatctcagcaccagaccagctgatgccgtactttgtcatggagatatttgccacaatgccaggactgccaggactttttgtggcttgtgccttcagtggaactctgagcaccgtggcttccagcatcaatgccttggcaacagtgacctttgaggattttgtcaagagctgttttcctcatctctccgacaagctgagcacctggatcagtaaaggcttatgtaggtacagctggtggactttctattccatatcatgaaatgtacatgtggtagatgtcaaaatcctgcatgtgctattcaggacacacttataaacacaaatgcactgtgagatatgtgaagaatcccacacatagattcttacacttccaaagatccagcagggtatcaggaaagaatgactagctagtttaccttaactgcctttattttcagatactcttctatacttaccctacactctagacgaggcttatccaacccacggcctgtgggccgcatacggcccaggatggctttgaatgcagcccaacacaaattcgtaaactttcttaaaacattctggaatttttttgtaattttttaaatcttagcagctatcattagtgtttgtgtattttatgtgtactccaaggcaactccttctttcaacgtggcccagggaggccaaaagattggacacccctgcaaactaatcacatcaatctctcttgattacactgtgtgatggtcatattagtctctctacatgggaagatgttgtgcttactatggccagtcactttgacaaagaaaagccaaattcttttctaaagaattgttccttattaccaaactcccagtaaccccctcaaagaataattgccccttgcttaatcatgcaattgcatattatgtttatactcacttcagcacttatcagagataattgcagtttcacaaggtttactttttaaagtataaacaaattatgtatttacttactaatagaaaatataggtaatttggggaaatttatgtacattgttaaataaaattatatctatctaa

SEQ ID NO: 184417 - DNA, 6250 bp, Homo sapiens
  Payload ID: 16312
  Gene Symbol: SLC5A12
  Gene Name: solute carrier family 5 (sodium/monocarboxylate cotransporter), member 12
  Uniprot ID: Q1EHB4
  ENST ID: ENST00000396005
  CDS Start-End: 311-2167
ctgaattccttctctgtggcatatgctttaggagaggagcagacagctcttagctagggtcagatttcaaattctcatctcttggtgccaataccaccaccagattcttctttgaagtcaacttttgagatcttcactaagtacacgttggtgtctgaagattcacacgagtgcctctggtaatcattttcttcagggaatcacagtctctcctctcagcaaagcatccactgtactgaactttgcttttggaaacatcttcttcctgagacctcgttgaaagaaactctctggtgtcatactttccaatatggaggtgaagaactttgcagtttgggattatgttgtatttgcagccctctttttcatttcctctggaattggggtgttctttgccattaaggagagaaaaaaggcaacttcccgagagttcctggttgggggaaggcaaatgagctttggccctgtcggcttgtctctgacagccagcttcatgtcagctgtcacggtcctggggaccccttctgaagtctaccgctttggggcatccttcctagtcttcttcattgcttacctatttgtcatcctcttaacatcagagctctttctccctgtgttctacagatctggtatcaccagcacttatgagtacttacaactacgattcaacaaaccagttcgctatgctgccacggtcatctacattgtacagacgattctctacacaggagtggtggtgtatgctcctgccctggcactcaatcaagtgactgggtttgatctctggggctctgtgtttgcaacaggaattgtttgcacattctactgtaccctgggaggattaaaagcagtggtgtggacagatgcatttcagatggttgtcatgattgtgggcttcttaacggttctcattcaaggatcaactcatgctgggggattccacaatgtattagagcaatcaacaaatggatctcgactacatatatttgactttgatgtagatcctctcaggcgacacactttttggactatcacagtgggaggaacttttacttggctcggaatctatggggtcaatcaatcaactattcagcgatgcatctcttgcaaaacagaaaagcatgctaagcttgccttgtattttaacttgctgggtctctggatcattctggtgtgtgctgtcttctctggcttaatcatgtactctcactttaaagactgtgacccttggacttctggcatcatctcagcaccagaccagctgatgccgtactttgtcatggagatatttgccacaatgccaggactgccaggactttttgtggcttgtgccttcagtggaactctgagcaccgtggcttccagcatcaatgccttggcaacagtgacctttgaggattttgtcaagagctgttttcctcatctctccgacaagctgagcacctggatcagtaaaggcttatgtctcttatttggcgtgatgtgtacctctatggctgtggctgcatctgtcatgggaggtgttgtgcaggcttccctcagcattcacggcatgtgtggaggaccaatgctgggcttattctccctgggaatcgtgttcccttttgtgaattggaagggtgcactaggaggtcttcttactggaatcaccttgtcattttgggtggccattggggccttcatttaccctgcaccagcctctaagacatggcctttgcctctgtcaacagaccaatgtatcaaatcaaatgtgacagcaacagggcctccagtactatccagcagacctggaatagctgatacctggtactcgatctcctacctttactacagtgcagtgggctgcttaggatgcattgttgctggagtaatcatcagcctcataacaggtcgccaaagaggtgaggatattcaaccactgttaattagaccagtttgtaatttattttgcttttggtctaagaagtacaaaacactatgctggtgtggagttcagcatgacagtgggacagagcaggaaaaccttgagaatggcagtgcccggaaacagggggctgaatctgtcttacagaacggactcagaagagaaagcctggtacatgttccaggctatgatcctaaggacaaaagctacaacaatatggcatttgagactacccatttctaaggcaatacctgtatgaatgcacacacacacgtgcaatacacacacacacacacaaactccacatacttcttgcctacttgttagtagatatgtatagttgccattgctagaagacagggatgtctggtgcctatttctacttatttataactacatgcaaaatgactgtctctcgggatattctttgaaagactccaactttcacagagaaaaaccaacctgctccaaatgcccttgactacttccttcttgaataaattagggctggatttcattaccattcaagaaagcgaagtctttttgcttggtgtcatattaaacttcaggtttttcgttttagtagttttttaaccatcaaaatatcttggagtttagaggcagaacgggaaacagaaatatgcatatttaacactttcctgccacgagggataaaatagaggaatgacatccacccctgacctcatacctgacatacatgtagatatattttatgccacccatctcccatcctgtagctacaattggcatacaactactattaacctcccttcaccaccactgtcaggtcctcttccagtcattccagtcattagctgtcctgaccaaacattaaaaaaaaaattcagctaaatacagaagaagatggtatgtctggctagtgggagtgattataactaaaaactttgctccttttgtgctgtccatgcagtatgtcttcttcctttctatcactttacaatgaaaaattgcctcagagctcaataagaagtctagagcctttttccagggctaaggaaagagaaaaggaatgtcctatagaaggttgttaggatagaatttggtaaaagaacgttgcaaatattgtaacagaccataggagatttcatcagcaataggattcttctttggagaaaatacattgtccataagacttgtactctgctcattcaactcatgtgagcaagctcaactcactccacctgggttaggtaacagaagtggagaacttcatagttcgtgtctagaaaataatgtttaaagttctggagaatgagggtattgcagattaaaaggcgagttgacaaatgaaggagcagtgaaagatttttggaagaagtgaagaagtgaaattctgaaaaggtaaaagaaagaaccagtatgtcacaggggccaagtcagaggacagataataagaaacaaagttgtatctgagagtcatatattaggacaggtgtcagatatttattttggtggccagataaaagcaaaaggcctagaaacagtgtgttagcaaagtaagaagaaatggtccaaataggcaaggataaggaaatccaaaggttgtctttaaatatttctcaaaagagaaagccttgaaagaagcatacaatagagaaaaaataaattaccagtatttattattagaaaagatagaaagacagacaaatcagtggaggaattaaaacagagaaactggagtttataaaacagagcccaatccttgccttctctccctccactcaaatagaaaaggagaatggagaaagagaaagaaggtattaggctacagtttataagagagatgagaaaaaaatacatttgggaatagagggaaagggtcaaaaggggtcacatttggagaaatatctgaaaatgagaaggagcagaatttttggaaacattttttaaagtctggcaacgctaattaagctgttgatctaaggatttgcaaattgagaggtgcaattattttccaaatgatttgtgacactcttattaattagaatatatattttgtgaatattgaaatctgagccaaaactagttagctttattaatatcttagggaaagaagagagaaagaaagagggagggagagagagaaagaaagaaagaaagaaagaaagaaagaaaagaagaaagaaagaaagaaaaagacaggaagaggaagagagagacagaaagaataaaaaaacagcaattctgaggatgagaataaattaatggtaggtattacatatgcatatacatatatatatctgtacacatatatatgtaaatatgatttggaatacatcaggattgtgaacttccacttgggatagcataaaagcaaaatataccatacaatttttcattttactcacaaattttactcacaaattctcctaaagacatttcactaggtcagtacatttccgagaaagttttaaaaacgtttcttcttttatagtccctaattatcttacctggagtgttatcaaaatgtcatacaactggaaaatgcaattattattataaaaatatctctgccttctcttgtgtaatgaaatttatggcattaggagatgacatttcaagagattttagaggtcaatgtagagactccccccattcttcttaattgaacaaacatgcataaatctagggtttcaggtagagagcagatgggaatctacaggaaactgtcttccatagtgtatgaaaaccgtgtttgttgtgtggtgaagcaaaaggaaactatgaagcgcacagtcaatagattcagctagtgagtcccagcactcctttcaggccctcactaggattagcagcccagagtcatgccaaggccactggtgcagtacaaagacagttcagtgacaagttccatccataccatggaagagggttaaacttgtggctgtttttgccacagcatgaccagagacattctcaataaatggcactaggaatgatgagttttagaggggcctaaaatgttccaaacttgatactcaccactgtacctttaaagcacaaccacagatattggtaaaaatggaacagaattacctcaatacctctttaactcattctgtatgaattcattttgatgacagacattttttgtcaccatttggaataagaactacaacagcttatgattgaggtgaggaactgcagtcaaatggcttaggttcaaacacgagttctgacacaaatctaggtaattttgggcaatattttaaaatcttagtttattcaccaattaataggagtaaaaattacccctacttaatagaattattatgaagatttatataagtaaatcatataaagtgcttagcacagtgtgactggcccacatggaacatttaatacttggtctgcagtatatgaagaaaatggtgtacatgttaacttaaatggtttcattatttctcttcaggatttttaagatgtgggatcagaatatatgttactattttgagaattagaaataataagaaaaacagaatgtatacattaaaagtcatgcctaaatttccaaagagtagtttttttaatgccagagtttaaataaaatattattttccagagagtaacttttctaaaggtcctaaattctgaaaagagagaaaactactgttataaacaagtttattactaaaagatgcaattcattactatgatttattattattttgtacatgtaaaccttgataaataaacagcatctcaacccaagtttattactcattgcacagttcaaagcaactatgactctcaaaatagcaacagaaggtggggagggtcttttccctttgtttatatagtatttgctaaaaatgaactttactattttgtggctttatagggttacaccatttcattctaaagagaaacaaaaagtaaaccattggccatgtggctttcaaacagtatttcaaagagaatattactgaaatatttttgtgctgttacagtcttaatcaaacattattacaaagatcagatacggaaaaaatagaggagtctccccttaattgttccctttgaaataaattgttttaaattattacagaagttatagctgtatgtacatgcacatttgtatatttacaagtctcatgtacttaatctcaatattgcaaattagctaggtttactatagagttaactgcttttatctagcatttataatcttgtagtataacctattttcaaataactaaaatttaattgatgtcatcaatggtacacatgaaaatgatacaaatttataaactaataaaatgtaactcgtcattgatagtaaat

SEQ ID NO: 184418 - DNA, 814 bp, Homo sapiens
  Payload ID: 16312
  Gene Symbol: SLC5A12
  Gene Name: solute carrier family 5 (sodium/monocarboxylate cotransporter), member 12
  ENST ID: ENST00000533617
  CDS Start-End: 363-814
ggaatttaaacagaggacacagacagctcttgggagagtcttcatatttttattgatgagaatcctgaagcacagatcacagagtgagatgccagcaaatctcaaactggaattcaaggaggctgatttctgatcagtacttacaactacgattcaacaaaccagttcgctatgctgccacggtcatctacattgtacagacgattctctacacaggagtggtggtgtatgctcctgccctggcactcaatcaagtgactgggtttgatctctggggctctgtgtttgcaacaggaattgtttgcacattctactgtaccctgggaggattaaaagcagtggtgtggacagatgcatttcagatggttgtcatgattgtgggcttcttaacggttctcattcaaggatcaactcatgctgggggattccacaatgtattagagcaatcaacaaatggatctcgactacatatatttgactttgatgtagatcctctcaggcgacacactttttggactatcacagtgggaggaacttttacttggctcggaatctatggggtcaatcaatcaactattcagcgatgcatctcttgcaaaacagaaaagcatgctaagcttgccttgtattttaacttgctgggtctctggatcattctggtgtgtgctgtcttctctggcttaatcatgtactctcactttaaagactgtgacccttggacttctggcatcatctcagcaccagaccagctgatgccgtactttgtcatggagatatttgccacaatgccaggactgccaggactttttgtggc

SEQ ID NO: 184419 - DNA, 1932 bp, Homo sapiens
  Payload ID: 16312
  Gene Symbol: SLC5A12
  Gene Name: solute carrier family 5 (sodium/monocarboxylate cotransporter), member 12
  ENST ID: ENST00000527405
  CDS Start-End: 347-1180
ggtaaatatattaaagaccaagatttgcagtaacatttatcatatcaaatctccaaatctagtggaggaatttaaacagaggacacagacagctcttgggagagtcttcatatttttattgtacttacaactacgattcaacaaaccagttcgctatgctgccacggtcatctacattgtacagacgattctctacacaggagtggtggtgtatgctcctgccctggcactcaatcaagtgactgggtttgatctctggggctctgtgtttgcaacaggaattgtttgcacattctactgtaccctgggaggattaaaagcagtggtgtggacagatgcatttcagatggttgtcatgattgtgggcttcttaacggttctcattcaaggatcaactcatgctgggggattccacaatgtattagagcaatcaacaaatggatctcgactacatatatttgactttgatgtagatcctctcaggcgacacactttttggactatcacagtgggaggaacttttacttggctcggaatctatggggtcaatcaatcaactattcagcgatgcatctcttgcaaaacagaaaagcatgctaagcttgccttgtattttaacttgctgggtctctggatcattctggtgtgtgctgtcttctctggcttaatcatgtactctcactttaaagactgtgacccttggacttctggcatcatctcagcaccagaccagctgatgccgtactttgtcatggagatatttgccacaatgccaggactgccaggactttttgtggcttgtgccttcagtggaactctgagcaccgtggcttccagcatcaatgccttggcaacagtgacctttgaggattttgtcaagagctgttttcctcatctctccgacaagctgagcacctggatcagtaaaggcttatgtaggtctcttatttggcgtgatgtgtacctctatggctgtggctgcatctgtcatgggaggtgttgtgcaggcttccctcagcattcacggcatgtgtggaggaccaatgctgggcttattctccctgggaatcgtgttcccttttgtgaattggaagggtgcactaggaggtcttcttactggaatcaccttgtcattttgggtggccattggggccttcatttaccctgcaccagcctctaagacatggcctttgcctctgtcaacagaccaatgtatcaaatcaaatgtgacagcaacagggcctccagtactatccagcagacctggaatagctgatacctggtactcgatctcctacctttactacagtgcagtgggctgcttaggatgcattgttgctggagtaatcatcagcctcataacaggtcgccaaagaggtgaggatattcaaccactgttaattagaccagtttgtaatttattttgcttttggtctaagaagtacaaaacactatgctggtgtggagttcagcatgacagtgggacagagcaggaaaaccttgagaatggcagtgcccggaaacagggggctgaatctgtcttacagaacggactcagaagagaaagcctggtacatgttccaggctatgatcctaaggacaaaagctacaacaatatggcatttgagactacccatttctaaggcaatacctgtatgaatgcacacacacacgtgcaatacacacacacacacacaaactccacatacttcttgcctacttgttagtagatatgtatagttgccattgctagaagacagggatgtctggtgcctatttctacttatttataactacatgcaaaatgactgtctctcgggatattctttgaaagactccaactttcacagagaaaaaccaacctgctccaaatgcccttgactacttccttcttgaataaattagggctggatttcattaccattcaagaaa

SEQ ID NO: 184420 - DNA, 4178 bp, Homo sapiens
  Payload ID: 16313
  Gene Symbol: SLC5A8
  Gene Name: solute carrier family 5 (sodium/monocarboxylate cotransporter), member 8
  Uniprot ID: Q8N695
  ENST ID: ENST00000536262
  CDS Start-End: 560-2392
attaacctatcaaataaggcagtctaaaaactccaggcgtccctttccgtaaggacccggactgttgaactggaaagctaaaattcaaggcgtgacaattgccctttgtcccacattcctccaccggtcgcctgcttatttaaatggtgcgtcccctcgggtaccacttgaacaaaacctgcccagagcgctccctgtgtagattcgctggaagcagctggaggctccagttctcatctgctcaggtgtccccggcgccttggcgaactcggccactccagttcctcacgtggtgagcactcagggcagcgggtcgattttccgaggtcccatacctgggtttgaggggcgcggctcgcagcggcgggtgcaggggcgactgccagccctcaccccgcctcggggtgcgttcggaggccgacacctggaggacgcctccagtccccgcgggacgccacgcctgcgcgccagggatccgggataagaagtgcgcgccgggctccggctgcgcgccgcggggccaccagtttgcgcgcagggctcaggcgaccgtgcggccatggacacgccacggggcatcggcaccttcgtggtgtgggactacgtggtgttcgcgggcatgctggtcatctcggccgccatcggcatctactacgccttcgctgggggcggccagcagacctccaaggacttcctgatgggcggccgcagaatgaccgcagtgcccgtggcgctgtccctcaccgctagcttcatgtcagccgtcactgtcctgggcaccccctccgaggtctaccgttttggggccatttttagcatctttgccttcacctacttctttgtggtggtcatcagcgcggaggtcttcctcccggtgttctacaaactgggaattaccagcacctacgagtatttagaacttcgatttaacaaatgtgttcgtctctgtggaacagtcctcttcattgttcaaacaattctgtatactggaattgttatttatgcccctgccctggctttgaatcaagtcacaggatttgatctgtggggcgcggtagtggcaacgggggtggtctgcacattctactgcacactgggtggtcttaaagcagttatctggacagatgtttttcaagttgggatcatggtggctggatttgcatccgtgattatacaggctgtggtgatgcaaggtggaatcagcactattttaaatgatgcctatgatggtggaagattaaatttctggaattttaatcctaaccctttgcaaagacacaccttctggacaattattataggagggaccttcacatggaccagcatctacggtgtcaaccaatcccaggtgcagagatatatttcttgtaaaagcagattccaggcaaaactgtctctctacatcaatcttgtgggactctgggcaatcctcacatgctcagtgttttgtgggctcgccctatattccaggtaccatgactgtgatccttggacagccaagaaagtgtctgcaccagaccagctcatgccttatttggtactggacattctgcaagattatccaggacttcctggactttttgtggcctgtgcttacagtgggacattaagcacagtgtcctccagtattaatgccttagcagcagtaactgtggaagatctaatcaaaccttacttcagatcgctctcagaaaggtctctgtcttggatttcccaaggaatgagtgtggtgtatggagccctgtgtattggaatggctgcgctggcgtcacttatgggagctttgttgcaggcagcactcagcgtatttggtatggttggtggaccacttatgggcctgttcgctttgggcattttggttccctttgccaactcaattggagcacttgttggtctgatggctggatttgccatttctctatgggttggaattggagctcaaatatatcctccacttcctgagagaacattgccattgcaccttgatatccaaggctgtaacagcacctacaatgagacaaatttgatgacaaccacagaaatgccatttactactagtgtttttcaaatatacaatgttcaaaggactccactgatggataactggtattctttatcatatctgtacttcagcactgttggaactttggtaacattattagtggggatacttgtcagtttatcaacaggaggaagaaaacagaacttagaccccagatacatactaaccaaagaggactttttatccaattttgatatttttaagaaaaagaagcatgttttgagctataaatcacatccagtggaagatggtggaactgataatcctgctttcaaccacattgaattgaactcagatcagagtggcaagagcaatgggactcgtttgtgaagctgctctgatactagatatccttaaatgatgtttcaattttatatgttttctaagataattggatcaggttttctttgtgtgtgtgtgtgtgttgtatcatgagtgtttgggggataagtttttgttaaaacaaagtctggactatcttcatttactacatcattaattgatgttactctggagtttagaattctggcattgacatttccctctctttcctttatttcgatgaagctataattgtgaaaattgtaactacatagatgctgaaaggctaatacacacatatgcacatgtatttgattgtcaaaggtatattcttaaatttgggtattattgaaaatattttccatgccttggtgctagcatataagtttggaagtttgccaacatcacaattcatcttgaaaagagcttttttccctcctaccacatacaccattcttagggagcaatgaggtaacaggtctgtgttgtctagatctttgctttttatccccctatcagtccagggcatatactaacctgcaaactgattctgaatcaggaaggtggtaatcaataagtattctggctgggaaagaccgtgggcccaatgatcaaagtcttcttggtgctgttcattaattcttgtgccttttggcttgttttctagagtttctgggctttggctgctgatactgcctttcttagactgtaatttttatctgcatgcccagtttctgacctatcaacttgggttttattgtgcactctaactgagcttgtcttcataattttctgtttattgccctgggcttggatatgtctcaagacactcatgtgaatcatgccaccccaaatcctggcttatcaagtcccagactataaattatgaactcccattagcttggtactaacatatacttgatgtaggtatttatggacttgatgatccaagaatattatattcttcaaaatggttaagctccatggagttagatgactacacttaatgctattaagttgaacttttgaatgtcaactaatttgcaatcaattaaagatacatatgcctagaaattttgaaatttcggtatatttatccagttaaagggctaaattatataagcaaacactactttttttaaaacgtctggactcaaaaaatgctttgttccatgttttaaaatttttaagtagcagtctcaaagttgcttagctgtttattttgctatgttcctagctaagagtttggttataggagttcatcaataacttattttttgtacagttcccacattagatactgtttaaaagttcttttttaaactcaattttttttagaaacataagagaaatatttagatacatacaaatgtttttatgattaaataattttatgcttattttctgatacgtgttatttaggtaatcatgccctgtacatttagaggttgctaactgacaatgttaagaaatttaaaaaaaaaaaaaagcctgggcatgatggctcatgcttgtaatctgaacatttgggaggctgaggcaggaagatcgcttgaggtccagagtttaagtccagcctggaaacatagttagacctcatctctacaaaaataaaaaataaaaataaaaaaaacttagctaggcatgttgccacatacttgtagtcccagttattagggaagctgaggtgggaggatagcttaagcccaggatttcaaggctgcattgagctatgattacaccactgcactccagcctgggtaacagagtgaaatcttgtctctgggaaaaaaaa

SEQ ID NO: 184421 - DNA, 3983 bp, Homo sapiens
  Payload ID: 16313
  Gene Symbol: SLC5A8
  Gene Name: solute carrier family 5 (sodium/monocarboxylate cotransporter), member 8
  Uniprot ID: Q8N695
  ENST ID: ENST00000572861
  CDS Start-End: 364-2196
gtgtagattcgctggaagcagctggaggctccagttctcatctgctcaggtgtccccggcgccttggcgaactcggccactccagttcctcacgtggtgagcactcagggcagcgggtcgattttccgaggtcccatacctgggtttgaggggcgcggctcgcagcggcgggtgcaggggcgactgccagccctcaccccgcctcggggtgcgttcggaggccgacacctggaggacgcctccagtccccgcgggacgccacgcctgcgcgccagggatccgggataagaagtgcgcgccgggctccggctgcgcgccgcggggccaccagtttgcgcgcagggctcaggcgaccgtgcggccatggacacgccacggggcatcggcaccttcgtggtgtgggactacgtggtgttcgcgggcatgctggtcatctcggccgccatcggcatctactacgccttcgctgggggcggccagcagacctccaaggacttcctgatgggcggccgcagaatgaccgcagtgcccgtggcgctgtccctcaccgctagcttcatgtcagccgtcactgtcctgggcaccccctccgaggtctaccgttttggggccatttttagcatctttgccttcacctacttctttgtggtggtcatcagcgcggaggtcttcctcccggtgttctacaaactgggaattaccagcacctacgagtatttagaacttcgatttaacaaatgtgttcgtctctgtggaacagtcctcttcattgttcaaacaattctgtatactggaattgttatttatgcccctgccctggctttgaatcaagtcacaggatttgatctgtggggcgcggtagtggcaacgggggtggtctgcacattctactgcacactgggtggtcttaaagcagttatctggacagatgtttttcaagttgggatcatggtggctggatttgcatccgtgattatacaggctgtggtgatgcaaggtggaatcagcactattttaaatgatgcctatgatggtggaagattaaatttctggaattttaatcctaaccctttgcaaagacacaccttctggacaattattataggagggaccttcacatggaccagcatctacggtgtcaaccaatcccaggtgcagagatatatttcttgtaaaagcagattccaggcaaaactgtctctctacatcaatcttgtgggactctgggcaatcctcacatgctcagtgttttgtgggctcgccctatattccaggtaccatgactgtgatccttggacagccaagaaagtgtctgcaccagaccagctcatgccttatttggtactggacattctgcaagattatccaggacttcctggactttttgtggcctgtgcttacagtgggacattaagcacagtgtcctccagtattaatgccttagcagcagtaactgtggaagatctaatcaaaccttacttcagatcgctctcagaaaggtctctgtcttggatttcccaaggaatgagtgtggtgtatggagccctgtgtattggaatggctgcgctggcgtcacttatgggagctttgttgcaggcagcactcagcgtatttggtatggttggtggaccacttatgggcctgttcgctttgggcattttggttccctttgccaactcaattggagcacttgttggtctgatggctggatttgccatttctctatgggttggaattggagctcaaatatatcctccacttcctgagagaacattgccattgcaccttgatatccaaggctgtaacagcacctacaatgagacaaatttgatgacaaccacagaaatgccatttactactagtgtttttcaaatatacaatgttcaaaggactccactgatggataactggtattctttatcatatctgtacttcagcactgttggaactttggtaacattattagtggggatacttgtcagtttatcaacaggaggaagaaaacagaacttagaccccagatacatactaaccaaagaggactttttatccaattttgatatttttaagaaaaagaagcatgttttgagctataaatcacatccagtggaagatggtggaactgataatcctgctttcaaccacattgaattgaactcagatcagagtggcaagagcaatgggactcgtttgtgaagctgctctgatactagatatccttaaatgatgtttcaattttatatgttttctaagataattggatcaggttttctttgtgtgtgtgtgtgtgttgtatcatgagtgtttgggggataagtttttgttaaaacaaagtctggactatcttcatttactacatcattaattgatgttactctggagtttagaattctggcattgacatttccctctctttcctttatttcgatgaagctataattgtgaaaattgtaactacatagatgctgaaaggctaatacacacatatgcacatgtatttgattgtcaaaggtatattcttaaatttgggtattattgaaaatattttccatgccttggtgctagcatataagtttggaagtttgccaacatcacaattcatcttgaaaagagcttttttccctcctaccacatacaccattcttagggagcaatgaggtaacaggtctgtgttgtctagatctttgctttttatccccctatcagtccagggcatatactaacctgcaaactgattctgaatcaggaaggtggtaatcaataagtattctggctgggaaagaccgtgggcccaatgatcaaagtcttcttggtgctgttcattaattcttgtgccttttggcttgttttctagagtttctgggctttggctgctgatactgcctttcttagactgtaatttttatctgcatgcccagtttctgacctatcaacttgggttttattgtgcactctaactgagcttgtcttcataattttctgtttattgccctgggcttggatatgtctcaagacactcatgtgaatcatgccaccccaaatcctggcttatcaagtcccagactataaattatgaactcccattagcttggtactaacatatacttgatgtaggtatttatggacttgatgatccaagaatattatattcttcaaaatggttaagctccatggagttagatgactacacttaatgctattaagttgaacttttgaatgtcaactaatttgcaatcaattaaagatacatatgcctagaaattttgaaatttcggtatatttatccagttaaagggctaaattatataagcaaacactactttttttaaaacgtctggactcaaaaaatgctttgttccatgttttaaaatttttaagtagcagtctcaaagttgcttagctgtttattttgctatgttcctagctaagagtttggttataggagttcatcaataacttattttttgtacagttcccacattagatactgtttaaaagttcttttttaaactcaattttttttagaaacataagagaaatatttagatacatacaaatgtttttatgattaaataattttatgcttattttctgatacgtgttatttaggtaatcatgccctgtacatttagaggttgctaactgacaatgttaagaaattttaaaaaaaaaaaaaagcctgggcatgatggctcatgcttgtaatctgaacatttgggaggctgaggcaggaagatcgcttgaggtccagagtttaagtccagcctggaaacatagttagacctcatctctacaaaaataaaaaataaaaataaaaaaaacttagctaggcatgttgccacatacttgtagtcccagttattagggaagctgaggtgggaggatagcttaagcccaggatttcaaggctgcattgagctatgattacaccactgcactccagcctgggtaacagagtgaaatcttgtctctgggaaaaaaaa

SEQ ID NO: 184422 - DNA, 3231 bp, Homo sapiens
  Payload ID: 16314
  Gene Symbol: SLC5A6
  Gene Name: solute carrier family 5 (sodium/multivitamin and iodide cotransporter), member 6
  Uniprot ID: Q9Y289
  ENST ID: ENST00000310574
  CDS Start-End: 475-2382
gcgtggcctaagcggcccggtccagtcgccctggggctgcttgggggcttttcctgctcgtggagctctgcgctggtcttcatgcgccctagccctctttcggggatactggccgaccccctcttccttttcccctttagtgaaggcctcccccgtcgccgcgcggcttcccggagccgactgcagactccctcagcccggtgttccccgcgtccggacgccgaggtcgcggcttcgcagaaactcgggcccctccatccgccctcagaaaagggagcgatgttgatctcaggaagcacaaagggaccttcctagctctgactgaaccacggagctcaccctggacagtatcactccgtggaggaagactgtgagactgtggctggaagccagattgtagccacacatccgcccctgccctaccccagagccctggagcagcaactggctgcagatcacagacacagtgaggatatgagtgtaggggtgagcacctcagcccctctttccccaacctcgggcacaagcgtgggcatgtctaccttctccatcatggactatgtggtgttcgtcctgctgctggttctctctcttgccattgggctctaccatgcttgtcgtggctggggccggcatactgttggtgagctgctgatggcggaccgcaaaatgggctgccttccggtggcactgtccctgctggccaccttccagtcagccgtggccatcctgggtgtgccgtcagagatctaccgatttgggacccaatattggttcctgggctgctgctactttctggggctgctgatacctgcacacatcttcatccccgttttctaccgcctgcatctcaccagtgcctatgagtacctggagcttcgattcaataaaactgtgcgagtgtgtggaactgtgaccttcatctttcagatggtgatctacatgggagttgtgctctatgctccgtcattggctctcaatgcagtgactggctttgatctgtggctgtccgtgctggccctgggcattgtctgtaccgtctatacagctctgggtgggctgaaggccgtcatctggacagatgtgttccagacactggtcatgttcctcgggcagctggcagttatcattgtggggtcagccaaggtgggcggcttggggcgtgtgtgggccgtggcttcccagcacggccgcatctctgggtttgagctggatccagacccctttgtgcggcacaccttctggaccttggccttcgggggtgtcttcatgatgctctccttatacggggtgaaccaggctcaggtgcagcggtacctcagttcccgcacggagaaggctgctgtgctctcctgttatgcagtgttccccttccagcaggtgtccctctgcgtgggctgcctcattggcctggtcatgttcgcgtattaccaggagtatcccatgagcattcagcaggctcaggcagccccagaccagttcgtcctgtactttgtgatggatctcctgaagggcctgccaggcctgccagggctcttcattgcctgcctcttcagcggctctctcagcactatatcctctgcttttaattcattggcaactgttacgatggaagacctgattcgaccttggttccctgagttctctgaagcccgggccatcatgctttccagaggccttgcctttggctatgggctgctttgtctaggaatggcctatatttcctcccagatgggacctgtgctgcaggcagcaatcagcatctttggcatggttgggggaccgctgctgggactcttctgccttggaatgttctttccatgtgctaaccctcctggtgctgttgtgggcctgttggctgggctcgtcatggccttctggattggcatcgggagcatcgtgaccagcatgggctccagcatgccaccctctccctctaatgggtccagcttctccctgcccaccaatctaaccgttgccactgtgaccacactgatgcccttgactaccttctccaagcccacagggctgcagcggttctattccttgtcttacttatggtacagtgctcacaactccaccacagtgattgtggtgggcctgattgtcagtctactcactgggagaatgcgaggccggtccctgaaccctgcaaccatttacccagtgttgccaaagctcctgtccctccttccgttgtcctgtcagaagcggctccactgcaggagctacggccaggaccacctcgacactggcctgtttcctgagaagccgaggaatggtgtgctgggggacagcagagacaaggaggccatggccctggatggcacagcctatcaggggagcagctccacctgcatcctccaggagacctccctgtgatgttgactcaggaccccgcctctgtcctcactgtgccaggccatagccagaggccaccctgtagtacagggatgagtcttggtgtgttctgcagggacaggcctggatgatctagctcataccaaaggaccttgttctgagaggttcttgcctgcaggagaagctgtcacatctcaagcatgtgaggcaccgtttttctcgtcgcttgccaatctgttttttaaaggatcaggctcgtagggagcaggatcatgccagaaatagggatggaagtgcatcctctgggaaaaagataatggcttctgattcaacatagccatagtcctttgaagtaagtggctagaaacagcactctggttataattgccccagggcctgattcaggactgactctccaccataaaactggaagctgcttcccctgtagtccccatttcagtaccagttctgccagccacagtgagcccctattattactttcagattgtctgtgacactcaagcccctctcatttttatctgtctacctccattctgaagagggaggttttggtgtccctggtcctctgggaatagaagatccatttgtctttgtgtagagcaagcacgttttccacctcactgtctccatcctccacctctgagatggacacttaagagacggggcaaatgtggatccaagaaaccagggccatgaccgggtccactgtggagcagccatctatctacctgactcctgagccaggctgccgtggtgtcatttctgtcatccgtgctctgtttccttttggagtttcttctccacattatctttgttcctggggaataaaaactaccattggacctagaa

SEQ ID NO: 184423 - DNA, 732 bp, Homo sapiens
  Payload ID: 16314
  Gene Symbol: SLC5A6
  Gene Name: solute carrier family 5 (sodium/multivitamin and iodide cotransporter), member 6
  ENST ID: ENST00000401463
  CDS Start-End: 291-732
gtgggtctgagatcttaagtgcgagcggtaaggtggtggtctccgccgcgtagagggaagcgggaaaccgagaaagaacgagggaaaagggagcgatgttgatctcaggaagcacaaagggaccttcctagctctgactgaaccacggagctcaccctggacagtatcactccgtggaggaagactgtgagactgtggctggaagccagattgtagccacacatccgcccctgccctaccccagagccctggagcagcaactggctgcagatcacagacacagtgaggatatgagtgtaggggtgagcacctcagcccctctttccccaacctcgggcacaagcgtgggcatgtctaccttctccatcatggactatgtggtgttcgtcctgctgctggttctctctcttgccattgggctctaccatgcttgtcgtggctggggccggcatactgttggtgagctgctgatggcggaccgcaaaatgggctgccttccggtggcactgtccctgctggccaccttccagtcagccgtggccatcctgggtgtgccgtcagagatctaccgatttgggacccaatattggttcctgggctgctgctactttctggggctgctgatacctgcacacatcttcatccccgttttctaccgcctgcatctcaccagtgcctatgagtacctggagcttcgattcaataaaactgtgcgagtgtgtggaactgtga

SEQ ID NO: 184424 - DNA, 2230 bp, Homo sapiens
  Payload ID: 16314
  Gene Symbol: SLC5A6
  Gene Name: solute carrier family 5 (sodium/multivitamin and iodide cotransporter), member 6
  Uniprot ID: Q9Y289
  ENST ID: ENST00000408041
  CDS Start-End: 323-2230
tccgccgcgtagagggaagcgggaaaccgagaaagaacgagggaaaagggagcgatgttgatctcaggaagcacaaagggaccttcctagctctgactgaaccacggagctactcatagagccagatcctcagctctgcagctccaggcaactctgcctcagaacagggattgcttctccagctcaccctggacagtatcactccgtggaggaagactgtgagactgtggctggaagccagattgtagccacacatccgcccctgccctaccccagagccctggagcagcaactggctgcagatcacagacacagtgaggatatgagtgtaggggtgagcacctcagcccctctttccccaacctcgggcacaagcgtgggcatgtctaccttctccatcatggactatgtggtgttcgtcctgctgctggttctctctcttgccattgggctctaccatgcttgtcgtggctggggccggcatactgttggtgagctgctgatggcggaccgcaaaatgggctgccttccggtggcactgtccctgctggccaccttccagtcagccgtggccatcctgggtgtgccgtcagagatctaccgatttgggacccaatattggttcctgggctgctgctactttctggggctgctgatacctgcacacatcttcatccccgttttctaccgcctgcatctcaccagtgcctatgagtacctggagcttcgattcaataaaactgtgcgagtgtgtggaactgtgaccttcatctttcagatggtgatctacatgggagttgtgctctatgctccgtcattggctctcaatgcagtgactggctttgatctgtggctgtccgtgctggccctgggcattgtctgtaccgtctatacagctctgggtgggctgaaggccgtcatctggacagatgtgttccagacactggtcatgttcctcgggcagctggcagttatcattgtggggtcagccaaggtgggcggcttggggcgtgtgtgggccgtggcttcccagcacggccgcatctctgggtttgagctggatccagacccctttgtgcggcacaccttctggaccttggccttcgggggtgtcttcatgatgctctccttatacggggtgaaccaggctcaggtgcagcggtacctcagttcccgcacggagaaggctgctgtgctctcctgttatgcagtgttccccttccagcaggtgtccctctgcgtgggctgcctcattggcctggtcatgttcgcgtattaccaggagtatcccatgagcattcagcaggctcaggcagccccagaccagttcgtcctgtactttgtgatggatctcctgaagggcctgccaggcctgccagggctcttcattgcctgcctcttcagcggctctctcagcactatatcctctgcttttaattcattggcaactgttacgatggaagacctgattcgaccttggttccctgagttctctgaagcccgggccatcatgctttccagaggccttgcctttggctatgggctgctttgtctaggaatggcctatatttcctcccagatgggacctgtgctgcaggcagcaatcagcatctttggcatggttgggggaccgctgctgggactcttctgccttggaatgttctttccatgtgctaaccctcctggtgctgttgtgggcctgttggctgggctcgtcatggccttctggattggcatcgggagcatcgtgaccagcatgggctccagcatgccaccctctccctctaatgggtccagcttctccctgcccaccaatctaaccgttgccactgtgaccacactgatgcccttgactaccttctccaagcccacagggctgcagcggttctattccttgtcttacttatggtacagtgctcacaactccaccacagtgattgtggtgggcctgattgtcagtctactcactgggagaatgcgaggccggtccctgaaccctgcaaccatttacccagtgttgccaaagctcctgtccctccttccgttgtcctgtcagaagcggctccactgcaggagctacggccaggaccacctcgacactggcctgtttcctgagaagccgaggaatggtgtgctgggggacagcagagacaaggaggccatggccctggatggcacagcctatcaggggagcagctccacctgcatcctccaggagacctccctgtga

SEQ ID NO: 184425 - DNA, 599 bp, Homo sapiens
  Payload ID: 16314
  Gene Symbol: SLC5A6
  Gene Name: solute carrier family 5 (sodium/multivitamin and iodide cotransporter), member 6
  ENST ID: ENST00000430186
  CDS Start-End: 484-599
atatggcgttcgtgcgtagagagattacacaagaggcagaggacccgtctgtagaaagaacttaaagttattctaaaattaaggggcgaaatcaagtttcacaggtctttgaaagtcggcaggactggggcgccgaaggcctgcacgactgaaggcctcccccgtcgccgcgcggcttcccggagccgactgcagactccctcagcccggtgttccccgcgtccggacgccgaggtcgcggcttcgcagaaactcgggcccctccatccgccctcagaaaagggagcgatgttgatctcaggaagcacaaagggaccttcctagctctgactgaaccacggagctcaccctggacagtatcactccgtggaggaagactgtgagactgtggctggaagccagattgtagccacacatccgcccctgccctaccccagagccctggagcagcaactggctgcagatcacagacacagtgaggatatgagtgtaggggtgagcacctcagcccctctttccccaacctcgggcacaagcgtgggcatgtctaccttctccatcatggactatgtggtgttcgtcctgctgctggttctctc

SEQ ID NO: 184426 - DNA, 676 bp, Homo sapiens
  Payload ID: 16314
  Gene Symbol: SLC5A6
  Gene Name: solute carrier family 5 (sodium/multivitamin and iodide cotransporter), member 6
  ENST ID: ENST00000426119
  CDS Start-End: 330-676
gagcgtgagccggtgccgagaggcaccggggagcggcgtctgagccggggcggggacaagggggcggggaggggcggagcgagccggcctccggcgtgggtctgagatcttaagtgcgagcggaaaagggagcgatgttgatctcaggaagcacaaagggaccttcctagctctgactgaaccacggagctcaccctggacagtatcactccgtggaggaagactgtgagactgtggctggaagccagattgtagccacacatccgcccctgccctaccccagagccctggagcagcaactggctgcagatcacagacacagtgaggatatgagtgtaggggtgagcacctcagcccctctttccccaacctcgggcacaagcgtgggcatgtctaccttctccatcatggactatgtggtgttcgtcctgctgctggttctctctcttgccattgggctctaccatgcttgtcgtggctggggccggcatactgttggtgagctgctgatggcggaccgcaaaatgggctgccttccggtggcactgtccctgctggccaccttccagtcagccgtggccatcctgggtgtgccgtcagagatctaccgatttgggacccaatattggttcctgggctgctgctactttctggggctgctgatacctgcacacat

SEQ ID NO: 184427 - DNA, 570 bp, Homo sapiens
  Payload ID: 16314
  Gene Symbol: SLC5A6
  Gene Name: solute carrier family 5 (sodium/multivitamin and iodide cotransporter), member 6
  ENST ID: ENST00000428518
  CDS Start-End: 395-570
acgcacggctggccagcgaccctgcttcagcccgacctcaaacttgcttctgtacctcggtgaaggcctcccccgtcgccgcgcggcttcccggagccgactgcagactccctcagcccggtgttccccgcgtccggacgccgaggtcgcggcttcgcagaaactcgggcccctccatccgccctcagaaaagggagcgatgttgatctcaggaagcacaaagggaccttcctagctctgactgaaccacggagctcaccctggacagtatcactccgtggaggaagactgtgagactgtggctggaagccagattgtagccacacatccgcccctgccctaccccagagccctggagcagcaactggctgcagatcacagacacagtgaggatatgagtgtaggggtgagcacctcagcccctctttccccaacctcgggcacaagcgtgggcatgtctaccttctccatcatggactatgtggtgttcgtcctgctgctggttctctctcttgccattgggctctaccatgcttgtcgtggctggggccggcatactgttggtgagct

SEQ ID NO: 184428 - DNA, 917 bp, Homo sapiens
  Payload ID: 16314
  Gene Symbol: SLC5A6
  Gene Name: solute carrier family 5 (sodium/multivitamin and iodide cotransporter), member 6
  ENST ID: ENST00000412471
  CDS Start-End: 339-917
atccgccctcagtaaacatggcggcacggcgagcggggcgggcagggggcgggcagggggcggggcccccgcgggctcccggccagggctctcggccgggctctggctacccacgtgtggagaccgggcaggaaaagggagcgatgttgatctcaggaagcacaaagggaccttcctagctctgactgaaccacggagctcaccctggacagtatcactccgtggaggaagactgtgagactgtggctggaagccagattgtagccacacatccgcccctgccctaccccagagccctggagcagcaactggctgcagatcacagacacagtgaggatatgagtgtaggggtgagcacctcagcccctctttccccaacctcgggcacaagcgtgggcatgtctaccttctccatcatggactatgtggtgttcgtcctgctgctggttctctctcttgccattgggctctaccatgcttgtcgtggctggggccggcatactgttggtgagctgctgatggcggaccgcaaaatgggctgccttccggtggcactgtccctgctggccaccttccagtcagccgtggccatcctgggtgtgccgtcagagatctaccgatttgggacccaatattggttcctgggctgctgctactttctggggctgctgatacctgcacacatcttcatccccgttttctaccgcctgcatctcaccagtgcctatgagtacctggagcttcgattcaataaaactgtgcgagtgtgtggaactgtgaccttcatctttcagatggtgatctacatgggagttgtgctctatgctccgtcattggctctcaatgcagtgactggctttgatctgtggctgtccgtgctggccctgggcattgtctgtaccgtctatacagctctg

SEQ ID NO: 184429 - DNA, 741 bp, Homo sapiens
  Payload ID: 16314
  Gene Symbol: SLC5A6
  Gene Name: solute carrier family 5 (sodium/multivitamin and iodide cotransporter), member 6
  ENST ID: ENST00000414408
  CDS Start-End: 506-741
gtcgccctggggctgcttgggggcttttcctgctcgtggagctctgcgctggtcttcatgcgccctagccctctttcggggatactggccgaccccctcttccttttcccctttagtgaaggcctcccccgtcgccgcgcggcttcccggagccgactgcagactccctcagcccggtgttccccgcgtccggacgccgaggtcgcggcttcgcagaaactcgggcccctccatccgccctcagaaaagggagcgatgttgatctcaggaagcacaaagggaccttcctagctctgactgaaccacggagccgctcttcctgcgtctgctgttgactgtgatgttgcaggtagaggggctgagagctcaccctggacagtatcactccgtggaggaagactgtgagactgtggctggaagccagattgtagccacacatccgcccctgccctaccccagagccctggagcagcaactggctgcagatcacagacacagtgaggatatgagtgtaggggtgagcacctcagcccctctttccccaacctcgggcacaagcgtgggcatgtctaccttctccatcatggactatgtggtgttcgtcctgctgctggttctctctcttgccattgggctctaccatgcttgtcgtggctggggccggcatactgttggtgagctgctgatggcggaccgcaaaatgggctgccttccggtggcactgtccctgctggccacctt

SEQ ID NO: 184430 - DNA, 871 bp, Homo sapiens
  Payload ID: 16314
  Gene Symbol: SLC5A6
  Gene Name: solute carrier family 5 (sodium/multivitamin and iodide cotransporter), member 6
  ENST ID: ENST00000445802
  CDS Start-End: 247-708
cggccgggctctggctacccacgtgtggagaccgggcaggaaaagggagcgatgttgatctcaggaagcacaaagggaccttcctagctctgactgaaccacggagctcaccctggacagtatcactccgtggaggaagactgtgagactgtggctggaagccagattgtagccacacatccgcccctgccctaccccagagccctggagcagcaactggctgcagatcacagacacagtgaggatatgagtgtaggggtgagcacctcagcccctctttccccaacctcgggcacaagcgtgggcatgtctaccttctccatcatggactatgtggtgttcgtcctgctgctggttctctctcttgccattgggctctaccatgcttgtcgtggctggggccggcatactgttggtgagctgctgatggcggaccgcaaaatgggctgccttccggtggcactgtccctgctggccaccttccagtcagccgtggccatcctgggtgtgccgtcagagatctaccgatttgggacccaatattggttcctgggctgctgctactttctggggctgctgatacctgcacacatcttcatccccgttttctaccgcctgcatctcaccagtgcctatgagtacctggagcttcgattcaataaaactgtgcgagtgtgtggaactgtgaccttcatctttcagatgtgactggctttgatctgtggctgtccgtgctggccctgggcattgtctgtaccgtctatacagctctgggtgggctgaaggccgtcatctggacagatgtgttccagacactggtcatgttcctcgggcagctggcagttatcattgtggggtcagccaaggtggg

SEQ ID NO: 184431 - DNA, 725 bp, Homo sapiens
  Payload ID: 16314
  Gene Symbol: SLC5A6
  Gene Name: solute carrier family 5 (sodium/multivitamin and iodide cotransporter), member 6
  ENST ID: ENST00000432106
  CDS Start-End: 327-725
atatcgcacagggaaggtcctcatctctgaagatcactattcgaacttatttattatgctttctgcagagacttctcaatctgacagccctagtttggcgcggtgtaaaacgaccgcaggaaaagggagcgatgttgatctcaggaagcacaaagggaccttcctagctctgactgaaccacggagctcaccctggacagtatcactccgtggaggaagactgtgagactgtggctggaagccagattgtagccacacatccgcccctgccctaccccagagccctggagcagcaactggctgcagatcacagacacagtgaggatatgagtgtaggggtgagcacctcagcccctctttccccaacctcgggcacaagcgtgggcatgtctaccttctccatcatggactatgtggtgttcgtcctgctgctggttctctctcttgccattgggctctaccatgcttgtcgtggctggggccggcatactgttggtgagctgctgatggcggaccgcaaaatgggctgccttccggtggcactgtccctgctggccaccttccagtcagccgtggccatcctgggtgtgccgtcagagatctaccgatttgggacccaatattggttcctgggctgctgctactttctggggctgctgatacctgcacacatcttcatccccgttttctaccgcctgcatctcaccagtgcctatgagtacctg

SEQ ID NO: 184432 - DNA, 542 bp, Homo sapiens
  Payload ID: 16314
  Gene Symbol: SLC5A6
  Gene Name: solute carrier family 5 (sodium/multivitamin and iodide cotransporter), member 6
  ENST ID: ENST00000442731
  CDS Start-End: 462-542
agtaccagatatcgcacagggaaggtcctcatctctgaagatcactattcgaacttatttattatgctttctgcagagacttctcaatctgacagccctagtttggcgcggtgtaaaacgaccgcagtgaaggcctcccccgtcgccgcgcggcttcccggagccgactgcagactccctcagcccggtgttccccgcgtccggacgccgaggtcgcggcttcgcagaaactcgggcccctccatccgccctcagaaaagggagcgatgttgatctcaggaagcacaaagggaccttcctagctctgactgaaccacggagctcaccctggacagtatcactccgtggaggaagactgtgagactgtggctggaagccagattgtagccacacatccgcccctgccctaccccagagccctggagcagcaactggctgcagatcacagacacagtgaggatatgagtgtaggggtgagcacctcagcccctctttccccaacctcgggcacaagcgtgggcatgtctaccttctccatcatg

SEQ ID NO: 184433 - DNA, 11574 bp, Homo sapiens
  Payload ID: 16315
  Gene Symbol: SLC5A3
  Gene Name: solute carrier family 5 (sodium/myo-inositol cotransporter), member 3
  Uniprot ID: P53794
  ENST ID: ENST00000381151
  CDS Start-End: 513-2669
cggaccgtgctttcgccgcctgggagccgtccggcgcagcagtttctaggtccccactgtccccgccgtcccgccccttcgcgtcccgggaaccggctggcttccgagccgcactcgccgatcctccaggcatgccccgctacgagctggctttaatcctgaaagccatgcagcggggttggtacagtaggcttcactagacttagctgcaactcagaatttctcctccagcacctgagtaaatgctgatggtcttgtggagagtggattaagagtacgagctaagttctcaatcccaattaagaagcggaaaatttaaactgtcttcttcaaagtttatcacaaccaccaccatcaagacagcaaaccaaaggacaaagactttgaccctgctgtgttgctctgtgtagtccagttcacgtatggtttacagacttggctggggttactaaaaataaataaaaagttggacacttctgtcattggagcgctattattcacaagttaccagaatgagagctgtactggacacagcagacattgccatagtggccctgtattttatcctggtcatgtgcattggtttttttgccatgtggaaatctaatagaagcaccgtgagtggatacttcctggcggggcgctctatgacctgggtagcaattggtgcctctctgtttgtgagcaatattgggagtgagcacttcattgggctggcaggatctggagctgcaagtggatttgcagtgggcgcatgggaattcaatgccttactgcttttacaacttctgggatgggttttcatcccaatttacatccggtcaggggtatataccatgcctgaatacttgtccaagcgatttggtggccataggattcaggtctattttgcagccttgtctctgattctctatattttcaccaagctctcggtggatctgtattcgggtgccctttttatccaggagtctttgggttggaatctttatgtgtctgtcatcctgctcattggcatgactgctttgctgactgtcaccggaggccttgttgcagtgatctacacagacactctgcaggctctgctcatgatcattggggcacttacacttatgattattagcataatggagattggcgggtttgaggaagttaagagaaggtacatgttggcctcacccgatgtcacttccatcttattgacatacaacctttccaacacaaattcttgtaatgtctcccctaagaaagaagccctgaaaatgctgcggaatccaacagatgaagatgttccttggcctggattcattcttgggcagaccccagcttcagtatggtactggtgtgctgaccaagtcatcgtgcagagggtccttgcagccaaaaacattgctcatgccaaaggctctactcttatggctggcttcttaaagctcctgccaatgtttatcatagttgtcccaggaatgatttccaggatactgtttactgatgatatagcttgcatcaacccagagcactgcatgctggtgtgtggaagcagagctggttgctccaatattgcttacccacgcctggtgatgaagctggttcctgtgggccttcggggtttaatgatggcagtgatgattgcagctctgatgagtgacttagactctatctttaacagtgccagtaccatattcaccctcgatgtgtacaaacttatccgcaagagcgcaagctcccgggagttaatgattgtggggaggatatttgtggcatttatggtggtgatcagcatagcatgggtgccaatcatcgtggagatgcaaggaggccagatgtacctttacattcaggaggtagcagattacctgacacccccagtggcagccttgttcctgctggcaattttctggaagcgctgcaatgaacaaggggctttctatggtggaatggctggctttgttcttggagcagtccgtttgatactggcctttgcctaccgtgccccagaatgtgaccaacctgataataggccgggcttcatcaaagacatccattatatgtatgtggccacaggattgttttgggtcacgggactcattactgtaattgtgagccttctcacaccacctcccacaaaggaacagattcgaaccaccaccttttggtctaagaagaacctggtggtgaaggagaactgctccccaaaagaggaaccatacaaaatgcaagaaaagagcattctgagatgcagtgagaataatgagaccatcaaccacatcattcccaacgggaaatctgaagacagcattaagggccttcagcctgaagatgttaatctgttggtaacctgcagagaggagggcaacccagtggcatccttaggtcattcagaggcagaaacaccagttgacgcttactccaatgggcaagcagctctcatgggtgagaaagagagaaagaaagaaacggatgatggaggtcggtactggaagttcatagactggttttgtggctttaaaagtaagagcctcagcaagaggagtctcagagacctgatggaagaggaggctgtttgtttacagatgctagaagagactcggcaagttaaagtaatactaaatattggactttttgctgtgtgttcacttggaattttcatgtttgtttatttctccttatgaacttaaggatatggtgagacactaacttaagacaatactgactggtctttggggaaaaaagttatgtaactgtgcatctctcaggcattgtttacgctgtaggttttagccaaattttacttagcagaaaatcatctaattacaagactttattttcccagagatggattaaagtaaatcttcaacttaagtgaagccaaacctaacagactgaattgtgcaaatgtggttttaaattttgcataccaaagtaagaagagaccaattattctcacagagcacttagagcagaatatatgttaagttaccatgaattaaggtatactgtctgcactgccaagtcttggcagaccttaccctgaagtagaagatttgctcatttctaaatttttttttctgtctctgtaatccctcctaccattaagaaaaacttatttcttagacattgtacaatcagttatgtactgaaaatcgaatgtgcttgtgtgatacttgtttcaggacaagttcatttgccaggttcattttgttagcatgagcctacggattctgatttcccaaagaaagaatgttttcctgtaggtatttttgtaccaccagtatatggaatgttagggaaaaactttgttccagttcctttttttttttctttctactttcaagtttaagtgaaccatactgaaatgaccaacaagtctgcctgtaaagttacatgtcatgattgtgttgttaaatgattatgggggagaaaatgaagtaaatgttgctgatgatccccatatttattgatcatattaaggttgtttatatagtttggaaatgaccagccccctaagcagtgtttgattaacttatgctaatcagatgattactcatatattctgctaattttctagctttattcttgttatttggaaaaattattagccaaatgccttcctaggtggatccagttggaagatatgtccagaaacctgaagaaaaattgacgctgcctttgtgtgctggattgctctacttgattagatcatgatatatcaaggttgaatttttagagggaaaatttaattctgatatcttattgcatccttgataagtttttccctgattttttttttcctcaaaagactttccatctgtacacagcctctacatttttgttgtagtgacttagagcataaggatgtttcagtgcaaactggccgtcggtaacagaaaactcagtgcatactttgctgttgttaggttgtcaatatagtctttctgtaggatggatagcatgtttgagaggtgccaaacaagaacttttggggttagtagtgtgtcttgtggagggtattacaggactgtgtaattataggactctaacttgacatggcttggcacccacttgcagctagtgggtacagggtacaaaagatgttagagaaaagctctacagattacgtacttctgtgtcttcgtatgctcaacactgtcctttgtcctccatgaaagatgaaggaagcaaattatgtatgtactttctttgaccttctttaatctctgatactttttagattgcatgattttactaggcttgtatttagggaaattactttcataaatacttttgtagattttgaatcaaaactcagtctttttaatttttttgtagtctataaactagtttcattatgatggacttgattagtccaaagttaattttagaaattgtcaggtagcatagtgtcttcccatgatcaggaggctttctgaaggactgagtctgtaaatgaaaaaataatttatgtatgaatagcatgtatttctgaagagcttagagtgccttgtagaatttttttctcaattttattcttgaggtttataatttgggggccaaatagatagagctcatcattttcttgtttggaagttgaggctgcgacatgtccaaggttatgaagtctcttttgggaagaacagaaaccaggtctccaaatctggactcatggtttgttcagatgtgtctggacaaatggttgtcaatgttttgtcctgttttttcaaaggaactgttcttcctttgggacaaccttttggtgtttgggaaagtaataagatcttggatttttcaaattaacattaagttgtaagaactaaaattttctttgaaccacattactgtgtaattcactgataattgacatattggctgggcagcctatctcttccatatccagcgtaaatgaataggaggtgtttgtgattttttttttctccctttatttaacattgagtcctagtagtttggagaattagggtccctctaccttctttctgctcttgtcttagtaagatacataaggtacatcatcttgtgtctgtgtgtatatagcagtaggtcaagtttagagtactaaagtctgtaaataaggaatgactattagcatattcattagaattgtttattcttgccagtataaacatcattttatttagactaaagtccctgaagcttgtctttcttattgcttcccagtaatagataatgtgctcgagtaagtttgtgaattgctgattgcaacttaattcagggaccagtcttcaatctatatttcattagaatgattgttcctggaatgatcatacatggactgtcttaagctagcaaaatgttcatactttacactgactaaatgggtcctaaatgatgacattggtctttagacattaacatgtgtatatttttatattagctcaagctaaggttcagaattgaagcttgatattgactagaatagctaaaagtcaaaatgaggtgaggacactggtcttggaaggtagagaaaaataaatgtcttaccaggtgttaatggtatccccagttcttagacttttgtcttctcaggcaattttcatctcaagatctgatgagaagggcatattacattggtatgcaggatgattattgcatattttgtgggacctctaatttccctggtcatctttcagaatattctgttctgccacccccagagagtaaacacttgagccgatttcttcttccccagctattctttcctgggggtaattatgctttgtctttagattagagaagcatcaagcaatagcaatggtgctgtgtccttcggcctaaattcaatagatctcatctcctagggcttccttttcacttggctcaaaggatccattgtattttggcacaaagagcctggccagggtcatgtagccatagctcttagggatgatacctcaagaaattagctgggacccatcactctgtgaaacttcacattttaagaactgagttgagggggttgttatgcacttctgtaacttgaggctaagcaaggggttaactcttgtgagagccaatagagtgtgtctgtattcgcagtccatggctcattttctttatagtaggcatatggatcttcccctctgactttgaatatcatttggtgtggcctgtgggttattttcattctttaccaccaaataaagcggcttattagctactcagttacttgctactcaaaggttaggtcttccctgttcctgcttggcagtgttaaagcttacagggttaacttatgatgattctcctggctcattttcatcagaggcatgatgactggaaagggatcacatgggtcgttggtggtgacacctcactgtttcctaggtttggatagagagatgtatacaagacctttcctgttaaattacgtgactacagagacttgccaggacaaaattttcctaagaaatcagaaaaatgattaagtgagataagtacctgggtgacacagatattagcccgttggtaaaagacaacaaatattagcttaaaatctgcatatgtagaatcattttcattagatttagagcttgaagcaccttggctctcagctactttaaactcctccccatataaatcagggcaccaataaataagtttcagctttttaaaccctggtttgatgttaagcattataaagtacgaagtttgttaccacagtagagataatttagtagaaaaatgctttgaggcttcagtatttgtaagattttgcattagccagatgctaggttgttgaaggcatttcagtgttgataatagcctgagcagacttctttacaaatgggatctgtttctatatgtgtatatgcccacttaccattcagagagactggtctttctctttgtcttccttcacattgctgtgtcagttctacacctagtcttttcagcacttagcaaattcaaattttgatttttttgtcagcttagttcactttaaggcatattggcatggtgtgtgaaagtgatgttttgccccagtattgaggacttttagatccaaataatgactcattaaatataattatgttttaagtatactgaatttctgttagcttaaaatgttaattctcaggaatgattttctcacactttgtgttggctaataataaaagcactgttttattctcaaaactcctttttcaaaaattagggagagagcagtagtgatcatttatgtgagcccctttgaaatgatggtgtcagagtgcagagaaacaatggagttttgatgccaaaaaggtttttttgcagtaaaagtaaaaatttggaattagttggcatatagaggaacccttttgtactggaacgtatgaggctggattgtgaaaaggtaatctttcgattgctagacttggttaacttagggctgcaaatctttttcttctgtcaaggtcacttaatatggaatgtttttgtcagactgtcctttgttggaatactttagctgttcagctactttgactcctaggagagaatttagttaaggttcaaagtaattaactggctttgccagtggtgagtcccacaccattattcacttagtagtcatataaatgtttttatttaaacttctctctcttcaatgctgagaataaggctttaaattactgattcacctttaaaggaatgttgtgagaattgatgtaatttctgtttctgtttccatctaaacttctttataaaaagagggattagtttttttgttttggggtaagcacctaatttatccagtaaccaacaaccctaaccattggcatatatagtctttcactcagaaataaacaaaaactgtttggtatatctgtatcattgctaatcttgtgcactttactttttgggcagtaccatacatagtctgaggctattgacttaaaccaataactgtactttatgtaatgactcttaaatttggttacctgggttcacagcttgcttgaagagaaaggatgctagaataaagtaagcagctgaagagcgagcaaatcaagacaaaacacagtggtctcagatttttcgtagtgtgggaacagtggttttgctctataccactgaaaagcactataacataattgttgtccatgatactgaagcttttcccctcacttctaggttgtttacattcagagctctatcaataagaggaatacatattacagtgaattcgacaaccgcacaagttggcagtaggtatccccaacctaatttatcttggtaaattcaccctgtttcctagtgctgctggataaaagagtgtttactttttattgctcttagacagagtagtctagataagttttcaatttatcaacatagcctagacttctgtaagtggaatgttcattagtaactcatctttttgttgttataattggaaacagaaacgaggcttattgctattgcagaaatcccaaactggcaaaggccagtatatatggtattccataatataaccagcttttgaaatttatgtgtttggattagtgccttctggttaccagtattgactctgctagtttgcacctttccgttcttaacagaaaatttgtatttgttattcctcttaaattttgtcgtaactagtgaaggaagtaaaaaaaaaaaaaaaacatgcattacattgacatactttatgtgcagcctttatttaggttcagtgaaaccaggtagttctgtatttgtgttgtagcctaaatgttgtttcttttatatccattaaaaacttaaagttacttatgttctgtgatcttaattttgttgtgtttccattgtaggttgataggtatatcgagaacaggtacgtgacaacagtttatattccatgatagaaagctaaagtccatagaaagcacaaaatcgtgttcacacattagtgtacccacacatagaaagcacaagactaatagtattctctgtatcccacaagtgccagtcataaaggccaccaggtatttgtctcagagttgctatgagcactacagtattgataagcccaagacaatgcggtatctaaactggtcctaatggtaagggacccaaaggaataatctcaataagtttgtaccacattgatggagggagagaatataaatgtcaagaatgccaaaattatatttgggggttactagctaaaatggggtttgagggctttttactgcaacttgaaactggagaaatagggacagatgtctaggtttttggtgggtggaacaggtgacatatttctgttttaagctgtagtgtgattggggttttttgtaaaaaatcttaaatcttttaggaaatattacctcttaacagtgcccccccaaacatgcagaaagtcatactttaacagggcaaatactacttgtctttgattttttttgtgtacgtttgtatgtgagagatgaagttacctttatttttttcctatacttgactgtgcttcattttaataaaggataatttgatctgagtgttctgagcatcagactaattctgaagcatatttgctagaggagctactttgcttttcacaatggggtggagaggattctttcacttgtcccattaaccctcttctagtctagatgagatgaaatctgttaatgtgtgtgtagaagaaaacgtatgttcttctactcagcattgcccttttccacctcctcacttcacctccgagtagcttgtttatcaagaatgaatgaatgtctttgtcttaaattttgcccatgtgttaaaagatgtaattctcagaatgggagagaaatgactacctttgttcctactcttttatataattatccttttagggaaagacttggtcaactctaatatatctagaaggaagactatatctggtgtagactaatatgagatgttttagaagagttaacctgaacactttgagggagagattattcttgccagcaaaaagctagccaggaatgagcctaccacattatttgagaatatcaaacctcaggcctggggggatgaggggaagaagattaccagaagtgcaggaaagagaagtttgaggaacacccttggcttagcaacatgtgataatgcaaagctgttataacctgttaatcctacgtactatgtgttctgtacctttacatgtttttaaatttaagatagtttgtaagaactgtacaaaaaaatgcttctggagatttctttggcagaaatgcctttcatctataatttcatggagaactgctttaattagcctaggtgaaaagtagtcctagcagtgtaaatatgtataattagagttttctaatttcactgtgagatctctaacttttgagtggcaaacagatcaagtcttttgctcatagacttttctgtggggttattaaaatgcaaaagctttattttttttaataatgccatactccattagtgtcagatgatggtatggaatttgttcccttgctttcccccactgttactgcttcagtttatagattgccagcagagttcagaaatagagcagggatttacccgttctttgcttggacatcccattttcttttgtccagacccatgttggcaatcatgtatgaactgtgttatacttctcagtgctttcttttttctttttgataagatggatatcaaaaatagttgctgtgcaaaagttagtagtcttcttcaagaagaaaaccaattctttttctaataatatcctgtgaaattgcttcattcattcatttatttttaagccaaatgtcagcagagtgctgctgcttttatctagtaattttgatatgtaagtattaatgcatttttaaaagatgtctacattgaaacatgttcttcccagtgtcctgcttatgatgctttgttcagattttttgtaagagaccagttagtacactgggggtgtatattgtgtacatgtgtcattttagttaggcattgtaggccaaatgtgattataaatgaagttgatgaacattaattttgttattagtgagttttttgaattgtaaatggatttccagtttaccttctgttgtctacagcttttttaattttaaggtttgactaattgtatccatctcattgtacagtgttttagttgcaagcagaaagtagaatttggtataaagcaggttatttctatattgaaaggagtacagttgaaattgtagatttaagattgttaaaatcatgacaattctaacttgtctattctaacctattgtgtacaatctgattttttaaaattgtaaacatgtatgatcttggtttcatgtgtttttgaaagtgttattgtttaaaaaatgaaaaaagcatatctgctaaagagctgtcagttttcattactgactctgtaaaatacactgttctttgtgtactgtgtgttattttgccagctgctgcattagccttcaaaagtatttggaaacttaagatgaactacatttcttgcaaagtacattcctttctgtggtattttgtcctgtaactgaagtatagtaattattttatggaaatgttagcaattctgtaccaactttgaataaaatgaaaaattta

SEQ ID NO: 184434 - DNA, 4436 bp, Homo sapiens
  Payload ID: 16316
  Gene Symbol: SLC5A10
  Gene Name: solute carrier family 5 (sodium/sugar cotransporter), member 10
  Uniprot ID: A0PJK1
  ENST ID: ENST00000317977
  CDS Start-End: 572-2272
tggcaaaaatcccaaggacttttgatccaaaggcggcagttatcactaagtggtttatttccttctaagacctagccaacggtctcagagccaatgctgctggtacaactactctattaatgggatagttttggtaagtctggatcctcccagctgggtcctcctgatcagtgcaaagcagccttttgttttaaaacacattgcaagcaatggcttgggaagtaaacaccatctgaggctcgctggccagaggcaaggggagacggcaggcagttgagcctgcctgagggttctctcagcagtgacttcctttttcccttccttcttctgcctagtcctgtatgtgaggactattaattgttttttgttgttgttgttgtttgttttgtgagatggagtctccctctgttgcccaggctggactgcaatggcgcagtcttggctcactgcaatctctacctcctgagttcaagcaattctcctgcctcagcctcccaagtagctgggattacagtcctcttgtcgggccagtaggaacacggtgaatggctacttcctggcaggccgggacatgacgtggtggccgattggagcctccctcttcgccagcagcgagggctctggcctcttcattggactggcgggctcaggcgcggcaggaggtctggccgtggcaggcttcgagtggaatgccacgtacgtgctgctggcactggcatgggtgttcgtgcccatctacatctcctcagagatcgtcaccttacctgagtacattcagaagcgctacgggggccagcggatccgcatgtacctgtctgtcctgtccctgctactgtctgtcttcaccaagatatcgctggacctgtacgcgggggctctgtttgtgcacatctgcctgggctggaacttctacctctccaccatcctcacgctcggcatcacagccctgtacaccatcgcagcttttgaccagatcggtggttacgggcagctggaggcagcctacgcccaggccattccctccaggaccattgccaacaccacctgccacctgccacgtacagacgccatgcacatgtttcgagacccccacacaggggacctgccgtggaccgggatgacctttggcctgaccatcatggccacctggtactggtgcaccgaccaggtcatcgtgcagcgatcactgtcagcccgggacctgaaccatgccaaggcgggctccatcctggccagctacctcaagatgctccccatgggcctgatcatcatgccgggcatgatcagccgcgcattgttcccaggtgctcatgtctatgaggagagacaccaagtgtccgtctctcgaacagatgatgtgggctgcgtggtgccgtccgagtgcctgcgggcctgcggggccgaggtcggctgctccaacatcgcctaccccaagctggtcatggaactgatgcccatcggtctgcgggggctgatgatcgcagtgatgctggcggcgctcatgtcgtcgctgacctccatcttcaacagcagcagcaccctcttcactatggacatctggaggcggctgcgtccccgctccggcgagcgggagctcctgctggtgggacgcactgggataccctcaacacccccagcccctcaaagccgtctcagcttcctcctgcccgaaacaccaccattggagcggtatctcctaggcctcgtggtcatggatctctggctggtcatagtggcactcatcggcgtgagtgtggcctggatccccgtcctgcaggactccaacagcgggcaactcttcatctacatgcagtcagtgaccagctccctggccccaccagtgactgcagtctttgtcctgggcgtcttctggcgacgtgccaacgagcagggggccttctggggcctgatagcagggctggtggtgggggccacgaggctggtcctggaattcctgaacccagccccaccgtgcggagagccagacacgcggccagccgtcctggggagcatccactacctgcacttcgctgtcgccctctttgcactcagtggtgctgttgtggtggctggaagcctgctgaccccacccccacagagtgtccagattgagaaccttacctggtggaccctggctcaggatgtgcccttgggaactaaagcaggtgatggccaaacaccccagaaacacgccttctgggcccgtgtctgtggcttcaatgccatcctcctcatgtgtgtcaacatattcttttatgcctacttcgcctgacactgccatcctggacagaaaggcaggagctctgagtcctcaggtccacccatttccctcatggggatcccgaggccccaagaggggcagattcccctcacagctgcacagcagctcggtgcccaagaactggccaagccagcaaagcgggagccctgaaaaattaggggggaaatgggagaaaataatgtgacatttcaaaaacagcaccaaagcagtcagcattggaaggaaaattagatttctgacggacatcctgatgttggttttactgttttcgttttgaatacacaggctgggtcaggagcagtgagatttgccagcactcagggttctaagggtcttgggccagctctggatggaggaagagccccacatgcccagagcaaggccccccattaagggactgcagccacctccaagggctcctccctccacccaccggctcccaaatgccagagggagcctcttcgccctccctccctgcccaccatccctcaaccatcagcctggcgttcaaagcctttccaagtcccacctcacttttccctctcccaaaggtgcccaggctctgggcaggccctgctcatatccctgatcatggcacattctctggaggaccctcctgttctcgggtaggggccgtgccccacctaggtagccgtcccatgtgggatcctgtaggatctctaaaacctagctctggccccaactttctgtctgccctggaggtttctcagcctcctgagagctctgctgggccccggtctgggcagaacctgggcctaaacaaacaagagccagggcagccagggtctctgcgtggctgggcccagggcttgccctcagagctcacctgtccaacagaagaggagtgtgcctccaccttccctactgcccgcccctttttcagggtcttagggcctctagccctgtggtggggtgctgggtgccccaggtggagctgaagtcatggggctgttgaggagttggtgtccacctggagtctgtccagtgagtttaggtcaacaggtgtgcagtctgtccttcgaggctgagccacctcccaacagcctgaacaactccaggggccttttgagggaggggcaggcaggcccagtgggtggtcagcccaaggtgaacccacccaccatggccagggttccttaggttgagcctccagtgggtgaaacctgggagtcctcaaccttcctggcagatggggccattgacaagaggaggtgggcggggcctccacagactccgccctgtggtgtcacacagctggcagccaatggaaagcaaccagccaggaagccccggagctacccttgctgggtacccttgctgggggacctgggccatcccagtttgtgcagagcggccggaggcagttaggagcccacgttcagtccaaggccgtccactgagccccgtgtgactctgacagagctgggggtgtccatgtcctctctggacctcagttcctgtaaaaaggcccgttggccagatcggccgccgggctgctcacaggtgcacgggctgcacgtaactccgtgggaagaagccaacgcgcccgcaggaccggccccgccaccagtgggggtctgggcgctccaggacctcaatgatgtcgccacggcggaagctgagctgcgaggggtcctgggctgagaagtcaaactgggcctgggcaaagcaggccccaggtgactgcaagaagaggaggtggttagtagggtgccttcagaagccctgcaacccaccctccctcagaggcacccaagagaagtgatttgccacaggtgaggaggggtctcgggcagcaccggagttgaactttaagtccagatcaatggtagtgccaccactgggcctcctgctgcccacacccctgcctgtctgctgtgcagatgctgcatctacatagaacacggctttcccagccgcccagctgggacaatagggctggtgggtcaggggacctgagtcctggtccttagggtgggattttggttaggtccctgcttctcttgggatcttatttacccgactctgcagcagccatggtagcttttgactccaggccacaaagccatgagaatgggccttataaactgtaaagtgacgtgcagctaagagtcgtgtttattgctcttgccct

SEQ ID NO: 184435 - DNA, 1982 bp, Homo sapiens
  Payload ID: 16316
  Gene Symbol: SLC5A10
  Gene Name: solute carrier family 5 (sodium/sugar cotransporter), member 10
  Uniprot ID: A0PJK1
  ENST ID: ENST00000395643
  CDS Start-End: 19-1728
gcctgcggcaggacagccatggccgccaactccaccagcgacctccacactcccgggacgcagctgagcgtggctgacatcatcgtcatcactgtgtattttgctctgaatgtggccgtgggcatatggtcctcttgtcgggccagtaggaacacggtgaatggctacttcctggcaggccgggacatgacgtggtggccgattggagcctccctcttcgccagcagcgagggctctggcctcttcattggactggcgggctcaggcgcggcaggaggtctggccgtggcaggcttcgagtggaatgccacgtacgtgctgctggcactggcatgggtgttcgtgcccatctacatctcctcagagatcgtcaccttacctgagtacattcagaagcgctacgggggccagcggatccgcatgtacctgtctgtcctgtccctgctactgtctgtcttcaccaagatatcgctggacctgtacgcgggggctctgtttgtgcacatctgcctgggctggaacttctacctctccaccatcctcacgctcggcatcacagccctgtacaccatcgcagcttttgaccagatcggtggttacgggcagctggaggcagcctacgcccaggccattccctccaggaccattgccaacaccacctgccacctgccacgtacagacgccatgcacatgtttcgagacccccacacaggggacctgccgtggaccgggatgacctttggcctgaccatcatggccacctggtactggtgcaccgaccaggtcatcgtgcagcgatcactgtcagcccgggacctgaaccatgccaaggcgggctccatcctggccagctacctcaagatgctccccatgggcctgatcatcatgccgggcatgatcagccgcgcattgttcccagatgatgtgggctgcgtggtgccgtccgagtgcctgcgggcctgcggggccgaggtcggctgctccaacatcgcctaccccaagctggtcatggaactgatgcccatcggtctgcgggggctgatgatcgcagtgatgctggcggcgctcatgtcgtcgctgacctccatcttcaacagcagcagcaccctcttcactatggacatctggaggcggctgcgtccccgctccggcgagcgggagctcctgctggtgggacggctggtcatagtggcactcatcggcgtgagtgtggcctggatccccgtcctgcaggactccaacagcgggcaactcttcatctacatgcagtcagtgaccagctccctggccccaccagtgactgcagtctttgtcctgggcgtcttctggcgacgtgccaacgagcagggggccttctggggcctgatagcagggctggtggtgggggccacgaggctggtcctggaattcctgaacccagccccaccgtgcggagagccagacacgcggccagccgtcctggggagcatccactacctgcacttcgctgtcgccctctttgcactcagtggtgctgttgtggtggctggaagcctgctgaccccacccccacagagtgtccagattgagaaccttacctggtggaccctggctcaggatgtgcccttgggaactaaagcaggtgatggccaaacaccccagaaacacgccttctgggcccgtgtctgtggcttcaatgccatcctcctcatgtgtgtcaacatattcttttatgcctacttcgcctgacactgccatcctggacagaaaggcaggagctctgagtcctcaggtccacccatttccctcatggggatcccgaggccccaagaggggcagattcccctcacagctgcacagcagctcggtgcccaagaactggccaagccagcaaagcgggagccctgaaaaattaggggggaaatgggagaaaataatgtgacatttcaaaaacagcaccaaagcagtcagcattggaaggaaaattagatttctgacggaca

SEQ ID NO: 184436 - DNA, 2069 bp, Homo sapiens
  Payload ID: 16316
  Gene Symbol: SLC5A10
  Gene Name: solute carrier family 5 (sodium/sugar cotransporter), member 10
  Uniprot ID: A0PJK1
  ENST ID: ENST00000395645
  CDS Start-End: 19-1809
gcctgcggcaggacagccatggccgccaactccaccagcgacctccacactcccgggacgcagctgagcgtggctgacatcatcgtcatcactgtgtattttgctctgaatgtggccgtgggcatatggtcctcttgtcgggccagtaggaacacggtgaatggctacttcctggcaggccgggacatgacgtggtggccgattggagcctccctcttcgccagcagcgagggctctggcctcttcattggactggcgggctcaggcgcggcaggaggtctggccgtggcaggcttcgagtggaatgccacgtacgtgctgctggcactggcatgggtgttcgtgcccatctacatctcctcagagatcgtcaccttacctgagtacattcagaagcgctacgggggccagcggatccgcatgtacctgtctgtcctgtccctgctactgtctgtcttcaccaagatatcgctggacctgtacgcgggggctctgtttgtgcacatctgcctgggctggaacttctacctctccaccatcctcacgctcggcatcacagccctgtacaccatcgcagggggcctggctgctgtaatctacacggacgccctgcagacgctcatcatggtggtgggggctgtcatcctgacaatcaaagcttttgaccagatcggtggttacgggcagctggaggcagcctacgcccaggccattccctccaggaccattgccaacaccacctgccacctgccacgtacagacgccatgcacatgtttcgagacccccacacaggggacctgccgtggaccgggatgacctttggcctgaccatcatggccacctggtactggtgcaccgaccaggtcatcgtgcagcgatcactgtcagcccgggacctgaaccatgccaaggcgggctccatcctggccagctacctcaagatgctccccatgggcctgatcatcatgccgggcatgatcagccgcgcattgttcccagatgatgtgggctgcgtggtgccgtccgagtgcctgcgggcctgcggggccgaggtcggctgctccaacatcgcctaccccaagctggtcatggaactgatgcccatcggtctgcgggggctgatgatcgcagtgatgctggcggcgctcatgtcgtcgctgacctccatcttcaacagcagcagcaccctcttcactatggacatctggaggcggctgcgtccccgctccggcgagcgggagctcctgctggtgggacggctggtcatagtggcactcatcggcgtgagtgtggcctggatccccgtcctgcaggactccaacagcgggcaactcttcatctacatgcagtcagtgaccagctccctggccccaccagtgactgcagtctttgtcctgggcgtcttctggcgacgtgccaacgagcagggggccttctggggcctgatagcagggctggtggtgggggccacgaggctggtcctggaattcctgaacccagccccaccgtgcggagagccagacacgcggccagccgtcctggggagcatccactacctgcacttcgctgtcgccctctttgcactcagtggtgctgttgtggtggctggaagcctgctgaccccacccccacagagtgtccagattgagaaccttacctggtggaccctggctcaggatgtgcccttgggaactaaagcaggtgatggccaaacaccccagaaacacgccttctgggcccgtgtctgtggcttcaatgccatcctcctcatgtgtgtcaacatattcttttatgcctacttcgcctgacactgccatcctggacagaaaggcaggagctctgagtcctcaggtccacccatttccctcatggggatcccgaggccccaagaggggcagattcccctcacagctgcacagcagctcggtgcccaagaactggccaagccagcaaagcgggagccctgaaaaattaggggggaaatgggagaaaataatgtgacatttcaaaaacagcaccaaagcagtcagcattggaaggaaaattagatttctgacggacatcctga

SEQ ID NO: 184437 - DNA, 2140 bp, Homo sapiens
  Payload ID: 16316
  Gene Symbol: SLC5A10
  Gene Name: solute carrier family 5 (sodium/sugar cotransporter), member 10
  Uniprot ID: A0PJK1
  ENST ID: ENST00000395647
  CDS Start-End: 42-1880
agtccctcgggctcatacctagtgcctgcggcaggacagccatggccgccaactccaccagcgacctccacactcccgggacgcagctgagcgtggctgacatcatcgtcatcactgtgtattttgctctgaatgtggccgtgggcatatggtcctcttgtcgggccagtaggaacacggtgaatggctacttcctggcaggccgggacatgacgtggtggccgattggagcctccctcttcgccagcagcgagggctctggcctcttcattggactggcgggctcaggcgcggcaggaggtctggccgtggcaggcttcgagtggaatgccacgtacgtgctgctggcactggcatgggtgttcgtgcccatctacatctcctcagagatcgtcaccttacctgagtacattcagaagcgctacgggggccagcggatccgcatgtacctgtctgtcctgtccctgctactgtctgtcttcaccaagatatcgctggacctgtacgcgggggctctgtttgtgcacatctgcctgggctggaacttctacctctccaccatcctcacgctcggcatcacagccctgtacaccatcgcagggggcctggctgctgtaatctacacggacgccctgcagacgctcatcatggtggtgggggctgtcatcctgacaatcaaagcttttgaccagatcggtggttacgggcagctggaggcagcctacgcccaggccattccctccaggaccattgccaacaccacctgccacctgccacgtacagacgccatgcacatgtttcgagacccccacacaggggacctgccgtggaccgggatgacctttggcctgaccatcatggccacctggtactggtgcaccgaccaggtcatcgtgcagcgatcactgtcagcccgggacctgaaccatgccaaggcgggctccatcctggccagctacctcaagatgctccccatgggcctgatcatcatgccgggcatgatcagccgcgcattgttcccaggtgctcatgtctatgaggagagacaccaagtgtccgtctctcgaacagatgatgtgggctgcgtggtgccgtccgagtgcctgcgggcctgcggggccgaggtcggctgctccaacatcgcctaccccaagctggtcatggaactgatgcccatcggtctgcgggggctgatgatcgcagtgatgctggcggcgctcatgtcgtcgctgacctccatcttcaacagcagcagcaccctcttcactatggacatctggaggcggctgcgtccccgctccggcgagcgggagctcctgctggtgggacggctggtcatagtggcactcatcggcgtgagtgtggcctggatccccgtcctgcaggactccaacagcgggcaactcttcatctacatgcagtcagtgaccagctccctggccccaccagtgactgcagtctttgtcctgggcgtcttctggcgacgtgccaacgagcagggggccttctggggcctgatagcagggctggtggtgggggccacgaggctggtcctggaattcctgaacccagccccaccgtgcggagagccagacacgcggccagccgtcctggggagcatccactacctgcacttcgctgtcgccctctttgcactcagtggtgctgttgtggtggctggaagcctgctgaccccacccccacagagtgtccagattgagaaccttacctggtggaccctggctcaggatgtgcccttgggaactaaagcaggtgatggccaaacaccccagaaacacgccttctgggcccgtgtctgtggcttcaatgccatcctcctcatgtgtgtcaacatattcttttatgcctacttcgcctgacactgccatcctggacagaaaggcaggagctctgagtcctcaggtccacccatttccctcatggggatcccgaggccccaagaggggcagattcccctcacagctgcacagcagctcggtgcccaagaactggccaagccagcaaagcgggagccctgaaaaattaggggggaaatgggagaaaataatgtgacatttcaaaaacagcaccaaagcagtcagcattggaaggaaaattagatttctgacggacatcctga

SEQ ID NO: 184438 - DNA, 1984 bp, Homo sapiens
  Payload ID: 16316
  Gene Symbol: SLC5A10
  Gene Name: solute carrier family 5 (sodium/sugar cotransporter), member 10
  Uniprot ID: A0PJK1
  ENST ID: ENST00000417251
  CDS Start-End: 42-1724
agtccctcgggctcatacctagtgcctgcggcaggacagccatggccgccaactccaccagcgacctccacactcccgggacgcagctgagcgtggctgacatcatcgtcatcactgtgtattttgctctgaatgtggccgtgggcatatggtcctcttgtcgggccagtaggaacacggtgaatggctacttcctggcaggccgggacatgacgtggtggccgattggagcctccctcttcgccagcagcgagggctctggcctcttcattggactggcgggctcaggcgcggcaggaggtctggccgtggcaggcttcgagtggaatgccacgtacgtgctgctggcactggcatgggtgttcgtgcccatctacatctcctcagagatcgtcaccttacctgagtacattcagaagcgctacgggggccagcggatccgcatgtacctgtctgtcctgtccctgctactgtctgtcttcaccaagatatcgctggacctgtacgcgggggctctgtttgtgcacatctgcctgggctggaacttctacctctccaccatcctcacgctcggcatcacagccctgtacaccatcgcagggggcctggctgctgtaatctacacggacgccctgcagacgctcatcatggtggtgggggctgtcatcctgacaatcaaagcttttgaccagatcggtggttacgggcagctggaggcagcctacgcccaggccattccctccaggaccattgccaacaccacctgccacctgccacgtacagacgccatgcacatgtttcgagacccccacacaggggacctgccgtggaccgggatgacctttggcctgaccatcatggccacctggtactggtgcaccgaccaggtcatcgtgcagcgatcactgtcagcccgggacctgaaccatgccaaggcgggctccatcctggccagctacctcaagatgctccccatgggcctgatcatcatgccgggcatgatcagccgcgcattgttcccaggtctgcgggggctgatgatcgcagtgatgctggcggcgctcatgtcgtcgctgacctccatcttcaacagcagcagcaccctcttcactatggacatctggaggcggctgcgtccccgctccggcgagcgggagctcctgctggtgggacggctggtcatagtggcactcatcggcgtgagtgtggcctggatccccgtcctgcaggactccaacagcgggcaactcttcatctacatgcagtcagtgaccagctccctggccccaccagtgactgcagtctttgtcctgggcgtcttctggcgacgtgccaacgagcagggggccttctggggcctgatagcagggctggtggtgggggccacgaggctggtcctggaattcctgaacccagccccaccgtgcggagagccagacacgcggccagccgtcctggggagcatccactacctgcacttcgctgtcgccctctttgcactcagtggtgctgttgtggtggctggaagcctgctgaccccacccccacagagtgtccagattgagaaccttacctggtggaccctggctcaggatgtgcccttgggaactaaagcaggtgatggccaaacaccccagaaacacgccttctgggcccgtgtctgtggcttcaatgccatcctcctcatgtgtgtcaacatattcttttatgcctacttcgcctgacactgccatcctggacagaaaggcaggagctctgagtcctcaggtccacccatttccctcatggggatcccgaggccccaagaggggcagattcccctcacagctgcacagcagctcggtgcccaagaactggccaagccagcaaagcgggagccctgaaaaattaggggggaaatgggagaaaataatgtgacatttcaaaaacagcaccaaagcagtcagcattggaaggaaaattagatttctgacggacatcctga

SEQ ID NO: 184439 - DNA, 3272 bp, Homo sapiens
  Payload ID: 16317
  Gene Symbol: SLC5A9
  Gene Name: solute carrier family 5 (sodium/sugar cotransporter), member 9
  Uniprot ID: Q2M3M2
  ENST ID: ENST00000236495
  CDS Start-End: 51-2171
gaagccaggagcgcctcaaagtccagcctgctgttgaccaacactaacagatgagcaaggagctggcagcaatggggcctggagcttcaggggacggggtcaggactgagacagctccacacatagcactggactccagagttggtctgcacgcctacgacatcagcgtggtggtcatctactttgtcttcgtcattgctgtggggatctggtcgtccatccgtgcaagtcgagggaccattggcggctatttcctggccgggaggtccatgagctggtggccaattggagcatctctgatgtccagcaatgtgggcagtggcttgttcatcggcctggctgggacaggggctgccggaggccttgccgtaggtggcttcgagtggaacatgaggaaatcaaggtctggaggagacagagggatccatccaaggtcacacgggaggactggggtcaggtcccaggcaacctggctgctcctggcccttggctgggtcttcgtccctgtgtacatcgcagcaggtgtggtcacaatgccgcagtatctgaagaagcgatttgggggccagaggatccaggtgtacatgtctgtcctgtctctcatcctctacatcttcaccaagatctcgactgacatcttctctggagccctcttcatccagatggcattgggctggaacctgtacctctccacagggatcctgctggtggtgactgccgtctacaccattgcaggtggcctcatggccgtgatctacacagatgctctgcagacggtgatcatggtagggggagccctggtcctcatgtttctgggctttcaggacgtgggctggtacccaggcctggagcagcggtacaggcaggccatccctaatgtcacagtccccaacaccacctgtcacctcccacggcccgatgctttccacattcttcgggaccctgtgagcggggacatcccttggccaggtctcattttcgggctcacagtgctggccacctggtgttggtgcacagaccaggtcattgtgcagcggtctctctcggccaagagtctgtctcatgccaagggaggctccgtgctggggggctacctgaagatcctccccatgttcttcatcgtcatgcctggcatgatcagccgggccctgttcccagacgaggtgggctgcgtggaccctgatgtctgccaaagaatctgtggggcccgagtgggatgttccaacattgcctaccctaagttggtcatggccctcatgcctgttggtctgcgggggctgatgattgccgtgatcatggccgctctcatgagctcactcacctccatcttcaacagcagcagcaccctgttcaccattgatgtgtggcagcgcttccgcaggaagtcaacagagcaggagctgatggtggtgggcagagtgtttgtggtgttcctggttgtcatcagcatcctctggatccccatcatccaaagctccaacagtgggcagctcttcgactacatccaggctgtcaccagttacctggccccacccatcaccgctctcttcctgctggccatcttctgcaagagggtcacagagcccggagctttctggggcctcgtgtttggcctgggagtggggcttctgcgtatgatcctggagttctcatacccagcgccagcctgtggggaggtggaccggaggccagcagtgctgaaggacttccactacctgtactttgcaatcctcctctgcgggctcactgccatcgtcattgtcattgtcagcctctgtacaactcccatccctgaggaacagctcacacgcctcacatggtggactcggaactgccccctctctgagctggagaaggaggcccacgagagcacaccggagatatccgagaggccagccggggagtgccctgcaggaggtggagcggcagagaactcgagcctgggccaggagcagcctgaagccccaagcaggtcctggggaaagttgctctggagctggttctgtgggctctctggaacaccggagcaggccctgagcccagcagagaaggctgcgctagaacagaagctgacaagcattgaggaggagccactctggagacatgtctgcaacatcaatgctgtccttttgctggccatcaacatcttcctctggggctattttgcgtgattccacagacctggcttcagtgtagacagattaaacaaagcccaagcctgtcagccacagaaacaggctctcctcttactttgctgtctaaactggagatcacagaagtcaagactgcaagctcccctgaagagaatccaactcaacctgcacacttgacaagtggagaaacagaagcccagagagagcactgggtttgttcaggaccacccagaaggtgtcacacggggtttccccactctttctgatatattgccttacagacctacctcaaacacactgtttccaccctcttcttgaatgtattcagtagcctttactgaatgtgtgtcttgagagtagaaaaatggaggatacaagaaaaggagcaggaagaaatttgcaaaaatccaagagcacctttgctcccccttatcctccttcctcttcccctttctagttcccctacctctctatctttctattctcaccaataatctctttgttgcatgaatttacccaggagagtcctatatttccattggtggctccacagtggtggctgtcagacccgaaggggtggggagccaagggtggactttaagcatggtgacagatggtattttgggcagaaagctcttagacaatggactatccaaagcactatttaaattctgcctcttcctactctctaacccaaatatgcacaaactctctatggccttgagaagcagttggagagacatgacttgttaaaacctcaaggaatcaagacatgttactctgtatttaagggtaagccccacagcgggcagcacaaacagcctgggagccactgtgcctgtgcttctctgtccttctccctttgcttgccatgaatccgcataccttggaatacactgtgaccccagttaagtgtcccttcgccaggaagctgccgcaacgtccagacctgggtcaagttcccactcctgctcccatagccttgacctgcttctgtcacagcactgatcacactgagatggaagactccagggggcaaggaccaagggccatatcccaagtgactttgtacccagaaaataacagctgttcaataaatgtgtattgagttaattagtt

SEQ ID NO: 184440 - DNA, 1046 bp, Homo sapiens
  Payload ID: 16317
  Gene Symbol: SLC5A9
  Gene Name: solute carrier family 5 (sodium/sugar cotransporter), member 9
  ENST ID: ENST00000441260
  CDS Start-End: 1-520
gagcaaggagctggcagcaatggggcctggagcttcaggggacggggtcaggactgagacagctccacacatagcactggactccagagttggtctgcacgcctacgacatcagcgtggtggtcatctactttgtcttcgtcattgctgtggggatctggtcgtccatccgtgcaagtcgagggaccattggcggctatttcctggccgggaggtccatgagctggtggccaattggagcatctctgatgtccagcaatgtgggcagtggcttgttcatcggcctggctgggacaggggctgccggaggccttgccgtaggtggcttcgagtggaacgcaacctggctgctcctggcccttggctgggtcttcgtccctgtgtacatcgcagcaggtgtggtcacaatgccgcagtatctgaagaagcgatttgggggccagaggatccaggtgtacatgtctgtcctgtctctcatcctctacatcttcaccaagatctcgggatcctgctggtggtgactgccgtctacaccattgcaggtggcctcatggccgtgatctacacagatgctctgcagacggtgatcatggtagggggagccctggtcctcatgtttctgggtcattgtgcagcggtctctctcggccaagagtctgtctcatgccaagggaggctccgtgctggggggctacctgaagatcctccccatgttcttcatcgtcatgcctggcatgatcagccgggccctgttcccagacgaggtgggctgcgtggaccctgatgtctgccaaagaatctgtggggcccgagtgggatgttccaacattgcctaccctaagttggtcatggccctcatgcctgttggtctgcgggggctgatgattgccgtgatcatggccgctctcatgagctcactcacctccatcttcaacagcagcagcaccctgttcaccattgatgtgtggcagcgcttccgcaggaagtcaacagagcaggagctgatggtggtgggcagagtgtttgtggtgttcctggttgtcatca

SEQ ID NO: 184441 - DNA, 3195 bp, Homo sapiens
  Payload ID: 16317
  Gene Symbol: SLC5A9
  Gene Name: solute carrier family 5 (sodium/sugar cotransporter), member 9
  Uniprot ID: Q2M3M2
  ENST ID: ENST00000438567
  CDS Start-End: 53-2098
atgaagccaggagcgcctcaaagtccagcctgctgttgaccaacactaacagatgagcaaggagctggcagcaatggggcctggagcttcaggggacggggtcaggactgagacagctccacacatagcactggactccagagttggtctgcacgcctacgacatcagcgtggtggtcatctactttgtcttcgtcattgctgtggggatctggtcgtccatccgtgcaagtcgagggaccattggcggctatttcctggccgggaggtccatgagctggtggccaattggagcatctctgatgtccagcaatgtgggcagtggcttgttcatcggcctggctgggacaggggctgccggaggccttgccgtaggtggcttcgagtggaacgcaacctggctgctcctggcccttggctgggtcttcgtccctgtgtacatcgcagcaggtgtggtcacaatgccgcagtatctgaagaagcgatttgggggccagaggatccaggtgtacatgtctgtcctgtctctcatcctctacatcttcaccaagatctcgactgacatcttctctggagccctcttcatccagatggcattgggctggaacctgtacctctccacagggatcctgctggtggtgactgccgtctacaccattgcaggtggcctcatggccgtgatctacacagatgctctgcagacggtgatcatggtagggggagccctggtcctcatgtttctgggctttcaggacgtgggctggtacccaggcctggagcagcggtacaggcaggccatccctaatgtcacagtccccaacaccacctgtcacctcccacggcccgatgctttccacattcttcgggaccctgtgagcggggacatcccttggccaggtctcattttcgggctcacagtgctggccacctggtgttggtgcacagaccaggtcattgtgcagcggtctctctcggccaagagtctgtctcatgccaagggaggctccgtgctggggggctacctgaagatcctccccatgttcttcatcgtcatgcctggcatgatcagccgggccctgttcccagacgaggtgggctgcgtggaccctgatgtctgccaaagaatctgtggggcccgagtgggatgttccaacattgcctaccctaagttggtcatggccctcatgcctgttggtctgcgggggctgatgattgccgtgatcatggccgctctcatgagctcactcacctccatcttcaacagcagcagcaccctgttcaccattgatgtgtggcagcgcttccgcaggaagtcaacagagcaggagctgatggtggtgggcagagtgtttgtggtgttcctggttgtcatcagcatcctctggatccccatcatccaaagctccaacagtgggcagctcttcgactacatccaggctgtcaccagttacctggccccacccatcaccgctctcttcctgctggccatcttctgcaagagggtcacagagcccggagctttctggggcctcgtgtttggcctgggagtggggcttctgcgtatgatcctggagttctcatacccagcgccagcctgtggggaggtggaccggaggccagcagtgctgaaggacttccactacctgtactttgcaatcctcctctgcgggctcactgccatcgtcattgtcattgtcagcctctgtacaactcccatccctgaggaacagctcacacgcctcacatggtggactcggaactgccccctctctgagctggagaaggaggcccacgagagcacaccggagatatccgagaggccagccggggagtgccctgcaggaggtggagcggcagagaactcgagcctgggccaggagcagcctgaagccccaagcaggtcctggggaaagttgctctggagctggttctgtgggctctctggaacaccggagcaggccctgagcccagcagagaaggctgcgctagaacagaagctgacaagcattgaggaggagccactctggagacatgtctgcaacatcaatgctgtccttttgctggccatcaacatcttcctctggggctattttgcgtgattccacagacctggcttcagtgtagacagattaaacaaagcccaagcctgtcagccacagaaacaggctctcctcttactttgctgtctaaactggagatcacagaagtcaagactgcaagctcccctgaagagaatccaactcaacctgcacacttgacaagtggagaaacagaagcccagagagagcactgggtttgttcaggaccacccagaaggtgtcacacggggtttccccactctttctgatatattgccttacagacctacctcaaacacactgtttccaccctcttcttgaatgtattcagtagcctttactgaatgtgtgtcttgagagtagaaaaatggaggatacaagaaaaggagcaggaagaaatttgcaaaaatccaagagcacctttgctcccccttatcctccttcctcttcccctttctagttcccctacctctctatctttctattctcaccaataatctctttgttgcatgaatttacccaggagagtcctatatttccattggtggctccacagtggtggctgtcagacccgaaggggtggggagccaagggtggactttaagcatggtgacagatggtattttgggcagaaagctcttagacaatggactatccaaagcactatttaaattctgcctcttcctactctctaacccaaatatgcacaaactctctatggccttgagaagcagttggagagacatgacttgttaaaacctcaaggaatcaagacatgttactctgtatttaagggtaagccccacagcgggcagcacaaacagcctgggagccactgtgcctgtgcttctctgtccttctccctttgcttgccatgaatccgcataccttggaatacactgtgaccccagttaagtgtcccttcgccaggaagctgccgcaacgtccagacctgggtcaagttcccactcctgctcccatagccttgacctgcttctgtcacagcactgatcacactgagatggaagactccagggggcaaggaccaagggccatatcccaagtgactttgtacccagaaaataacagctgttcaataaatgtgtattgagttaatt

SEQ ID NO: 184442 - DNA, 1950 bp, Homo sapiens
  Payload ID: 16317
  Gene Symbol: SLC5A9
  Gene Name: solute carrier family 5 (sodium/sugar cotransporter), member 9
  ENST ID: ENST00000425816
  CDS Start-End: 53-904
atgaagccaggagcgcctcaaagtccagcctgctgttgaccaacactaacagatgagcaaggagctggcagcaatggggcctggagcttcaggggacggggtcaggactgagacagctccacacatagcactggactccagagttggtctgcacgcctacgacatcagcgtggtggtcatctactttgtcttcgtcattgctgtggggatctggtcgtccatccgtgcaagtcgagggaccattggcggctatttcctggccgggaggtccatgagctggtggccaattggagcatctctgatgtccagcaatgtgggcagtggcttgttcatcggcctggctgggacaggggctgccggaggccttgccgtaggtggcttcgagtggaacgcaacctggctgctcctggcccttggctgggtcttcgtccctgtgtacatcgcagcaggtgtggtcacaatgccgcagtatctgaagaagcgatttgggggccagaggatccaggtgtacatgtctgtcctgtctctcatcctctacatcttcaccaagatctcgactgacatcttctctggagccctcttcatccagatggcattgggctggaacctgtacctctccacagggatcctgctggtggtgactgccgtctacaccattgcaggtggcctcatggccgtgatctacacagatgctctgcagacggtgatcatggtagggggagccctggtcctcatgtttctgggtcattgtgcagcggtctctctcggccaagagtctgtctcatgccaagggaggctccgtgctggggggctacctgaagatcctccccatgttcttcatcgtcatgcctggcatgatcagccgggccctgttcccagacgaggtgggctgcgtggaccctgatgtctgccaaagaatctgtggggcccgagtgggatgttccaacattgcctaccctaagttggtcatggccctcatgcctgttggtctgcgggggctgatgattgccgtgatcatggccgctctcatgagctcactcacctccatcttcaacagcagcagcaccctgttcaccattgatgtgtggcagcgcttccgcaggaagtcaacagagcaggagctgatggtggtgggcagagtgtttgtggtgttcctggttgtcatcagcatcctctggatccccatcatccaaagctccaacagtgggcagctcttcgactacatccaggctgtcaccagttacctggccccacccatcaccgctctcttcctgctggccatcttctgcaagagggtcacagagcccggagctttctggggcctcgtgtttggcctgggagtggggcttctgcgtatgatcctggagttctcatacccagcgccagcctgtggggaggtggaccggaggccagcagtgctgaaggacttccactacctgtactttgcaatcctcctctgcgggctcactgccatcgtcattgtcattgtcagcctctgtacaactcccatccctgaggaacagctcacacgcctcacatggtggactcggaactgccccctctctgagctggagaaggaggcccacgagagcacaccggagatatccgagaggccagccggggagtgccctgcaggaggtggagcggcagagaactcgagcctgggccaggagcagcctgaagccccaagcaggtcctggggaaagttgctctggagctggttctgtgggctctctggaacaccggagcaggccctgagcccagcagagaaggctgcgctagaacagaagctgacaagcattgaggaggagccactctggagacatgtctgcaacatcaatgctgtccttttgctggccatcaacatcttcctctggggctattttgcgtgattccacagacctggcttcagtgtagacagattaaacaaagcccaagcctgtcagccac

SEQ ID NO: 184443 - DNA, 968 bp, Homo sapiens
  Payload ID: 16317
  Gene Symbol: SLC5A9
  Gene Name: solute carrier family 5 (sodium/sugar cotransporter), member 9
  ENST ID: ENST00000532322
  CDS Start-End: 1-229
atacccagcgccagcctgtggggaggtggaccggaggccagcagtgctgaaggacttccactacctgtactttgcaatcctcctctgcgggctcactgccatcgtcattgtcattgtcagcctctgtacaactcccatccctgaggaacaggtgcccattatttttggcttcacttttacaacatcctccaggctggacccctttcaattcactccaagagaactttgaagatcctggcacttacagtctatctgctgcttaaagtctgcagtgactctccattgcctacagggtttttgttctttaagctacgactcctcagcctgacctttgaagacttgttctcaagtgcctgcctccctgtccagcctcatttgcctcagtctgtaaaatccatgaggacagggcccaggtgtgtttcagctcacacgcctcacatggtggactcggaactgccccctctctgagctggagaaggaggcccacgagagcacaccggagatatccgagaggccagccggggagtgccctgcaggaggtggagcggcagagaactcgagcctgggccaggagcagcctgaagccccaagcaggtcctggggaaagttgctctggagctggttctgtgggctctctggaacaccggagcaggccctgagcccagcagagaaggctgcgctagaacagaagctgacaagcattgaggaggagccactctggagacatgtctgcaacatcaatgctgtccttttgctggccatcaacatcttcctctggggctattttgcgtgattccacagacctggcttcagtgtagacagattaaacaaagcccaagcctgtcagccacagaaacaggctctcctcttactttgctgtctaaactggagatcacagaagtcaagactgcaagctcccctgaagagaatccaactcaacctgcacacttgacaagtggagaaacaga

SEQ ID NO: 184444 - DNA, 2219 bp, Homo sapiens
  Payload ID: 16317
  Gene Symbol: SLC5A9
  Gene Name: solute carrier family 5 (sodium/sugar cotransporter), member 9
  Uniprot ID: Q2M3M2
  ENST ID: ENST00000533824
  CDS Start-End: 53-2161
atgaagccaggagcgcctcaaagtccagcctgctgttgaccaacactaacagatgagcaaggagctggcagcaatggggcctggagcttcaggggacggggtcaggactgagacagctccacacatagcactggactccagagttggtctgcacgcctacgacatcagcgtggtggtcatctactttgtcttcgtcattgctgtggggatctggtcgtccatccgtgcaagtcgagggaccattggcggctatttcctggccgggaggtccatgagctggtggccaattggagcatctctgatgtccagcaatgtgggcagtggcttgttcatcggcctggctgggacaggggctgccggaggccttgccgtaggtggcttcgagtggaacatgaggaaatcaaggtctggaggagacagagggatccatccaaggtcacacgggaggactggggcaacctggctgctcctggcccttggctgggtcttcgtccctgtgtacatcgcagcaggtgtggtcacaatgccgcagtatctgaagaagcgatttgggggccagaggatccaggtgtacatgtctgtcctgtctctcatcctctacatcttcaccaagatctcgactgacatcttctctggagccctcttcatccagatggcattgggctggaacctgtacctctccacagggatcctgctggtggtgactgccgtctacaccattgcaggtggcctcatggccgtgatctacacagatgctctgcagacggtgatcatggtagggggagccctggtcctcatgtttctgggctttcaggacgtgggctggtacccaggcctggagcagcggtacaggcaggccatccctaatgtcacagtccccaacaccacctgtcacctcccacggcccgatgctttccacattcttcgggaccctgtgagcggggacatcccttggccaggtctcattttcgggctcacagtgctggccacctggtgttggtgcacagaccaggtcattgtgcagcggtctctctcggccaagagtctgtctcatgccaagggaggctccgtgctggggggctacctgaagatcctccccatgttcttcatcgtcatgcctggcatgatcagccgggccctgttcccagacgaggtgggctgcgtggaccctgatgtctgccaaagaatctgtggggcccgagtgggatgttccaacattgcctaccctaagttggtcatggccctcatgcctgttggtctgcgggggctgatgattgccgtgatcatggccgctctcatgagctcactcacctccatcttcaacagcagcagcaccctgttcaccattgatgtgtggcagcgcttccgcaggaagtcaacagagcaggagctgatggtggtgggcagagtgtttgtggtgttcctggttgtcatcagcatcctctggatccccatcatccaaagctccaacagtgggcagctcttcgactacatccaggctgtcaccagttacctggccccacccatcaccgctctcttcctgctggccatcttctgcaagagggtcacagagcccggagctttctggggcctcgtgtttggcctgggagtggggcttctgcgtatgatcctggagttctcatacccagcgccagcctgtggggaggtggaccggaggccagcagtgctgaaggacttccactacctgtactttgcaatcctcctctgcgggctcactgccatcgtcattgtcattgtcagcctctgtacaactcccatccctgaggaacagctcacacgcctcacatggtggactcggaactgccccctctctgagctggagaaggaggcccacgagagcacaccggagatatccgagaggccagccggggagtgccctgcaggaggtggagcggcagagaactcgagcctgggccaggagcagcctgaagccccaagcaggtcctggggaaagttgctctggagctggttctgtgggctctctggaacaccggagcaggccctgagcccagcagagaaggctgcgctagaacagaagctgacaagcattgaggaggagccactctggagacatgtctgcaacatcaatgctgtccttttgctggccatcaacatcttcctctggggctattttgcgtgattccacagacctggcttcagtgtagacagattaaacaaagcccaagcctgtcagccac

SEQ ID NO: 184445 - DNA, 1137 bp, Homo sapiens
  Payload ID: 16318
  Gene Symbol: SLC50A1
  Gene Name: solute carrier family 50 (sugar efflux transporter), member 1
  Uniprot ID: Q9BRV3
  ENST ID: ENST00000303343
  CDS Start-End: 63-566
gtaggtcccggcaaccgcaggctcgcggcgggcgctgggcgcgggatccgactctagtcgtaatggaggcgggcggctttctggactcgctcatttacggagcatgcgtggtcttcacccttggcatgttctccgccggcctctcggacctcaggcacatgcgaatgacccggagtgtggacaacgtccagttcctgccctttctcaccacggaagtcaacaacctgggctggctgagttatggggctttgaagggagacgggatcctcatcgtcgtcaacacagtgggtgctgcgcttcagaccctgtatatcttggcatatctgcattactgccctcggaaggctaaggtgattcaaactaaatcaacccaatgtctctcctacccactcaccattgctacccttctcacctctgcctcctggtgcctctatgggtttcgactcagagatccctatatcatggtgtccaactttccaggaatcgtcaccagctttatccgcttctggcttttctggaagtacccccaggagcaagacaggaactactggctcctgcaaacctgaggctgctcatctgaccactgggcaccttagtgccaacctgaaccaaagagacctccttgtttcagctgggcctgctgtccagcttcccaggtgcagtgggttgtgggaacaagagatgactttgaggataaaaggaccaaagaaaaagctttacttagatgattgattggggcctaggagatgaaatcactttttattttttagagatttttttttttaattttggaggttggggtgcaatctttagaatatgccttaaaaggccgggcgcggtggctcacgcctgtaatcccagcactttgggaggccaaggtgggcggatcgcctgaggtcaggagttcaagaccaacctgactaacatggtgaaaccccatctctactaaaaatacaaaattagccaggcatgatggcacatgcctgtaatcccagatacttgggaggctgaggcaggagaattgcttgaacccaggaggtggaggttgcagtgagctgagatcgtgccattgtgatatgaatatgccttatatgctgatatgaatatgccttaaaataaagtgttccccacccctgc

SEQ ID NO: 184446 - DNA, 1166 bp, Homo sapiens
  Payload ID: 16318
  Gene Symbol: SLC50A1
  Gene Name: solute carrier family 50 (sugar efflux transporter), member 1
  Uniprot ID: Q9BRV3
  ENST ID: ENST00000368401
  CDS Start-End: 96-596
cggcaaccgcaggctcgcggcgggcgctgggcgcgggatccgactctagtcgtaatggaggcgggcggctttctggactcgctcatttacggagcatgcgtggtcttcacccttggcatgttctccgccggcctctcggacctcaggcacatgcgaatgacccggagtgtggacaacgtccagttcctgccctttctcaccacggaagtcaacgtgttgtgctcctacagactgcaaccctgctaggggtccttctcctgggttatggctacttttggctcctggtacccaaccctgaggcccggcttcagcagttgggcctcttctgcagtgtcttcaccatcagcatgtacctctcaccactggctgacttggctaaggtgattcaaactaaatcaacccaatgtctctcctacccactcaccattgctacccttctcacctctgcctcctggtgcctctatgggtttcgactcagagatccctatatcatggtgtccaactttccaggaatcgtcaccagctttatccgcttctggcttttctggaagtacccccaggagcaagacaggaactactggctcctgcaaacctgaggctgctcatctgaccactgggcaccttagtgccaacctgaaccaaagagacctccttgtttcagctgggcctgctgtccagcttcccaggtgcagtgggttgtgggaacaagagatgactttgaggataaaaggaccaaagaaaaagctttacttagatgattgattggggcctaggagatgaaatcactttttattttttagagatttttttttttaattttggaggttggggtgcaatctttagaatatgccttaaaaggccgggcgcggtggctcacgcctgtaatcccagcactttgggaggccaaggtgggcggatcgcctgaggtcaggagttcaagaccaacctgactaacatggtgaaaccccatctctactaaaaatacaaaattagccaggcatgatggcacatgcctgtaatcccagatacttgggaggctgaggcaggagaattgcttgaacccaggaggtggaggttgcagtgagctgagatcgtgccattgtgatatgaatatgccttatatgctgatatgaatatgccttaaaataaagtgttccccacccctg

SEQ ID NO: 184447 - DNA, 1300 bp, Homo sapiens
  Payload ID: 16318
  Gene Symbol: SLC50A1
  Gene Name: solute carrier family 50 (sugar efflux transporter), member 1
  Uniprot ID: Q9BRV3
  ENST ID: ENST00000368404
  CDS Start-End: 63-728
gtaggtcccggcaaccgcaggctcgcggcgggcgctgggcgcgggatccgactctagtcgtaatggaggcgggcggctttctggactcgctcatttacggagcatgcgtggtcttcacccttggcatgttctccgccggcctctcggacctcaggcacatgcgaatgacccggagtgtggacaacgtccagttcctgccctttctcaccacggaagtcaacaacctgggctggctgagttatggggctttgaagggagacgggatcctcatcgtcgtcaacacagtgggtgctgcgcttcagaccctgtatatcttggcatatctgcattactgccctcggaagcgtgttgtgctcctacagactgcaaccctgctaggggtccttctcctgggttatggctacttttggctcctggtacccaaccctgaggcccggcttcagcagttgggcctcttctgcagtgtcttcaccatcagcatgtacctctcaccactggctgacttggctaaggtgattcaaactaaatcaacccaatgtctctcctacccactcaccattgctacccttctcacctctgcctcctggtgcctctatgggtttcgactcagagatccctatatcatggtgtccaactttccaggaatcgtcaccagctttatccgcttctggcttttctggaagtacccccaggagcaagacaggaactactggctcctgcaaacctgaggctgctcatctgaccactgggcaccttagtgccaacctgaaccaaagagacctccttgtttcagctgggcctgctgtccagcttcccaggtgcagtgggttgtgggaacaagagatgactttgaggataaaaggaccaaagaaaaagctttacttagatgattgattggggcctaggagatgaaatcactttttattttttagagatttttttttttaattttggaggttggggtgcaatctttagaatatgccttaaaaggccgggcgcggtggctcacgcctgtaatcccagcactttgggaggccaaggtgggcggatcgcctgaggtcaggagttcaagaccaacctgactaacatggtgaaaccccatctctactaaaaatacaaaattagccaggcatgatggcacatgcctgtaatcccagatacttgggaggctgaggcaggagaattgcttgaacccaggaggtggaggttgcagtgagctgagatcgtgccattgtgatatgaatatgccttatatgctgatatgaatatgccttaaaataaagtgttccccacccctgcc

SEQ ID NO: 184448 - DNA, 886 bp, Homo sapiens
  Payload ID: 16318
  Gene Symbol: SLC50A1
  Gene Name: solute carrier family 50 (sugar efflux transporter), member 1
  ENST ID: ENST00000484157
  CDS Start-End: 329-799
cgagagggagggcaaaagaggaaggcttggtgattcctggtaatgtgttattttgagaaaaagcttcggcagcacactccagaaaaaaacttcccaaaccctgggcaactgaggttctgatgtggagctctggatggaaagcgtgctgaagtcttgttaaactagcaagcttttgtttggaggtccaccgccgaaggcgcacaggcctgtgggaacacgagcgttgagactgggggcgtctagatgatccaaggggtaggcagagtgtgagcagcggcaggtatcggggacacacccgcggagccctaggaaggggactgaccgggacatggaagagctcggacctcaggcacatgcgaatgacccggagtgtggacaacgtccagttcctgccctttctcaccacggaagtcaacgtgttgtgctcctacagactgcaaccctgctaggggtccttctcctgggttatggctacttttggctcctggtacccaaccctgaggcccggcttcagcagttgggcctcttctgcagtgtcttcaccatcagcatgtacctctcaccactggctgacttggctaaggtgattcaaactaaatcaacccaatgtctctcctacccactcaccattgctacccttctcacctctgcctcctggtgcctctatgggtttcgactcagagatccctatatcatggtgtccaactttccaggaatcgtcaccagctttatccgcttctggcttttctggaagtacccccaggagcaagacaggaactactggctcctgcaaacctgaggctgctcatctgaccactgggcaccttagtgccaacctgaaccaaagagacctccttgtttcagctgggcctgctgtccagcttcc

SEQ ID NO: 184449 - DNA, 1245 bp, Homo sapiens
  Payload ID: 16318
  Gene Symbol: SLC50A1
  Gene Name: solute carrier family 50 (sugar efflux transporter), member 1
  ENST ID: ENST00000622581
  CDS Start-End: 142-669
cgcggggcggggctccagagccgcaggtctgggctgcagtaggtcccggcaaccgcaggctcgcggcgggcgctgggcgcgggatccgactctagtcgtaatggaggcgggcggctttctggactcgctcatttacggagcatgcgtggtcttcacccttgcaacctgggctggctgagttatggggctttgaagggagacgggatcctcatcgtcgtcaacacagtgggtgctgcgcttcagaccctgtatatcttggcatatctgcattactgccctcggaagcgtgttgtgctcctacagactgcaaccctgctaggggtccttctcctgggttatggctacttttggctcctggtacccaaccctgaggcccggcttcagcagttgggcctcttctgcagtgtcttcaccatcagcatgtacctctcaccactggctgacttggctaaggtgattcaaactaaatcaacccaatgtctctcctacccactcaccattgctacccttctcacctctgcctcctggtgcctctatgggtttcgactcagagatccctatatcatggtgtccaactttccaggaatcgtcaccagctttatccgcttctggcttttctggaagtacccccaggagcaagacaggaactactggctcctgcaaacctgaggctgctcatctgaccactgggcaccttagtgccaacctgaaccaaagagacctccttgtttcagctgggcctgctgtccagcttcccaggtgcagtgggttgtgggaacaagagatgactttgaggataaaaggaccaaagaaaaagctttacttagatgattgattggggcctaggagatgaaatcactttttattttttagagatttttttttttaattttggaggttggggtgcaatctttagaatatgccttaaaaggccgggcgcggtggctcacgcctgtaatcccagcactttgggaggccaaggtgggcggatcgcctgaggtcaggagttcaagaccaacctgactaacatggtgaaaccccatctctactaaaaatacaaaattagccaggcatgatggcacatgcctgtaatcccagatacttgggaggctgaggcaggagaattgcttgaacccaggaggtggaggttgcagtgagctgagatcgtgccattgtgatatgaatatgccttatatgctgatatgaatatgccttaaaataaagtgttccccacccctgcccacg

SEQ ID NO: 184450 - DNA, 1463 bp, Homo sapiens
  Payload ID: 16319
  Gene Symbol: SLC51A
  Gene Name: solute carrier family 51, alpha subunit
  Uniprot ID: Q86UW1
  ENST ID: ENST00000296327
  CDS Start-End: 210-1232
agaggatcaaattcctccggggtgaactctgagatagaaagttggcccgggaagctcaaggagggagagcggcagaggggaagactctgcaattctgcttgccccccaccccggcccaggcaagccaccctgcccccggcccccacctgcccgccccgcctgcccttcctcaccccggtgcctgcgggattgctggagagaacgcggcgatggagccgggcaggacccagataaagcttgaccccaggtacacagcagatcttctggaggtgctgaagaccaattacggcatcccctccgcctgcttctctcagcctcccacagcagcccaactcctgagagccctgggccctgtggaacttgccctcactagcatcctgaccttgctggcgctgggctccattgccatcttcctggaggatgccgtctacctgtacaagaacaccctttgccccatcaagaggcggactctgctctggaagagctcggcacccacggtggtgtctgtgctgtgctgctttggtctctggatccctcgttccctggtgctggtggaaatgaccatcacctcgttttatgccgtgtgcttttacctgctgatgctggtcatggtggaaggctttggggggaaggaggcagtgctgaggacgctgagggacaccccgatgatggtccacacaggcccctgctgctgctgctgcccctgctgtccacggctgctgctcaccaggaagaagcttcagctgctgatgttgggccctttccaatacgccttcttgaagataacgctgaccctggtgggcctgtttctcgtccccgacggcatctatgacccagcagacatttctgaggggagcacagctctatggatcaacactttccttggcgtgtccacactgctggctctctggaccctgggcatcatttcccgtcaagccaggctacacctgggtgagcagaacatgggagccaaatttgctctgttccaggttctcctcatcctgactgccctacagccctccatcttctcagtcttggccaacggtgggcagattgcttgttcgcctccctattcctctaaaaccaggtctcaagtgatgaattgccacctcctcatactggagacttttctaatgactgtgctgacacgaatgtactaccgaaggaaagaccacaaggttgggtatgaaactttctcttctccagacctggacttgaacctcaaagcctaaggtggatggcttggacaatgaaaggatgctgtactcattagaatacaagattcctttactgtccctcaaccttgaccaaatgggaagcattcccccttgtcaacacaagctggcagatacatttgactctacagatgaaggtgaacaatgttagaataaaattgctttggatcttgcctggaaggtgttttaagttttgtaataaacaagatgatgtctgaaaatgtgtaa

SEQ ID NO: 184451 - DNA, 568 bp, Homo sapiens
  Payload ID: 16319
  Gene Symbol: SLC51A
  Gene Name: solute carrier family 51, alpha subunit
  ENST ID: ENST00000442203
  CDS Start-End: 180-356
gagatagaaagttggcccgggaagctcaaggagggagagcggcagaggggaagactctgcaattctgcttgccccccaccccggcccaggcaagccaccctgcccccggcccccacctgcccgccccgcctgcccttcctcaccccggtgcctgcgggattgctggagagaacgcggcgatggagccgggcaggacccagataaagcttgaccccaggtacacagcagatcttctggaggtgctgaagaccaattacggcatcccctccgcctgcttctctcagcctcccacagcagcccaactcctgagagacagagtctggctctgtggcccaggctggagtgcagtggtgtgatctcagctcaatgcaacctccacctcccagttcaagcaattctcctgcctcagcctctccagtaggtgggattacagcaacggtgaggccagatgaggtctaccagtatttgtcaaagtgtctgctatcctccgaccactatcagccctgggccctgtggaacttgccctcactagcatcctgaccttgctggcgctgggctccattgccat

SEQ ID NO: 184452 - DNA, 572 bp, Homo sapiens
  Payload ID: 16319
  Gene Symbol: SLC51A
  Gene Name: solute carrier family 51, alpha subunit
  ENST ID: ENST00000416660
  CDS Start-End: 374-572
agccctgctctagctgcctccggtgacaggcacttccaacagcaaaccccacccccaccccgacatgtgctggggaaccgggagttcctgcccctgagaggctgatgttgttggagaaaatatgacctggagaaacacatgggaagaaagttctttaggctccgataaaaattgacacgaggccaagcaaatttcccagacaaggctttattaggggcttccgttccaccacgggggagacagcaccgcagggagaggtctccggctggctccccaggggactgcgttgtggcgtctcgaggagggcgacacgcgtaattcatgaggtcgtgtgatcagtggatgtggcattttgtgtaagatttacagtggaatgctgcttatcttaatgctttcactgtccttcaatgagcaggcaagccaccctgcccccggcccccacctgcccgccccgcctgcccttcctcaccccggtgcctgcgggattgctggagagaacgcggcgatggagccgggcaggacccagataaagcttgaccccaggtacacagcagatcttctggaggtgctga

SEQ ID NO: 184453 - DNA, 742 bp, Homo sapiens
  Payload ID: 16319
  Gene Symbol: SLC51A
  Gene Name: solute carrier family 51, alpha subunit
  ENST ID: ENST00000415111
  CDS Start-End: 1-72
caagccaggctacacctgggtgagcagaacatgggagccaaatttgctctgttccagcagcaacatggctgaacatctgcagctgccctgagatcccctacagtgaggaagcacagctcactcacctgcctccttgatgtgcttataaacatcatcactgccagcagatgaataaggaatatcatcatgggctacaaaatcaatctgaaaataaggaaacatcattaaaacccatgataactgccattcagaaagacccagtcaatgttctcaggcccagaaaaaggacaataggcagaggccaggcctcagtggacttcatatctctctttgctttgctcataaattctacaatctattcacaaaccacccaacctaatgatttatggagtatacatatgaagttagccagctgcttttgtagctatttctcctagtctgctagaactgttaccctcactctgtataccagtcatcttgctgtggtcaatagggccagagggtttgctggtgaaccggttagtgggtggagcctaggaaagaaggaaatctccctgtcctgggtctggaaggatttggtcaaataagggtttctaaaagtatgagaaaggccaggcacggtggctcatgcctgtaatcccagcactttgggaggccaaggcgggcagatcacgaggtcaggagttcaagactaacgtggctaacatggtgaaaccccgtctctactaaaaatacaaaaaaa

SEQ ID NO: 184454 - DNA, 636 bp, Homo sapiens
  Payload ID: 16319
  Gene Symbol: SLC51A
  Gene Name: solute carrier family 51, alpha subunit
  ENST ID: ENST00000428985
  CDS Start-End: 1-636
ccgcctgcttctctcagcctcccacagcagcccaactcctgagagccctgggccctgtggaacttgccctcactagcatcctgaccttgctggcgctgggctccattgccatcttcctggaggatgccgtctacctgtacaagaacaccctttgccccatcaagaggcggactctgctctggaagagctcggcacccacgctggcaacgtttaaggaacgctgcctcgaatgtgtaggttttgcctcctgtgtccttgccgcaaaaggcttccggagcctcagggtctccctcccgccctcacctgctcctgccccttctgagcaggtggtgtctgtgctgtgctgctttggtctctggatccctcgttccctggtgctggtggaaatgaccatcacctcgttttatgccgtgtgcttttacctgctgatgctggtcatggtggaaggctttggggggaaggaggcagtgctgaggacgctgagggacaccccgatgatggtccacacaggcccctgctgctgctgctgcccctgctgtccacggctgctgctcaccaggaagaagcttcagctgctgatgttgggccctttccaatacgccttcttgaagataacgctgaccctggtgggcctgt

SEQ ID NO: 184455 - DNA, 940 bp, Homo sapiens
  Payload ID: 16320
  Gene Symbol: SLC51B
  Gene Name: solute carrier family 51, beta subunit
  Uniprot ID: Q86UW2
  ENST ID: ENST00000334287
  CDS Start-End: 322-708
cctgggcgtgtgctaaggccagagctaccagatgggtccagctgccgcaggctctccaggcactgtcccctaagtgacagctgttactgcctgggagagctcaagtgcaaagactatcctgttctcccataaagaggaggaaaaggaagatacagaaatcggtgctgctcccaacagcagatcaaggcagtcgtcaggaactcaggatccggggggtcttcacggcttctctgcccaggggccagaaccgaggaggccaggagggctgctggggctaaggggtctaaggacctcgttgcacacgctaccaggagcaggggcatggagcacagtgagggggctcccggagacccagccggtactgtggtaccccaggagctgctggaagagatgctttggttttttcgtgtggaagatgcatctccctggaatcattccatccttgccctggcagctgtggtggtcattataagcatggtcctcctgggaagaagcatccaggcaagcagaaaagaaaagatgcagccaccagaaaaagaaactccagaagtcctgcatttggatgaggccaaggatcacaacagcctaaacaacctaagagaaactttgctctcagaaaagccaaacttggcccaggtggaacttgagttaaaagagagagatgtgctgtcagttttccttccggatgtaccagaaactgagagctagtgagggttcagagaagccccatcctaagccagacacatgatgtgggctcagctcagtggcctgaaacctctcaggttttagagtctctcccaagaagccgcttttttctttttctttctttctttttttttttcttagcagatacaatgaatgaactgcaagcaaactaaaattctgttattaaaaaaaatcttttattaaaatgctcctggaagggagcaggtggtattgc

SEQ ID NO: 184456 - DNA, 2377 bp, Homo sapiens
  Payload ID: 16321
  Gene Symbol: SLC52A1
  Gene Name: solute carrier family 52 (riboflavin transporter), member 1
  Uniprot ID: Q9NWF4
  ENST ID: ENST00000254853
  CDS Start-End: 674-2020
gcaaaagcgctagggttgcaagtggcaccagagacgtgcccttgtcccggggtccatttgagggtgagcgtgttggtgccgagctgtttttttgttttgttttgttttgttttgtttttgagaccgaatctcgttctgtcgcccaggctggaatgcagtggtgtgatcttggctcactgcaacctccaccttccgggttcaagtgaatctcctgcctcagcctcctgagtagctgggattactggcacccaccaccacgaccagctaatttttgtatttttagtagagacgggttttcaccatgttggccaggatggtctcaatctcctgacctcaggcgatctgccttcctcagcttcccaaagtgctgggattacaggtgtgagccaccgcacccggccagtgctgagctgttttgacaacttggaccccgggtcctctgtgggtaggaaaatcagctccctctttgctcctctggggcagctgcacctcgggccagctttctgcctgtctgcctgccggcactgctgggtcgctgtacccaaacgcacagccggtgccccgtgctagaaggtcttcagtttccagaagaaccaaagcatctttggacctacctagggaaggacctgcctgtgacctttgccctgtcctggagggtccagctttgggctgaatggcagcacccacgctgggccgtctggtgctgacccacctgctggtggccctttttggcatgggctcctgggctgctgtgaacgggatctgggtggagctgcctgtggtggtaaaagaccttccagagggttggagcctcccctcatacctctctgtggttgtggcgctgggaaacctgggtctgctggtggtgaccctgtggaggcagctggccccgggcaagggcgagcaggtccccatccaggtggtacaggtgctgagtgtagtgggcacagccctgctggcccctctgtggcaccacgtggccccagtggcagggcagctccactctgtggccttcctaactctggccttggtgttggcaatggcctgttgtacctctaatgtcactttcctgcccttcctgagccacctgccacctcctttcttacggtctttcttcctgggtcagggtctcagtgccctactcccctgtgtgctggccctagtgcaaggtgtgggccgcctcgagtgcccaccagcgcccaccaatggcacctctgggcctcccctcgacttccctgagcgttttcctgccagcaccttcttctgggcactgactgcccttctggtcacttcagctgccgccttccggggtctcctgttgctgttgccatcactaccctctgtaaccacagggggctcagggcctgaacttcaactgggatccccaggagcagaggaggaagagaaggaggaagaagaggctttgccattgcaggagccaccgagccaggcagcaggcaccatccctggcccagaccctgaggcccatcagctgttctcagcccatggtgccttcctgctgggcctgatggccttcaccagtgccgtgaccaatggcgtgctgccttctgtgcagagcttttcctgtttgccctatgggcgcctggcctaccacctggctgtggtgctgggcagtgccgccaacccccttgcctgcttcctggccatgggcgtgctgtgcaggtccctggcagggctggttggtctttctctgctgggcatgctctttggggcctacctgatggcactggcaatcctgagcccctgcccacccctggtgggcaccactgcaggggtggtccttgtggtgctgtcgtgggtgctgtgtctgtgtgtgttctcatatgtgaaggtggctgcaagctccctgctgcatggtgggggtcggccggcattgctggcagctggtgtggccatccaagtgggctccctgcttggtgccggtgccatgttccctcccaccagcatctaccacgtgtttcaaagcagaaaggactgtgtagacccctgtggcccctgagcctgggcaggtggggacccaactccaccccacctgtcttcatcgtgaggctgccacagtgcctgactacttgtggcccaggcaggcttcccccaacacaggaacgctcatggacacctgcacactccacagaagacgttggcatgtgaggccagggtgggcaccaaagaccaggcccagagccaggggacaggttggggctgtgggcttggacccagggcctgagacctttgtgggatttgtgcaataaagtgtttttatttaaaaccaaaaacaaaaacaaaagcctaatgaaaaccttataagaaatatataatgaaatcaggaaactggattaaataatttttcatacatata

SEQ ID NO: 184457 - DNA, 2412 bp, Homo sapiens
  Payload ID: 16321
  Gene Symbol: SLC52A1
  Gene Name: solute carrier family 52 (riboflavin transporter), member 1
  Uniprot ID: Q9NWF4
  ENST ID: ENST00000424747
  CDS Start-End: 714-2060
agtgtcgcaaaagcgctagggttgcaagtggcaccagagacgtgcccttgtcccggggtccatttgagggtgagcgtgttggtgccgagctgtttttttgttttgttttgttttgttttgtttttgagaccgaatctcgttctgtcgcccaggctggaatgcagtggtgtgatcttggctcactgcaacctccaccttccgggttcaagtgaatctcctgcctcagcctcctgagtagctgggattactggcacccaccaccacgaccagctaatttttgtatttttagtagagacgggttttcaccatgttggccaggatggtctcaatctcctgacctcaggcgatctgccttcctcagcttcccaaagtgctgggattacaggtgtgagccaccgcacccggccagtgctgagctgttttgacaacttggaccccgggtcctctgtgggtaggaaaatcagctccctctttgctcctctggggcagctgcacctcgggccagctttctgcctgtctgcctgccggcactgctgggtcgctgtacccaaacgcacagccggtgccccgtgcctattacctgccagcctgtctgtttccctccagctagaaggtcttcagtttccagaagaaccaaagcatctttggacctacctagggaaggacctgcctgtgacctttgccctgtcctggagggtccagctttgggctgaatggcagcacccacgctgggccgtctggtgctgacccacctgctggtggccctttttggcatgggctcctgggctgctgtgaacgggatctgggtggagctgcctgtggtggtaaaagaccttccagagggttggagcctcccctcatacctctctgtggttgtggcgctgggaaacctgggtctgctggtggtgaccctgtggaggcagctggccccgggcaagggcgagcaggtccccatccaggtggtacaggtgctgagtgtagtgggcacagccctgctggcccctctgtggcaccacgtggccccagtggcagggcagctccactctgtggccttcctaactctggccttggtgttggcaatggcctgttgtacctctaatgtcactttcctgcccttcctgagccacctgccacctcctttcttacggtctttcttcctgggtcagggtctcagtgccctactcccctgtgtgctggccctagtgcaaggtgtgggccgcctcgagtgcccaccagcgcccaccaatggcacctctgggcctcccctcgacttccctgagcgttttcctgccagcaccttcttctgggcactgactgcccttctggtcacttcagctgccgccttccggggtctcctgttgctgttgccatcactaccctctgtaaccacagggggctcagggcctgaacttcaactgggatccccaggagcagaggaggaagagaaggaggaagaagaggctttgccattgcaggagccaccgagccaggcagcaggcaccatccctggcccagaccctgaggcccatcagctgttctcagcccatggtgccttcctgctgggcctgatggccttcaccagtgccgtgaccaatggcgtgctgccttctgtgcagagcttttcctgtttgccctatgggcgcctggcctaccacctggctgtggtgctgggcagtgccgccaacccccttgcctgcttcctggccatgggcgtgctgtgcaggtccctggcagggctggttggtctttctctgctgggcatgctctttggggcctacctgatggcactggcaatcctgagcccctgcccacccctggtgggcaccactgcaggggtggtccttgtggtgctgtcgtgggtgctgtgtctgtgtgtgttctcatatgtgaaggtggctgcaagctccctgctgcatggtgggggtcggccggcattgctggcagctggtgtggccatccaagtgggctccctgcttggtgccggtgccatgttccctcccaccagcatctaccacgtgtttcaaagcagaaaggactgtgtagacccctgtggcccctgagcctgggcaggtggggacccaactccaccccacctgtcttcatcgtgaggctgccacagtgcctgactacttgtggcccaggcaggcttcccccaacacaggaacgctcatggacacctgcacactccacagaagacgttggcatgtgaggccagggtgggcaccaaagaccaggcccagagccaggggacaggttggggctgtgggcttggacccagggcctgagacctttgtgggatttgtgcaataaagtgtttttatttaaaaccaaaaacaaaaacaaaagcctaatgaaaaccttataagaaatatataatgaaatcaggaaactggattaaataatttttcatac

SEQ ID NO: 184458 - DNA, 2989 bp, Homo sapiens
  Payload ID: 16321
  Gene Symbol: SLC52A1
  Gene Name: solute carrier family 52 (riboflavin transporter), member 1
  ENST ID: ENST00000512825
  CDS Start-End: 1413-2465
tcggcctcccaaagtgctgggattacaggcctgagccacggtgcctggcctatctttcattttcaaagcttgtttttgagtggtggcatggggcacacccctgtactgctaatgcaaaggaatattagaatcaccatttgtgaaagaaacttggcagtctgttacaagagcctcagctatgtcatacagtttcacccaataattctatttcaagagacttatccaggaaaaaaaaaaaaaaaaagaccaaaataagaaaagctttgtaatgagcccttgttgcttttacctacccagtgcctctgttcctcttctggtaactgaattcctccttcatctaccaatttatagcagcagggtttgagattctttcactgaattccaaccaatcaaattatctgaaaagtattatttttcttttttcagacagggtctcgctctttcacccaggctggagcacggtggtgtgaccccagttcactgaagcctcaacctcctgggctcaagggatcctcccacctcagcctcctgagtagctgggactataggtgcacatcagcatgcccaactaaattttattttttgtagagatggggtttcgccatgttgcttgggctggtctcgaactcctgggctcctgcgatccgcccatctcagcctcccagagtgctgggactacaggcatgggccattgcacctggcctttaaaatattcttttcttttcaagtgagaaatggtatcctactgatgtcttaatttgcctttctttgatatatacagtcagggagagcatcttttccacatgtctattggccatgtgtatttcccatgaaatatttcataccacccccctcaccattttacaatatgatctttatcaatgtcacagtgataggatatgtctctaacctgtatcttttattttctttctttccttttttttttttttgatacggagttttcctcttgtcgtccagtctggaatgcaatgacatgatctcggctcaccacaatctccgcctcccgggttcaagcaattctcctgcctcagcctcccgagtagctgggattacaggcatgtgccaccatgcccggctaattttgtatttttagtagagacagggtttcgccatgttggtcaggctggtctcgaactcctgacctcaggtgatccacgcccccttagcgtcccaaagtgctgggattacaggcacgaactactatgcctgggattaacctgtatcttttgacttattaacttgtctgtgcttactggagtggcactctgagctgagcctggacagctagaaggtcttcagtttccagaagaaccaaagcatctttggacctacctagggaaggacctgcctgtgacctttgccctgtcctggagggtccagctttgggctgaatggcagcacccacgctgggccgtctggtgctgacccacctgctggtggccctttttggcatgggctcctgggctgctgtgaacgggatctgggtggagctgcctgtggtggtaaaagaccttccagagggttggagcctcccctcatacctctctgtggttgtggcgctgggaaacctgggtctgctggtggtgaccctgtggaggcagctggccccgggcaagggcgagcaggtccccatccaggtggtacaggtgctgagtgtagtgggcacagccctgctggcccctctgtggcaccacgtggccccagtggcagggcagctccactctgtggccttcctaactctggccttggtgttggcaatggcctgttgtacctctaatgtcactttcctgcccttcctgagccacctgccacctcctttcttacggtctttcttcctgggtcagggtctcagtgccctactcccctgtgtgctggccctagtgcaaggtgtgggccgcctcgagtgcccaccagcgcccaccaatggcacctctgggcctcccctcgacttccctgagcgttttcctgccagcaccttcttctgggcactgactgcccttctggtcacttcagctgccgccttccggggtctcctgttgctgttgccatcactaccctctgtaaccacagggggctcagggcctgaacttcaactgggatccccaggagcagaggaggaagagaaggaggaagaagaggctttgccattgcaggagccaccgagccaggcagcaggcaccatccctggcccagaccctgaggcccatcagctgttctcagcccatggtgccttcctgctgggcctgatggccttcaccagtgccgtgaccaatggcgtgctgccttctgtgcagagcttttcctgtttgccctatgggcgcctggcctaccacctggctgtggtgctgggcagtgccgccaacccccttgcctgcttcctggccatgggcgtgctgtgcaggtgctgtcgtgggtgctgtgtctgtgtgtgttctcatatgtgaaggtggctgcaagctccctgctgcatggtgggggtcggccggcattgctggcagctggtgtggccatccaagtgggctccctgcttggtgccggtgccatgttccctcccaccagcatctaccacgtgtttcaaagcagaaaggactgtgtagacccctgtggcccctgagcctgggcaggtggggacccaactccaccccacctgtcttcatcgtgaggctgccacagtgcctgactacttgtggcccaggcaggcttcccccaacacaggaacgctcatggacacctgcacactccacagaagacgttggcatgtgaggccagggtgggcaccaaagaccaggcccagagccaggggacaggttggggctgtgggcttggacccagggcctgagacctttgtgggatttgtgcaataaagtgtttttatttaaaaccaaaaacaaaaacaaaagcctaatgaaaaccttataagaaatatataatgaaatcaggaaactggattaaataatttttcatacat

SEQ ID NO: 184459 - DNA, 1896 bp, Homo sapiens
  Payload ID: 16322
  Gene Symbol: SLC52A2
  Gene Name: solute carrier family 52 (riboflavin transporter), member 2
  Uniprot ID: Q9HAB3
  ENST ID: ENST00000329994
  CDS Start-End: 302-1639
ggcccggaaccgccacgggtgagtcgggtcgtggctgctgccgggtcctgcgcgctccggactgaggtggcgtccctgggccggacggcggtgtcccggcgtggcgggaagccggcactggagcgggagcgcactgggcgcgggaccgggaggcgcagggaccggacggctcccgagtcgcccacctgacgctagaagaagtcttcacttcccaggagagccaaagcgtgtctggccctaggtgggaaaagaactggctgtgacctttgccctgacctggaagggcccagccttgggctgaatggcagcacccacgcccgcccgtccggtgctgacccacctgctggtggctctcttcggcatgggctcctgggctgcggtcaatgggatctgggtggagctacctgtggtggtcaaagagcttccagagggttggagcctcccctcttacgtctctgtgcttgtggctctggggaacctgggtctgctggtggtgaccctctggaggaggctggccccaggaaaggacgagcaggtccccatccgggtggtgcaggtgctgggcatggtgggcacagccctgctggcctctctgtggcaccatgtggccccagtggcaggacagttgcattctgtggccttcttagcactggcctttgtgctggcactggcatgctgtgcctcgaatgtcactttcctgcccttcttgagccacctgccacctcgcttcttacggtcattcttcctgggtcaaggcctgagtgccctgctgccctgcgtgctggccctagtgcagggtgtgggccgcctcgagtgcccgccagcccccatcaacggcacccctggccccccgctcgacttccttgagcgttttcccgccagcaccttcttctgggcactgactgcccttctggtcgcttcagctgctgccttccagggtcttctgctgctgttgccgccaccaccatctgtacccacaggggagttaggatcaggcctccaggtgggagccccaggagcagaggaagaggtggaagagtcctcaccactgcaagagccaccaagccaggcagcaggcaccacccctggtccagaccctaaggcctatcagcttctatcagcccgcagtgcctgcctgctgggcctgttggccgccaccaacgcgctgaccaatggcgtgctgcctgccgtgcagagcttttcctgcttaccctacgggcgtctggcctaccacctggctgtggtgctgggcagtgctgccaatcccctggcctgcttcctggccatgggtgtgctgtgcaggtccttggcagggctgggcggcctctctctgctgggcgtgttctgtgggggctacctgatggcgctggcagtcctgagcccctgcccgcccctggtgggcacctcggcgggggtggtcctcgtggtgctgtcgtgggtgctgtgtcttggcgtgttctcctacgtgaaggtggcagccagctccctgctgcatggcgggggccggccggcattgctggcagccggcgtggccatccaggtgggctctctgctcggcgctgttgctatgttccccccgaccagcatctatcacgtgttccacagcagaaaggactgtgcagacccctgtgactcctgagcctgggcaggtggggaccccgctccccaacacctgtctttccctcaatgctgccaccatgcctgagtgcctgcagcccaggaggcccgcacaccggtacactcgtggacacctacacactccataggagatcctggctttccagggtgggcaagggcaaggagcaggcttggagccagggaccagtgggggctgtagggtaagcccctgagcctgggacctacatgtggtttgcgtaataaaacatttgtatttaa

SEQ ID NO: 184460 - DNA, 1777 bp, Homo sapiens
  Payload ID: 16322
  Gene Symbol: SLC52A2
  Gene Name: solute carrier family 52 (riboflavin transporter), member 2
  Uniprot ID: Q9HAB3
  ENST ID: ENST00000402965
  CDS Start-End: 185-1522
atgccgggggcgggcccggaaccgccacgggtgagtcgggtcgtggctgctgccgggtcctgcgcgctccggactgagaagaagtcttcacttcccaggagagccaaagcgtgtctggccctaggtgggaaaagaactggctgtgacctttgccctgacctggaagggcccagccttgggctgaatggcagcacccacgcccgcccgtccggtgctgacccacctgctggtggctctcttcggcatgggctcctgggctgcggtcaatgggatctgggtggagctacctgtggtggtcaaagagcttccagagggttggagcctcccctcttacgtctctgtgcttgtggctctggggaacctgggtctgctggtggtgaccctctggaggaggctggccccaggaaaggacgagcaggtccccatccgggtggtgcaggtgctgggcatggtgggcacagccctgctggcctctctgtggcaccatgtggccccagtggcaggacagttgcattctgtggccttcttagcactggcctttgtgctggcactggcatgctgtgcctcgaatgtcactttcctgcccttcttgagccacctgccacctcgcttcttacggtcattcttcctgggtcaaggcctgagtgccctgctgccctgcgtgctggccctagtgcagggtgtgggccgcctcgagtgcccgccagcccccatcaacggcacccctggccccccgctcgacttccttgagcgttttcccgccagcaccttcttctgggcactgactgcccttctggtcgcttcagctgctgccttccagggtcttctgctgctgttgccgccaccaccatctgtacccacaggggagttaggatcaggcctccaggtgggagccccaggagcagaggaagaggtggaagagtcctcaccactgcaagagccaccaagccaggcagcaggcaccacccctggtccagaccctaaggcctatcagcttctatcagcccgcagtgcctgcctgctgggcctgttggccgccaccaacgcgctgaccaatggcgtgctgcctgccgtgcagagcttttcctgcttaccctacgggcgtctggcctaccacctggctgtggtgctgggcagtgctgccaatcccctggcctgcttcctggccatgggtgtgctgtgcaggtccttggcagggctgggcggcctctctctgctgggcgtgttctgtgggggctacctgatggcgctggcagtcctgagcccctgcccgcccctggtgggcacctcggcgggggtggtcctcgtggtgctgtcgtgggtgctgtgtcttggcgtgttctcctacgtgaaggtggcagccagctccctgctgcatggcgggggccggccggcattgctggcagccggcgtggccatccaggtgggctctctgctcggcgctgttgctatgttccccccgaccagcatctatcacgtgttccacagcagaaaggactgtgcagacccctgtgactcctgagcctgggcaggtggggaccccgctccccaacacctgtctttccctcaatgctgccaccatgcctgagtgcctgcagcccaggaggcccgcacaccggtacactcgtggacacctacacactccataggagatcctggctttccagggtgggcaagggcaaggagcaggcttggagccagggaccagtgggggctgtagggtaagcccctgagcctgggacctacatgtggtttgcgtaataaaacatttgtattt

SEQ ID NO: 184461 - DNA, 935 bp, Homo sapiens
  Payload ID: 16322
  Gene Symbol: SLC52A2
  Gene Name: solute carrier family 52 (riboflavin transporter), member 2
  ENST ID: ENST00000534725
  CDS Start-End: 419-935
ggcccggaaccgccacgggtgagtcgggtcgtggctgctgccgggtcctgcgcgctccggactgaggtggcgtccctgggccggacggcggtgtcccggcgtggcgggaagccggcactggagcgggagcgcactgggcgcgggaccgggaggcgcagggaccggacggctcccgagtcgcccacctgacggtaccgagagggcggcgcccctccgagcagagccgtcccggccactcccctgggatctgacttggctcttgcggtcgcgggcaccgtgaagccctggggtgtgcgtggctcctcctgctagaagaagtcttcacttcccaggagagccaaagcgtgtctggccctaggtgggaaaagaactggctgtgacctttgccctgacctggaagggcccagccttgggctgaatggcagcacccacgcccgcccgtccggtgctgacccacctgctggtggctctcttcggcatgggctcctgggctgcggtcaatgggatctgggtggagctacctgtggtggtcaaagagcttccagagggttggagcctcccctcttacgtctctgtgcttgtggctctggggaacctgggtctgctggtggtgaccctctggaggaggctggccccaggaaaggacgagcaggtccccatccgggtggtgcaggtgctgggcatggtgggcacagccctgctggcctctctgtggcaccatgtggccccagtggcaggacagttgcattctgtggccttcttagcactggcctttgtgctggcactggcatgctgtgcctcgaatgtcactttcctgcccttcttgagccacctgccacctcgcttcttacggtcattcttcctgggtcaaggcctgagtgccctgctgccctgcgtgctggccctagtgcagggtgtgggccgcctcgagtgcc

SEQ ID NO: 184462 - DNA, 655 bp, Homo sapiens
  Payload ID: 16322
  Gene Symbol: SLC52A2
  Gene Name: solute carrier family 52 (riboflavin transporter), member 2
  ENST ID: ENST00000526338
  CDS Start-End: 145-655
ggccatgccgggggcgggcccggaaccgccacggctagaagaagtcttcacttcccaggagagccaaagcgtgtctggccctaggtgggaaaagaactggctgtgacctttgccctgacctggaagggcccagccttgggctgaatggcagcacccacgcccgcccgtccggtgctgacccacctgctggtggctctcttcggcatgggctcctgggctgcggtcaatgggatctgggtggagctacctgtggtggtcaaagagcttccagaggctgctgccttccagggtcttctgctgctgttgccgccaccaccatctgtacccacaggggagttaggatcaggcctccaggtgggagccccaggagcagaggaagaggtggaagagtcctcaccactgcaagagccaccaagccaggcagcaggcaccacccctggtccagaccctaaggcctatcagcttctatcagcccgcagtgcctgcctgctgggcctgttggccgccaccaacgcgctgaccaatggcgtgctgcctgccgtgcagagcttttcctgcttaccctacgggcgtctggcctaccacctggctgtggtgctgggcagtgctgccaatcccctggcctgcttcctggccatgggtgtgctgtgcaggt

SEQ ID NO: 184463 - DNA, 710 bp, Homo sapiens
  Payload ID: 16322
  Gene Symbol: SLC52A2
  Gene Name: solute carrier family 52 (riboflavin transporter), member 2
  ENST ID: ENST00000526752
  CDS Start-End: 112-447
gctagaagaagtcttcacttcccaggagagccaaagcgtgtctggccctaggtgggaaaagaactggctgtgacctttgccctgacctggaagggcccagccttgggctgaatggcagcacccacgcccgcccgtccggtgctgacccacctgctggtggctctcttcggcatgggctcctgggctgcggtcaatgggatctgggtggagctacctgtggtggtcaaagagcttccagagggtgctgtcgtgggtgctgtgtcttggcgtgttctcctacgtgaaggtggcagccagctccctgctgcatggcgggggccggccggcattgctggcagccggcgtggccatccaggtgggctctctgctcggcgctgttgctatgttccccccgaccagcatctatcacgtgttccacagcagaaaggactgtgcagacccctgtgactcctgagcctgggcaggtggggaccccgctccccaacacctgtctttccctcaatgctgccaccatgcctgagtgcctgcagcccaggaggcccgcacaccggtacactcgtggacacctacacactccataggagatcctggctttccagggtgggcaagggcaaggagcaggcttggagccagggaccagtgggggctgtagggtaagcccctgagcctgggacctacatgtggtttgcgtaataaaacatttgtattta

SEQ ID NO: 184464 - DNA, 495 bp, Homo sapiens
  Payload ID: 16322
  Gene Symbol: SLC52A2
  Gene Name: solute carrier family 52 (riboflavin transporter), member 2
  ENST ID: ENST00000524541
  CDS Start-End: 288-495
ctcttgcttctgcacctgcgggcgccacgcggagagtctgagcggcgcggggccggccctcaggggaggagggcggtgggggtcgggcccaggggctcacacctctctcagggagctgaagctgaccaggaccacgctgatgatgaagagcagcatccccttccacagtgtgtccagctagaagaagtcttcacttcccaggagagccaaagcgtgtctggccctaggtgggaaaagaactggctgtgacctttgccctgacctggaagggcccagccttgggctgaatggcagcacccacgcccgcccgtccggtgctgacccacctgctggtggctctcttcggcatgggctcctgggctgcggtcaatgggatctgggtggagctacctgtggtggtcaaagagcttccagagggttggagcctcccctcttacgtctctgtgcttgtggctctggggaacctgggtctgctggtggtgaccctctggagga

SEQ ID NO: 184465 - DNA, 1790 bp, Homo sapiens
  Payload ID: 16322
  Gene Symbol: SLC52A2
  Gene Name: solute carrier family 52 (riboflavin transporter), member 2
  Uniprot ID: Q9HAB3
  ENST ID: ENST00000527078
  CDS Start-End: 447-1784
cttccggtcgtgggccatgccgggggcgggcccggaaccgccacgggtgagtcgggtcgtggctgctgccgggtcctgcgcgctccggactgaggtggcgtccctgggccggacggcggtgtcccggcgtggcgggaagccggcactggagcgggagcgcactgggcgcgggaccgggaggcgcagggaccggacggctcccgagtcgcccacctgacggtaccgagagggcggcgcccctccgagcagagccgtcccggccactcccctgggatctgacttggctcttgcggtcgcgggcaccgtgaagccctggggtgtgcgtggctcctcctgctagaagaagtcttcacttcccaggagagccaaagcgtgtctggccctaggtgggaaaagaactggctgtgacctttgccctgacctggaagggcccagccttgggctgaatggcagcacccacgcccgcccgtccggtgctgacccacctgctggtggctctcttcggcatgggctcctgggctgcggtcaatgggatctgggtggagctacctgtggtggtcaaagagcttccagagggttggagcctcccctcttacgtctctgtgcttgtggctctggggaacctgggtctgctggtggtgaccctctggaggaggctggccccaggaaaggacgagcaggtccccatccgggtggtgcaggtgctgggcatggtgggcacagccctgctggcctctctgtggcaccatgtggccccagtggcaggacagttgcattctgtggccttcttagcactggcctttgtgctggcactggcatgctgtgcctcgaatgtcactttcctgcccttcttgagccacctgccacctcgcttcttacggtcattcttcctgggtcaaggcctgagtgccctgctgccctgcgtgctggccctagtgcagggtgtgggccgcctcgagtgcccgccagcccccatcaacggcacccctggccccccgctcgacttccttgagcgttttcccgccagcaccttcttctgggcactgactgcccttctggtcgcttcagctgctgccttccagggtcttctgctgctgttgccgccaccaccatctgtacccacaggggagttaggatcaggcctccaggtgggagccccaggagcagaggaagaggtggaagagtcctcaccactgcaagagccaccaagccaggcagcaggcaccacccctggtccagaccctaaggcctatcagcttctatcagcccgcagtgcctgcctgctgggcctgttggccgccaccaacgcgctgaccaatggcgtgctgcctgccgtgcagagcttttcctgcttaccctacgggcgtctggcctaccacctggctgtggtgctgggcagtgctgccaatcccctggcctgcttcctggccatgggtgtgctgtgcaggtccttggcagggctgggcggcctctctctgctgggcgtgttctgtgggggctacctgatggcgctggcagtcctgagcccctgcccgcccctggtgggcacctcggcgggggtggtcctcgtggtgctgtcgtgggtgctgtgtcttggcgtgttctcctacgtgaaggtggcagccagctccctgctgcatggcgggggccggccggcattgctggcagccggcgtggccatccaggtgggctctctgctcggcgctgttgctatgttccccccgaccagcatctatcacgtgttccacagcagaaaggactgtgcagacccctgtgactcctgagcctgg

SEQ ID NO: 184466 - DNA, 1757 bp, Homo sapiens
  Payload ID: 16322
  Gene Symbol: SLC52A2
  Gene Name: solute carrier family 52 (riboflavin transporter), member 2
  Uniprot ID: Q9HAB3
  ENST ID: ENST00000530047
  CDS Start-End: 165-1502
gggcgggacttccggtcgtgggccatgccgggggcgggcccggaaccgccacggctagaagaagtcttcacttcccaggagagccaaagcgtgtctggccctaggtgggaaaagaactggctgtgacctttgccctgacctggaagggcccagccttgggctgaatggcagcacccacgcccgcccgtccggtgctgacccacctgctggtggctctcttcggcatgggctcctgggctgcggtcaatgggatctgggtggagctacctgtggtggtcaaagagcttccagagggttggagcctcccctcttacgtctctgtgcttgtggctctggggaacctgggtctgctggtggtgaccctctggaggaggctggccccaggaaaggacgagcaggtccccatccgggtggtgcaggtgctgggcatggtgggcacagccctgctggcctctctgtggcaccatgtggccccagtggcaggacagttgcattctgtggccttcttagcactggcctttgtgctggcactggcatgctgtgcctcgaatgtcactttcctgcccttcttgagccacctgccacctcgcttcttacggtcattcttcctgggtcaaggcctgagtgccctgctgccctgcgtgctggccctagtgcagggtgtgggccgcctcgagtgcccgccagcccccatcaacggcacccctggccccccgctcgacttccttgagcgttttcccgccagcaccttcttctgggcactgactgcccttctggtcgcttcagctgctgccttccagggtcttctgctgctgttgccgccaccaccatctgtacccacaggggagttaggatcaggcctccaggtgggagccccaggagcagaggaagaggtggaagagtcctcaccactgcaagagccaccaagccaggcagcaggcaccacccctggtccagaccctaaggcctatcagcttctatcagcccgcagtgcctgcctgctgggcctgttggccgccaccaacgcgctgaccaatggcgtgctgcctgccgtgcagagcttttcctgcttaccctacgggcgtctggcctaccacctggctgtggtgctgggcagtgctgccaatcccctggcctgcttcctggccatgggtgtgctgtgcaggtccttggcagggctgggcggcctctctctgctgggcgtgttctgtgggggctacctgatggcgctggcagtcctgagcccctgcccgcccctggtgggcacctcggcgggggtggtcctcgtggtgctgtcgtgggtgctgtgtcttggcgtgttctcctacgtgaaggtggcagccagctccctgctgcatggcgggggccggccggcattgctggcagccggcgtggccatccaggtgggctctctgctcggcgctgttgctatgttccccccgaccagcatctatcacgtgttccacagcagaaaggactgtgcagacccctgtgactcctgagcctgggcaggtggggaccccgctccccaacacctgtctttccctcaatgctgccaccatgcctgagtgcctgcagcccaggaggcccgcacaccggtacactcgtggacacctacacactccataggagatcctggctttccagggtgggcaagggcaaggagcaggcttggagccagggaccagtgggggctgtagggtaagcccctgagcctgggacctacatgtggtttgcgtaataaaacatttgtattt

SEQ ID NO: 184467 - DNA, 2147 bp, Homo sapiens
  Payload ID: 16322
  Gene Symbol: SLC52A2
  Gene Name: solute carrier family 52 (riboflavin transporter), member 2
  Uniprot ID: Q9HAB3
  ENST ID: ENST00000532887
  CDS Start-End: 584-1921
ggcccggaaccgccacgggtgagtcgggtcgtggctgctgccgggtcctgcgcgctccggactgaggtggcgtccctgggccggacggcggtgtcccggcgtggcgggaagccggcactggagcgggagcgcactgggcgcgggaccgggaggcgcagggaccggacggctcccgagtcgcccacctgacggtaccgagagggcggcgcccctccgagcagagccgtcccggccactcccctgggatctgacttggctcttgcggtcgcgggcaccgtgaagccctggggtgtgcgtggctcctcctggtaggcgccctttcccggcgtccggcttggggtggtggtggcgttgactccagccccgcctctccctggagaggagggctccactcgctccttcggcctcctcccctggggccgcagcgactcgggccggcttcctgcttccctgcctgccggcggtcccgctggctagaagaagtcttcacttcccaggagagccaaagcgtgtctggccctaggtgggaaaagaactggctgtgacctttgccctgacctggaagggcccagccttgggctgaatggcagcacccacgcccgcccgtccggtgctgacccacctgctggtggctctcttcggcatgggctcctgggctgcggtcaatgggatctgggtggagctacctgtggtggtcaaagagcttccagagggttggagcctcccctcttacgtctctgtgcttgtggctctggggaacctgggtctgctggtggtgaccctctggaggaggctggccccaggaaaggacgagcaggtccccatccgggtggtgcaggtgctgggcatggtgggcacagccctgctggcctctctgtggcaccatgtggccccagtggcaggacagttgcattctgtggccttcttagcactggcctttgtgctggcactggcatgctgtgcctcgaatgtcactttcctgcccttcttgagccacctgccacctcgcttcttacggtcattcttcctgggtcaaggcctgagtgccctgctgccctgcgtgctggccctagtgcagggtgtgggccgcctcgagtgcccgccagcccccatcaacggcacccctggccccccgctcgacttccttgagcgttttcccgccagcaccttcttctgggcactgactgcccttctggtcgcttcagctgctgccttccagggtcttctgctgctgttgccgccaccaccatctgtacccacaggggagttaggatcaggcctccaggtgggagccccaggagcagaggaagaggtggaagagtcctcaccactgcaagagccaccaagccaggcagcaggcaccacccctggtccagaccctaaggcctatcagcttctatcagcccgcagtgcctgcctgctgggcctgttggccgccaccaacgcgctgaccaatggcgtgctgcctgccgtgcagagcttttcctgcttaccctacgggcgtctggcctaccacctggctgtggtgctgggcagtgctgccaatcccctggcctgcttcctggccatgggtgtgctgtgcaggtccttggcagggctgggcggcctctctctgctgggcgtgttctgtgggggctacctgatggcgctggcagtcctgagcccctgcccgcccctggtgggcacctcggcgggggtggtcctcgtggtgctgtcgtgggtgctgtgtcttggcgtgttctcctacgtgaaggtggcagccagctccctgctgcatggcgggggccggccggcattgctggcagccggcgtggccatccaggtgggctctctgctcggcgctgttgctatgttccccccgaccagcatctatcacgtgttccacagcagaaaggactgtgcagacccctgtgactcctgagcctgggcaggtggggaccccgctccccaacacctgtctttccctcaatgctgccaccatgcctgagtgcctgcagcccaggaggcccgcacaccggtacactcgtggacacctacacactccataggagatcctggctttccagggtgggcaagggcaaggagcaggcttggagccagggaccagtgggggctgtagggtaagcccctgagcctgggacctacat

SEQ ID NO: 184468 - DNA, 881 bp, Homo sapiens
  Payload ID: 16322
  Gene Symbol: SLC52A2
  Gene Name: solute carrier family 52 (riboflavin transporter), member 2
  ENST ID: ENST00000526779
  CDS Start-End: 165-428
ccgcagcgactcgggccggcttcctgcttccctgcctgccggcggtcccgctggctagaagaagtcttcacttcccaggagagccaaagcgtgtctggccctaggtgggaaaagaactggctgtgacctttgccctgacctggaagggcccagccttgggctgaatggcagcacccacgcccgcccgtccggtgctgacccacctgctggtggctctcttcggcatgggctcctgggctgcggtcaatgggatctgggtggagctacctgtggtggtcaaagagcttccagagggttggagcctcccctcttacgtctctgtgcttgtggctctggggaacctgggtctgctggtggtgaccctctggaggaggctggccccaggaaaggacgagcaggtccccatccgggtggtgcaggggagttaggatcaggcctccaggtgggagccccaggagcagaggaagaggtggaagagtcctcaccactgcaagagccaccaagccaggcagcaggcaccacccctggtccagaccctaaggcctatcagcttctatcagcccgcagtgcctgcctgctgggcctgttggccgccaccaacgcgctgaccaatggcgtgctgcctgccgtgcagagcttttcctgcttaccctacgggcgtctggcctaccacctggctgtggtgctgggcagtgctgccaatcccctggcctgcttcctggccatgggtgtgctgtgcaggtccttggcagggctgggcggcctctctctgctgggcgtgttctgtgggggctacctgatggcgctggcagtcctgagcccctgcccgcccctggtgggcacctcggcgggggtggtcctcgtggtgagcacagggggac

SEQ ID NO: 184469 - DNA, 2654 bp, Homo sapiens
  Payload ID: 16323
  Gene Symbol: SLC52A3
  Gene Name: solute carrier family 52 (riboflavin transporter), member 3
  Uniprot ID: Q9NQ40
  ENST ID: ENST00000217254
  CDS Start-End: 299-1708
atacaaaacgagctgcctctggcccctcccatgcagagcggctggggaactggaccagcagaaggaagaagtatggagttaaagactgcagcgtgaactgaggagtcccggacaggccgcttgctgcagaggatccagtccagatcccaggagagcccctctgccccttcggacctcgtctcccatctacaaaacgtgaagattggcccagttagcgtgtctctacaaaaaggtgcatataccactgccccgctgcaggctgatctgagaaagcctctggcccagggcagataccgccatggccttcctgatgcacctgctggtctgcgtcttcggaatgggctcctgggtgaccatcaatgggctctgggtagagctgcccctgctggtgatggagctgcccgagggctggtacctgccctcctacctcacggtggtcatccagctggccaacatcgggcccctcctggtcaccctgctccatcacttccggcccagctgcctttccgaagtgcccatcatcttcaccctgctgggcgtgggaaccgtcacctgcatcatctttgccttcctctggaatatgacctcctgggtgctggacggccaccacagcatcgccttcttggtcctcaccttcttcctggccctggtggactgcacctcttcagtgaccttcctgccgttcatgagccggctgcccacctactacctcaccaccttctttgtgggtgaaggactcagcggcctcttgcccgccctggtggctcttgcccagggctccggtctcactacctgcgtcaatgtcactgagatatcagacagcgtaccaagccctgtacccacgagggagactgacatcgcacagggagttcccagagctttggtgtccgccctccccggaatggaagcacccttgtcccacctggagagccgctaccttcccgcccacttctcacccctggtcttcttcctcctcctatccatcatgatggcctgctgcctcgtggcgttctttgtcctccagcgtcaacccaggtgctgggaggcttccgtggaagacctcctcaatgaccaggtcaccctccactccatccggccgcgggaagagaatgacttgggccctgcaggcacggtggacagcagccagggccaggggtatctagaggagaaagcagccccctgctgcccggcgcacctggccttcatctataccctggtggccttcgtcaacgcgctcaccaacggcatgctgccctctgtgcagacctactcctgcctgtcctatgggccagttgcctaccacctggctgccaccctcagcattgtggccaaccctcttgcctcgttggtctccatgttcctgcctaacaggtctctgctgttcctgggggtcctctccgtgcttgggacctgctttgggggctacaacatggccatggcggtgatgagcccctgccccctcttgcagggccactggggtggggaagtcctcattgtggcctcgtgggtgcttttcagcggctgcctcagttacgtcaaggtgatgctgggcgtggtcctgcgcgacctcagccgcagcgccctcttgtggtgcggggcggcggtgcagctgggctcgctgctcggagcgctgctcatgttccctctggtcaacgtgctgcggctcttctcgtccgcggacttctgcaatctgcactgtccagcctaggcaggccgccgaccccgcccccatcgctcacggacggaactggggtccagagaggccaggtcacagagcaaggggcaggaacagagagacagagcctgagtaattgaatcatgaacgcaagtgcccactggggactgtggggaagatggcacctggaaatgcaaggtgcggctctatccccaactctgtgtcacactacctgtgacgaccagctcagatctcctttgctttgactctcaagagaggactgatttgcagcatctagctggaggcaggcccaagggtgttagaagggaaacagctgggacagccggctgtcccttcaggctgtgtgaccttgggaaagtcatttggcttctctgtgcctgtttcttcatgcatgcagtggggattccagtaagtaccaactacctcacaggcatggcacggaggcaaaaggaaaaagcagcccgcatcaagcaagccctcctgggccacctgctgatctgacagtccatcgtagtaacaagagtggcagtctgcacaacctagaagtggccagaagggttgagacacgcccctgccctctctcctttgcccctcagtctcacagaggggcttctacaagacaagcagataacgatagaatcttgggcatcttggctttcggattctcagtgtggagggacgtagtaccccacacaccccttcctgtcatccttcctggcccataaagcccactagttggagagtaagtaccctcctggaagccgggagagatgatttgctggtggggctggggaaggcccatccctgagcctctgaaagtgaactccccgaccaggttggggaccagacatgcagagcccctggaagtattctctcaaatggaggcaacagaggtgattgttattttgttttagtttctgtttttcatttttttaaataaaggcattccctgctttta

SEQ ID NO: 184470 - DNA, 3060 bp, Homo sapiens
  Payload ID: 16323
  Gene Symbol: SLC52A3
  Gene Name: solute carrier family 52 (riboflavin transporter), member 3
  Uniprot ID: Q9NQ40
  ENST ID: ENST00000381944
  CDS Start-End: 243-1490
actagaaggaagaagtatggagttaaagactgcagcgtgaactgaggagtcccggacaggccgcttgctgcagaggatccagtccagatcccaggagagcccctctgccccttcggacctcgtctcccatctacaaaacgtgaagattggcccagttagcgtgtctctacaaaaaggtgcatataccactgccccgctgcaggctgatctgagaaagcctctggcccagggcagataccgccatggccttcctgatgcacctgctggtctgcgtcttcggaatgggctcctgggtgaccatcaatgggctctgggtagagctgcccctgctggtgatggagctgcccgagggctggtacctgccctcctacctcacggtggtcatccagctggccaacatcgggcccctcctggtcaccctgctccatcacttccggcccagctgcctttccgaagtgcccatcatcttcaccctgctgggcgtgggaaccgtcacctgcatcatctttgccttcctctggaatatgacctcctgggtgctggacggccaccacagcatcgccttcttggtcctcaccttcttcctggccctggtggactgcacctcttcagtgaccttcctgccgttcatgagccggctgcccacctactacctcaccaccttctttgtgggtgaaggactcagcggcctcttgcccgccctggtggctcttgcccagggctccggtctcactacctgcgtcaatgtcactgagatatcagacagcgtaccaagccctgtacccacgagggagactgacatcgcacagggagttcccagagctttggtgtccgccctccccggaatggaagcacccttgtcccacctggagagccgctaccttcccgcccacttctcacccctggtcttcttcctcctcctatccatcatgatggcctgctgcctcgtggcgttctttgtcctccagcgtcaacccaggtgctgggaggcttccgtggaagacctcctcaatgaccaggtcaccctccactccatccggccgcgggaagagaatgacttgggccctgcaggcacggtggacagcagccagggccaggggtatctagaggagaaagcagccccctgctgcccggcgcacctggccttcatctataccctggtggccttcgtcaacgcgctcaccaacggcatgctgccctctgtgcagacctactcctgcctgtcctatgggccagttgcctaccacctggctgccaccctcagcattgtggccaaccctcttgcctcgttggtctccatgttcctgcctaacaggtctctgctgttcctgggggtcctctccgtgcttgggacctgctttgggggctacaacatggccatggcggtgatgagcccctgccccctcttgcagggccactggggtggggaagtcctcattgtgagtatccggccggtggggctgctcccgctgcgtacccctcacccctagccaaggcctgggagagcttgggcgcggccctttccagcgagcggggtctgtgggaccctcccgggaagccccaggtgggggaagcgccccttcctcatttgggagtggaggcttagggaatcgaggtgactggtaggcctcttcccaccatgtgtacctcagcaggggccttctctcaagggcccttgccctgatcatgggcacgtgaacccagaaaagccactggattctccttcgcccccgggcggccaactcatgggacccgtcggccccgcaggctcactcccagaaggcgctcctcgcacctagagagtattccgtgggttcccctgagccctgtgagagttctttgctccggcgctcgccccgcaagccccgtgactctgcacctcttccctcccggccccgcaggtggcctcgtgggtgcttttcagcggctgcctcagttacgtcaaggtgatgctgggcgtggtcctgcgcgacctcagccgcagcgccctcttgtggtgcggggcggcggtgcagctgggctcgctgctcggagcgctgctcatgttccctctggtcaacgtgctgcggctcttctcgtccgcggacttctgcaatctgcactgtccagcctaggcaggccgccgaccccgcccccatcgctcacggacggaactggggtccagagaggccaggtcacagagcaaggggcaggaacagagagacagagcctgagtaattgaatcatgaacgcaagtgcccactggggactgtggggaagatggcacctggaaatgcaaggtgcggctctatccccaactctgtgtcacactacctgtgacgaccagctcagatctcctttgctttgactctcaagagaggactgatttgcagcatctagctggaggcaggcccaagggtgttagaagggaaacagctgggacagccggctgtcccttcaggctgtgtgaccttgggaaagtcatttggcttctctgtgcctgtttcttcatgcatgcagtggggattccagtaagtaccaactacctcacaggcatggcacggaggcaaaaggaaaaagcagcccgcatcaagcaagccctcctgggccacctgctgatctgacagtccatcgtagtaacaagagtggcagtctgcacaacctagaagtggccagaagggttgagacacgcccctgccctctctcctttgcccctcagtctcacagaggggcttctacaagacaagcagataacgatagaatcttgggcatcttggctttcggattctcagtgtggagggacgtagtaccccacacaccccttcctgtcatccttcctggcccataaagcccactagttggagagtaagtaccctcctggaagccgggagagatgatttgctggtggggctggggaaggcccatccctgagcctctgaaagtgaactccccgaccaggttggggaccagacatgcagagcccctggaagtattctctcaaatggaggcaacagaggtgattgttattttgttttagtttctgtttttcatttttttaaataaaggcattccctgctttta

SEQ ID NO: 184471 - DNA, 2694 bp, Homo sapiens
  Payload ID: 16323
  Gene Symbol: SLC52A3
  Gene Name: solute carrier family 52 (riboflavin transporter), member 3
  Uniprot ID: Q9NQ40
  ENST ID: ENST00000632431
  CDS Start-End: 340-1749
gtgagggaattccgtgtgtgggaaccgtggggaggagctgccaggattcaggagtttcctgggtgaggcgtggccacaacggacactcctgctttgtactagaaggaagaagtatggagttaaagactgcagcgtgaactgaggagtcccggacaggccgcttgctgcagaggatccagtccagatcccaggagagcccctctgccccttcggacctcgtctcccatctacaaaacgtgaagattggcccagttagcgtgtctctacaaaaaggtgcatataccactgccccgctgcaggctgatctgagaaagcctctggcccagggcagataccgccatggccttcctgatgcacctgctggtctgcgtcttcggaatgggctcctgggtgaccatcaatgggctctgggtagagctgcccctgctggtgatggagctgcccgagggctggtacctgccctcctacctcacggtggtcatccagctggccaacatcgggcccctcctggtcaccctgctccatcacttccggcccagctgcctttccgaagtgcccatcatcttcaccctgctgggcgtgggaaccgtcacctgcatcatctttgccttcctctggaatatgacctcctgggtgctggacggccaccacagcatcgccttcttggtcctcaccttcttcctggccctggtggactgcacctcttcagtgaccttcctgccgttcatgagccggctgcccacctactacctcaccaccttctttgtgggtgaaggactcagcggcctcttgcccgccctggtggctcttgcccagggctccggtctcactacctgcgtcaatgtcactgagatatcagacagcgtaccaagccctgtacccacgagggagactgacatcgcacagggagttcccagagctttggtgtccgccctccccggaatggaagcacccttgtcccacctggagagccgctaccttcccgcccacttctcacccctggtcttcttcctcctcctatccatcatgatggcctgctgcctcgtggcgttctttgtcctccagcgtcaacccaggtgctgggaggcttccgtggaagacctcctcaatgaccaggtcaccctccactccatccggccgcgggaagagaatgacttgggccctgcaggcacggtggacagcagccagggccaggggtatctagaggagaaagcagccccctgctgcccggcgcacctggccttcatctataccctggtggccttcgtcaacgcgctcaccaacggcatgctgccctctgtgcagacctactcctgcctgtcctatgggccagttgcctaccacctggctgccaccctcagcattgtggccaaccctcttgcctcgttggtctccatgttcctgcctaacaggtctctgctgttcctgggggtcctctccgtgcttgggacctgctttgggggctacaacatggccatggcggtgatgagcccctgccccctcttgcagggccactggggtggggaagtcctcattgtggcctcgtgggtgcttttcagcggctgcctcagttacgtcaaggtgatgctgggcgtggtcctgcgcgacctcagccgcagcgccctcttgtggtgcggggcggcggtgcagctgggctcgctgctcggagcgctgctcatgttccctctggtcaacgtgctgcggctcttctcgtccgcggacttctgcaatctgcactgtccagcctaggcaggccgccgaccccgcccccatcgctcacggacggaactggggtccagagaggccaggtcacagagcaaggggcaggaacagagagacagagcctgagtaattgaatcatgaacgcaagtgcccactggggactgtggggaagatggcacctggaaatgcaaggtgcggctctatccccaactctgtgtcacactacctgtgacgaccagctcagatctcctttgctttgactctcaagagaggactgatttgcagcatctagctggaggcaggcccaagggtgttagaagggaaacagctgggacagccggctgtcccttcaggctgtgtgaccttgggaaagtcatttggcttctctgtgcctgtttcttcatgcatgcagtggggattccagtaagtaccaactacctcacaggcatggcacggaggcaaaaggaaaaagcagcccgcatcaagcaagccctcctgggccacctgctgatctgacagtccatcgtagtaacaagagtggcagtctgcacaacctagaagtggccagaagggttgagacacgcccctgccctctctcctttgcccctcagtctcacagaggggcttctacaagacaagcagataacgatagaatcttgggcatcttggctttcggattctcagtgtggagggacgtagtaccccacacaccccttcctgtcatccttcctggcccataaagcccactagttggagagtaagtaccctcctggaagccgggagagatgatttgctggtggggctggggaaggcccatccctgagcctctgaaagtgaactccccgaccaggttggggaccagacatgcagagcccctggaagtattctctcaaatggaggcaacagaggtgattgttattttgttttagtttctgtttttcatttttttaaataaaggcattccctgctttt

SEQ ID NO: 184472 - DNA, 4520 bp, Homo sapiens
  Payload ID: 16324
  Gene Symbol: SLC6A14
  Gene Name: solute carrier family 6 (amino acid transporter), member 14
  Uniprot ID: Q9UN76
  ENST ID: ENST00000598581
  CDS Start-End: 89-2017
taggaacaggggagagtgcacctgctaccagtcaagctcagccagactgcaagaggaggcgaggcggagccagccgagggagtgaaccatggacaagttgaaatgcccgagtttcttcaagtgcagggagaaggagaaagtgtcggcttcatcagagaatttccatgttggtgaaaatgatgagaatcaggaccgtggtaactggtccaaaaaatcggattatcttctatctatgattggatacgcagtgggattaggaaatgtgtggagatttccatatctgacctacagcaatggtggaggcgccttcttgataccttatgcaattatgttagcattggctggtttacctttgttctttctggagtgttcactgggacaatttgctagcttaggtccagtttcagtttggaggattcttccattgtttcaaggtgtgggaattacaatggtcctgatctccatttttgtgacaatctattacaatgtcataattgcctatagtctttactacatgtttgcttcttttcaaagtgaactaccatggaaaaattgttcttcgtggtcagataaaaactgtagcagatcaccaatagtaactcactgtaatgtgagtacagtgaataaaggaatacaagagatcatccaaatgaataaaagctgggtagacatcaacaattttacctgcatcaacggcagtgaaatttatcagccagggcagcttcccagtgaacaatattggaataaagtggcgctccaacggtcaagtggaatgaatgagactggagtaattgtttggtatttagcactttgtcttcttctggcttggctcatagttggagcagcactatttaaaggaatcaaatcgtctggcaaggtggtatattttacagctcttttcccctatgtggtcctactcatcctgttagtacgaggtgcaactctggagggtgcttcaaaaggcatttcatactatattggagcccagtcaaattttacaaaacttaaggaagctgaggtatggaaagatgctgccactcagatattttactccctttcagtggcttggggtggcttagttgctctatcatcttacaataagttcaaaaacaactgcttctctgatgccattgtggtttgtttgacaaactgtctcactagcgtgtttgctggatttgctattttttctatattgggacacatggcccatatatctggaaaggaagtttctcaagttgtaaaatcaggttttgatttggcattcattgcctatccagaggctctagcccaactcccaggtggtccattttggtccatattattttttttcatgcttttaactttgggtctcgattctcagtttgcttcgattgaaacgatcacaacaacaattcaagatttatttcccaaagtgatgaagaaaatgagggttcccataactttgggctgctgcttggttttgtttctccttggtctcgtctgtgtgactcaggctggaatttactgggttcatctgattgaccacttctgtgctggatggggcattttaattgcagctatactggagctagttggaatcatctggatttatggagggaacagattcattgaggatacagaaatgatgattggagcaaagaggtggatattctggctatggtggagagcttgctggtttgtaattacgcctatccttttgattgcaatatttatctggtcattggtgcaatttcatagacctaattatggcgcaattccataccctgactggggagttgctttaggctggtgtatgattgttttctgcattatttggattccaattatggctatcataaaaataattcaggctaaaggaaacatctttcaacgccttataagttgctgcagaccagcttctaactggggtccatacctggaacaacatcgtggggaaagatataaagacatggtagatcctaaaaaagaggctgaccatgaaatacctactgttagtggcagcagaaaaccggaatgagatctcattgaaaaaaatatatgattgtataatgtgattttttttagaatagggggaaccttatttatttgtgtgttaactgaataggaaaatgtacatactatgttcatgatagtgtgatttttttcacatttaagcaggaatgcaatataaaaatgtgaatctcttaattctcagccatgtgcttattatatttctttttagattgtctatctgtataacacacacacacacacctaagagtctctatttcacaattatatttttgtaaatagtatatgcatttttaatacattggaggctttattttgaactaatttcttagagaatagttatattttctattacacaagtttaaaaatattattaacttgtattttcttaatatacaatctatcttttccacaaatatgagtgggaaataaatcagcacatttgaaagaaagtgttaaaactgaaggcctcacttaattagaaacgtgataaatatatggacaaatggactatacatactataagaggactgtagtttaatactttttacccaaatatgtttaaaaacttcgtgcatttgttacagctcatgttttctatatgaacttagtcattaatgttctttataaaaagtgaaataagatggaaaaataaggatcctacagccagtaagtgataaatctagaaaattgagttttgagtacctcttttcccatatacaatcttccttccttaggtaatttggaagaaaactatgacccatttaatttctattgtgtttcacaaaattaagtgttgttcattatactctctgaaatataggtttaatttcaaatagaatatggacttaaatgttaatgagaaaatggctttaatcaattctagcattttattactgtaatacagggctgatagagtgattttgtcttatatgagtaagttactacttacaggtgataacttgcatactattggaagataaacttgtcaaacttgtcaagaatgagaaaagccaaattagaaaatcctatgtcctagtttccttaccaaggataattaaatatatcactaagagctttatatattgattatatattgttgacaactggtttaagcatcatagcctatgatgataaacactgcctatatatgtaaatagcttttcatcaattcttaaatttcttaacctaggcttcagggagcatatgaaaccaaaattatatggaacattttctgtgtgtacatgtacatgcatttttctagggagagagtccgtaggtttatcagaatatcaaggaaaactgtgacccaaagaagtttaagaatcacatacactgctgctggctttttgtgcttggcaaatgagtgacaatagaagaaataatttttcttacacattttaaaacgttttctcttccttgtgattgaagatgaaaggagtaagaaattaaggcatttgtttaatttatactggtaacttatttaggggggaggggacatgaaggtaggtaaataggtaggcctctaattgaaccacctctctaagttatgtacgtatatataagctgaaattgtgtttgacattctgagggttttctttttctttttccttttttttttttttggtggggggctgggggtcagagtcttgttctgttgcccgggctggagtgcagtggcatgatctcagctcactgcaacctctgccttctggattcaagtgattctcctgcctcagcctcttgagtagctgggactacaggtgcccgccaccacaccagctaatttttgtatttttagtagaggcgaagtttccccatgttggccaggctggtcttgaactcccgacctcaagtgatctgtctacctcggcctcctaaagtgctgagattacaggtgtgagccaccgtgcccggcccattctaagggttttctttgaagacaggtcaaatgctgttagtaagtttcaggagattgttaattcctcagttataccagattttataaaatatttgagaatagatggctaacaagaggttagaaatacttttccttaattttaatccacagtatgttacatgcattctaccactacattttggtgctatttaaggtgtgcaattttctataggtgacttttgcaattcagggaagatttgggcatattaaatgaaagaatatctaattgggggaggtgtgaagggaaagaaattcttttcaaaagctgaccacaaagagtagttaaaagtttttgtcactatcttcacaagtgtgtaaagcacagatttcaacagagtgcttggcatattgtagggtgctcaatggtggtttttattattattactcagattccacagtggcaagaaacatcattctacataatggaaaacatttacatcaaatcccacttactttaatgcgaacttggagataatttatggtattgtattgtaaaccattaatgaaaactttttcacagttgagtgaaattaaaatcactatatctcaa

SEQ ID NO: 184473 - DNA, 4502 bp, Homo sapiens
  Payload ID: 16325
  Gene Symbol: SLC6A1
  Gene Name: solute carrier family 6 (neurotransmitter transporter), member 1
  Uniprot ID: P30531
  ENST ID: ENST00000287766
  CDS Start-End: 422-2221
tcccttccccgcgaccctccgcccgccctcggaagaccgagacagcggagaggttgcgggtgagctgcgctgagcccaggagccgaggagtcgggagcgcagtagcgctgagcccgagcccgagcggccccgcgtcccgagcgcatcggagcggccgagccgcccggatgcagcgcctgtcccgggcagcgcagccccggccgcaggatctcacccagggtggcagaaggaggccttctggagctgacccacccccgacgaccatcagggtgaggcaactccaaggtcctactctctttctgtgcctgttacccaccccgtcctcctagggtgcccttgagccgcaaaactgctgtccacgtggaccgggggtgacatcgcacgtccatctgccaggacccctgcgtccaaattccgagacatggcgaccaacggcagcaaggtggccgacgggcagatctccaccgaggtcagcgaggcccctgtggccaatgacaagcccaaaaccttggtggtcaaggtgcagaagaaggcggcagacctccccgaccgggacacgtggaagggccgcttcgacttcctcatgtcctgtgtgggctatgccatcggcctgggcaacgtctggaggttcccctatctctgcgggaaaaatggtgggggagccttcctgatcccctatttcctgacactcatctttgcgggggtcccactcttcctgctggagtgctccctgggccagtacacctccatcggggggctaggggtatggaagctggctcctatgttcaagggcgtgggccttgcggctgctgtgctatcattctggctgaacatctactacatcgtcatcatctcctgggccatttactacctgtacaactccttcaccacgacactgccgtggaaacagtgcgacaacccctggaacacagaccgctgcttctccaactacagcatggtcaacactaccaacatgaccagcgctgtggtggagttctgggagcgcaacatgcatcagatgacggacgggctggataagccaggtcagatccgctggccactggccatcacgctggccatcgcctggatccttgtgtatttctgtatctggaagggtgttggctggactggaaaggtggtctacttttcagccacatacccctacatcatgctgatcatcctgttcttccgtggagtgacgctgcccggggccaaggagggcatcctcttctacatcacacccaacttccgcaagctgtctgactccgaggtgtggctggatgcggcaacccagatcttcttctcatacgggctgggcctggggtccctgatcgctctcgggagctacaactctttccacaacaatgtctacagggactccatcatcgtctgctgcatcaattcgtgcaccagcatgttcgcaggattcgtcatcttctccatcgtgggcttcatggcccatgtcaccaagaggtccattgctgatgtggcggcctcaggccccgggctggcgttcctggcatacccagaggcggtgacccagctgcctatctccccactctgggccatcctcttcttctccatgctgttgatgctgggcattgacagccagttctgcactgtggagggcttcatcacagccctggtggatgagtaccccaggctcctccgcaaccgcagagagctcttcattgctgctgtctgcatcatctcctacctgatcggtctctctaacatcactcaggggggtatttatgtcttcaaactctttgactactactctgccagtggcatgagcctgctgttcctcgtgttctttgaatgtgtctctatttcctggttttacggtgtcaaccgattctatgacaatatccaagagatggttggatccaggccctgcatctggtggaaactctgctggtctttcttcacaccaatcattgtggcgggcgtgttcattttcagtgctgtgcagatgacgccactcaccatgggaaactatgttttccccaagtggggccagggtgtgggctggctgatggctctgtcttccatggtcctcatccccgggtacatggcctacatgttcctcaccttaaagggctccctgaagcagcgcatccaagtcatggtccagcccagcgaagacatcgttcgcccagagaatggtcctgagcagccccaggcgggcagctccaccagcaaggaggcctacatctagggtgggggccactcaccgacccgacactctcaccccccgacctggctgagtgcgaccaccacttgatgtctgaggataccttccatctcaacctacctcgagtggcgagtccagacaccatcaccacgcagagaggggaggtgggaggacagttagacccctgggtgggccctgccgtgggcaaggatacccggtggcttctggcacctggcgggctggtgacctttttaatccaggccccatcagcatcccacgatcggccttggtaaccgccgcggtagatcatttttatcccgccagggagtgtgatgcaggaagaccacatgcgctcctggcttttaaacctgttcctgactgttctcttactgccgaaacccttgactgttatctcggactttgcaggagttcctttccctccgaacgctgctccatgcacaggaaaagggcattttgtacaatggggacttcccgggaacgcttgctcttaagtaccagaagccggcggagctctggctttcgtgtttttggttttctccttcccaaggcagctggattgaaaaaacaaaacaaaacaaaaaaacccaggggcgtcagtcgatattcccagggccgcttctcctgcagtctgtggagcgtccttgtccccgccgccggaatgaatgagcattctgcagcccgatgtccctgtcccctcctcgccgggccattctgattggacctggcccagtgcaatctgtccagacaagccctgcttgctggaaaactgccacaagcacaattgatctctttttatcgccattccaggggcctcaggtcctactggggaaacttcctataccggagctccagtttctcttaagctgcccaatttcacagagtacaaaatagttgtaggggaaatcaaggtgaaggatctgtccgacagtcaagacggatccacagtaatctttcggtctccttaaactaccaccctcgctgccacccaccccaagctgctgccgcctcaccttccttgaaatttctcagcgggagtctcctcactgccactaaaatccacccagcccactaactgaggagctagtgttaatccagagaaccccccgcaatgtgcttccgagattcagactgcttcattgggaagtatgatttgttcctttctggaattgggctccgtggtggcggcggcacttcaagcaaagacagtttcttgcaagctccagtagctccgcgtgtctcatttgccaggaagatgggttcccacgtagcaaatcgtacattgtgccctgtagctccttagctagttagctcacaagccgtgttttatgactaatccttaataactatggtaaataactgtgactgtggggtttttaatctcttgtcattctcatccaaaagtgaccagcataccagttcttgcaataagatattaccctcagaatattaagcacattattgtagagaaaaaaaaatatgtgtacacatatgaacgcacaacatgcacattcatcctcacatgtggcacgtaaggtctcatttgatattgtgtaggaaatctgaagccttttcctgaggtcatctgtaaaatagtctcattgccaaggcatccccagtgccagctggtgaatccatgatcaaaatgcatacgtattgttaaatgataaggtttagaatgacaggaacccatcactgtgtctcatggtcccacttccccatctgtgtgtgaattcctttagactaagggcaggaagacttccagctttctctttgttcttcaatgtgaaactgagaccaagtctctctaagacaaatgcagtgtatttaatgtttgtaagcaattctaagtgagatgtttggcaagaaatcccctaactgatttccatccaaacctaccttatagagcacaatattaagtgttgtacaattactgtgagaactgtgaatatgtgtaacttttttttagtatttgcccggggggaaaaagatattgtattatcatatatgcttttttgcaataaggatttattctcagaacaccaagtaaatctatctctatataaaaaatatatgtaatatatacatattcaaagtatatacagagcctgttttaaaaaatacagtattatttagtaaaattatctgttctatggaccaaatgtaaaatatttataaatgaagatgcattttaaatgtctataaatggtgtcataactagagcacgggcgttatgtaagtttctaagaatttagaggataaataataaaggttctatgatatacaa

SEQ ID NO: 184474 - DNA, 472 bp, Homo sapiens
  Payload ID: 16325
  Gene Symbol: SLC6A1
  Gene Name: solute carrier family 6 (neurotransmitter transporter), member 1
  ENST ID: ENST00000425938
  CDS Start-End: 357-472
ttccccgcgaccctccgcccgccctcggaagaccgagacagcggagaggttgcgggtgagctgcgctgagcccaggagccgaggagtcgggagcgcagtagcgctgagcccgagcccgagcggccccgcgtcccgagcgcatcggagcggccgagccgcccggatgcagcgcctgtcccgggcagcgcagccccggccgcaggatctcacccagggtggcagaaggaggccttctggagctgacccacccccgacgaccatcagggtgcccttgagccgcaaaactgctgtccacgtggaccgggggtgacatcgcacgtccatctgccaggacccctgcgtccaaattccgagacatggcgaccaacggcagcaaggtggccgacgggcagatctccaccgaggtcagcgaggcccctgtggccaatgacaagcccaaaaccttggtggtcaaggtgcagaagaaggcggc

SEQ ID NO: 184475 - DNA, 4296 bp, Homo sapiens
  Payload ID: 16326
  Gene Symbol: SLC6A11
  Gene Name: solute carrier family 6 (neurotransmitter transporter), member 11
  Uniprot ID: P48066
  ENST ID: ENST00000254488
  CDS Start-End: 67-1965
gaaaagccagctcgcccggggcggcggcgcagagccgggccggcgcacgaggcagccagcgcggccatgacggcggagaaggcgctgcccctgggcaatgggaaggctgctgaggaggcgcgggagtccgaggcgccgggtggcggctgcagcagcgggggcgcggcgcccgcgcgccacccgcgcgtcaagcgcgacaaggcggtccacgagcgcggccactggaacaacaaggtggagttcgtgctgagcgtggccggggagatcattgggctgggcaacgtgtggcgcttcccctacctgtgctacaagaacggaggaggggcattcctgattccctacgtggtgttttttatttgctgtggaattcctgtttttttcctggagacagctctggggcagttcacaagtgaaggtggcattacgtgttggaggaaagtttgccctttatttgaaggcattggctatgcaacacaggtgattgaggcccatctgaatgtgtactacatcatcatcctggcatgggccattttttacctgagcaactgcttcactactgagctaccctgggctacctgtgggcatgagtggaacacagagaattgtgtggagttccagaaactgaatgtgagcaactacagccatgtgtctctgcagaatgccacctcccctgtcatggagttttgggagcaccgggtcctggccatctctgacgggatcgagcacatcgggaaccttcgctgggagctggccttgtgtctcttggcagcctggaccatctgttacttctgtatctggaaggggaccaagtctacaggaaaggttgtatacgtgactgcgacattcccctacatcatgctgctgatcctcctgatacgaggggtcacgttgcccggggcctcagagggcatcaagttctacttgtaccctgacctctcccggctctccgacccccaggtctgggtagatgctggaacgcagatctttttctcctatgccatttgcctgggctgtctgaccgctctgggaagttataacaattataacaacaactgctacagggactgcatcatgctctgttgcctgaacagcggcaccagcttcgtggctgggtttgccatcttctcagtcctgggttttatggcgtacgagcagggggtacccattgctgaggtggcagagtcaggccccggcctggcctttattgcgtaccccaaggcggtcaccatgatgcctctctccccgctgtgggccaccttgttcttcatgatgctcatcttcctgggcctggacagccagtttgtgtgtgtggaaagcctggtgaccgccgtggtggacatgtaccccaaggttttccggaggggttaccggcgggagctgctcatcctagccttgtctgttatctcctattttctgggcctcgtgatgttaacagagggtggcatgtacatcttccagctctttgactcctatgccgccagtgggatgtgccttctcttcgtggccatctttgagtgcatctgcatcggctgggtgtatggaagcaaccggttctatgataacattgaagacatgattggctaccggccaccgtcgctcattaagtggtgctggatgatcatgacccctgggatctgcgcggggatcttcatcttcttcttgatcaagtacaagccactcaagtacaacaacatctacacctacccagcctggggctatggcattggctggctcatggccctgtcctccatgctctgcatcccgctctggatctgcatcacagtgtggaagacggaggggacactgcccgagaaactccagaagttgacgacccccagcacagatctgaaaatgcggggcaagcttggggtgagcccacggatggtgacagttaatgactgtgatgccaaactcaagagtgacgggaccatcgcagccatcacagagaaggagacgcacttctgagcggccaccagccatctggggctcttcttcctttcttccccccgtgtatgtaaatgaattcctgaaccccatacttcacctaatggtaggggcttgcttgttttgcacaggattaattaacaagttaattttaaggtggccactgtacactgctctaaagtcatatcccctccccgcccccagtcatcatggaagtaaccactacaaagagataacactgtacggggactgccagatcttctgtcctagggcagttttaatcaatgttttctagggattaggaagaagtgtataatattgtaaaactttttttactggggttgtgggccaggtggggtggggagtgatggctgtcctcctctgtcggccttttaatgaccgttctgtgtcccatgtatgtctctgaccatccacagccgcccctcctccataccccagggataatttttccttcaaaccttccctttccaagggacactgggtttgcagacagcaaggctatgtggcagagaagaaaaagtccagcagactcaggactcctgggctgcaggcccccctctgccctgatcccatgaagtgaccttgggcactccctttccctccctgggcctcagtttccccatctcccaaatgggaggaggagccggattgggttatttcttagggattctctttgtgtgccttgctggcttccagacctgccgtggaccttggcttcctctgaagacttgcaggcaataatctccgccctcccagttgtacctcctccccacctgcttatttaaaatcaagtttattgtagaaatggtgtggtgttgatgtgtgttttccctaaaactctaatttcatctcatctgtgggcagccctgctctctggacaccagtgggtcctcagcccccatggcaggggctcctctgtctggcctgcctttttttcctggtcagctgctcttagcgccggctctgcctctccacccttggcagggctggctggagttgctgtggggactgattttctgggtggggaagcagccatctattcttgcagccatctcagccagggtctatgtcttaggaccttcctccggccttccatgagaagcagccacagggggcctggtttcctcctaaggcccttctctgtcccaggccacctcttctccctcctcctgtcccctaacctccacctaccaccatcctccctctcagttctctcccatccttgcccctggttcaggagccattctacctgcctcagtggccaggcgcaaggctacaggtgcagtcacctgttcccggccaccttccctcccatctttggcagacagaagtctcagctctcactagagggaagacctgggcatcctgctggctcctctctccgtggggcctggagtctggtgctgttccccagccagcctggctgcagacctctctggctgataccgctcttcttctttaattggacttcatatcaagcctctgccttggtttctgagctatatgagggtggggaaggcacactcttttttcctttttccttaggttcccaatattatttggtggaaacgtgggctttctccaaaccaaggcctgagtttcctgtaagggtcctctgtttttgattcacccaaaagtctgcaaacccccagcatctctgctctggccagccctgatctgaagcctgtgtctactaagagggatgcccagtgccccactgggcaggacgggaagcctagcctgggccccctctgtgcacacagttcaggcctgcccagcttcttatgggcaagccaccatcccactctcgtctccctgagctgtctggttctgcggacccaggaagggccaggctggggccctgcttgtgtttatcctcggctgctgtcttcccagcaggccccaggcaaggaggcttcccattgctgctgctaccggttctccacagatccctgtggtccgccatcgccgacacacacacacgtcgtaatgtggctaacgcttgactcacttaacactactcatggggcagggcggagggtggattgttgctttttgttttttgtaatttcctactagtatttgggtaactttgggggtggggagggcaatgtgggggcaggggaacatgtcattgtgatgacttttttgatattcattagaaacaatacatcctttctgagatatttacagtattattaaaaaatgaaaaaggttgtactgttttgcataatgaacatttttattgggcattcaaagggtgcaagattgtctgcttactcatttttaaaaattaaagaaatgaacaatcagtgtggctattcctagcaa

SEQ ID NO: 184476 - DNA, 2794 bp, Homo sapiens
  Payload ID: 16326
  Gene Symbol: SLC6A11
  Gene Name: solute carrier family 6 (neurotransmitter transporter), member 11
  Uniprot ID: P48066
  ENST ID: ENST00000454147
  CDS Start-End: 66-692
aaaagccagctcgcccggggcggcggcgcagagccgggccggcgcacgaggcagccagcgcggccatgacggcggagaaggcgctgcccctgggcaatgggaaggctgctgaggaggcgcgggagtccgaggcgccgggtggcggctgcagcagcgggggcgcggcgcccgcgcgccacccgcgcgtcaagcgcgacaaggcggtccacgagcgcggccactggaacaacaaggtggagttcgtgctgagcgtggccggggagatcattgggctgggcaacgtgtggcgcttcccctacctgtgctacaagaacggaggaggggcattcctgattccctacgtggtgttttttatttgctgtggaattcctgtttttttcctggagacagctctggggcagttcacaagtgaaggtggcattacgtgttggaggaaagtttgccctttatttgaaggcattggctatgcaacacaggtgattgaggcccatctgaatgtgtactacatcatcatcctggcatgggccattttttacctgagcaactgcttcactactgagctaccctgggctacctgtgggcatgagtggaacacagagaattgtgtggagttccagaaactgaatgtgagcaactacagccatgtgtctctgcagaatgccacctcccctgtcatggagttttgggagtaagtggagaagaacttgtctcccttggcctgtgggggctctgtcctggttctgctcagttggtcttgcccctattcctggaaaaagcctgatccttcttgcagcctggcacttcctggcttctgtgagcattcgacagcttcggaagcaagagtgcagatcttcagaggtttcccaaaggggcagctgagagaaatgttttcttgttctttgataacatgtcagcatgcatagtgggttattagggcaggaagtacttggtgaaaggatagacagtttaaaaattcattttgagcaaaagaggagatgcagcctgtttgcaataagctaagtcaagagtgtatttagcctggaaagcataagtctctagaggggataggttagctttctttcagtagctgaagtgtcatatggaaaagaaggagatcaaatttaatggatagagattataaagaggcaggtttcaaatgtgcgtagggaagaacttggtctcatagcatagcattatctggaagcacttcagaaggttgtgagcacccatccctggaagttgaccagtatagggttgccaatcattgttgggggtgtgtctgaatccactgaaattataagtagtacttgtgtggttgggcattttcccagaaattggcatagttttatcagagttccaaaggatctgtgacccttacagggctgctatgtgtggttgtgtacattgcacactgaacaacccaaggggccataatttacattatgaaatatacattccagaattgtgtggtgcacgacctgtataaccatacacagtggccctgacttgcaagtttgttttaaaggtagaaggatcccttgccccaggtattggaaagaagtttcctgtatgggtcaaaggctggactaaatgctttctgaagcttttcaatctaaaaagtcctggcttcattgaagaagcctcccttactctgatggtgattaatagtagtatatgtgtgtgtggtggggcagtggtttatgagtgatttttatttttttcccagataccattcgtctcctgccttctctagaggtcattatgctgaatttagatttaccactctcatataaatcttcatacttttcatatatatatgccccaaatagcacctaggtctttcttgcatatttttcaaatttgtgatactggcatccattatttacattttttataacaactttatttctttgctcaatattggttcttagatgtatccatattggtacatgtagctttggttctttcatttttctatcagagtatttcattgtatgaatggcctgtgttgtatttatccaggtcctcttggtcctcttgatgggcatttaggctgttgcccatttctcactattattaagcacactgagtgaatgtctagtctgtgcttccttgagtggaattgctgggttgtagcatacatgcgttgtcagttttatcatataacgtaaaattactttagaaagaaattaatctaggccaggcatggtggctcacacctgtaattccagcactttgggaagccgaggtgggcggatcacctgaggtcaggagtttgagaccagcctggccaacatggtgaaaccctgtctttactaaaaatacaaaaattagctgggtagtggttcatgcctgcaatctcatctactcaggaggttgaagcaggagaatcacttgaacctggaaggcgaaagttgcagtgagccgagatcggcgccactgcactccagcctgggtgacagagcgagactgtctcaaaaaaaaaaaaaaaaattaatttacactccaaacaagagtttgtgagaatttctgcagcttcacattttggacagcacttggtctgttcagtttttgttttgccagtgtaatgggcattaaatgataacttactattttaaattcacatttctctaattacttgtgaggttaagcaccttttcatgttttgttttgtctgttttttgctatttgatttctgtacctgtgaacttcaggtttacattcgtttctatttggatagtttgtcttttcttacagatagaaattgttaatacattctagatattatcttttc

SEQ ID NO: 184477 - DNA, 3165 bp, Homo sapiens
  Payload ID: 16327
  Gene Symbol: SLC6A12
  Gene Name: solute carrier family 6 (neurotransmitter transporter), member 12
  Uniprot ID: P48065
  ENST ID: ENST00000359674
  CDS Start-End: 330-2174
agtgattagcctgtggagcaggaaagtccagcgatgggcagctggtcacggcagtgggtgaaagcaggggtggtcatctgacgaggggaggggaagcaggtggtgcccagcaaggtggaaggagaagtggacaggagaaacctcggggcattcccgagggcccaggaactgcaataaatgatcacagggaaacttagagttcagagagggggtgtgatttgcctgaggtcacacagcaagttagagacccagctccacgactcattgtcttggctttggccctcgtcatcctgcccacccagcggggcttcccaacccaccacacagccatggacgggaaggtggcagtgcaagagtgtgggcctcctgcagtctcctgggtccccgaggagggagagaagttggaccaggaagacgaggaccaggtgaaggatcggggccaatggaccaacaagatggagtttgtgctgtcagtggccggggagatcattgggctgggcaatgtctggaggtttccctatctctgctacaaaaacggaggtggagccttcttcatcccctacttcatcttcttctttgtctgcggcatcccggtgttcttcctggaggtggcgttgggccaatacaccagccaagggagtgtcacagcctggaggaagatctgccccctcttccagggcattggtctggcatctgtggtcatcgagtcatatttgaatgtctactacatcatcatccttgcctgggctctcttctacctgttcagctccttcacttctgagctgccctggacgacctgcaacaacttttggaacacagagcattgcacggactttctgaaccactcaggagccggcacagtgaccccatttgagaattttacctcacctgtcatggaattctgggagagacgagttctgggcatcacctcgggcatccatgacctgggctccctgcgctgggagctggccctgtgcctcctgctcgcctgggtcatctgctatttctgcatctggaagggggtcaagtccacaggcaaggtggtttatttcacagccacgtttccgtacctgatgcttgtcattttgctgatcagaggtgtcacccttcccggagcctaccagggcatcatctactacttgaagccagatttgttccgcctcaaggaccctcaggtgtggatggatgcgggcacccagatcttcttctcctttgccatctgccaggggtgcctgacagccctgggcagctacaacaagtatcacaacaactgctacaaggactgcatcgccctctgcttcctgaacagtgccaccagctttgtggctgggtttgttgtcttctccatcctgggcttcatgtcccaagagcaaggggtgcccatttctgaagtggccgagtcaggtcctgggctggccttcatcgccttccccaaggctgtgactatgatgcccttatcccagctgtggtcctgcctgttctttatcatgctcatattcctagggctggacagccagtttgtctgtgtggagtgcctggtgacagcctccatagacatgttccccaggcagctccggaagagcgggcggcgcgagctcctcatcctcaccatcgccgtcatgtgctacctgatagggcttttcctggtcaccgagggcgggatgtacatcttccagctgtttgactactatgcttccagtggcatatgcctgctgttcctgtcattgtttgaagtggtctgcataagctgggtgtatggggcggaccgtttctatgacaacattgaggacatgattggctaccggccatggcccctggtgaagatctcctggctcttcctgacccctggactttgcctggccactttcctcttctccttgagcaagtacacccccctcaagtacaacaacgtctatgtgtacccgccctggggatactccattggctggttcctggctctgtcctccatggtctgtgtcccactcttcgtcgtcatcaccctcctgaagactcggggtcctttcaggaagcgtctgcgtcagctcatcacccctgactccagtctgccacagcccaagcaacatccctgcttggatggcagtgctggccggaactttgggccctccccaacaagggaaggactgatagccggggagaaggagacccatttgtagggtgtggccagaggccaggcggctcctaagccgggaacctaggtcagggccaccctccattctcagcggacagcctctgcctctgtctcctgccacaatcctgctgggaacctctggagagccacaggcacccccagctggaggccagactcctctcttgtgctagctggagcagctccttcccctttgctgataacaccaccactgggacgtgccatgttgggacgccactccctgtgggaaggcaccatcgtttttataaaggggggtctttttggaggccgccatctgattgcaacacctcgagttatgaggattccactgtggggatgcctcttgttagagcgtactgcatttgtacacggggagaggagctataattggaacgcacactgccgtccaatgtggagagcctgatgggacaataccctgttggaagtgacaactgaacacactgtgttggatcggaggttccgttaggggatccttccttaggcttaacgacagaggcaagcctttgcatgccgtcagtctggagtttcctccgagtctctcatggcatctccagctcctgccctagttccgcactgttcttgcagtgtttcatcaactcctggagcattggaatggaaggggcttgggagatgattcctagacttcacaaacactcggcatgcctccctgcactgtccgttcctctgcccaaggccgatattgctaactgatcacagattctttcccacctcacaatccttccgaatgtgctccaggcagcaccatttgccatcctgcttctaacgcaaacccctgacttcatggatgaggaacctggagaccaaagagacaaagggactttttcaagttcacatggggacccccttcttgggggccagagatatgactaaaaccttatctccttgtgctcaggccagtgtcttcccattaaccccctgccttagttaacaagtgtgtatggattgccttccatgcg

SEQ ID NO: 184478 - DNA, 3294 bp, Homo sapiens
  Payload ID: 16327
  Gene Symbol: SLC6A12
  Gene Name: solute carrier family 6 (neurotransmitter transporter), member 12
  Uniprot ID: P48065
  ENST ID: ENST00000397296
  CDS Start-End: 459-2303
gttcagaggccccaccttctcttttcctcccaatcagctgcccagagctgctggctcccctgtttactctgagctgatcgatcaccttagcacacagctggctaggagagaaccatgcagtcacttcggccacacctgcccgttgacccttgctacctcggcaggctttgatcccttctgacctggaggccagaggctaggctgaggtcactcagcagacatcaaggacctgggcagatgggccggctgggatggtggcgagctgtacagataaaaagggacatgaaaatgaaaagcccgagcctgagttttcatcacggttccactcctgagtggtcttgggtgaatcacttcatctgccaaggcctggatttcctcatctgcaaactcagaaaactaaggctttggccctcgtcatcctgcccacccagcggggcttcccaacccaccacacagccatggacgggaaggtggcagtgcaagagtgtgggcctcctgcagtctcctgggtccccgaggagggagagaagttggaccaggaagacgaggaccaggtgaaggatcggggccaatggaccaacaagatggagtttgtgctgtcagtggccggggagatcattgggctgggcaatgtctggaggtttccctatctctgctacaaaaacggaggtggagccttcttcatcccctacttcatcttcttctttgtctgcggcatcccggtgttcttcctggaggtggcgttgggccaatacaccagccaagggagtgtcacagcctggaggaagatctgccccctcttccagggcattggtctggcatctgtggtcatcgagtcatatttgaatgtctactacatcatcatccttgcctgggctctcttctacctgttcagctccttcacttctgagctgccctggacgacctgcaacaacttttggaacacagagcattgcacggactttctgaaccactcaggagccggcacagtgaccccatttgagaattttacctcacctgtcatggaattctgggagagacgagttctgggcatcacctcgggcatccatgacctgggctccctgcgctgggagctggccctgtgcctcctgctcgcctgggtcatctgctatttctgcatctggaagggggtcaagtccacaggcaaggtggtttatttcacagccacgtttccgtacctgatgcttgtcattttgctgatcagaggtgtcacccttcccggagcctaccagggcatcatctactacttgaagccagatttgttccgcctcaaggaccctcaggtgtggatggatgcgggcacccagatcttcttctcctttgccatctgccaggggtgcctgacagccctgggcagctacaacaagtatcacaacaactgctacaaggactgcatcgccctctgcttcctgaacagtgccaccagctttgtggctgggtttgttgtcttctccatcctgggcttcatgtcccaagagcaaggggtgcccatttctgaagtggccgagtcaggtcctgggctggccttcatcgccttccccaaggctgtgactatgatgcccttatcccagctgtggtcctgcctgttctttatcatgctcatattcctagggctggacagccagtttgtctgtgtggagtgcctggtgacagcctccatagacatgttccccaggcagctccggaagagcgggcggcgcgagctcctcatcctcaccatcgccgtcatgtgctacctgatagggcttttcctggtcaccgagggcgggatgtacatcttccagctgtttgactactatgcttccagtggcatatgcctgctgttcctgtcattgtttgaagtggtctgcataagctgggtgtatggggcggaccgtttctatgacaacattgaggacatgattggctaccggccatggcccctggtgaagatctcctggctcttcctgacccctggactttgcctggccactttcctcttctccttgagcaagtacacccccctcaagtacaacaacgtctatgtgtacccgccctggggatactccattggctggttcctggctctgtcctccatggtctgtgtcccactcttcgtcgtcatcaccctcctgaagactcggggtcctttcaggaagcgtctgcgtcagctcatcacccctgactccagtctgccacagcccaagcaacatccctgcttggatggcagtgctggccggaactttgggccctccccaacaagggaaggactgatagccggggagaaggagacccatttgtagggtgtggccagaggccaggcggctcctaagccgggaacctaggtcagggccaccctccattctcagcggacagcctctgcctctgtctcctgccacaatcctgctgggaacctctggagagccacaggcacccccagctggaggccagactcctctcttgtgctagctggagcagctccttcccctttgctgataacaccaccactgggacgtgccatgttgggacgccactccctgtgggaaggcaccatcgtttttataaaggggggtctttttggaggccgccatctgattgcaacacctcgagttatgaggattccactgtggggatgcctcttgttagagcgtactgcatttgtacacggggagaggagctataattggaacgcacactgccgtccaatgtggagagcctgatgggacaataccctgttggaagtgacaactgaacacactgtgttggatcggaggttccgttaggggatccttccttaggcttaacgacagaggcaagcctttgcatgccgtcagtctggagtttcctccgagtctctcatggcatctccagctcctgccctagttccgcactgttcttgcagtgtttcatcaactcctggagcattggaatggaaggggcttgggagatgattcctagacttcacaaacactcggcatgcctccctgcactgtccgttcctctgcccaaggccgatattgctaactgatcacagattctttcccacctcacaatccttccgaatgtgctccaggcagcaccatttgccatcctgcttctaacgcaaacccctgacttcatggatgaggaacctggagaccaaagagacaaagggactttttcaagttcacatggggacccccttcttgggggccagagatatgactaaaaccttatctccttgtgctcaggccagtgtcttcccattaaccccctgccttagttaacaagtgtgtatggattgccttccatgcg

SEQ ID NO: 184479 - DNA, 3332 bp, Homo sapiens
  Payload ID: 16327
  Gene Symbol: SLC6A12
  Gene Name: solute carrier family 6 (neurotransmitter transporter), member 12
  Uniprot ID: P48065
  ENST ID: ENST00000424061
  CDS Start-End: 556-2400
gggtgtgaaggactacagagagagccaggttttggtgccatgcacacagggaaacttagagttcagagagggggtgtgatttgcctgaggtcacacagcaagttagagacccagctccacgactcattgtcttgctgcccagagctgctggctcccctgtttactctgagctgatcgatcaccttagcacacagctggctaggagagaaccatgcagtcacttcggccacacctgcccgttgacccttgctacctcggcaggctttgatcccttctgacctggaggccagaggctaggctgaggtcactcagcagacatcaaggacctgggcagatgggccggctgggatggtggcgagctgtacagataaaaagggacatgaaaatgaaaagcccgagcctgagttttcatcacggttccactcctgagtggtcttgggtgaatcacttcatctgccaaggcctggatttcctcatctgcaaactcagaaaactaaggctttggccctcgtcatcctgcccacccagcggggcttcccaacccaccacacagccatggacgggaaggtggcagtgcaagagtgtgggcctcctgcagtctcctgggtccccgaggagggagagaagttggaccaggaagacgaggaccaggtgaaggatcggggccaatggaccaacaagatggagtttgtgctgtcagtggccggggagatcattgggctgggcaatgtctggaggtttccctatctctgctacaaaaacggaggtggagccttcttcatcccctacttcatcttcttctttgtctgcggcatcccggtgttcttcctggaggtggcgttgggccaatacaccagccaagggagtgtcacagcctggaggaagatctgccccctcttccagggcattggtctggcatctgtggtcatcgagtcatatttgaatgtctactacatcatcatccttgcctgggctctcttctacctgttcagctccttcacttctgagctgccctggacgacctgcaacaacttttggaacacagagcattgcacggactttctgaaccactcaggagccggcacagtgaccccatttgagaattttacctcacctgtcatggaattctgggagagacgagttctgggcatcacctcgggcatccatgacctgggctccctgcgctgggagctggccctgtgcctcctgctcgcctgggtcatctgctatttctgcatctggaagggggtcaagtccacaggcaaggtggtttatttcacagccacgtttccgtacctgatgcttgtcattttgctgatcagaggtgtcacccttcccggagcctaccagggcatcatctactacttgaagccagatttgttccgcctcaaggaccctcaggtgtggatggatgcgggcacccagatcttcttctcctttgccatctgccaggggtgcctgacagccctgggcagctacaacaagtatcacaacaactgctacaaggactgcatcgccctctgcttcctgaacagtgccaccagctttgtggctgggtttgttgtcttctccatcctgggcttcatgtcccaagagcaaggggtgcccatttctgaagtggccgagtcaggtcctgggctggccttcatcgccttccccaaggctgtgactatgatgcccttatcccagctgtggtcctgcctgttctttatcatgctcatattcctagggctggacagccagtttgtctgtgtggagtgcctggtgacagcctccatagacatgttccccaggcagctccggaagagcgggcggcgcgagctcctcatcctcaccatcgccgtcatgtgctacctgatagggcttttcctggtcaccgagggcgggatgtacatcttccagctgtttgactactatgcttccagtggcatatgcctgctgttcctgtcattgtttgaagtggtctgcataagctgggtgtatggggcggaccgtttctatgacaacattgaggacatgattggctaccggccatggcccctggtgaagatctcctggctcttcctgacccctggactttgcctggccactttcctcttctccttgagcaagtacacccccctcaagtacaacaacgtctatgtgtacccgccctggggatactccattggctggttcctggctctgtcctccatggtctgtgtcccactcttcgtcgtcatcaccctcctgaagactcggggtcctttcaggaagcgtctgcgtcagctcatcacccctgactccagtctgccacagcccaagcaacatccctgcttggatggcagtgctggccggaactttgggccctccccaacaagggaaggactgatagccggggagaaggagacccatttgtagggtgtggccagaggccaggcggctcctaagccgggaacctaggtcagggccaccctccattctcagcggacagcctctgcctctgtctcctgccacaatcctgctgggaacctctggagagccacaggcacccccagctggaggccagactcctctcttgtgctagctggagcagctccttcccctttgctgataacaccaccactgggacgtgccatgttgggacgccactccctgtgggaaggcaccatcgtttttataaaggggggtctttttggaggccgccatctgattgcaacacctcgagttatgaggattccactgtggggatgcctcttgttagagcgtactgcatttgtacacggggagaggagctataattggaacgcacactgccgtccaatgtggagagcctgatgggacaataccctgttggaagtgacaactgaacacactgtgttggatcggaggttccgttaggggatccttccttaggcttaacgacagaggcaagcctttgcatgccgtcagtctggagtttcctccgagtctctcatggcatctccagctcctgccctagttccgcactgttcttgcagtgtttcatcaactcctggagcattggaatggaaggggcttgggagatgattcctagacttcacaaacactcggcatgcctccctgcactgtccgttcctctgcccaaggccgatattgctaactgatcacagattctttcccacctcacaatccttccgaatgtgctccaggcagcaccatttgccatcctgcttctaacgcaaacccctgacttcatggatgaggaacctggagaccaaagagacaaagggactttttcaagttcacatggggacccccttcttgggggccagagatatgactaaaaccttatctccttgtgctcaggccag

SEQ ID NO: 184480 - DNA, 577 bp, Homo sapiens
  Payload ID: 16327
  Gene Symbol: SLC6A12
  Gene Name: solute carrier family 6 (neurotransmitter transporter), member 12
  ENST ID: ENST00000537793
  CDS Start-End: 140-577
atccctgtttctctagagccttggaggagcgtggggcacttggtagacctggtcgctttgattccctcaatacccctcagaggctttggccctcgtcatcctgcccacccagcggggcttcccaacccaccacacagccatggacgggaaggtggcagtgcaagagtgtgggcctcctgcagtctcctgggtccccgaggagggagagaagttggaccaggaagacgaggaccaggtgaaggatcggggccaatggaccaacaagatggagtttgtgctgtcagtggccggggagatcattgggctgggcaatgtctggaggtttccctatctctgctacaaaaacggaggtggagccttcttcatcccctacttcatcttcttctttgtctgcggcatcccggtgttcttcctggaggtggcgttgggccaatacaccagccaagggagtgtcacagcctggaggaagatctgccccctcttccagggcattggtctggcatctgtggtcatcgagtcatatttgaatgtctactacatcatcatccttgcctgggctctcttctacctgttcagc

SEQ ID NO: 184481 - DNA, 2101 bp, Homo sapiens
  Payload ID: 16327
  Gene Symbol: SLC6A12
  Gene Name: solute carrier family 6 (neurotransmitter transporter), member 12
  Uniprot ID: P48065
  ENST ID: ENST00000536824
  CDS Start-End: 257-2101
tctttctgtctgggagtccctggacaagtcacatgggattctgcgctgggaggaacagggtaaggcgtgaacgtggagggcagtttccctttcaggtcccggctctcttggctttcccataagcagctgccttgggactctcctggagacctgatgcccacagccaagctgaccacaggagccggtgctggggactgaggctttggccctcgtcatcctgcccacccagcggggcttcccaacccaccacacagccatggacgggaaggtggcagtgcaagagtgtgggcctcctgcagtctcctgggtccccgaggagggagagaagttggaccaggaagacgaggaccaggtgaaggatcggggccaatggaccaacaagatggagtttgtgctgtcagtggccggggagatcattgggctgggcaatgtctggaggtttccctatctctgctacaaaaacggaggtggagccttcttcatcccctacttcatcttcttctttgtctgcggcatcccggtgttcttcctggaggtggcgttgggccaatacaccagccaagggagtgtcacagcctggaggaagatctgccccctcttccagggcattggtctggcatctgtggtcatcgagtcatatttgaatgtctactacatcatcatccttgcctgggctctcttctacctgttcagctccttcacttctgagctgccctggacgacctgcaacaacttttggaacacagagcattgcacggactttctgaaccactcaggagccggcacagtgaccccatttgagaattttacctcacctgtcatggaattctgggagagacgagttctgggcatcacctcgggcatccatgacctgggctccctgcgctgggagctggccctgtgcctcctgctcgcctgggtcatctgctatttctgcatctggaagggggtcaagtccacaggcaaggtggtttatttcacagccacgtttccgtacctgatgcttgtcattttgctgatcagaggtgtcacccttcccggagcctaccagggcatcatctactacttgaagccagatttgttccgcctcaaggaccctcaggtgtggatggatgcgggcacccagatcttcttctcctttgccatctgccaggggtgcctgacagccctgggcagctacaacaagtatcacaacaactgctacaaggactgcatcgccctctgcttcctgaacagtgccaccagctttgtggctgggtttgttgtcttctccatcctgggcttcatgtcccaagagcaaggggtgcccatttctgaagtggccgagtcaggtcctgggctggccttcatcgccttccccaaggctgtgactatgatgcccttatcccagctgtggtcctgcctgttctttatcatgctcatattcctagggctggacagccagtttgtctgtgtggagtgcctggtgacagcctccatagacatgttccccaggcagctccggaagagcgggcggcgcgagctcctcatcctcaccatcgccgtcatgtgctacctgatagggcttttcctggtcaccgagggcgggatgtacatcttccagctgtttgactactatgcttccagtggcatatgcctgctgttcctgtcattgtttgaagtggtctgcataagctgggtgtatggggcggaccgtttctatgacaacattgaggacatgattggctaccggccatggcccctggtgaagatctcctggctcttcctgacccctggactttgcctggccactttcctcttctccttgagcaagtacacccccctcaagtacaacaacgtctatgtgtacccgccctggggatactccattggctggttcctggctctgtcctccatggtctgtgtcccactcttcgtcgtcatcaccctcctgaagactcggggtcctttcaggaagcgtctgcgtcagctcatcacccctgactccagtctgccacagcccaagcaacatccctgcttggatggcagtgctggccggaactttgggccctccccaacaagggaaggactgatagccggggagaaggagacccatttgtag

SEQ ID NO: 184482 - DNA, 554 bp, Homo sapiens
  Payload ID: 16327
  Gene Symbol: SLC6A12
  Gene Name: solute carrier family 6 (neurotransmitter transporter), member 12
  ENST ID: ENST00000535347
  CDS Start-End: 312-554
acatgggattctgcgctgggaggaacagggtaaggcgtgaacgtggagggcagtttccctttcaggtcccggctctcttggctttcccataagcagctgccttgggactctcctggagacctgatgcccacagccaagctgaccacaggagccggtgctggggactgagggaaacttagagttcagagagggggtgtgatttgcctgaggtcacacagcaagttagagacccagctccacgactcattgtcttggctttggccctcgtcatcctgcccacccagcggggcttcccaacccaccacacagccatggacgggaaggtggcagtgcaagagtgtgggcctcctgcagtctcctgggtccccgaggagggagagaagttggaccaggaagacgaggaccaggagccttcttcatcccctacttcatcttcttctttgtctgcggcatcccggtgttcttcctggaggtggcgttgggccaatacaccagccaagggagtgtcacagcctggaggaagatctgccccctcttccagggcattggtctgg

SEQ ID NO: 184483 - DNA, 2185 bp, Homo sapiens
  Payload ID: 16328
  Gene Symbol: SLC6A13
  Gene Name: solute carrier family 6 (neurotransmitter transporter), member 13
  Uniprot ID: Q9NSD5
  ENST ID: ENST00000343164
  CDS Start-End: 54-1862
agataattcttctcccctgactggacctctggcagcagcttcactaaggtgggatggatagcagggtctcaggcacaaccagtaatggagagacaaaaccagtgtatccagtcatggaaaagaaggaggaagatggcaccctggagcgggggcactggaacaacaagatggagtttgtgctgtcagtggctggggagatcattggcttaggcaacgtctggaggtttccctatctctgctacaaaaatgggggaggtgccttcttcatcccctacctcgtcttcctctttacctgtggcattcctgtcttccttctggagacagcactaggccagtacactagccagggaggcgtcacagcctggaggaagatctgccccatctttgagggcattggctatgcctcccagatgatcgtcatcctcctcaacgtctactacatcattgtgttggcctgggccctgttctacctcttcagcagcttcaccatcgacctgccctggggcggctgctaccatgagtggaacacagaacactgtatggagttccagaagaccaacggctccctgaatggtacctctgagaatgccacctctcctgtcatcgagttctgggagcggcgggtcttgaagatctctgatgggatccagcacctgggggccctgcgctgggagctggctctgtgcctcctgctggcctgggtcatctgctacttctgcatctggaagggggtgaagtccacaggcaaggtggtgtacttcacggccacatttccttacctcatgctggtggtcctgttaattcgaggggtgacgttgcctggggcagcccaaggaattcagttttacctgtacccaaacctcacgcgtctgtgggatccccaggtgtggatggatgcaggcacccagatattcttctccttcgccatctgtcttgggtgcctgacagccctgggcagctacaacaagtaccacaacaactgctacagggactgcatcgccctctgcttcctcaacagcggcaccagctttgtggccggctttgccatcttctccatcctgggcttcatgtctcaggagcagggggtgcccatttctgaggtggccgagtcaggccctggcctggctttcatcgcttacccgcgggctgtggtgatgctgcccttctctcctctctgggcctgctgtttcttcttcatggtcgttctcctgggactggatagccagtttgtgtgtgtagaaagcctggtgacagcgctggtggacatgtaccctcacgtgttccgcaagaagaaccggagggaagtcctcatccttggagtatctgtcgtctccttccttgtggggctgatcatgctcacagagggcggaatgtacgtgttccagctctttgactactatgcggccagtggcatgtgcctcctgttcgtggccatcttcgagtccctctgtgtggcttgggtttacggagccaagcgcttctacgacaacatcgaagacatgattgggtacaggccatggcctcttatcaaatactgttggctcttcctcacaccagctgtgtgcacagccacctttctcttctccctgataaagtacactccgctgacctacaacaagaagtacacgtacccgtggtggggcgatgccctgggctggctcctggctctgtcctccatggtctgcattcctgcctggagcctctacagactcggaaccctcaagggccccttcagagagagaatccgtcagctcatgtgcccagccgaggacctgccccagcggaacccagcaggaccctcggctcccgccacccccaggacctcactgctcagactcacagagctagagtctcactgctagggggcaggcccttggatggtgcctgtgtgcctggccttggggatggctgtggagggaacgtggcagaagcagccccatgtgcttccctgcccccgacctggagtggataagacaagaggggtattttggagtccacctgctgagctggaggcctcccactgcaacttttcagctcaggggttgttgaacagatgtgaaaggccagtgccaagagtgtccctctgagacccttgggaagctgggtgggggctggtaggtggggcgagacttgctggcttcgggccctctcatccttcattccattaaatccacattcttcccgc

SEQ ID NO: 184484 - DNA, 1101 bp, Homo sapiens
  Payload ID: 16328
  Gene Symbol: SLC6A13
  Gene Name: solute carrier family 6 (neurotransmitter transporter), member 13
  Uniprot ID: Q9NSD5
  ENST ID: ENST00000436453
  CDS Start-End: 54-347
agataattcttctcccctgactggacctctggcagcagcttcactaaggtgggatggatagcagggtctcaggcacaaccagtaatggagagacaaaaccagtgtatccagtcatggaaaagaaggaggaagatggcaccctggagcgggggcactggaacaacaagatggagtttgtgctgtcagtggctggggagatcattggcttaggcaacgtctggaggtttccctatctctgctacaaaaatgggggaggtgagatgagagcccttgtgccaccccacccactcctggaaggaggatacttccatctcctgcacttacggcccctctggggagtcccatagatgtatagaattctggaggtaggaggacgcttagaggtcattaaggacactctgtaagagactaagacctagaaaggttacgtgactatcccagggctctttctattataacgtggcatcgtagaaatatgagcacaagctggaaccaggtggatgagagtttggattctggctctgctacttaacactctgtgtgatcttggacaagttacttaagctctcagagcatcaattgccgctcctgcaaattgagataataatgcctgcctttcaaggtcattgtaaggattagagacaatgtgtgtaaagcacttaataaatagtagctctgctgatgatgacgttgataaccaaactgttctgtggtcttaagtaataaatagtagctctgctgatgatgacgttgataaccaaactgttctgtggtcttaagtaataagtagtagctctgttgatgatgacgttgataaccaaactgttctgtggtcttaagtaataagtagtagctctgctgatgatgacgttgataaccaaactgttctgtggtcttaagtaataaatagtagctctgctgatgatgatgttgataaccaaactgttctgtggtcttaagtaataaatagtagctctgctgatgatgacgttgataaccaaactgttctgtggtcttaagtaataaatagtagctctgctgatgatgacgttgataaccaaactgttctgtggtcttaagtaataaatagtagctctgctg

SEQ ID NO: 184485 - DNA, 1950 bp, Homo sapiens
  Payload ID: 16328
  Gene Symbol: SLC6A13
  Gene Name: solute carrier family 6 (neurotransmitter transporter), member 13
  Uniprot ID: Q9NSD5
  ENST ID: ENST00000445055
  CDS Start-End: 91-1623
cacactttaaatagccagcaccttctccttcccccttagataattcttctcccctgactggacctctggcagcagcttcactaaggtgggatggatagcagggtctcaggcacaaccagtaatggagagacaaaaccagtgtatccagtcatggaaaagaaggaggaagatggcaccctggagcgggggcactggaacaacaagatggagtttgtgctgtcagtggctggggagatcattggcttaggcaacgtctggaggtttccctatctctgctacaaaaatgggggagaacactgtatggagttccagaagaccaacggctccctgaatggtacctctgagaatgccacctctcctgtcatcgagttctgggagcggcgggtcttgaagatctctgatgggatccagcacctgggggccctgcgctgggagctggctctgtgcctcctgctggcctgggtcatctgctacttctgcatctggaagggggtgaagtccacaggcaaggtggtgtacttcacggccacatttccttacctcatgctggtggtcctgttaattcgaggggtgacgttgcctggggcagcccaaggaattcagttttacctgtacccaaacctcacgcgtctgtgggatccccaggtgtggatggatgcaggcacccagatattcttctccttcgccatctgtcttgggtgcctgacagccctgggcagctacaacaagtaccacaacaactgctacagggactgcatcgccctctgcttcctcaacagcggcaccagctttgtggccggctttgccatcttctccatcctgggcttcatgtctcaggagcagggggtgcccatttctgaggtggccgagtcaggccctggcctggctttcatcgcttacccgcgggctgtggtgatgctgcccttctctcctctctgggcctgctgtttcttcttcatggtcgttctcctgggactggatagccagtttgtgtgtgtagaaagcctggtgacagcgctggtggacatgtaccctcacgtgttccgcaagaagaaccggagggaagtcctcatccttggagtatctgtcgtctccttccttgtggggctgatcatgctcacagagggcggaatgtacgtgttccagctctttgactactatgcggccagtggcatgtgcctcctgttcgtggccatcttcgagtccctctgtgtggcttgggtttacggagccaagcgcttctacgacaacatcgaagacatgattgggtacaggccatggcctcttatcaaatactgttggctcttcctcacaccagctgtgtgcacagccacctttctcttctccctgataaagtacactccgctgacctacaacaagaagtacacgtacccgtggtggggcgatgccctgggctggctcctggctctgtcctccatggtctgcattcctgcctggagcctctacagactcggaaccctcaagggccccttcagagagagaatccgtcagctcatgtgcccagccgaggacctgccccagcggaacccagcaggaccctcggctcccgccacccccaggacctcactgctcagactcacagagctagagtctcactgctagggggcaggcccttggatggtgcctgtgtgcctggccttggggatggctgtggagggaacgtggcagaagcagccccatgtgcttccctgcccccgacctggagtggataagacaagaggggtattttggagtccacctgctgagctggaggcctcccactgcaacttttcagctcaggggttgttgaacagatgtgaaaggccagtgccaagagtgtccctctgagacccttgggaagctgggtgggggctggtaggtggggcgagacttgctggcttcgggccctctcatccttcattccattaaatccacattcttcccgctgac

SEQ ID NO: 184486 - DNA, 607 bp, Homo sapiens
  Payload ID: 16328
  Gene Symbol: SLC6A13
  Gene Name: solute carrier family 6 (neurotransmitter transporter), member 13
  ENST ID: ENST00000539260
  CDS Start-End: 34-405
ctggacctctggcagcagcttcactaaggtgggatggatagcagggtctcaggcacaaccagtaatggagagacaaaaccagtgtatccagtcatggaaaagaaggaggaagatggcaccctggagcgggggcactggaacaacaagatggagtttgtgctgtcagtggctggggagatcattggcttaggcaacgtctggaggtttccctatctctgctacaaaaatgggggaggtgccttcttcatcccctacctcgtcttcctctttacctgtggcattcctgtcttccttctggagacagcactaggccagtacactagccagggaggcgtcacagcctggaggaagatctgccccatctttgaggtttccccgcaggcattggctatgcctcccagatgatcgtcatcctcctcaacgtctactacatcattgtgttggcctgggccctgttctacctcttcagcagcttcaccatcgacctgccctggggcggctgctaccatgagtggaacacagaacactgtatggagttccagaagaccaacggctccctgaatggtacctctgagaatgccacctctcctgtcatcgagttctggga

SEQ ID NO: 184487 - DNA, 560 bp, Homo sapiens
  Payload ID: 16328
  Gene Symbol: SLC6A13
  Gene Name: solute carrier family 6 (neurotransmitter transporter), member 13
  ENST ID: ENST00000542272
  CDS Start-End: 204-413
agataattcttctcccctgactggacctctggcagcagcttcactaaggtgccttcttcatcccctacctcgtcttcctctttacctgtggcattcctgtcttccttctggagacagcactaggccagtacactagccagggaggcgtcacagcctggaggaagatctgccccatctttgagggcattggctatgcctcccagatgatcgtcatcctcctcaacgtctactacatcattgtgttggcctgggccctgttctacctcttcagcagcttcaccatcgacctgccctggggcggctgctaccatgagtggaacacaggtggtgactttgcacaggacgcttacatagaaatgttagcatgccttgaagcagctgacctgaagagcacctttcctgttgccatctgatcatgcttgaggagaatgtatacccaagcatctatgtacccacatgtccaagtgtgcgggagagagtgagctgcatttgttgagaacactgtatggagttccagaagaccaacggctccctgaatggtacctctgagaatgccacct

SEQ ID NO: 184488 - DNA, 541 bp, Homo sapiens
  Payload ID: 16328
  Gene Symbol: SLC6A13
  Gene Name: solute carrier family 6 (neurotransmitter transporter), member 13
  ENST ID: ENST00000546319
  CDS Start-End: 91-541
cacactttaaatagccagcaccttctccttcccccttagataattcttctcccctgactggacctctggcagcagcttcactaaggtgggatggatagcagggtctcaggcacaaccagtaatggagagacaaaaccagtgtatccagtcatggaaaagaaggaggaagatggcaccctggagcgggggcactggaacaacaagatggagtttgtgctgtcagtggctggggagatcattggcttaggcaacgtctggaggtttccctatctctgctacaaaaatgggggagaacactgtatggagttccagaagaccaacggctccctgaatggtacctctgagaatgccacctctcctgtcatcgagttctgggagcggcgggtcttgaagatctctgatgggatccagcacctgggggccctgcgctgggagctggctctgtgcctcctgctggcctgggtcatctgctacttctgcatctggaagggggtgaagtccacaggcaaggtggtgtacttcacggccacatttccttacc

SEQ ID NO: 184489 - DNA, 2858 bp, Homo sapiens
  Payload ID: 16329
  Gene Symbol: SLC6A2
  Gene Name: solute carrier family 6 (neurotransmitter transporter), member 2
  Uniprot ID: P23975
  ENST ID: ENST00000219833
  CDS Start-End: 52-1938
agcctcggcgtgcccccaggaccggtaaagttcctctcgccagccgcatccatgcttctggcgcggatgaacccgcaggtgcagcccgagaacaacggggcggacacgggtccagagcagccccttcgggcgcgcaaaactgcggagctgctggtggtgaaggagcgcaacggcgtccagtgcctgctggcgccccgcgacggcgacgcgcagccccgggagacctggggcaagaagatcgacttcctgctgtccgtagtcggcttcgcagtggacctggccaacgtgtggcgcttcccctacctctgctacaagaacggcggcggtgccttcttgatcccgtacacactgttccttatcatcgcggggatgcccctgttctacatggagctggctctgggacagtacaaccgggagggggctgccaccgtttggaaaatctgcccattcttcaaaggcgttggctatgctgtcatcctgatcgccctgtacgttggcttctactacaacgtcatcatcgcctggtcactctactacctcttctcctccttcaccctcaacctgccctggaccgactgtggccacacctggaacagccccaactgtaccgaccccaagctcctcaatggctccgtgcttggcaaccacaccaagtactccaagtacaagttcacgccggcagccgagttttatgagcgtggtgtcctgcaccttcacgagagcagcgggattcatgacatcggcctgccccagtggcagctcttgctctgtctgatggtcgtcgtcatcgtcttgtattttagcctctggaaaggggtgaagacatcaggaaaggtggtgtggatcacagccacgctgccttacttcgtgctgttcgtgctcctggtccatggcgtcacgctgcccggagcctccaatggcatcaatgcctacctgcacatcgacttctaccgcttgaaagaggccacggtatggattgatgccgcaactcagatatttttttccttgggggctggatttggagtattgattgcatttgccagttacaacaaatttgacaacaactgttacagggatgccctgctgaccagcagcatcaactgtatcaccagcttcgtctctgggttcgccatcttctccatccttggttacatggcccatgaacacaaggtcaacattgaggatgtggccacagaaggagctggcctagtgttcatcctgtatccagaggccatttctaccctgtctggatctacattctgggctgttgtgtttttcgtcatgctcctggcgctgggccttgacagctcaatgggaggcatggaggctgtcatcacgggcctggcagatgacttccaggtcctgaagcgacaccggaaactcttcacatttggcgtcaccttcagcactttccttctcgccctgttctgcataaccaagggtggaatttacgtcttgaccctcctggacacctttgctgcgggcacctccatcctttttgctgtcctcatggaagccatcggagtttcctggttttatggagtggacaggttcagcaacgacatccagcagatgatggggttcaggccgggtctatactggagactgtgctggaagttcgtcagtcctgccttcctcctgttcgtggttgtggtcagcatcatcaacttcaagccactcacctacgacgactacatcttcccgccctgggccaactgggtggggtggggcatcgccctgtcctccatggtcctggtgcccatctacgtcatctataagttcctcagcacgcagggctctctttgggagagactggcctatggcatcacgccagagaacgagcaccacctggtggctcagagggacatcagacagttccagatgaaaacgagacaagggagaaggagagctaccaactcttgccagatatcctgctgaacagaaatccctgaagctgccttaattctcaaaaggagttaccgctcagctgggagccagttcctgctatatgatctgttttctagcctcgctaatgtgagactgaagcattcttaccaaagaaatcatttcctagtaaagaagcccattgaactcactttatttgtttatttccttcgaaagccaccgaagagagaaaaacagagaaggtgtgtagtgtggcggaaaaagcacagcatatagttttacagacttgggtctgcagctgactagctgggtggcctggggatagtggcttcatcttttggggcttcaagattctttgtctttaaaatcaggggttatatcagatcatcaaagttcccattccattaaagaaaaccctgcatgtatccataatgatgctctcctgttaaatttacaatgaaggaaacacatcacttaactgtaagaatttcccaaaatgaactgatgaccagtgatctctctatcagagaaatgtcagatttctagcctccagaactttgatttttctggacattcaatagttcctctttctcagatatttttcaactgatgccagaaacacttggtatttgtttttaatccaacccttttgttttgaggctttggagggtaacacattttcataccctgtgagtcccaggatccacagctctgctgtggtcttagaagccactgaaacattggtgaatgtgaagtcacttttggggtgcctgccctcatccctctgtctctctgcttccgtgtaaataaagactgtttcaattgtgtcctctctgtgtcatggactgttccaatgtcatgcagatttctgtgtctgatatggattttaaaagttgttctctttgtggaatataagtgtacagaataataaataatgtttcctgggctgtgta

SEQ ID NO: 184490 - DNA, 3551 bp, Homo sapiens
  Payload ID: 16329
  Gene Symbol: SLC6A2
  Gene Name: solute carrier family 6 (neurotransmitter transporter), member 2
  Uniprot ID: P23975
  ENST ID: ENST00000379906
  CDS Start-End: 256-2109
gtcagaagtctccaactcttgagttccggcgtgccccaacctctgtttccaaatttttccagcggacgcgcgcccttttctgggaaccctgcgtccgctcagcgcgcgctcatcccagtgtctaaggcgctcccgggtggtcttgggagttgcaagtagggaggaacggccgggtaaccacctcttttccctttatccaagcagagcctcggcgtgcccccaggaccggtaaagttcctctcgccagccgcatccatgcttctggcgcggatgaacccgcaggtgcagcccgagaacaacggggcggacacgggtccagagcagccccttcgggcgcgcaaaactgcggagctgctggtggtgaaggagcgcaacggcgtccagtgcctgctggcgccccgcgacggcgacgcgcagccccgggagacctggggcaagaagatcgacttcctgctgtccgtagtcggcttcgcagtggacctggccaacgtgtggcgcttcccctacctctgctacaagaacggcggcggtgccttcttgatcccgtacacactgttccttatcatcgcggggatgcccctgttctacatggagctggctctgggacagtacaaccgggagggggctgccaccgtttggaaaatctgcccattcttcaaaggcgttggctatgctgtcatcctgatcgccctgtacgttggcttctactacaacgtcatcatcgcctggtcactctactacctcttctcctccttcaccctcaacctgccctggaccgactgtggccacacctggaacagccccaactgtaccgaccccaagctcctcaatggctccgtgcttggcaaccacaccaagtactccaagtacaagttcacgccggcagccgagttttatgagcgtggtgtcctgcaccttcacgagagcagcgggattcatgacatcggcctgccccagtggcagctcttgctctgtctgatggtcgtcgtcatcgtcttgtattttagcctctggaaaggggtgaagacatcaggaaaggtggtgtggatcacagccacgctgccttacttcgtgctgttcgtgctcctggtccatggcgtcacgctgcccggagcctccaatggcatcaatgcctacctgcacatcgacttctaccgcttgaaagaggccacggtatggattgatgccgcaactcagatatttttttccttgggggctggatttggagtattgattgcatttgccagttacaacaaatttgacaacaactgttacagggatgccctgctgaccagcagcatcaactgtatcaccagcttcgtctctgggttcgccatcttctccatccttggttacatggcccatgaacacaaggtcaacattgaggatgtggccacagaaggagctggcctagtgttcatcctgtatccagaggccatttctaccctgtctggatctacattctgggctgttgtgtttttcgtcatgctcctggcgctgggccttgacagctcaatgggaggcatggaggctgtcatcacgggcctggcagatgacttccaggtcctgaagcgacaccggaaactcttcacatttggcgtcaccttcagcactttccttctcgccctgttctgcataaccaagggtggaatttacgtcttgaccctcctggacacctttgctgcgggcacctccatcctttttgctgtcctcatggaagccatcggagtttcctggttttatggagtggacaggttcagcaacgacatccagcagatgatggggttcaggccgggtctatactggagactgtgctggaagttcgtcagtcctgccttcctcctgttcgtggttgtggtcagcatcatcaacttcaagccactcacctacgacgactacatcttcccgccctgggccaactgggtggggtggggcatcgccctgtcctccatggtcctggtgcccatctacgtcatctataagttcctcagcacgcagggctctctttgggagagactggcctatggcatcacgccagagaacgagcaccacctggtggctcagagggacatcagacagttccagttgcaacactggctggccatctgagcctgcctggaggagaaggaggaacccccatgccaatgtccaggtcacaggcatccgctgcgctcccacctcggacaccatcttgggattcctcccctggaagttgtcctttctgatcctctcttcttttcccatttacaaatgatttcgtgactgtagtttttgttcaccttctgtgcatctggcctgggggctgttagctcagaggagaggagcaaacaggaaaatgacttctgttctgtccccgctgttttgggggaagtctctcccactttgggatcctgctgaagctaggttcatgaggtcggaaatccccaccacatttgcctagactttgggcacaggagttcttagtccaccaaatcagagagaggatgggcttttgatcagatacccctcccaaaaaaaaaaaaaactaaaactaaagcaaaaatcaaacaaaatctggctgagtttagtggggtggttggggaaggtacatagaccctcctcttgcccaccctagacagccctctcatgtctgaacctcagcctgggagttagatttatttgtctctaaaatgaagtcagtggatagatgctttgagggattttgagtagaaacattcatagttaattttcactctggccaatctgagtttgatgtgtgtgttctggaacattcctccagcttttggtggtcagatggcccagagatatgggggacaggaggaagagggtaaatgaaccacagtgagcaggttctaggaggtacctgcatcagacaagctggtggaggccacgtggcaagccacatctactgaggcctcatgctgctcttgctctgtaagacacggagcccagaaacccatctgcacttcctgagacctgcctggggaaacgggggcagggaccaagtgaggcctcatgtgtgtcttcaccgtgctgtcctcacaaggccaggtgggtgcccaaagggagcctgacaggctgttgtgttaatttattgttcttgcacacctgcacagcctccctctggggatcccacctggagtggaccaggggtcttgagaaatggagagttggctgcaaaaactctcatgcactagatgtggcaccttggagggcagggtgagacaagcagcccagaaatactctctcaagtggaggggagaattttgagagtggatggaacagtttggtggtttcagagaatttctaggtttctacttggatctacttctgatacaaacttgcacttggtgccctctggtggtgtttagttttagttccgtaagagaaatgattcctagtttgctaaattggtggcatctttgggaggggtttctgtttatggttagagtctcttacacccttgttggagggattcttattctgactgtgggagctcctgttgcgggatcttgggaaaaaataaagaagccgctgcattcgcacgtcaa

SEQ ID NO: 184491 - DNA, 3201 bp, Homo sapiens
  Payload ID: 16329
  Gene Symbol: SLC6A2
  Gene Name: solute carrier family 6 (neurotransmitter transporter), member 2
  ENST ID: ENST00000414754
  CDS Start-End: 112-1797
cgccgccggtcgggggccggcagggcgcaaggcaccagggatcccctcgccgccggacacagcctcggcgtgcccccaggaccggtaaagttcctctcgccagccgcatccatgcttctggcgcggatgaacccgcaggtgcagcccgagaacaacggggcggacacgggtccagagcagccccttcgggcgcgcaaaactgcggagctgctggtggtgaaggagcgcaacggcgtccagtgcctgctggcgccccgcgacggcgacgcgcagccccgggagacctggggcaagaagatcgacttcctgctgtccgtagtcggcttcgcagtggacctggccaacgtgtggcgcttcccctacctctgctacaagaacggcggcggtgccttcttgatcccgtacacactgttccttatcatcgcggggatgcccctgttctacatggagctggctctgggacagtacaaccgggagggggctgccaccgtttggaaaatctgcccattcttcaaaggcgttggctatgctgtcatcctgatcgccctgtacgttggcttctactacaacgtcatcatcgcctggtcactctactacctcttctcctccttcaccctcaacctgccctggaccgactgtggccacacctggaacagccccaactgtaccgaccccaagctcctcaatggctccgtgcttggcaaccacaccaagtactccaagtacaagttcacgccggcagccgagttttatgagcgtggtgtcctgcaccttcacgagagcagcgggattcatgacatcggcctgccccagtggcagctcttgctctgtctgatggtcgtcgtcatcgtcttgtattttagcctctggaaaggggtgaagacatcaggaaaggtggtgtggatcacagccacgctgccttacttcgtgctgttcgtgctcctggtccatggcgtcacgctgcccggagcctccaatggcatcaatgcctacctgcacatcgacttctaccgcttgaaagaggccacggtatggattgatgccgcaactcagatatttttttccttgggggctggatttggagtattgattgcatttgccagttacaacaaatttgacaacaactgttacagggatgccctgctgaccagcagcatcaactgtatcaccagcttcgtctctgggttcgccatcttctccatccttggttacatggcccatgaacacaaggtcaacattgaggatgtggccacagaaggagctggcctagtgttcatcctgtatccagaggccatttctaccctgtctggatctacattctgggctgttgtgtttttcgtcatgctcctggcgctgggccttgacagctcaatgggaggcatggaggctgtcatcacgggcctggcagatgacttccaggtcctgaagcgacaccggaaactcttcacatttggcgtcaccttcagcactttccttctcgccctgttctgcataaccaagggtggaatttacgtcttgaccctcctggacacctttgctgcgggcacctccatcctttttgctgtcctcatggaagccatcggagtttcctggttttatggagtggacaggttcagcaacgacatccagcagatgatggggttcaggccgggtctatactggagactgtgctggaagttcgtcagtcctgccttcctcctgagactggcctatggcatcacgccagagaacgagcaccacctggtggctcagagggacatcagacagttccagttgcaacactggctggccatctgagcctgcctggaggagaaggaggaacccccatgccaatgtccaggtcacaggcatccgctgcgctcccacctcggacaccatcttgggattcctcccctggaagttgtcctttctgatcctctcttcttttcccatttacaaatgatttcgtgactgtagtttttgttcaccttctgtgcatctggcctgggggctgttagctcagaggagaggagcaaacaggaaaatgacttctgttctgtccccgctgttttgggggaagtctctcccactttgggatcctgctgaagctaggttcatgaggtcggaaatccccaccacatttgcctagactttgggcacaggagttcttagtccaccaaatcagagagaggatgggcttttgatcagatacccctcccaaaaaaaaaaaaaactaaaactaaagcaaaaatcaaacaaaatctggctgagtttagtggggtggttggggaaggtacatagaccctcctcttgcccaccctagacagccctctcatgtctgaacctcagcctgggagttagatttatttgtctctaaaatgaagtcagtggatagatgctttgagggattttgagtagaaacattcatagttaattttcactctggccaatctgagtttgatgtgtgtgttctggaacattcctccagcttttggtggtcagatggcccagagatatgggggacaggaggaagagggtaaatgaaccacagtgagcaggttctaggaggtacctgcatcagacaagctggtggaggccacgtggcaagccacatctactgaggcctcatgctgctcttgctctgtaagacacggagcccagaaacccatctgcacttcctgagacctgcctggggaaacgggggcagggaccaagtgaggcctcatgtgtgtcttcaccgtgctgtcctcacaaggccaggtgggtgcccaaagggagcctgacaggctgttgtgttaatttattgttcttgcacacctgcacagcctccctctggggatcccacctggagtggaccaggggtcttgagaaatggagagttggctgcaaaaactctcatgcactagatgtggcaccttggagggcagggtgagacaagcagcccagaaatactctctcaagtggaggggagaattttgagagtggatggaacagtttggtggtttcagagaatttctaggtttctacttggatctacttctgatacaaacttgcacttggtgccctctggtggtgtttagttttagttccgtaagagaaatgattcctagtttgctaaattggtggcatctttgggaggggtttctgtttatggttagagtctcttacacccttgttggagggattcttattctgactgtgggagctcctgttgcgggatct

SEQ ID NO: 184492 - DNA, 2268 bp, Homo sapiens
  Payload ID: 16329
  Gene Symbol: SLC6A2
  Gene Name: solute carrier family 6 (neurotransmitter transporter), member 2
  ENST ID: ENST00000561820
  CDS Start-End: 78-1892
cacctcttttccctttatccaagcagagcctcggcgtgcccccaggaccggtaaagttcctctcgccagccgcatccatgcttctggcgcggatgaacccgcaggtgcagcccgagaacaacggggcggacacgggtccagagcagccccttcgggcgcgcaaaactgcggagctgctggtggtgaaggagcgcaacggcgtccagtgcctgctggcgccccgcgacggcgacgcgcagccccgggagacctggggcaagaagatcgacttcctgctgtccgtagtcggcttcgcagtggacctggccaacgtgtggcgcttcccctacctctgctacaagaacggcggcggtgccttcttgatcccgtacacactgttccttatcatcgcggggatgcccctgttctacatggagctggctctgggacagtacaaccgggagggggctgccaccgtttggaaaatctgcccattcttcaaaggcgttggctatgctgtcatcctgatcgccctgtacgttggcttctactacaacgtcatcatcgcctggtcactctactacctcttctcctccttcaccctcaacctgccctggaccgactgtggccacacctggaacagccccaactgtaccgaccccaagctcctcaatggctccgtgcttggcaaccacaccaagtactccaagtacaagttcacgccggcagccgagttttatgagcgtggtgtcctgcaccttcacgagagcagcgggattcatgacatcggcctgccccagtggcagctcttgctctgtctgatggtcgtcgtcatcgtcttgtattttagcctctggaaaggggtgaagacatcaggaaaggtggtgtggatcacagccacgctgccttacttcgtgctgttcgtgctcctggtccatggcgtcacgctgcccggagcctccaatggcatcaatgcctacctgcacatcgacttctaccgcttgaaagaggccacggtatggattgatgccgcaactcagatatttttttccttgggggctggatttggagtattgattgcatttgccagttacaacaaatttgacaacaactgttacagggatgccctgctgaccagcagcatcaactgtatcaccagcttcgtctctgggttcgccatcttctccatccttggttacatggcccatgaacacaaggtcaacattgaggatgtggccacagaaggagctggcctagtgttcatcctgtatccagaggccatttctaccctgtctggatctacattctgggctgttgtgtttttcgtcatgctcctggcgctgggccttgacagctcaatgggaggcatggaggctgtcatcacgggcctggcagatgacttccaggtcctgaagcgacaccggaaactcttcacatttggcgtcaccttcagcactttccttctcgccctgttctgcataaccaagggtggaatttacgtcttgaccctcctggacacctttgctgcgggcacctccatcctttttgctgtcctcatggaagccatcggagtttcctggttttatggagtggacaggttcagcaacgacatccagcagatgatggggttcaggccgggtctatactggagactgtgctggaagttcgtcagtcctgccttcctcctgttcgtggttgtggtcagcatcatcaacttcaagccactcacctacgacgactacatcttcccgccctgggccaactgggtggggtggggcatcgccctgtcctccatggtcctggtgcccatctacgtcatctataagttcctcagcacgcagggctctctttgggagatgaaaacgagacaagggagaaggagagctaccaactcttgccagatatcctgctgaacagaaatccctgaagctgccttaattctcaaaaggagttaccgctcagctgggagccagttcctgctatatgatctgttttctagcctcgctaatgtgagactgaagcattcttaccaaagaaatcatttcctagtaaagaagcccattgaactcactttatttgtttatttccttcgaaagccaccgaagagagaaaaacagagaaggtgtgtagtgtggcggaaaaagcacagcatatagttttacagacttgggtctgcagctgactagctgggtggcctggggatagtggcttcatcttttggggcttcaagattctttgtctttaaaatcaggggttatatcagatcatcaaagttcccattccattaaa

SEQ ID NO: 184493 - DNA, 750 bp, Homo sapiens
  Payload ID: 16329
  Gene Symbol: SLC6A2
  Gene Name: solute carrier family 6 (neurotransmitter transporter), member 2
  ENST ID: ENST00000568655
  CDS Start-End: 151-750
gtagtgcagtgacgttaagtgtccgagaaggctcctgtggctgttgaagtgtcgcggacctgagctggggagggggtcggcacgctgccctcagcctcgagcctcggcgtgcccccaggaccggtaaagttcctctcgccagccgcatccatgcttctggcgcggatgaacccgcaggtgcagcccgagaacaacggggcggacacgggtccagagcagccccttcgggcgcgcaaaactgcggagctgctggtggtgaaggagcgcaacggcgtccagtgcctgctggcgccccgcgacggcgacgcgcagccccgggagacctggggcaagaagatcgacttcctgctgtccgtagtcggcttcgcagtggacctggccaacgtgtggcgcttcccctacctctgctacaagaacggcggcggtgccttcttgatcccgtacacactgttccttatcatcgcggggatgcccctgttctacatggagctggctctgggacagtacaaccgggagggggctgccaccgtttggaaaatctgcccattcttcaaaggcgttggctatgctgtcatcctgatcgccctgtacgttggcttctactacaacgtcatcatcgcctggtcactctactacctcttctcctccttcaccctcaacctgccctggaccgactgtggccacacctggaacagccccaactgtaccgaccccaagctcctcaatggctccgtgcttggcaaccacacc

SEQ ID NO: 184494 - DNA, 1759 bp, Homo sapiens
  Payload ID: 16329
  Gene Symbol: SLC6A2
  Gene Name: solute carrier family 6 (neurotransmitter transporter), member 2
  ENST ID: ENST00000566163
  CDS Start-End: 41-1759
gcccccaggaccggtaaagttcctctcgccagccgcatccatgcttctggcgcggatgaacccgcaggtgcagcccgagaacaacggggcggacacgggtccagagcagccccttcgggcgcgcaaaactgcggagctgctggtggtgaaggagcgcaacggcgtccagtgcctgctggcgccccgcgacggcgacgcgcagccccgggagacctggggcaagaagatcgacttcctgctgtccgtagtcggcttcgcagtggacctggccaacgtgtggcgcttcccctacctctgctacaagaacggcggcggtgccttcttgatcccgtacacactgttccttatcatcgcggggatgcccctgttctacatggagctggctctgggacagtacaaccgggagggggctgccaccgtttggaaaatctgcccattcttcaaaggcgttggctatgctgtcatcctgatcgccctgtacgttggcttctactacaacgtcatcatcgcctggtcactctactacctcttctcctccttcaccctcaacctgccctggaccgactgtggccacacctggaacagccccaactgtaccgaccccaagctcctcaatggctccgtgcttggcaaccacaccaagtactccaagtacaagttcacgccggcagccgagttttatgagcgtggtgtcctgcaccttcacgagagcagcgggattcatgacatcggcctgccccagtggcagctcttgctctgtctgatggtcgtcgtcatcgtcttgtattttagcctctggaaaggggtgaagacatcaggaaaggtatggattgatgccgcaactcagatatttttttccttgggggctggatttggagtattgattgcatttgccagttacaacaaatttgacaacaactgttacagggatgccctgctgaccagcagcatcaactgtatcaccagcttcgtctctgggttcgccatcttctccatccttggttacatggcccatgaacacaaggtcaacattgaggatgtggccacagaaggagctggcctagtgttcatcctgtatccagaggccatttctaccctgtctggatctacattctgggctgttgtgtttttcgtcatgctcctggcgctgggccttgacagctcaatgggaggcatggaggctgtcatcacgggcctggcagatgacttccaggtcctgaagcgacaccggaaactcttcacatttggcgtcaccttcagcactttccttctcgccctgttctgcataaccaagggtggaatttacgtcttgaccctcctggacacctttgctgcgggcacctccatcctttttgctgtcctcatggaagccatcggagtttcctggttttatggagtggacaggttcagcaacgacatccagcagatgatggggttcaggccgggtctatactggagactgtgctggaagttcgtcagtcctgccttcctcctgttcgtggttgtggtcagcatcatcaacttcaagccactcacctacgacgactacatcttcccgccctgggccaactgggtggggtggggcatcgccctgtcctccatggtcctggtgcccatctacgtcatctataagttcctcagcacgcagggctctctttgggagagactggcctatggcatcacgccagagaacgagcaccacctggtggctcagagggacatcagacagttccagttgcaacactggctggccatctga

SEQ ID NO: 184495 - DNA, 1022 bp, Homo sapiens
  Payload ID: 16329
  Gene Symbol: SLC6A2
  Gene Name: solute carrier family 6 (neurotransmitter transporter), member 2
  ENST ID: ENST00000568529
  CDS Start-End: 136-1022
cccgcgccctagagcctgccaaggcgccgccggtcgggggccggcagggcgcaaggcaccagggatcccctcgccgccggacacagcctcggcgtgcccccaggaccggtaaagttcctctcgccagccgcatccatgcttctggcgcggatgaacccgcaggtgcagcccgagaacaacggggcggacacgggtccagagcagccccttcgggcgcgcaaaactgcggagctgctggtggtgaaggagcgcaacggcgtccagtgcctgctggcgccccgcgacggcgacgcgcagccccgggagacctggggcaagaagatcgacttcctgctgtccgtagtcggcttcgcagtggacctggccaacgtgtggcgcttcccctacctctgctacaagaacggcggcggtgccttcttgatcccgtacacactgttccttatcatcgcggggatgcccctgttctacatggagctggctctgggacagtacaaccgggagggggctgccaccgtttggaaaatctgcccattcttcaaaggcgttggctatgctgtcatcctgatcgccctgtacgttggcttctactacaacgtcatcatcgcctggtcactctactacctcttctcctccttcaccctcaacctgccctggaccgactgtggccacacctggaacagccccaactgtaccgaccccaagctcctcaatggctccgtgcttggcaaccacaccaagtactccaagtacaagttcacgccggcagccgagttttatgagcgtggtgtcctgcaccttcacgagagcagcgggattcatgacatcggcctgccccagtggcagctcttgctctgtctgatggtcgtcgtcatcgtcttgtattttagcctctggaaaggggtgaagacatcaggaaaggtatggattgatgccgcaactcagatatttttttccttgggggctggatttggagtattgattgcatttgccagttacaacaaatttgacaacaactgttacag

SEQ ID NO: 184496 - DNA, 3160 bp, Homo sapiens
  Payload ID: 16329
  Gene Symbol: SLC6A2
  Gene Name: solute carrier family 6 (neurotransmitter transporter), member 2
  Uniprot ID: P23975
  ENST ID: ENST00000567238
  CDS Start-End: 177-1715
aggttgtgtgctccttatgagaatctaactaacgcctgatgacctgaggtggaacggtttcatcttgaaactacccccaccccaaaatctgtggaaaaattgtcttccatgcgacaggtcactggtgctgaaaaggttggggaccgctgttctgcaggaaacgagagacagagggaatgggagtgcagtggtggagccacacccaaggagaggtggctgtggggctgggcctgggagactcctaccttaccccctgtccctgcccaggcgttggctatgctgtcatcctgatcgccctgtacgttggcttctactacaacgtcatcatcgcctggtcactctactacctcttctcctccttcaccctcaacctgccctggaccgactgtggccacacctggaacagccccaactgtaccgaccccaagctcctcaatggctccgtgcttggcaaccacaccaagtactccaagtacaagttcacgccggcagccgagttttatgagcgtggtgtcctgcaccttcacgagagcagcgggattcatgacatcggcctgccccagtggcagctcttgctctgtctgatggtcgtcgtcatcgtcttgtattttagcctctggaaaggggtgaagacatcaggaaaggtggtgtggatcacagccacgctgccttacttcgtgctgttcgtgctcctggtccatggcgtcacgctgcccggagcctccaatggcatcaatgcctacctgcacatcgacttctaccgcttgaaagaggccacggtatggattgatgccgcaactcagatatttttttccttgggggctggatttggagtattgattgcatttgccagttacaacaaatttgacaacaactgttacagggatgccctgctgaccagcagcatcaactgtatcaccagcttcgtctctgggttcgccatcttctccatccttggttacatggcccatgaacacaaggtcaacattgaggatgtggccacagaaggagctggcctagtgttcatcctgtatccagaggccatttctaccctgtctggatctacattctgggctgttgtgtttttcgtcatgctcctggcgctgggccttgacagctcaatgggaggcatggaggctgtcatcacgggcctggcagatgacttccaggtcctgaagcgacaccggaaactcttcacatttggcgtcaccttcagcactttccttctcgccctgttctgcataaccaagggtggaatttacgtcttgaccctcctggacacctttgctgcgggcacctccatcctttttgctgtcctcatggaagccatcggagtttcctggttttatggagtggacaggttcagcaacgacatccagcagatgatggggttcaggccgggtctatactggagactgtgctggaagttcgtcagtcctgccttcctcctgttcgtggttgtggtcagcatcatcaacttcaagccactcacctacgacgactacatcttcccgccctgggccaactgggtggggtggggcatcgccctgtcctccatggtcctggtgcccatctacgtcatctataagttcctcagcacgcagggctctctttgggagagactggcctatggcatcacgccagagaacgagcaccacctggtggctcagagggacatcagacagttccagttgcaacactggctggccatctgagcctgcctggaggagaaggaggaacccccatgccaatgtccaggtcacaggcatccgctgcgctcccacctcggacaccatcttgggattcctcccctggaagttgtcctttctgatcctctcttcttttcccatttacaaatgatttcgtgactgtagtttttgttcaccttctgtgcatctggcctgggggctgttagctcagaggagaggagcaaacaggaaaatgacttctgttctgtccccgctgttttgggggaagtctctcccactttgggatcctgctgaagctaggttcatgaggtcggaaatccccaccacatttgcctagactttgggcacaggagttcttagtccaccaaatcagagagaggatgggcttttgatcagatacccctcccaaaaaaaaaaaaaactaaaactaaagcaaaaatcaaacaaaatctggctgagtttagtggggtggttggggaaggtacatagaccctcctcttgcccaccctagacagccctctcatgtctgaacctcagcctgggagttagatttatttgtctctaaaatgaagtcagtggatagatgctttgagggattttgagtagaaacattcatagttaattttcactctggccaatctgagtttgatgtgtgtgttctggaacattcctccagcttttggtggtcagatggcccagagatatgggggacaggaggaagagggtaaatgaaccacagtgagcaggttctaggaggtacctgcatcagacaagctggtggaggccacgtggcaagccacatctactgaggcctcatgctgctcttgctctgtaagacacggagcccagaaacccatctgcacttcctgagacctgcctggggaaacgggggcagggaccaagtgaggcctcatgtgtgtcttcaccgtgctgtcctcacaaggccaggtgggtgcccaaagggagcctgacaggctgttgtgttaatttattgttcttgcacacctgcacagcctccctctggggatcccacctggagtggaccaggggtcttgagaaatggagagttggctgcaaaaactctcatgcactagatgtggcaccttggagggcagggtgagacaagcagcccagaaatactctctcaagtggaggggagaattttgagagtggatggaacagtttggtggtttcagagaatttctaggtttctacttggatctacttctgatacaaacttgcacttggtgccctctggtggtgtttagttttagttccgtaagagaaatgattcctagtttgctaaattggtggcatctttgggaggggtttctgtttatggttagagtctcttacacccttgttggagggattcttattctgactgtgggagctcctgttgcgggatcttgggaaaaaataaagaagccgctgcattcgcacgtcaagaa

SEQ ID NO: 184497 - DNA, 2471 bp, Homo sapiens
  Payload ID: 16329
  Gene Symbol: SLC6A2
  Gene Name: solute carrier family 6 (neurotransmitter transporter), member 2
  Uniprot ID: P23975
  ENST ID: ENST00000568943
  CDS Start-End: 618-2471
agtttaagtggcctgctgcggaagacagagctggtgctgcaccggtcgctgcttccccagtccttttttggcctcctttctgacgcgacgcagaccccagttctggagagtctgtcactcgctccccgtggtgggagatcagaggcctggtgtccttgggagcggcgagcggtgctcggcgcaggatagaaagggagtgcgcgcccgagtcccccagatccctgggaacccgcgccaccctcccgcccctgcccatccccggccgcgctgtcagtctccattagcgctaacaggctccagacggagcgggccgggcgctgggttaatgcaatcggcgcgttacctggggcgcaggctacattaccagcccggcccccgccaggcacggccagaaccagtcagcccgcgccctgccggccgccccgcgcctccagctcttccccggccccgcccgaacgccacacggcggagcccagccccagcccgcgccctagagcctgccaaggcgccgccggtcgggggccggcagggcgcaaggcaccagggatcccctcgccgccggacacagcctcggcgtgcccccaggaccggtaaagttcctctcgccagccgcatccatgcttctggcgcggatgaacccgcaggtgcagcccgagaacaacggggcggacacgggtccagagcagccccttcgggcgcgcaaaactgcggagctgctggtggtgaaggagcgcaacggcgtccagtgcctgctggcgccccgcgacggcgacgcgcagccccgggagacctggggcaagaagatcgacttcctgctgtccgtagtcggcttcgcagtggacctggccaacgtgtggcgcttcccctacctctgctacaagaacggcggcggtgccttcttgatcccgtacacactgttccttatcatcgcggggatgcccctgttctacatggagctggctctgggacagtacaaccgggagggggctgccaccgtttggaaaatctgcccattcttcaaaggcgttggctatgctgtcatcctgatcgccctgtacgttggcttctactacaacgtcatcatcgcctggtcactctactacctcttctcctccttcaccctcaacctgccctggaccgactgtggccacacctggaacagccccaactgtaccgaccccaagctcctcaatggctccgtgcttggcaaccacaccaagtactccaagtacaagttcacgccggcagccgagttttatgagcgtggtgtcctgcaccttcacgagagcagcgggattcatgacatcggcctgccccagtggcagctcttgctctgtctgatggtcgtcgtcatcgtcttgtattttagcctctggaaaggggtgaagacatcaggaaaggtggtgtggatcacagccacgctgccttacttcgtgctgttcgtgctcctggtccatggcgtcacgctgcccggagcctccaatggcatcaatgcctacctgcacatcgacttctaccgcttgaaagaggccacggtatggattgatgccgcaactcagatatttttttccttgggggctggatttggagtattgattgcatttgccagttacaacaaatttgacaacaactgttacagggatgccctgctgaccagcagcatcaactgtatcaccagcttcgtctctgggttcgccatcttctccatccttggttacatggcccatgaacacaaggtcaacattgaggatgtggccacagaaggagctggcctagtgttcatcctgtatccagaggccatttctaccctgtctggatctacattctgggctgttgtgtttttcgtcatgctcctggcgctgggccttgacagctcaatgggaggcatggaggctgtcatcacgggcctggcagatgacttccaggtcctgaagcgacaccggaaactcttcacatttggcgtcaccttcagcactttccttctcgccctgttctgcataaccaagggtggaatttacgtcttgaccctcctggacacctttgctgcgggcacctccatcctttttgctgtcctcatggaagccatcggagtttcctggttttatggagtggacaggttcagcaacgacatccagcagatgatggggttcaggccgggtctatactggagactgtgctggaagttcgtcagtcctgccttcctcctgttcgtggttgtggtcagcatcatcaacttcaagccactcacctacgacgactacatcttcccgccctgggccaactgggtggggtggggcatcgccctgtcctccatggtcctggtgcccatctacgtcatctataagttcctcagcacgcagggctctctttgggagagactggcctatggcatcacgccagagaacgagcaccacctggtggctcagagggacatcagacagttccagttgcaacactggctggccatctga

SEQ ID NO: 184498 - DNA, 743 bp, Homo sapiens
  Payload ID: 16329
  Gene Symbol: SLC6A2
  Gene Name: solute carrier family 6 (neurotransmitter transporter), member 2
  ENST ID: ENST00000574918
  CDS Start-End: 1-176
aagttcctcagcacgcagggctctctttgggagagactggcctatggcatcacgccagagaacgagcaccacctggtggctcagagggacatcagacagttccagatgaaaacgagacaagggagaaggagagctaccaactcttgccagatatcctgctgaacagaaatccctgaagctgccttaattctcaaaaggagttaccgctcagctgggagccagttcctgctatatgatctgttttctagcctcgctaatgtgagactgaagcattcttaccaaagaaatcatttcctagtaaagaagcccattgaactcactttatttgtttatttccttcgaaagccaccgaagagagaaaaacagagaaggtgtgtagtgtggcggaaaaagcacagcatatagttttacagacttgggtctgcagctgactagctgggtggcctggggatagtggcttcatcttttggggcttcaagattctttgtctttaaaatcaggggttatatcagatcatcaaagttcccattccattaaagaaaaccctgcatgtatccataatgatgctctcctgttaaatttacaatgaaggaaacacatcacttaactgtaagaatttcccaaaatgaactgatgaccagtgatctctctatcagagaaatgtcagatttctagcctccagaactttgatttttctggacattcaatagttcctctttctcagatatttttcaactgatgcc

SEQ ID NO: 184499 - DNA, 3936 bp, Homo sapiens
  Payload ID: 16330
  Gene Symbol: SLC6A3
  Gene Name: solute carrier family 6 (neurotransmitter transporter), member 3
  Uniprot ID: Q01959
  ENST ID: ENST00000270349
  CDS Start-End: 129-1991
agcgctgcggagcgggaggggaggcttcgcggaacgctctcggcgccaggactcgcgtgcaaagcccaggcccgggcggccagaccaagagggaagaagcacagaattcctcaactcccagtgtgcccatgagtaagagcaaatgctccgtgggactcatgtcttccgtggtggccccggctaaggagcccaatgccgtgggcccgaaggaggtggagctcatccttgtcaaggagcagaacggagtgcagctcaccagctccaccctcaccaacccgcggcagagccccgtggaggcccaggatcgggagacctggggcaagaagatcgactttctcctgtccgtcattggctttgctgtggacctggccaacgtctggcggttcccctacctgtgctacaaaaatggtggcggtgccttcctggtcccctacctgctcttcatggtcattgctgggatgccacttttctacatggagctggccctcggccagttcaacagggaaggggccgctggtgtctggaagatctgccccatactgaaaggtgtgggcttcacggtcatcctcatctcactgtatgtcggcttcttctacaacgtcatcatcgcctgggcgctgcactatctcttctcctccttcaccacggagctcccctggatccactgcaacaactcctggaacagccccaactgctcggatgcccatcctggtgactccagtggagacagctcgggcctcaacgacacttttgggaccacacctgctgccgagtactttgaacgtggcgtgctgcacctccaccagagccatggcatcgacgacctggggcctccgcggtggcagctcacagcctgcctggtgctggtcatcgtgctgctctacttcagcctctggaagggcgtgaagacctcagggaaggtggtatggatcacagccaccatgccatacgtggtcctcactgccctgctcctgcgtggggtcaccctccctggagccatagacggcatcagagcatacctgagcgttgacttctaccggctctgcgaggcgtctgtttggattgacgcggccacccaggtgtgcttctccctgggcgtggggttcggggtgctgatcgccttctccagctacaacaagttcaccaacaactgctacagggacgcgattgtcaccacctccatcaactccctgacgagcttctcctccggcttcgtcgtcttctccttcctggggtacatggcacagaagcacagtgtgcccatcggggacgtggccaaggacgggccagggctgatcttcatcatctacccggaagccatcgccacgctccctctgtcctcagcctgggccgtggtcttcttcatcatgctgctcaccctgggtatcgacagcgccatgggtggtatggagtcagtgatcaccgggctcatcgatgagttccagctgctgcacagacaccgtgagctcttcacgctcttcatcgtcctggcgaccttcctcctgtccctgttctgcgtcaccaacggtggcatctacgtcttcacgctcctggaccattttgcagccggcacgtccatcctctttggagtgctcatcgaagccatcggagtggcctggttctatggtgttgggcagttcagcgacgacatccagcagatgaccgggcagcggcccagcctgtactggcggctgtgctggaagctggtcagcccctgctttctcctgttcgtggtcgtggtcagcattgtgaccttcagacccccccactacggagcctacatcttccccgactgggccaacgcgctgggctgggtcatcgccacatcctccatggccatggtgcccatctatgcggcctacaagttctgcagcctgcctgggtcctttcgagagaaactggcctacgccattgcacccgagaaggaccgtgagctggtggacagaggggaggtgcgccagttcacgctccgccactggctcaaggtgtagagggagcagagacgaagaccccaggaagtcatcctgcaatgggagagacacgaacaaaccaaggaaatctaagtttcgagagaaaggagggcaacttctactcttcaacctctactgaaaacacaaacaacaaagcagaagactcctctcttctgactgtttacacctttccgtgccgggagcgcacctcgccgtgtcttgtgttgctgtaataacgacgtagatctgtgcagcgaggtccaccccgttgttgtccctgcagggcagaaaaacgtctaacttcatgctgtctgtgtgaggctccctccctccctgctccctgctcccggctctgaggctgccccaggggcactgtgttctcaggcggggatcacgatccttgtagacgcacctgctgagaatccccgtgctcacagtagcttcctagaccatttactttgcccatattaaaaagccaagtgtcctgcttggtttagctgtgcagaaggtgaaatggaggaaaccacaaattcatgcaaagtcctttcccgatgcgtggctcccagcagaggccgtaaattgagcgttcagttgacacattgcacacacagtctgttcagaggcattggaggatgggggtcctggtatgtctcaccaggaaattctgtttatgttcttgcagcagagagaaataaaactccttgaaaccagctcaggctactgccactcaggcagcctgtgggtccttgcggtgtagggaacggcctgagaggagcgtgtcctatccccggacgcatgcagggcccccacaggagcgtgtcctatccccggacgcatgcagggcccccacaggagcatgtcctatccctggacgcatgcagggcccccacaggagcgtgtactaccccagaacgcatgcagggcccccacaggagcgtgtactaccccaggacgcatgcagggcccccactggagcgtgtactaccccaggacgcatgcagggcccccacaggagcgtgtcctatccccggaccggacgcatgcagggcccccacaggagcgtgtactaccccaggacgcatgcagggcccccacaggagcgtgtactaccccaggatgcatgcagggcccccacaggagcgtgtactaccccaggacgcatgcagggcccccatgcaggcagcctgcagaccacactctgcctggccttgagccgtgacctccaggaagggaccccactggaattttatttctctcaggtgcgtgccacatcaataacaacagtttttatgtttgcgaatggctttttaaaatcatatttacctgtgaatcaaaacaaattcaagaatgcagtatccgcgagcctgcttgctgatattgcagtttttgtttacaagaataattagcaatactgagtgaaggatgttggccaaaagctgctttccatggcacactgccctctgccactgacaggaaagtggatgccatagtttgaattcatgcctcaagtcggtgggcctgcctacgtgctgcccgagggcaggggccgtgcagggccagtcatggctgtcccctgcaagtggacgtgggctccagggactggagtgtaatgctcggtgggagccgtcagcctgtgaactgccaggcagctgcagttagcacagaggatggcttccccattgccttctggggagggacacagaggacggcttccccatcgccttctggccgctgcagtcagcacagagagcggcttccccattgccttctggggagggacacagaggacagcttccccatcgccttctggctgctgcagtcagcacagagagcggcttccccatcgccttctggggaggggctccgtgtagcaacccaggtgttgtccgtgtctgttgaccaatctctattcagcatcgtgtgggtccctaagcacaataaaagacatccacaatggaaaaactgc

SEQ ID NO: 184500 - DNA, 3936 bp, Homo sapiens; identical to SEQ ID NO: 184499
  Payload ID: 16330
  Gene Symbol: SLC6A3
  Gene Name: solute carrier family 6 (neurotransmitter transporter), member 3
  Uniprot ID: Q01959
  ENST ID: ENST00000621716
  CDS Start-End: 129-1991

SEQ ID NO: 184501 - DNA, 6604 bp, Homo sapiens
  Payload ID: 16331
  Gene Symbol: SLC6A4
  Gene Name: solute carrier family 6 (neurotransmitter transporter), member 4
  Uniprot ID: P31645
  ENST ID: ENST00000261707
  CDS Start-End: 577-2469
gctcctccctgcgagcgtgtgtgtgtgtcgggggtccctcccctcctggctctggggtcgggcgcgcaccccgccccgtagcgcggcccctccctggcgagcgcaaccccatccagcgggagcgcggagccgcggccgcggggaagcattaagtttattcgcctcaaagtgacgcaaaaattcttcaagagctctttggcggcggctatctagagatcagaccatgtgagggcccgcgggtacaaatacggccgcgccggcgcccctccgcacagccagcgccgccgggtgcctcgagggcgcgaggccagcccgcctgcccagcccgggaccagcctccccgcgcagcctggcaggtctcctggaggcaaggcgaccttgcttgccctctcttgcagaataacaaggggcttagccacaggagttgctggcaagtggaaagaagaacaaatgagtcaatcccgacgtgtcaatcccgacgatagagagctcggaggtgatccacaaatccaagcacccagagatcaattgggatccttggcagatggacatcagtgtcatttactaaccagcaggatggagacgacgcccttgaattctcagaagcagctatcagcgtgtgaagatggagaagattgtcaggaaaacggagttctacagaaggttgttcccaccccaggggacaaagtggagtccgggcaaatatccaatgggtactcagcagttccaagtcctggtgcgggagatgacacacggcactctatcccagcgaccaccaccaccctagtggctgagcttcatcaaggggaacgggagacctggggcaagaaggtggatttccttctctcagtgattggctatgctgtggacctgggcaatgtctggcgcttcccctacatatgttaccagaatggagggggggcattcctcctcccctacaccatcatggccatttttgggggaatcccgctcttttacatggagctcgcactgggacagtaccaccgaaatggatgcatttcaatatggaggaaaatctgcccgattttcaaagggattggttatgccatctgcatcattgccttttacattgcttcctactacaacaccatcatggcctgggcgctatactacctcatctcctccttcacggaccagctgccctggaccagctgcaagaactcctggaacactggcaactgcaccaattacttctccgaggacaacatcacctggaccctccattccacgtcccctgctgaagaattttacacgcgccacgtcctgcagatccaccggtctaaggggctccaggacctggggggcatcagctggcagctggccctctgcatcatgctgatcttcactgttatctacttcagcatctggaaaggcgtcaagacctctggcaaggtggtgtgggtgacagccaccttcccttatatcatcctttctgtcctgctggtgaggggtgccaccctccctggagcctggaggggtgttctcttctacttgaaacccaattggcagaaactcctggagacaggggtgtggatagatgcagccgctcagatcttcttctctcttggtccgggctttggggtcctgctggcttttgctagctacaacaagttcaacaacaactgctaccaagatgccctggtgaccagcgtggtgaactgcatgacgagcttcgtttcgggatttgtcatcttcacagtgctcggttacatggctgagatgaggaatgaagatgtgtctgaggtggccaaagacgcaggtcccagcctcctcttcatcacgtatgcagaagcgatagccaacatgccagcgtccactttctttgccatcatcttctttctgatgttaatcacgctgggcttggacagcacgtttgcaggcttggagggggtgatcacggctgtgctggatgagttcccacacgtctgggccaagcgccgggagcggttcgtgctcgccgtggtcatcacctgcttctttggatccctggtcaccctgacttttggaggggcctacgtggtgaagctgctggaggagtatgccacggggcccgcagtgctcactgtcgcgctgatcgaagcagtcgctgtgtcttggttctatggcatcactcagttctgcagggacgtgaaggaaatgctcggcttcagcccggggtggttctggaggatctgctgggtggccatcagccctctgtttctcctgttcatcatttgcagttttctgatgagcccgccacaactacgacttttccaatataattatccttactggagtatcatcttgggttactgcataggaacctcatctttcatttgcatccccacatatatagcttatcggttgatcatcactccagggacatttaaagagcgtattattaaaagtattaccccagaaacaccaacagaaattccttgtggggacatccgcttgaatgctgtgtaacacactcaccgagaggaaaaaggcttctccacaacctcctcctccagttctgatgaggcacgcctgccttctcccctccaagtgaatgagtttccagctaagcctgatgatggaagggccttctccacagggacacagtctggtgcccagactcaaggcctccagccacttatttccatggattcccctggacatattcccatggtagactgtgacacagctgagctggcctattttggacgtgtgaggatgtggatggaggtgatgaaaaccaccctatcatcagttaggattaggtttagaatcaagtctgtgaaagtctcctgtatcatttcttggtatgatcattggtatctgatatctgtttgcttctaaaggtttcactgttcatgaatacgtaaactgcgtaggagagaacagggatgctatctcgctagccatatattttctgagtagcatatataattttattgctggaatctactagaaccttctaatccatgtgctgctgtggcatcaggaaaggaagatgtaagaagctaaaatgaaaaatagtgtgtccatgcaagcttgtgagtctgtgtatattgttgtttcagtgtattcttatctctagtccaatattttgggcccattacaaatatatgaattccccaaatttttcttacattaacaaattctaccaactcaattgtgtatggaggttattatttgaagggtacaatcactacaacatgctctgccacccactccttttccagtgacactacttgagccacacactttcctttacaggccagcctctggcgtttgctgcacctcattgccaccttcctgtctctctgtgctaaacattcaggacagtgttccacaggcagatctggcctatttcattagtcaccatggcttggctgtgaagtacgttgaaggtggatcttgtcacatgccccttcagtgttcacctggccctctggtttaagttctgtctgccttacgtgactgagtttgactgtccaggttgctttgctcggtgaagagaggagggtaaatcggattctcgtttagcactgggttatacagatctggcaccctaacctaaaccaaggcatcttcactccaagagcagttggagagtctgggttagccttacgtggacctcgccgctcgctggcggtcacgattgtgagccctccagataatttttaaggttgagtctaagtaaggctgcttgggaaatggtcagctaagtaaatcacctttcatttcacataaggcccttaatatagataagtaaatttggcctttggtgtctcgtgactctcagaggcgtaggtagaggagcaaattaatatttgcagcatgggaattccttatcagaattttgaggggaataaatcctcatcagagacaaaaggacttaatcatctggccacctatcacttcagttctctgtataaatgaaatttaattctaacaaccttataaaaagaaggtccagacagcagaggaaacatcctgtccaattctaggttttcctcccttggcctcctttccccagcattgtctaccctggcccacttcctgcattctccccatgccctgctatttctgattctttgcttctcctagcgagatactttccttatatgatagctgctgagaagtttcccagaactgctagaggaaaagaagtggggaatttaggaaatatccctcactgacctaactccattatcttcactctttccttcttcctgccacctcatgcccattctctttactgtctagcatgctgaaagaaggaagtgatctaaatgccagcgtgttcagtggtaaatattagttggtgcaaaagaaaaaccatgattacttttgcactaacctaatagctttgcaaattttaagaacttgctttatgaagatattcggatatggattctccccaccccacatacttagacattgttcaaatatactacttttaaaaaaacaccttttcaaacagaattagcgttttgccaagtctggtattaatggaattgtacaggagctttgaaagttttcaaactttattaaactaaaaaaaaaaaatcgaaaatctctgtctgttccgcatagtatgcatttatttgacccctatttatcaatactatgatggggttttttttttttaaagaaaatttaagagtaggtaggtggattttaaaataatattttaaagaccttttatatctatatgtagcatttatagaaaaataaaaactaaaaatagaattgaattgtaacattatttaaggactgaagttttttttcttgtatcagtaagaaatacccaagaggctgggtgcagtgactcacacctgtaatcccagcactttgggaggctgcagtgggaggatcacatgacatcaggagtttgagaccagcttggccaacatagtgaaacgccgtctctattaaaaatacagaaaattagctgaatgtggtggcaggcgcctataattcctgctacttgggaggctgaggcaggagaattgcttgaacccaggaggcagaggttgcagtgagccaaacgttccactgcattccagcctggatgacaagagcgaaactccgtctcaaaaaaaaaaaaaaaaattgttatgcttagttccatggaaagactattctgaagctttaagtcttctttttctattttccatagtattgccccttccccacttcattgcttaactgtctctaaattttaatgataataatattttaaaggtcagataatgccattagaggcagagacaaacctggggaccaagctaatttctctgttattgagagcgctaaagacaggtgaactggagttttatttcctctgctagagtgaaataataccctctccaccaggcacaatggctcacacctgtaattccagcactttgggaggccaaggtgggcggatcacttgaggtcaggagttcgagaccagcctggccaacatggtgaaaccccatctctactaaaaatacaaaaattagccagccatggtggcatgctcctgtaatcccagctacttgggagactgaggtgggataatcacttgaacctgggaggcggaggttgcagtgagctgagattgtgccactgcactccagcctgggtgacagagcaagactccatctaaaaaacaaaaacaaaaacaaaaaaaccctctcaattggtttaataccacgatagaaaagataaatattttaggatggaatcttaaatatgtctgtccttttgtttcatatagttgaaatcaattcagtattgtttctacattaggtgtttcaaaaacagtcacctttgcaacagaagagctcttttgttgaaaatgattcacaatatatttcagttggaatgtcaggtggtatttctcttaccaacacctcacagaatctatgccaagctgctctaccaccaatgcaagtatttttttaaagctactaaaataaactttcttcaccagccaactctaatttggagacagtgtgcattggtgaaggacctcgtcagaataagtttgaatgtctactgaactaagaagaattttgtcgtttgggggagagaatagatggcatcagtccttcaattctgtaactgaagactccaattatagtagataagaattgtgtctagcaatttttaaacactgacagtccaaacaaaaatatttggtgaggaaggatgtcccatatttttgcttaaatatcataaacaaatatgagcatttactaattttttaaatggcattttgaaagattattcttatttacactctaaaattaaaggtgtactttatcttaagaaaatgatatattaaaaattcatattttaaaagataaaattggggaatttacagttattttgtgaatggcctttaaactatgatttgatctatatacaacttttcagaatacttttgattgtgtgttggacatatctaaaattaattttatctggcagaattaaacctaaatttatttgtataaaagagtcccctttctaaaattcatacagtgcccttgtattcatttatgcagtgtttataaatatttcaagttagattgtgagatattaataaatgatttatgctgtg

SEQ ID NO: 184502 - DNA, 2160 bp, Homo sapiens
  Payload ID: 16331
  Gene Symbol: SLC6A4
  Gene Name: solute carrier family 6 (neurotransmitter transporter), member 4
  ENST ID: ENST00000394821
  CDS Start-End: 307-2160
cacagccagcgccgccgggtgcctcgagggcgcgaggccagcccgcctgcccagcccgggaccagcctccccgcgcagcctggcaggtctcctggaggcaaggcgaccttgcttgccctctcttgcagaataacaaggggcttagccacaggagttgctggcaagtggaaagaagaacaaatgagtcaatcccgacgtgtcaatcccgacgatagagagctcggaggtgatccacaaatccaagcacccagagatcaattgggatccttggcagatggacatcagtgtcatttactaaccagcaggatggagacgacgcccttgaattctcagaagcagctatcagcgtgtgaagatggagaagattgtcaggaaaacggagttctacagaaggttgttcccaccccaggggacaaagtggagtccgggcaaatatccaatgggtactcagcagttccaagtcctggtgcgggagatgacacacggcactctatcccagcgaccaccaccaccctagtggctgagcttcatcaaggggaacgggagacctggggcaagaaggtggatttccttctctcagtgattggctatgctgtggacctgggcaatgtctggcgcttcccctacatatgttaccagaatggagggggggcattcctcctcccctacaccatcatggccatttttgggggaatcccgctcttttacatggagctcgcactgggacagtaccaccgaaatggatgcatttcaatatggaggaaaatctgcccgattttcaaagggattggttatgccatctgcatcattgccttttacattgcttcctactacaacaccatcatggcctgggcgctatactacctcatctcctccttcacggaccagctgccctggaccagctgcaagaactcctggaacactggcaactgcaccaattacttctccgaggacaacatcacctggaccctccattccacgtcccctgctgaagaattttacacgcgccacgtcctgcagatccaccggtctaaggggctccaggacctggggggcatcagctggcagctggccctctgcatcatgctgatcttcactgttatctacttcagcatctggaaaggcgtcaagacctctggcaaggtggtgtgggtgacagccaccttcccttatatcatcctttctgtcctgctggtgaggggtgccaccctccctggagcctggaggggtgttctcttctacttgaaacccaattggcagaaactcctggagacaggggtgtggatagatgcagccgctcagatcttcttctctcttggtccgggctttggggtcctgctggcttttgctagctacaacaagttcaacaacaactgctaccaagatgccctggtgaccagcgtggtgaactgcatgacgagcttcgtttcgggatttgtcatcttcacagtgctcggttacatggctgagatgaggaatgaagatgtgtctgaggtggccaaagacgcaggtcccagcctcctcttcatcacgtatgcagaagcgatagccaacatgccagcgtccactttctttgccatcatcttctttctgatgttaatcacgctgggcttggacagcacgtttgcaggcttggagggggtgatcacggctgtgctggatgagttcccacacgtctgggccaagcgccgggagcggttcgtgctcgccgtggtcatcacctgcttctttggatccctggtcaccctgacttttggaggggcctacgtggtgaagctgctggaggagtatgccacggggcccgcagtgctcactgtcgcgctgatcgaagcagtcgctgtgtcttggttctatggcatcactcagttctgcagggacgtgaaggaaatgctcggcttcagcccggggtggttctggaggatctgctgggtggccatcagccctctgtttctcctgttcatcatttgcagttttctgatgagcccgccacaactacgacttttccaatataattatccttactggagtatcatcttgggttactgcataggaacctcatctttcatttgcatccccacatatatagcttatcggttgatcatcactccagggacatttaaagagcgtattattaaaagtattaccccagaaacaccaaca

SEQ ID NO: 184503 - DNA, 6543 bp, Homo sapiens
  Payload ID: 16331
  Gene Symbol: SLC6A4
  Gene Name: solute carrier family 6 (neurotransmitter transporter), member 4
  Uniprot ID: P31645
  ENST ID: ENST00000401766
  CDS Start-End: 514-2406
gctcggccctgccctgccggctgctccgcgctccgctcctccctgcgagcgtgtgtgtgtgtcgggggtccctcccctcctggctctggggtcgggcgcgcaccccgccccgtagcgcggcccctccctggcgagcgcaaccccatccagcgggagcgcggagccgcggccgcggggaagcattaagtttattcgcctcaaagtgacgcaaaaattcttcaagagctctttggcggcggctatctagagatcagaccatgtgagggcccgcgggtacaaatacggccgcgccggcgcccctccgcacagccagcgccgccgggtgcctcgagggcgcgaggccagcccgcctgcccagcccgggaccagcctccccgcgcagcctggcagagtcaatcccgacgtgtcaatcccgacgatagagagctcggaggtgatccacaaatccaagcacccagagatcaattgggatccttggcagatggacatcagtgtcatttactaaccagcaggatggagacgacgcccttgaattctcagaagcagctatcagcgtgtgaagatggagaagattgtcaggaaaacggagttctacagaaggttgttcccaccccaggggacaaagtggagtccgggcaaatatccaatgggtactcagcagttccaagtcctggtgcgggagatgacacacggcactctatcccagcgaccaccaccaccctagtggctgagcttcatcaaggggaacgggagacctggggcaagaaggtggatttccttctctcagtgattggctatgctgtggacctgggcaatgtctggcgcttcccctacatatgttaccagaatggagggggggcattcctcctcccctacaccatcatggccatttttgggggaatcccgctcttttacatggagctcgcactgggacagtaccaccgaaatggatgcatttcaatatggaggaaaatctgcccgattttcaaagggattggttatgccatctgcatcattgccttttacattgcttcctactacaacaccatcatggcctgggcgctatactacctcatctcctccttcacggaccagctgccctggaccagctgcaagaactcctggaacactggcaactgcaccaattacttctccgaggacaacatcacctggaccctccattccacgtcccctgctgaagaattttacacgcgccacgtcctgcagatccaccggtctaaggggctccaggacctggggggcatcagctggcagctggccctctgcatcatgctgatcttcactgttatctacttcagcatctggaaaggcgtcaagacctctggcaaggtggtgtgggtgacagccaccttcccttatatcatcctttctgtcctgctggtgaggggtgccaccctccctggagcctggaggggtgttctcttctacttgaaacccaattggcagaaactcctggagacaggggtgtggatagatgcagccgctcagatcttcttctctcttggtccgggctttggggtcctgctggcttttgctagctacaacaagttcaacaacaactgctaccaagatgccctggtgaccagcgtggtgaactgcatgacgagcttcgtttcgggatttgtcatcttcacagtgctcggttacatggctgagatgaggaatgaagatgtgtctgaggtggccaaagacgcaggtcccagcctcctcttcatcacgtatgcagaagcgatagccaacatgccagcgtccactttctttgccatcatcttctttctgatgttaatcacgctgggcttggacagcacgtttgcaggcttggagggggtgatcacggctgtgctggatgagttcccacacgtctgggccaagcgccgggagcggttcgtgctcgccgtggtcatcacctgcttctttggatccctggtcaccctgacttttggaggggcctacgtggtgaagctgctggaggagtatgccacggggcccgcagtgctcactgtcgcgctgatcgaagcagtcgctgtgtcttggttctatggcatcactcagttctgcagggacgtgaaggaaatgctcggcttcagcccggggtggttctggaggatctgctgggtggccatcagccctctgtttctcctgttcatcatttgcagttttctgatgagcccgccacaactacgacttttccaatataattatccttactggagtatcatcttgggttactgcataggaacctcatctttcatttgcatccccacatatatagcttatcggttgatcatcactccagggacatttaaagagcgtattattaaaagtattaccccagaaacaccaacagaaattccttgtggggacatccgcttgaatgctgtgtaacacactcaccgagaggaaaaaggcttctccacaacctcctcctccagttctgatgaggcacgcctgccttctcccctccaagtgaatgagtttccagctaagcctgatgatggaagggccttctccacagggacacagtctggtgcccagactcaaggcctccagccacttatttccatggattcccctggacatattcccatggtagactgtgacacagctgagctggcctattttggacgtgtgaggatgtggatggaggtgatgaaaaccaccctatcatcagttaggattaggtttagaatcaagtctgtgaaagtctcctgtatcatttcttggtatgatcattggtatctgatatctgtttgcttctaaaggtttcactgttcatgaatacgtaaactgcgtaggagagaacagggatgctatctcgctagccatatattttctgagtagcatatataattttattgctggaatctactagaaccttctaatccatgtgctgctgtggcatcaggaaaggaagatgtaagaagctaaaatgaaaaatagtgtgtccatgcaagcttgtgagtctgtgtatattgttgtttcagtgtattcttatctctagtccaatattttgggcccattacaaatatatgaattccccaaatttttcttacattaacaaattctaccaactcaattgtgtatggaggttattatttgaagggtacaatcactacaacatgctctgccacccactccttttccagtgacactacttgagccacacactttcctttacaggccagcctctggcgtttgctgcacctcattgccaccttcctgtctctctgtgctaaacattcaggacagtgttccacaggcagatctggcctatttcattagtcaccatggcttggctgtgaagtacgttgaaggtggatcttgtcacatgccccttcagtgttcacctggccctctggtttaagttctgtctgccttacgtgactgagtttgactgtccaggttgctttgctcggtgaagagaggagggtaaatcggattctcgtttagcactgggttatacagatctggcaccctaacctaaaccaaggcatcttcactccaagagcagttggagagtctgggttagccttacgtggacctcgccgctcgctggcggtcacgattgtgagccctccagataatttttaaggttgagtctaagtaaggctgcttgggaaatggtcagctaagtaaatcacctttcatttcacataaggcccttaatatagataagtaaatttggcctttggtgtctcgtgactctcagaggcgtaggtagaggagcaaattaatatttgcagcatgggaattccttatcagaattttgaggggaataaatcctcatcagagacaaaaggacttaatcatctggccacctatcacttcagttctctgtataaatgaaatttaattctaacaaccttataaaaagaaggtccagacagcagaggaaacatcctgtccaattctaggttttcctcccttggcctcctttccccagcattgtctaccctggcccacttcctgcattctccccatgccctgctatttctgattctttgcttctcctagcgagatactttccttatatgatagctgctgagaagtttcccagaactgctagaggaaaagaagtggggaatttaggaaatatccctcactgacctaactccattatcttcactctttccttcttcctgccacctcatgcccattctctttactgtctagcatgctgaaagaaggaagtgatctaaatgccagcgtgttcagtggtaaatattagttggtgcaaaagaaaaaccatgattacttttgcactaacctaatagctttgcaaattttaagaacttgctttatgaagatattcggatatggattctccccaccccacatacttagacattgttcaaatatactacttttaaaaaaacaccttttcaaacagaattagcgttttgccaagtctggtattaatggaattgtacaggagctttgaaagttttcaaactttattaaactaaaaaaaaaaaatcgaaaatctctgtctgttccgcatagtatgcatttatttgacccctatttatcaatactatgatggggttttttttttttaaagaaaatttaagagtaggtaggtggattttaaaataatattttaaagaccttttatatctatatgtagcatttatagaaaaataaaaactaaaaatagaattgaattgtaacattatttaaggactgaagttttttttcttgtatcagtaagaaatacccaagaggctgggtgcagtgactcacacctgtaatcccagcactttgggaggctgcagtgggaggatcacatgacatcaggagtttgagaccagcttggccaacatagtgaaacgccgtctctattaaaaatacagaaaattagctgaatgtggtggcaggcgcctataattcctgctacttgggaggctgaggcaggagaattgcttgaacccaggaggcagaggttgcagtgagccaaacgttccactgcattccagcctggatgacaagagcgaaactccgtctcaaaaaaaaaaaaaaaaattgttatgcttagttccatggaaagactattctgaagctttaagtcttctttttctattttccatagtattgccccttccccacttcattgcttaactgtctctaaattttaatgataataatattttaaaggtcagataatgccattagaggcagagacaaacctggggaccaagctaatttctctgttattgagagcgctaaagacaggtgaactggagttttatttcctctgctagagtgaaataataccctctccaccaggcacaatggctcacacctgtaattccagcactttgggaggccaaggtgggcggatcacttgaggtcaggagttcgagaccagcctggccaacatggtgaaaccccatctctactaaaaatacaaaaattagccagccatggtggcatgctcctgtaatcccagctacttgggagactgaggtgggataatcacttgaacctgggaggcggaggttgcagtgagctgagattgtgccactgcactccagcctgggtgacagagcaagactccatctaaaaaacaaaaacaaaaacaaaaaaaccctctcaattggtttaataccacgatagaaaagataaatattttaggatggaatcttaaatatgtctgtccttttgtttcatatagttgaaatcaattcagtattgtttctacattaggtgtttcaaaaacagtcacctttgcaacagaagagctcttttgttgaaaatgattcacaatatatttcagttggaatgtcaggtggtatttctcttaccaacacctcacagaatctatgccaagctgctctaccaccaatgcaagtatttttttaaagctactaaaataaactttcttcaccagccaactctaatttggagacagtgtgcattggtgaaggacctcgtcagaataagtttgaatgtctactgaactaagaagaattttgtcgtttgggggagagaatagatggcatcagtccttcaattctgtaactgaagactccaattatagtagataagaattgtgtctagcaatttttaaacactgacagtccaaacaaaaatatttggtgaggaaggatgtcccatatttttgcttaaatatcataaacaaatatgagcatttactaattttttaaatggcattttgaaagattattcttatttacactctaaaattaaaggtgtactttatcttaagaaaatgatatattaaaaattcatattttaaaagataaaattggggaatttacagttattttgtgaatggcctttaaactatgatttgatctatatacaacttttcagaatacttttgattgtgtgttggacatatctaaaattaattttatctggcagaattaaacctaaatttatttgtataaaagagtcccctttctaaaattcatacagtgcccttgtattcatttatgcagtgtttataaatatttcaagttagattgtgagatattaataaatgatttatgctgtgaa

SEQ ID NO: 184504 - DNA, 1069 bp, Homo sapiens
  Payload ID: 16331
  Gene Symbol: SLC6A4
  Gene Name: solute carrier family 6 (neurotransmitter transporter), member 4
  ENST ID: ENST00000579221
  CDS Start-End: 1-217
cactttctttgccatcatcttctttctgatgttaatcacgctgggcttggacagcacgtttgcaggcttggagggggtgatcacggctgtgctggatgagttcccacacgtctgggccaagcgccgggagcggttcgtgctcgccgtggtcatcacctgcttctttggatccctggtcaccctgacttttgcatcactcagttctgcagggacgtgaaggaaatgctcggcttcagcccggggtggttctggaggatctgctgggtggccatcagccctctgtttctcctgttcatcatttgcagttttctgatgagcccgccacaactacgacttttccaatataattatccttactggagtatcatcttgggttactgcataggaacctcatctttcatttgcatccccacatatatagcttatcggttgatcatcactccagggacatttaaagagcgtattattaaaagtattaccccagaaacaccaacagaaattccttgtggggacatccgcttgaatgctgtgtaacacactcaccgagaggaaaaaggcttctccacaacctcctcctccagttctgatgaggcacgcctgccttctcccctccaagtgaatgagtttccagctaagcctgatgatggaagggccttctccacagggacacagtctggtgcccagactcaaggcctccagccacttatttccatggattcccctggacatattcccatggtagactgtgacacagctgagctggcctattttggacgtgtgaggatgtggatggaggtgatgaaaaccaccctatcatcagttaggattaggtttagaatcaagtctgtgaaagtctcctgtatcatttcttggtatgatcattggtatctgatatctgtttgcttctaaaggtttcactgttcatgaatacgtaaactgcgtaggagagaacagggatgctatctcgctagccatatattttctgagtagcatatataattttattgctggaatctactagaaccttctaatccatgtgctgctgtggcatcaggaaaggaagatgtaa

SEQ ID NO: 184505 - DNA, 2356 bp, Homo sapiens
  Payload ID: 16332
  Gene Symbol: SLC6A5
  Gene Name: solute carrier family 6 (neurotransmitter transporter), member 5
  ENST ID: ENST00000298923
  CDS Start-End: 80-643
tctcctgcctgagccaaacccagtcttgtcaatagcgggtttcaccctccaccagttcagtctgttgcctgtgtcagacatggattgcagtgctcccaaggaaatgaataaactgccagccaacagcccggaggcggcggcggcgcagggccacccggatggcccatgcgctcccaggacgagcccggagcaggagcttcccgcggctgccgccccgccgccgccacgtgtgcccaggtccgcttccaccggcgcccaaactttccagtcagcggacgcgcgagcctgcgaggctgagcggccaggagtggggtcttgcaaactcagtagcccgcgggcgcaggcggcctctgcagctctgcgggacttgagagaggcgcaaggcgcgcaggcctcgccccctcccgggagctccgggcccggcaacgcgctgcactgtaagatcccttttctgcgaggcccggagggggatgcgaacgtgagtgtgggcaagggcaccctggagcggaacaatacccctgttgtgggctgggtgaacatgagccagagcaccgtggtgctggccacggatggaatcacgtccgtgctcccgggcagcgtggccaccgttgccacccaggtgctttcctcatcccttacctgatgatgctggctctggctggattacccatcttcttcttggaggtgtcgctgggccagtttgccagccagggaccagtgtctgtgtggaaggccatcccagctctacaaggctgtggcatcgcgatgctgatcatctctgtcctaatagccatatactacaatgtgattatttgctatacacttttctacctgtttgcctcctttgtgtctgtactaccctggggctcctgcaacaacccttggaatacgccagaatgcaaagataaaaccaaacttttattagattcctgtgttatcagtgaccatcccaaaatacagatcaagaactcgactttctgcatgaccgcttatcccaacgtgacaatggttaatttcaccagccaggccaataagacatttgtcagtggaagtgaagagtacttcaagtactttgtgctgaagatttctgcagggattgaatatcctggcgagatcaggtggccactagctctctgcctcttcctggcttgggtcattgtgtatgcatcattggctaaaggaatcaagacttcaggaaaagtggtgtacttcacggccacgttcccgtatgtcgtactcgtgatcctcctcatccgaggagtcaccctgcctggagctggagctgggatctggtacttcatcacacccaagtgggagaaactcacggatgccacggtgtggaaagatgctgccactcagattttcttctctttatctgctgcatggggaggcctgatcactctctcttcttacaacaaattccacaacaactgctacagggacactctaattgtcacctgcaccaacagtgccacaagcatctttgccggcttcgtcatcttctccgttatcggcttcatggccaatgaacgcaaagtcaacattgagaatgtggcagaccaagggccaggcattgcatttgtggtttacccggaagccttaaccaggctgcctctctctccgttctgggccatcatctttttcctgatgctcctcactcttggacttgacactatgtttgccaccatcgagaccatagtgacctccatctcagacgagtttcccaagtacctacgcacacacaagccagtgtttactctgggctgctgcatttgtttcttcatcatgggttttccaatgatcactcagggtggaatttacatgtttcagcttgtggacacctatgctgcctcctatgcccttgtcatcattgccatttttgagctcgtggggatctcttatgtgtatggcttgcaaagattctgtgaagatatagagatgatgattggattccagcctaacatcttctggaaagtctgctgggcatttgtaaccccaaccattttaacctttatcctttgcttcagcttttaccagtgggagcccatgacctatggctcttaccgctatcctaactggtccatggtgctcggatggctaatgctcgcctgttccgtcatctggatcccaattatgtttgtgataaaaatgcatctggcccctggaagatttattgagaggctgaagttggtgtgctcgccacagccggactggggcccattcttagctcaacaccgcggggagcgttacaagaacatgatcgaccccttgggaacctcttccttgggactcaaactgccagtgaaggatttggaactgggcactcagtgctagtccagtggtgtgggatggtcca

SEQ ID NO: 184506 - DNA, 7084 bp, Homo sapiens
  Payload ID: 16332
  Gene Symbol: SLC6A5
  Gene Name: solute carrier family 6 (neurotransmitter transporter), member 5
  Uniprot ID: Q9Y345
  ENST ID: ENST00000525748
  CDS Start-End: 274-2667
cacgccaaacacgcagccccctcccgctggagtgacaactggccagcatactctaggctgttgtccctttaaaacttgaatccaagggggtaatgatttatcaaacttgtattatcaagaaaatgtcaaaccaagggcaccttgctttgcactgacgcaaacccggcctttcccaaggagatatagaaagcgcctctcctgcctgagccaaacccagtcttgtcaatagcgggtttcaccctccaccagttcagtctgttgcctgtgtcagacatggattgcagtgctcccaaggaaatgaataaactgccagccaacagcccggaggcggcggcggcgcagggccacccggatggcccatgcgctcccaggacgagcccggagcaggagcttcccgcggctgccgccccgccgccgccacgtgtgcccaggtccgcttccaccggcgcccaaactttccagtcagcggacgcgcgagcctgcgaggctgagcggccaggagtggggtcttgcaaactcagtagcccgcgggcgcaggcggcctctgcagctctgcgggacttgagagaggcgcaaggcgcgcaggcctcgccccctcccgggagctccgggcccggcaacgcgctgcactgtaagatcccttttctgcgaggcccggagggggatgcgaacgtgagtgtgggcaagggcaccctggagcggaacaatacccctgttgtgggctgggtgaacatgagccagagcaccgtggtgctggccacggatggaatcacgtccgtgctcccgggcagcgtggccaccgttgccacccaggaggacgagcaaggggatgagaataaggcccgagggaactggtccagcaaactggacttcatcctgtccatggtggggtacgcagtggggctgggcaatgtctggaggtttccctacctggccttccagaacgggggaggtgctttcctcatcccttacctgatgatgctggctctggctggattacccatcttcttcttggaggtgtcgctgggccagtttgccagccagggaccagtgtctgtgtggaaggccatcccagctctacaaggctgtggcatcgcgatgctgatcatctctgtcctaatagccatatactacaatgtgattatttgctatacacttttctacctgtttgcctcctttgtgtctgtactaccctggggctcctgcaacaacccttggaatacgccagaatgcaaagataaaaccaaacttttattagattcctgtgttatcagtgaccatcccaaaatacagatcaagaactcgactttctgcatgaccgcttatcccaacgtgacaatggttaatttcaccagccaggccaataagacatttgtcagtggaagtgaagagtacttcaagtactttgtgctgaagatttctgcagggattgaatatcctggcgagatcaggtggccactagctctctgcctcttcctggcttgggtcattgtgtatgcatcattggctaaaggaatcaagacttcaggaaaagtggtgtacttcacggccacgttcccgtatgtcgtactcgtgatcctcctcatccgaggagtcaccctgcctggagctggagctgggatctggtacttcatcacacccaagtgggagaaactcacggatgccacggtgtggaaagatgctgccactcagattttcttctctttatctgctgcatggggaggcctgatcactctctcttcttacaacaaattccacaacaactgctacagggacactctaattgtcacctgcaccaacagtgccacaagcatctttgccggcttcgtcatcttctccgttatcggcttcatggccaatgaacgcaaagtcaacattgagaatgtggcagaccaagggccaggcattgcatttgtggtttacccggaagccttaaccaggctgcctctctctccgttctgggccatcatctttttcctgatgctcctcactcttggacttgacactatgtttgccaccatcgagaccatagtgacctccatctcagacgagtttcccaagtacctacgcacacacaagccagtgtttactctgggctgctgcatttgtttcttcatcatgggttttccaatgatcactcagggtggaatttacatgtttcagcttgtggacacctatgctgcctcctatgcccttgtcatcattgccatttttgagctcgtggggatctcttatgtgtatggcttgcaaagattctgtgaagatatagagatgatgattggattccagcctaacatcttctggaaagtctgctgggcatttgtaaccccaaccattttaacctttatcctttgcttcagcttttaccagtgggagcccatgacctatggctcttaccgctatcctaactggtccatggtgctcggatggctaatgctcgcctgttccgtcatctggatcccaattatgtttgtgataaaaatgcatctggcccctggaagatttattgagaggctgaagttggtgtgctcgccacagccggactggggcccattcttagctcaacaccgcggggagcgttacaagaacatgatcgaccccttgggaacctcttccttgggactcaaactgccagtgaaggatttggaactgggcactcagtgctagtccagtggtgtgggatggtccagacttgatcctgtttttcctctctgcctcctcctaatgttttccatagctctcctcccatttttcttcatctttcttcctacatcttggttcacatccacgcatgagagtgattatgtagaaaagtaggcatagtgtcgcatgctgcagtaaagagctacatagaccacctgaagcgctgtttgcctgtgcccatggtgactgtttctggtcaggttggtcccctgaccacacgttttaccctgcagaggaggatcagttaggtgagcactggtaggtatgcgtggttttgtcaatagagaggtatccactgtgtgatggcatggggggtgccagtaaggcatgtatagagtggccgaattacaagactttatttggacttgaacagaactgagcaatgtggtgatcttgttcagacacacaaagttcaagacaggtttttttttttttcagagagttagcagtggtcagaaaatgttttggatgtaagacaagaccattcaatttggacaccactgaggtggttaagtttatatttccagtcaccactggggatctgtttccttcgtttggatcagcaatctccagttaccactaactcagatgctacagtctacacattgtgactttgattgaactgtcagttttcttccctcaactgtctttttttgttttaaataaccacatttgtgagttcttttggtcatttcctccacctctgcccaagaagccatcatataagttgtgcctcattttgtacgttcatagtagagctccatgctcatttctacatgatatttagcaccatggttcaatgtcacgatcctgtgtttcttctctaaatgtctttctataagctgtagacaccttgtcttttgacctctgggaaaacaagacttaccctggttctgtctatatattatatatataggacacatgctcttaaaagacagataacttcttaatttttactctttttcattcacagtaaatgccaactgtggtcatagagaaatcaaagaaatggagagtttaatagaaagcaaccacaatattcactgcactggtagtacattttaggacatggtatttatagaactttctgataaatacagcttaggtaagtagcgagtgagccaattaagactatagcttttaagactacatttagccaattcaattttaagagttccctattcacagtactcattttaacggcactctaatgagagctgatcatatgtctgcagaaattggcaaagtgtaaactttattatcttcttgtatcctgaacatgcatatatgaaatttttaaaatgtgacatgtgttcatgtagtgtgtacttgtagtggtgttttctgtccttataaatatcttttgaattctgtagagatggtgagtttagtatagtgtagtctggggattttattttcccttacagtaataatatctaaacctaaaattgtttcctttaggggagatcatttcaatcattttcttcatttatcttcatagtacagggtctcaggcaaagtttttcagttcaaatcttgtatattgttgtgacattttcatcctgtttaacagcaatgaaacccaacaacaggctttaatgtacatttttttttaaaagatttcatttgttaaaaaaagtctcaactcattttactgagctctcccttttctagggcaagtatcatcgccatttgccaacatcaatatgaacttccagtttttaagagtagcttgtgaaaggttttagaaaaggaaacaaagatgggttttgaactttagattttcatgtcttttgtctgcagtgtatatttgttctcccctctccttctcctcctttccccccttgtctcccaaagctcaaacttgcttgagtctatcatagagactaaaccttgagcttcccctaaacttagctttaggaagctgagctgtggcctcacctgtctgccatgaacacagatttctctaagaaagccatattgatgagaagcccccaattactgcagcagacgtcgcacaatggtaccaaaaatgagcctctccagctgatacctggtagagtgagaggagccaggaggaataacttaggcctggaaattatctgcaggctttgcaatttgaaggttgagaaagagagcttaaatcaattagcattctctcatgggactggtatgtttgtgtcaggatgaatggtttttggctctcctgttgcctcttggctaaaactctgattgagccaatggttgcagtctgatgctggacgccaacccaatttctgctaattattgcttttgtgattaaaagaaggtgggggtggggggctcccacagatgctgccaggtttgttttgtacaaactgaaagttaacttaattgtgagaacggagacctcatcactagctgcatgttttggatttgggggcatttacatttgtgttaattatgatttgtccaggtaagatgcagtagctgctccctgagcagctgtttcccccccaccccacttcactataatttccaagatttatttccctttgtttaaagggacacgcttaggtgaaaggttccaaatttacctggaaatggttaccttgtaaatttagcttgtctaatggattgtttccatgatattaaaatgtacagtcaattggaagaaaaaaaatgaaaaaaataaaatgaataacattgttagaaactggcacctgaaaacttcccttcaaagtgggggaaaaaaccgagtagctgaggaaagactttcattggttcactgtgtagaatggtggagcattttccacttgtgagattatttcataacaccaacaaatgccagaaactcattcagaaaaaaagccatatgtgaaaaacagtaatcctgtcatatccttagaggagaaaaaatgtatatttcttaacaagtggtgttgtgacttcttatgcaaatgtcttgcatattagtaacttttattatctttaggactgtgcttatcaggtacaaatgtgtctagttctgttttattgtttctttttcctttatatttatgtattgcatgaggtctgtggtcaatgcaaaatcatgatgacctcaatgtctttgaaatttgcaatgtgtttttaatatgtaagaaatgtaatcaacttgtatttcagtaagcagcactttaaaaagagtttaacatgatgacctttaaatggataggacttgggttgtttttatggtaatgttgcattggagttgagttttcctttaattaagttcttgtttcctcatctatgtgtctctcagtgcttcctgtccacctttgctctcagcatggtttcccatgcctaaaagtaagattttcttttctctttgttcccttggctgtaggtcattgtcctcttcccagaggctagcacaataactgttgctcaatgtaagatgagatggcaagatcatactactgttgttgcacctggatttgagttgggacatgcttctttgaggcagatgattcaagagaggacgtgctgtgtggcaggtgttttgcaggaccaaaaggccaaggccaacagaggagcatttccttctctttcacactgggtatcaagcagaaaacttccaggctgggagcaaaggtgtgggtgattctgccttgatactcatttccccacaaagtggccctaggatttgtgaaagtgaagcttcctatctttcccagattttgctttaattgcccagaaaggccaagtagttttgaaatgtggtctttgctcaggtcacctctgagcagcctgcagccaaagagaaagtgttttcagattaggtattcatcacctctgaaaagcaagcagtggtttgacttgcctgccacggattaaatacatcttcaggtaaccatttgccttacaggtgtattttactgttaggatgattcttagtaattgactaaaaactgttttgtctctcatttgtttgtggtttttgcactttattatggacctgtaaaggaataggttaattcttacattgtgtacttggctaatgtcctaaatgcaggcatcttttgtgggtactgttgcccatgaataaacatatgttccctaatcaggtccttatatttttccattaactatacatgaagaaaatatattatgttacaaatgatgcatcatatatatatatatatatatatatatatcttatagattacatattatatactgcacattattcatttaagaagtcattcttgaggccctacctcaaattttctatttatgtataaaaatgcaatttattgtattatatatttgcctattatgtactgatataaattagaatttaccctaataatgtatgagttcacaaaaccctaaataaatgtcagtgtttaaaacatga

SEQ ID NO: 184507 - DNA, 284 bp, Homo sapiens
  Payload ID: 16333
  Gene Symbol: SLC6A6
  Gene Name: solute carrier family 6 (neurotransmitter transporter), member 6
  ENST ID: ENST00000452151
  CDS Start-End: 1-284
gacaatgatgccgctgcccacattttggtccattcttttttttattatgcttctcttgcttggactggatagccagggatgtttcatcttctcgctcgtcaagtacgtacccctgacctacaacaaaacatacgtgtaccccaactgggccattgggctgggctggagcctggccctttcctccatgctctgcgttcccttggtcatcgtcatccgcctctgccagactgaggggccgttccttgtgagagtcaagtacctgctgaccccaagggaacccaacc

SEQ ID NO: 184508 - DNA, 458 bp, Homo sapiens
  Payload ID: 16333
  Gene Symbol: SLC6A6
  Gene Name: solute carrier family 6 (neurotransmitter transporter), member 6
  ENST ID: ENST00000452775
  CDS Start-End: 130-458
aagtccaacagtgcgcgactccccaggtcaggagaagccccgatgtgtgcagaatctgcagatggggctgctctcggccctgcctctggctgtggaaacaggcctccaagtacccaagaaagcaaggagatggccaccaaggagaagctgcagtgtctgaaagatttccacaaggacatcctgaagccctcaccagggaagagcccaggcacgcggcctgaggacgaggctgagggaaaacctccgcagagggagaagtggtctagcaagatcgactttgtgctctctgtggctggcggcttcgtgggcttgggcaacgtctggcgcttcccgtacctctgctacaagaatggtggaggtgcgtttctcataccgtattttattttcctgtttgggagcggcctgcctgtgtttttcttggagatcatcataggccagtacacctctgaagggggcat

SEQ ID NO: 184509 - DNA, 6528 bp, Homo sapiens
  Payload ID: 16333
  Gene Symbol: SLC6A6
  Gene Name: solute carrier family 6 (neurotransmitter transporter), member 6
  Uniprot ID: P31641
  ENST ID: ENST00000622186
  CDS Start-End: 326-2188
atttttccacccagcaggatgggtgatgctgagagctgcctgctcagacaacagacacgcgaggtcaggaagaagccgcttataaattaccgcttccttcgcgccgccgccaacgccgagccccgaggaccgcaagcccagaggacaagctgcgccaagagggagtgcggagcgttcacccagcgggtcagagagcgagcgggcaggcagcccccggccggcggaacccggcacagccgagcagagcgcgggcggcgccgcagccaccccagatccagaaccagaaccacagcccttctgaggagctcccaaacaaagcaaggagatggccaccaaggagaagctgcagtgtctgaaagatttccacaaggacatcctgaagccctcaccagggaagagcccaggcacgcggcctgaggacgaggctgagggaaaacctccgcagagggagaagtggtctagcaagatcgactttgtgctctctgtggctggcggcttcgtgggcttgggcaacgtctggcgcttcccgtacctctgctacaagaatggtggaggtgcgtttctcataccgtattttattttcctgtttgggagcggcctgcctgtgtttttcttggagatcatcataggccagtacacctctgaagggggcatcacctgctgggaaaagatctgccccttgttctctggtatcggctatgcctccgttgtaattgtgtccctcctgaatgtctactacatcgtcatcctggcctgggccacatactacctgttccagtccttccagaaggagctgccctgggcacactgcaaccacagctggaacacacctcactgcatggaggacaccatgcgcaagaacaagagtgtctggatcaccatcagctccaccaacttcacctcccctgtcatcgagttctgggagcgcaacgtgctgagcttgtcccctggaatcgaccacccaggctctctgaaatgggacctcgctctctgccttcttttagtctggctagtgtgtttcttctgcatctggaagggcgtcaggtccactgggaaggtcgtctacttcacagccacttttccattcgccatgctcctggtgctgctggtccgagggctgacgctgccgggcgcgggcgcaggcatcaagttctatctgtatcctgacatcacccgccttgaggacccacaggtgtggattgacgctgggactcagatattcttctcttatgccatctgcctgggggctatgacctcgctggggagctacaacaagtacaagtataactcgtacagggactgtatgctgctgggatgcctgaacagtggtaccagttttgtgtctggcttcgcaattttttccatcctgggcttcatggcacaagagcaaggggtggacattgctgatgtggctgagtcaggtcctggcctggccttcattgcctacccaaaagctgtgacaatgatgccgctgcccacattttggtccattcttttttttattatgcttctcttgcttggactggatagccagtttgttgaagttgaaggacagatcacatccttggttgatctttacccatccttcctaaggaagggttatcgtcgggaaatcttcatcgccttcgtgtgtagcatcagctacctgctggggctgacgatggtgacggagggtggcatgtatgtgtttcagctctttgactactatgcagctagcggtgtatgccttttgtgggttgcattctttgaatgttttgttattgcctggatatatggaggtgataacctttatgatggtattgaggacatgattggctatcggcccgggccctggatgaagtacagctgggctgtgatcactccagttctctgtgttggatgtttcatcttctcgctcgtcaagtacgtacccctgacctacaacaaaacatacgtgtaccccaactgggccattgggctgggctggagcctggccctttcctccatgctctgcgttcccttggtcatcgtcatccgcctctgccagactgaggggccgttccttgtgagagtcaagtacctgctgaccccaagggaacccaaccgctgggctgtggagcgcgagggagccacaccttacaactctcgcaccgtcatgaacggcgctctcgtgaaaccgacccacatcattgtggagaccatgatgtgagctctctcgggtcgacggggccggcggctttcctgctgtttactaacattagattctcataggaccaggtttacagagctttatatttgcactaggatttttttttttttgtaattgtcacagaaaatgtaattgtgggtatgtgtgcgtgcgtgtgtgtgtgtgtgtgtatcgtgtgtgtgtgttttgttttgatttgggggatattttgtacaaaaagaaaacccacgggaagatgtccgtggagaggcagagctttcatactgaattagatgtattttatgggaatttggtaaatttttctttgtatttttttttttacatataagtatatatacacttagagattgtcatatacttttaccacttgaattgatcttcttgccagcaatagatctcattttcaaaagcaattcttcggtgctgtgtagctggcagaaagttctgtccagtaaacgcaggatggaattttcctgggactctacacccatcttaaggtggtataccttccaaatcctggttcagatggaagaaatagcaggagagaggacccattagctggcagacccagggggaagaaaggagggctgtgaggagatacctcattaaacttggcttagtgaagaagagagatgccaaaggaatgaaccaacccttcacataaaggagactggctgaagctgaatgaggaggccctatagcagaagtctgattctaagagcagtagaaacttgtaccagaagcaaaatcccacttttaattttgagatggtgagtggatagtcagtagaccgtcagaaccactggccagagagggagctgctagagatccaagaaggctggcaggagtgaggctcacaactcagcctcgcaagaggtggcagaggcacaggaggccacagtccttcctggggcattccaggcagagaaggagcagaggctctcccggcaggagctggggtctcagggctcagatgagtctgttgcatttgaatggggtcatagcaggttctggtcattccccaagcaacatctcagcatctcttaaagttgcctgcaggaatgaagcatgacatacctgttgagggactaggggagtggtggggaggtgagtggaccaaaggatataggccccaggcatgcagatgggcccggtgtcggggaggggtgctttctttcctcatctccccactccccactctcagcctgggagactcctgccaagccctcattaaagatgccaccctgggctgccctggcacctagcaaggcacaccaagaacagcttttgagtctgtatcctccactgggggaagtgctcccagttcagaacaagggcagcccgtggtgctgacctaggatataacaaagctcttcacttcaaaacccctgcaatagctgggtttacagacatttaccacctgcggacccaaaagagaaggcctaggagagttttctagaaggttgggattgtcagggtcctggcccctcagaactggcttgatcaagggccttatgtggagcagaggttgtctctgaaccaggagagaaggtactatacctttcaaatccccagggcagacacacccccacccagcccctatttggacctaaactgtgccatttgaacagtcacttccaagctcagtctaaatgaaaccgaaacgtgaccacgcacaaaggcagtcactgcctcgaggggtgcagaccgcagaattttcacagcaggggctcttggaaccctggaaacccccttcttaaatttgggaggaggagtatgcctttggtgtccccctcccaaggggcaattctgaaccccatctttggcaggcatacatatttcactgtttccaaagctatctactctgccaaacaacacccagtcctattccaaactctcaacgattctatcttgttcctgtttttctatgtatttatggttgccgtttgtgtctgatttgattttactgttttttccctgattttatggagtagcattgtgacctgttttcctttgtcttatataactttagtaaactaaccactgtcaatgattgagggcaggtggcacgtggggaagaggggacttggcacgcagtggctacctgggcatttgtggtcatttcagtttccatctccccagcgggggctccctgggtgaaaggccacagtattttgggttggtaggcaaattgcaacattctggacatggcctgaggaaggcctcttcttataagattctcagaccaaattctagaccaaagacacaggcagaccaagtccccaggccccgcctggaaggaagtcgttcctcaactctccccaaggcacctgtctccaatcagagccctctcgcccagccagccctggctctgtgtgcagagcatagctctgcgagtacctgtgtaataatgctcaaccttcatgtctccgtataaacgaaactttccatgagagctcatgactctggtccacctgtctatagagaatgggcaaagtccttcacctgctttctgcttgggatgggtcagaaatgctgatgcccgcacatagcccagccagccagatctggaaaggaagcgagggggttgtttaaatcaattttttaagatgaagaagtgggagacactgcgttgagatgggccatgctagggccacagagatttcctgacggtcagggagagaagggcctccagggtcccctaacccaacgcccttgttgtaaatgaggtaactgaggctcagggaggcactgtgagccaggaatggattttcttgaaacagctctagctgcaggttctccgaggtaggtgcagggaatggtgagtgtctaaccagggctacatccagcaacatcctcaaggtcttcctgacaaccaaagacaagcctttatggaaaaggaaatgcgctcccctccatgttcagggatgaggggagcagcagcagccacactcccaccatcctcacagaattcctggacccatgcggtggctccgtgagctgggtgactccagcctcacctgcacaccccagccctgcacggggccctccttcctcccagcagcccttggtgagctaggaattgagatccctgtttgtgaaagagggaactgaggtgcagagaagccagaggtgtgccagatccttaggcaggatttagatgaagtcgccctggctccagactgaccccgaggctctgcggggagtttccaggcagcaggaagtggccttggatgctctccttccaggacagcataacccctgggccatgtgcagctccttcactgccccctggatccccagcatacccccaaagacagtggggaaacacaaggggagagcacagcatggcccctccagcccacttcagggcactcttgtatcacccgggtaccgccacactggtcccccacccagccagcatctcccagcacagcccctctccctggggaaatgctctgggtagccagtctaaaggcagaggcacctaactgctccccgcagcccaccccacccaagattcagacacaagccaggaaaggacccaagagaaaatccttcaaggtggcctgaggtcccatccctccctcagacccatgtggtcccaggccaggctgcctgggacacggtaaataccactgtgtgcaaaaatcgaagtacaaaaccacaagactaaacaaaacaaacccagagagccaaacttgtagaggtgggcagtccagaaagcagggggcagccctccccctttccttctctccctgatcctcagaatatatattgttgtaataggaagcatttttgcattgttctcttgtgggtgtcactacagacatgttctggcgtgttctccgagggatggagcatcctgttatatatttgacttcaaattgagatgttggcttcattttttttttttacccaattaatctcccaatccctagcaactgtgactctgtatttagcacaagagaaagctgagaatgtgggtcttgcctccttccagaaatatgtctggctcatcaggacatttttttaaaacttcaaaatatttttaagatattttaaacttttataaaaaaaaaatcaaccaacaagagacttttctgaggaggaacatttgtatttgaacaagatccttggtgtgtagttcagtcttgcagtatacaagcttttgtgtataaatgttttatgatatgattccctgtattttgcaggggtttttttctcttttgctttttagataaatatgtatatcaatattttaaattcatctttgctttttttagaggagtttgtaatcaccttataacatgaaaataaacatttcctttttaacatcc

SEQ ID NO: 184510 - DNA, 6526 bp, Homo sapiens
  Payload ID: 16333
  Gene Symbol: SLC6A6
  Gene Name: solute carrier family 6 (neurotransmitter transporter), member 6
  ENST ID: ENST00000613060
  CDS Start-End: 19-2184
atttttccacccagcaggatgggtgatgctgagagctgcctgctcagacaacagacacgcgaggtcaggaagaagccgcttataaattaccgcttccttcgcgccgccgccaacgccgagccccgaggaccgcaagcccagaggacaagctgcgccaagagggagtgcggagcgttcacccagcgggtcagagagcgagcgggcaggcagcccccggccggcggaacccggcacagccgagcagagcgcgggcggcgccgcagccaccccagatccagaaccagaaccacagcccttctgaggagctcccaaaccaaggagatggccaccaaggagaagctgcagtgtctgaaagatttccacaaggacatcctgaagccctcaccagggaagagcccaggcacgcggcctgaggacgaggctgagggaaaacctccgcagagggagaagtggtctagcaagatcgactttgtgctctctgtggctggcggcttcgtgggcttgggcaacgtctggcgcttcccgtacctctgctacaagaatggtggaggtgcgtttctcataccgtattttattttcctgtttgggagcggcctgcctgtgtttttcttggagatcatcataggccagtacacctctgaagggggcatcacctgctgggaaaagatctgccccttgttctctggtatcggctatgcctccgttgtaattgtgtccctcctgaatgtctactacatcgtcatcctggcctgggccacatactacctgttccagtccttccagaaggagctgccctgggcacactgcaaccacagctggaacacacctcactgcatggaggacaccatgcgcaagaacaagagtgtctggatcaccatcagctccaccaacttcacctcccctgtcatcgagttctgggagcgcaacgtgctgagcttgtcccctggaatcgaccacccaggctctctgaaatgggacctcgctctctgccttcttttagtctggctagtgtgtttcttctgcatctggaagggcgtcaggtccactgggaaggtcgtctacttcacagccacttttccattcgccatgctcctggtgctgctggtccgagggctgacgctgccgggcgcgggcgcaggcatcaagttctatctgtatcctgacatcacccgccttgaggacccacaggtgtggattgacgctgggactcagatattcttctcttatgccatctgcctgggggctatgacctcgctggggagctacaacaagtacaagtataactcgtacagggactgtatgctgctgggatgcctgaacagtggtaccagttttgtgtctggcttcgcaattttttccatcctgggcttcatggcacaagagcaaggggtggacattgctgatgtggctgagtcaggtcctggcctggccttcattgcctacccaaaagctgtgacaatgatgccgctgcccacattttggtccattcttttttttattatgcttctcttgcttggactggatagccagtttgttgaagttgaaggacagatcacatccttggttgatctttacccatccttcctaaggaagggttatcgtcgggaaatcttcatcgccttcgtgtgtagcatcagctacctgctggggctgacgatggtgacggagggtggcatgtatgtgtttcagctctttgactactatgcagctagcggtgtatgccttttgtgggttgcattctttgaatgttttgttattgcctggatatatggaggtgataacctttatgatggtattgaggacatgattggctatcggcccgggccctggatgaagtacagctgggctgtgatcactccagttctctgtgttggatgtttcatcttctcgctcgtcaagtacgtacccctgacctacaacaaaacatacgtgtaccccaactgggccattgggctgggctggagcctggccctttcctccatgctctgcgttcccttggtcatcgtcatccgcctctgccagactgaggggccgttccttgtgagagtcaagtacctgctgaccccaagggaacccaaccgctgggctgtggagcgcgagggagccacaccttacaactctcgcaccgtcatgaacggcgctctcgtgaaaccgacccacatcattgtggagaccatgatgtgagctctctcgggtcgacggggccggcggctttcctgctgtttactaacattagattctcataggaccaggtttacagagctttatatttgcactaggatttttttttttttgtaattgtcacagaaaatgtaattgtgggtatgtgtgcgtgcgtgtgtgtgtgtgtgtgtatcgtgtgtgtgtgttttgttttgatttgggggatattttgtacaaaaagaaaacccacgggaagatgtccgtggagaggcagagctttcatactgaattagatgtattttatgggaatttggtaaatttttctttgtatttttttttttacatataagtatatatacacttagagattgtcatatacttttaccacttgaattgatcttcttgccagcaatagatctcattttcaaaagcaattcttcggtgctgtgtagctggcagaaagttctgtccagtaaacgcaggatggaattttcctgggactctacacccatcttaaggtggtataccttccaaatcctggttcagatggaagaaatagcaggagagaggacccattagctggcagacccagggggaagaaaggagggctgtgaggagatacctcattaaacttggcttagtgaagaagagagatgccaaaggaatgaaccaacccttcacataaaggagactggctgaagctgaatgaggaggccctatagcagaagtctgattctaagagcagtagaaacttgtaccagaagcaaaatcccacttttaattttgagatggtgagtggatagtcagtagaccgtcagaaccactggccagagagggagctgctagagatccaagaaggctggcaggagtgaggctcacaactcagcctcgcaagaggtggcagaggcacaggaggccacagtccttcctggggcattccaggcagagaaggagcagaggctctcccggcaggagctggggtctcagggctcagatgagtctgttgcatttgaatggggtcatagcaggttctggtcattccccaagcaacatctcagcatctcttaaagttgcctgcaggaatgaagcatgacatacctgttgagggactaggggagtggtggggaggtgagtggaccaaaggatataggccccaggcatgcagatgggcccggtgtcggggaggggtgctttctttcctcatctccccactccccactctcagcctgggagactcctgccaagccctcattaaagatgccaccctgggctgccctggcacctagcaaggcacaccaagaacagcttttgagtctgtatcctccactgggggaagtgctcccagttcagaacaagggcagcccgtggtgctgacctaggatataacaaagctcttcacttcaaaacccctgcaatagctgggtttacagacatttaccacctgcggacccaaaagagaaggcctaggagagttttctagaaggttgggattgtcagggtcctggcccctcagaactggcttgatcaagggccttatgtggagcagaggttgtctctgaaccaggagagaaggtactatacctttcaaatccccagggcagacacacccccacccagcccctatttggacctaaactgtgccatttgaacagtcacttccaagctcagtctaaatgaaaccgaaacgtgaccacgcacaaaggcagtcactgcctcgaggggtgcagaccgcagaattttcacagcaggggctcttggaaccctggaaacccccttcttaaatttgggaggaggagtatgcctttggtgtccccctcccaaggggcaattctgaaccccatctttggcaggcatacatatttcactgtttccaaagctatctactctgccaaacaacacccagtcctattccaaactctcaacgattctatcttgttcctgtttttctatgtatttatggttgccgtttgtgtctgatttgattttactgttttttccctgattttatggagtagcattgtgacctgttttcctttgtcttatataactttagtaaactaaccactgtcaatgattgagggcaggtggcacgtggggaagaggggacttggcacgcagtggctacctgggcatttgtggtcatttcagtttccatctccccagcgggggctccctgggtgaaaggccacagtattttgggttggtaggcaaattgcaacattctggacatggcctgaggaaggcctcttcttataagattctcagaccaaattctagaccaaagacacaggcagaccaagtccccaggccccgcctggaaggaagtcgttcctcaactctccccaaggcacctgtctccaatcagagccctctcgcccagccagccctggctctgtgtgcagagcatagctctgcgagtacctgtgtaataatgctcaaccttcatgtctccgtataaacgaaactttccatgagagctcatgactctggtccacctgtctatagagaatgggcaaagtccttcacctgctttctgcttgggatgggtcagaaatgctgatgcccgcacatagcccagccagccagatctggaaaggaagcgagggggttgtttaaatcaattttttaagatgaagaagtgggagacactgcgttgagatgggccatgctagggccacagagatttcctgacggtcagggagagaagggcctccagggtcccctaacccaacgcccttgttgtaaatgaggtaactgaggctcagggaggcactgtgagccaggaatggattttcttgaaacagctctagctgcaggttctccgaggtaggtgcagggaatggtgagtgtctaaccagggctacatccagcaacatcctcaaggtcttcctgacaaccaaagacaagcctttatggaaaaggaaatgcgctcccctccatgttcagggatgaggggagcagcagcagccacactcccaccatcctcacagaattcctggacccatgcggtggctccgtgagctgggtgactccagcctcacctgcacaccccagccctgcacggggccctccttcctcccagcagcccttggtgagctaggaattgagatccctgtttgtgaaagagggaactgaggtgcagagaagccagaggtgtgccagatccttaggcaggatttagatgaagtcgccctggctccagactgaccccgaggctctgcggggagtttccaggcagcaggaagtggccttggatgctctccttccaggacagcataacccctgggccatgtgcagctccttcactgccccctggatccccagcatacccccaaagacagtggggaaacacaaggggagagcacagcatggcccctccagcccacttcagggcactcttgtatcacccgggtaccgccacactggtcccccacccagccagcatctcccagcacagcccctctccctggggaaatgctctgggtagccagtctaaaggcagaggcacctaactgctccccgcagcccaccccacccaagattcagacacaagccaggaaaggacccaagagaaaatccttcaaggtggcctgaggtcccatccctccctcagacccatgtggtcccaggccaggctgcctgggacacggtaaataccactgtgtgcaaaaatcgaagtacaaaaccacaagactaaacaaaacaaacccagagagccaaacttgtagaggtgggcagtccagaaagcagggggcagccctccccctttccttctctccctgatcctcagaatatatattgttgtaataggaagcatttttgcattgttctcttgtgggtgtcactacagacatgttctggcgtgttctccgagggatggagcatcctgttatatatttgacttcaaattgagatgttggcttcattttttttttttacccaattaatctcccaatccctagcaactgtgactctgtatttagcacaagagaaagctgagaatgtgggtcttgcctccttccagaaatatgtctggctcatcaggacatttttttaaaacttcaaaatatttttaagatattttaaacttttataaaaaaaaaatcaaccaacaagagacttttctgaggaggaacatttgtatttgaacaagatccttggtgtgtagttcagtcttgcagtatacaagcttttgtgtataaatgttttatgatatgattccctgtattttgcaggggtttttttctcttttgctttttagataaatatgtatatcaatattttaaattcatctttgctttttttagaggagtttgtaatcaccttataacatgaaaataaacatttcctttttaacatccaa

SEQ ID NO: 184511 - DNA, 6401 bp, Homo sapiens
  Payload ID: 16333
  Gene Symbol: SLC6A6
  Gene Name: solute carrier family 6 (neurotransmitter transporter), member 6
  ENST ID: ENST00000618278
  CDS Start-End: 19-1401
atttttccacccagcaggatgggtgatgctgagagctgcctgctcagacaacagacacgcgaggtcaggaagaagccgcttataaattaccgcttccttcgcgccgccgccaacgccgagccccgaggaccgcaagcccagaggacaagctgcgccaagagggagtgcggagcgttcacccagcgggtcagagagcgagcgggcaggcagcccccggccggcggaacccggcacagccgagcagagcgcgggcggcgccgcagccaccccagatccagaaccagaaccacagcccttctgaggagctcccaaaccaaggagatggccaccaaggagaagctgcagtgtctgaaagatttccacaaggacatcctgaagccctcaccagggaagagcccaggcacgcggcctgaggacgaggctgagggaaaacctccgcagagggagaagtggtctagcaagatcgactttgtgctctctgtggctggcggcttcgtgggcttgggcaacgtctggcgcttcccgtacctctgctacaagaatggtggaggtgcgtttctcataccgtattttattttcctgtttgggagcggcctgcctgtgtttttcttggagatcatcataggccagtacacctctgaagggggcatcacctgctgggaaaagatctgccccttgttctctggtatcggctatgcctccgttgtaattgtgtccctcctgaatgtctactacatcgtcatcctggcctgggccacatactacctgttccagtccttccagaaggagctgccctgggcacactgcaaccacagctggaacacacctcactgcatggaggacaccatgcgcaagaacaagagtgtctggatcaccatcagctccaccaacttcacctcccctgtcatcgagttctgggagcgcaacgtgctgagcttgtcccctggaatcgaccacccaggctctctgaaatgggacctcgctctctgccttcttttagtctggctagtgtgtttcttctgcatctggaagggcgtcaggtccactgggaaggtcgtctacttcacagccacttttccattcgccatgctcctggtgctgctggtccgagggctgacgctgccgggcgcgggcgcaggcatcaagttctatctgtatcctgacatcacccgccttgaggacccacaggtgtggattgacgctgggactcagatattcttctcttatgccatctgcctgggggctatgacctcgctggggagctacaacaagtacaagtataactcgtacaggtcctggcctggccttcattgcctacccaaaagctgtgacaatgatgccgctgcccacattttggtccattcttttttttattatgcttctcttgcttggactggatagccagtttgttgaagttgaaggacagatcacatccttggttgatctttacccatccttcctaaggaagggttatcgtcgggaaatcttcatcgccttcgtgtgtagcatcagctacctgctggggctgacgatggtgacggagggtggcatgtatgtgtttcagctctttgactactatgcagctagcggtgtatgccttttgtgggttgcattctttgaatgttttgttattgcctggatatatggaggtgataacctttatgatggtattgaggacatgattggctatcggcccgggccctggatgaagtacagctgggctgtgatcactccagttctctgtgttggatgtttcatcttctcgctcgtcaagtacgtacccctgacctacaacaaaacatacgtgtaccccaactgggccattgggctgggctggagcctggccctttcctccatgctctgcgttcccttggtcatcgtcatccgcctctgccagactgaggggccgttccttgtgagagtcaagtacctgctgaccccaagggaacccaaccgctgggctgtggagcgcgagggagccacaccttacaactctcgcaccgtcatgaacggcgctctcgtgaaaccgacccacatcattgtggagaccatgatgtgagctctctcgggtcgacggggccggcggctttcctgctgtttactaacattagattctcataggaccaggtttacagagctttatatttgcactaggatttttttttttttgtaattgtcacagaaaatgtaattgtgggtatgtgtgcgtgcgtgtgtgtgtgtgtgtgtatcgtgtgtgtgtgttttgttttgatttgggggatattttgtacaaaaagaaaacccacgggaagatgtccgtggagaggcagagctttcatactgaattagatgtattttatgggaatttggtaaatttttctttgtatttttttttttacatataagtatatatacacttagagattgtcatatacttttaccacttgaattgatcttcttgccagcaatagatctcattttcaaaagcaattcttcggtgctgtgtagctggcagaaagttctgtccagtaaacgcaggatggaattttcctgggactctacacccatcttaaggtggtataccttccaaatcctggttcagatggaagaaatagcaggagagaggacccattagctggcagacccagggggaagaaaggagggctgtgaggagatacctcattaaacttggcttagtgaagaagagagatgccaaaggaatgaaccaacccttcacataaaggagactggctgaagctgaatgaggaggccctatagcagaagtctgattctaagagcagtagaaacttgtaccagaagcaaaatcccacttttaattttgagatggtgagtggatagtcagtagaccgtcagaaccactggccagagagggagctgctagagatccaagaaggctggcaggagtgaggctcacaactcagcctcgcaagaggtggcagaggcacaggaggccacagtccttcctggggcattccaggcagagaaggagcagaggctctcccggcaggagctggggtctcagggctcagatgagtctgttgcatttgaatggggtcatagcaggttctggtcattccccaagcaacatctcagcatctcttaaagttgcctgcaggaatgaagcatgacatacctgttgagggactaggggagtggtggggaggtgagtggaccaaaggatataggccccaggcatgcagatgggcccggtgtcggggaggggtgctttctttcctcatctccccactccccactctcagcctgggagactcctgccaagccctcattaaagatgccaccctgggctgccctggcacctagcaaggcacaccaagaacagcttttgagtctgtatcctccactgggggaagtgctcccagttcagaacaagggcagcccgtggtgctgacctaggatataacaaagctcttcacttcaaaacccctgcaatagctgggtttacagacatttaccacctgcggacccaaaagagaaggcctaggagagttttctagaaggttgggattgtcagggtcctggcccctcagaactggcttgatcaagggccttatgtggagcagaggttgtctctgaaccaggagagaaggtactatacctttcaaatccccagggcagacacacccccacccagcccctatttggacctaaactgtgccatttgaacagtcacttccaagctcagtctaaatgaaaccgaaacgtgaccacgcacaaaggcagtcactgcctcgaggggtgcagaccgcagaattttcacagcaggggctcttggaaccctggaaacccccttcttaaatttgggaggaggagtatgcctttggtgtccccctcccaaggggcaattctgaaccccatctttggcaggcatacatatttcactgtttccaaagctatctactctgccaaacaacacccagtcctattccaaactctcaacgattctatcttgttcctgtttttctatgtatttatggttgccgtttgtgtctgatttgattttactgttttttccctgattttatggagtagcattgtgacctgttttcctttgtcttatataactttagtaaactaaccactgtcaatgattgagggcaggtggcacgtggggaagaggggacttggcacgcagtggctacctgggcatttgtggtcatttcagtttccatctccccagcgggggctccctgggtgaaaggccacagtattttgggttggtaggcaaattgcaacattctggacatggcctgaggaaggcctcttcttataagattctcagaccaaattctagaccaaagacacaggcagaccaagtccccaggccccgcctggaaggaagtcgttcctcaactctccccaaggcacctgtctccaatcagagccctctcgcccagccagccctggctctgtgtgcagagcatagctctgcgagtacctgtgtaataatgctcaaccttcatgtctccgtataaacgaaactttccatgagagctcatgactctggtccacctgtctatagagaatgggcaaagtccttcacctgctttctgcttgggatgggtcagaaatgctgatgcccgcacatagcccagccagccagatctggaaaggaagcgagggggttgtttaaatcaattttttaagatgaagaagtgggagacactgcgttgagatgggccatgctagggccacagagatttcctgacggtcagggagagaagggcctccagggtcccctaacccaacgcccttgttgtaaatgaggtaactgaggctcagggaggcactgtgagccaggaatggattttcttgaaacagctctagctgcaggttctccgaggtaggtgcagggaatggtgagtgtctaaccagggctacatccagcaacatcctcaaggtcttcctgacaaccaaagacaagcctttatggaaaaggaaatgcgctcccctccatgttcagggatgaggggagcagcagcagccacactcccaccatcctcacagaattcctggacccatgcggtggctccgtgagctgggtgactccagcctcacctgcacaccccagccctgcacggggccctccttcctcccagcagcccttggtgagctaggaattgagatccctgtttgtgaaagagggaactgaggtgcagagaagccagaggtgtgccagatccttaggcaggatttagatgaagtcgccctggctccagactgaccccgaggctctgcggggagtttccaggcagcaggaagtggccttggatgctctccttccaggacagcataacccctgggccatgtgcagctccttcactgccccctggatccccagcatacccccaaagacagtggggaaacacaaggggagagcacagcatggcccctccagcccacttcagggcactcttgtatcacccgggtaccgccacactggtcccccacccagccagcatctcccagcacagcccctctccctggggaaatgctctgggtagccagtctaaaggcagaggcacctaactgctccccgcagcccaccccacccaagattcagacacaagccaggaaaggacccaagagaaaatccttcaaggtggcctgaggtcccatccctccctcagacccatgtggtcccaggccaggctgcctgggacacggtaaataccactgtgtgcaaaaatcgaagtacaaaaccacaagactaaacaaaacaaacccagagagccaaacttgtagaggtgggcagtccagaaagcagggggcagccctccccctttccttctctccctgatcctcagaatatatattgttgtaataggaagcatttttgcattgttctcttgtgggtgtcactacagacatgttctggcgtgttctccgagggatggagcatcctgttatatatttgacttcaaattgagatgttggcttcattttttttttttacccaattaatctcccaatccctagcaactgtgactctgtatttagcacaagagaaagctgagaatgtgggtcttgcctccttccagaaatatgtctggctcatcaggacatttttttaaaacttcaaaatatttttaagatattttaaacttttataaaaaaaaaatcaaccaacaagagacttttctgaggaggaacatttgtatttgaacaagatccttggtgtgtagttcagtcttgcagtatacaagcttttgtgtataaatgttttatgatatgattccctgtattttgcaggggtttttttctcttttgctttttagataaatatgtatatcaatattttaaattcatctttgctttttttagaggagtttgtaatcaccttataacatgaaaataaacatttcctttttaacatccaa

SEQ ID NO: 184512 - DNA, 1116 bp, Homo sapiens
  Payload ID: 16333
  Gene Symbol: SLC6A6
  Gene Name: solute carrier family 6 (neurotransmitter transporter), member 6
  ENST ID: ENST00000622176
  CDS Start-End: 1-368
aacagacacgcgaggtcaggaagaagccgcttataaattaccgcttccttcgcgccgccgccaacgccgagccccgaggaccgcaagcccagaggacaagctgcgccaagagggagtgcggagcgttcacccagcgggtcagagagcgagcgggcaggcagcccccggccggcggaacccggcacagccgagcagagcgcgggcggcgccgcagccaccccagatccagaaccagaaccacagcccttctgaggagctcccaaacaaagcaaggagatggccaccaaggagaagctgcagtgtctgaaagatttccacaaggacatcctgaagccctcaccagggaagagcccaggcacgcggcctgaggacgaggctgagggaaaacctccgcagagggagaagtggtctagcaagatcgactttgtgctctctgtggctggcggcttcgtgggcttgggcaacgtctggcgcttcccgtacctctgctacaagaatggtggaggtctcaggcccctttgggactgtgatgagtgtcctagacgctccccagaacaaagcacatacactagacccaagttgcccacagtttcaaagggtttatggacccgctgaagccattagtggacaccaggtgcgtttctcataccgtattttattttcctgtttgggagcggcctgcctgtgtttttcttggagatcatcataggccagtacacctctgaagggggcatcacctgctgggaaaagatctgccccttgttctctggtatcggctatgcctccgttgtaattgtgtccctcctgaatgtctactacatcgtcatcctggcctgggccacatactacctgttccagtccttccagaaggagctgccctgggcacactgcaaccacagctggaacacacctcactgcatggaggacaccatgcgcaagaacaagagtgtctggatcaccatcagctccaccaacttcacctcccctgtcatcgagttctgggagcgcaacgtgctgagcttgtcccctggaatcgaccacccaggctctctgaaatgggacctcgctctctgccttcttttagtctggctagtgtgtttcttctgcatctggaag

SEQ ID NO: 184513 - DNA, 1983 bp, Homo sapiens
  Payload ID: 16333
  Gene Symbol: SLC6A6
  Gene Name: solute carrier family 6 (neurotransmitter transporter), member 6
  ENST ID: ENST00000610642
  CDS Start-End: 19-417
atttttccacccagcaggatgggtgatgctgagagctgcctgctcagacaacagacacgcgaggtcaggaagaagccgcttataaattaccgcttccttcgcgccgccgccaacgccgagccccgaggaccgcaagcccagaggacaagctgcgccaagagggagtgcggagcgttcacccagcgggtcagagagcgagcgggcaggcagcccccggccggcggaacccggcacagccgagcagagcgcgggcggcgccgcagccaccccagatccagaaccagaaccacagcccttctgaggagctcccaaacaaagcaaggagatggccaccaaggagaagctgcagtgtctgaaagatttccacaaggacatcctgaagccctcaccagggaagagcccaggcacgcggcctgaggacgaggctgagggaaaacctccgcagagggagaagtggtctagcaagatcgactttgtgctctctgtggctggcggcttcgtgggcttgggcaacgtctggcgcttcccgtacctctgctacaagaatggtggaggtgcgtttctcataccgtattttattttcctgtttgggagcggcctgcctgtgtttttcttggagatcatcataggccagtacacctctgaagggggcatcacctgctgggaaaagatctgccccttgttctctggtatcggctatgcctccgttgtaattgtgtccctcctgaatgtctactacatcgtcatcctggcctgggccacatactacctgttccagtccttccagaaggagctgccctgggcacactgcaaccacagctggaacacacctcactgcatggaggacaccatgcgcaagaacaagagtgtctggatcaccatcagctccaccaacttcacctcccctgtcatcgagttctgggagcgcaacgtgctgagcttgtcccctggaatcgaccacccaggctctctgaaatgggacctcgctctctgccttcttttagtctggctagtgtgtttcttctgcatctggaagggcgtcaggtccactgggaaggtcgtctacttcacagccacttttccattcgccatgctcctggtgctgctggtccgagggctgacgctgccgggcgcgggcgcaggcatcaagttctatctgtatcctgacatcacccgccttgaggacccacaggtgtggattgacgctgggactcagatattcttctcttatgccatctgcctgggggctatgacctcgctggggagctacaacaagtacaagtataactcgtacaggtcctggcctggccttcattgcctacccaaaagctgtgacaatgatgccgctgcccacattttggtccattcttttttttattatgcttctcttgcttggactggatagccagtttgttgaagttgaaggacagatcacatccttggttgatctttacccatccttcctaaggaagggttatcgtcgggaaatcttcatcgccttcgtgtgtagcatcagctacctgctggggctgacgatggtgacggagggtggcatgtatgtgtttcagctctttgactactatgcagctagcggtgtatgccttttgtgggttgcattctttgaatgttttgttattgcctggatatatggtgagtacagattttttcatgtcctttctcaaggctctcctttgggcttctctacttagaagcttcagaagcagagaatactaacagaaattcaatttgagttgaacagtaggccctccctacctagactacacaaataatctcactgtagccacactgaagatcctcctggtgctaaaggtgtgaggtgtgactggatgttttcacagtttcagaacttggttgtgcaggacctggaatactccttttttatctccttgaggccttgggtttgagtttgggctgtgcctaagattgcacacctagggtttggagtgtgcctcagattgccag

SEQ ID NO: 184514 - DNA, 1252 bp, Homo sapiens
  Payload ID: 16333
  Gene Symbol: SLC6A6
  Gene Name: solute carrier family 6 (neurotransmitter transporter), member 6
  Uniprot ID: P31641
  ENST ID: ENST00000621751
  CDS Start-End: 282-884
cagacaacagacacgcgaggtcaggaagaagccgcttataaattaccgcttccttcgcgccgccgccaacgccgagccccgaggaccgcaagcccagaggacaagctgcgccaagagggagtgcggagcgttcacccagcgggtcagagagcgagcgggcaggcagcccccggccggcggaacccggcacagccgagcagagcgcgggcggcgccgcagccaccccagatccagaaccagaaccacagcccttctgaggagctcccaaacaaagcaaggagatggccaccaaggagaagctgcagtgtctgaaagatttccacaaggacatcctgaagccctcaccagggaagagcccaggcacgcggcctgaggacgaggctgagggaaaacctccgcagagggagaagtggtctagcaagatcgactttgtgctctctgtggctggcggcttcgtgggcttgggcaacgtctggcgcttcccgtacctctgctacaagaatggtggaggtgcgtttctcataccgtattttattttcctgtttgggagcggcctgcctgtgtttttcttggagatcatcataggccagtacacctctgaagggggcatcacctgctgggaaaagatctgccccttgttctctggtatcggctatgcctccgttgtaattgtgtccctcctgaatgtctactacatcgtcatcctggcctgggccacatactacctgttccagtccttccagaaggagctgccctgggcacactgcaaccacagctggaacacacctcactgcatggaggacaccatgcgcaagaacaagagtgtctggatcaccatcagctccaccaacttcacctcccctgtcatcgagttctgggagtaaggccacctcattgaagcaaggaggaggacatgggtggggcagagaggatggcccacttccttatctcctcccctgggatacaggagccactgtcttcgggggagtgggaggagggtgcagatctggagataaatttatgcctttggccatagacaggactggaatcccagttctgccacttactggctgtttgaccttaggcaagccactcctcctttctgagcctcagtttctttacctgtaagataaaaagaatgaatcattactaccctgtgaggcaggtatgcatacttatgttgtctaaaaatgatacagttttcttaatgtattttaggaaaaaatatattctgttattgcacagagaaaaa

SEQ ID NO: 184515 - DNA, 3739 bp, Homo sapiens
  Payload ID: 16334
  Gene Symbol: SLC6A7
  Gene Name: solute carrier family 6 (neurotransmitter transporter), member 7
  Uniprot ID: Q99884
  ENST ID: ENST00000230671
  CDS Start-End: 372-2282
agaaagccgagggtttccgtcgcgaacccccctccccactcgctcagggctctccaatccgcagctctgcgtgcgggggcgcgcgcatccccccgccgtccgtccgtcagctgtctgtctgggtgtctatgcgggcgcagcagtgcacccttccccagcctcgggcgctgcgcagggacagacaaggcattcgcagcgccctgcccgcgctccacgcccgcagccgccagacggcagcgcctgcgtccgtgcccgccccagccggtgcgcgggagccgcgggggcaaaggcgcagtggccagcggaccatctctcgtgccctcgctctctgcgctccggggcagctgagccccggccacccgctctccaagatgaagaagctccagggagctcacctccgcaagcctgtcaccccagacctgctgatgacccccagtgaccagggcgatgtcgacctggatgtggactttgctgcacaccgggggaactggacaggcaagctggacttcctgctgtcctgcattggctactgtgtaggcctggggaatgtctggcgcttcccctatcgagcgtacaccaatggaggaggcgccttcctcgtgccctacttcctcatgctggccatctgtggcatccccctcttcttcctggagctctccctgggccagttctccagcctagggcccctggctgtctggaaaatcagccctctcttcaaaggcgccggcgcagccatgctgctcatcgtgggcttggtggccatctactacaacatgatcatcgcctacgtgctcttctacctcttcgcctccctcaccagcgacctaccctgggagcactgtggcaactggtggaacacagaactctgcctggagcacagagtctccaaggacggcaacggggccctgcccctcaacctcacctgcaccgtcagccccagcgaggagtactggagccgctacgtcctccacatccaaggcagccagggcatcggcagccctggggagatccgctggaacctctgcctctgcctgctgctggcctgggtcatcgtgttcctctgtatcctcaagggtgtgaagtcttcgggcaaggtggtgtatttcacggccacgttcccctacctcatcctgctcatgctgctggtccgcggagtcaccctcccaggggcctggaagggcatccagttctatctcaccccccagttccaccacttgttgtcttccaaggtgtggattgaagctgctcttcagatcttctattccctgggtgtgggcttcggggggctcctcacctttgcctcctacaacacgtttcaccagaacatctatagagacactttcatcgtcactctgggcaacgccatcaccagcatcctggctggctttgccatcttctccgtgctgggctacatgtctcaggagctgggcgtgcctgtggaccaagtagccaaagcaggccctggcctggcctttgtcgtctacccacaggccatgaccatgctgcctctgtcacccttctggtcctttctcttcttcttcatgcttctgactctcggcctagatagccagtttgcttttctggagaccattgtgacagctgtgacagatgagttcccatactacctgcggcccaagaaggcggtgttctcagggctcatctgcgtggccatgtacctgatggggctgatcctcaccactgatgggggcatgtactggctggtccttctggatgactacagcgccagcttcgggctgatggtggtggttatcaccacgtgccttgccgtgacacgggtgtatggcattcagaggttctgccgagacatccacatgatgctgggcttcaagccgggcctctacttcagggcctgctggctgttcctgtccccagccacgctcttggccctcatggtgtatagcatcgtcaagtaccagccctcggagtatggcagttaccgcttcccgccctgggctgagctgctgggcatcctgatgggcctgctgtcctgcctcatgatcccagctggcatgctggtggctgtgcttcgagaagagggctcactctgggagcggctccaacaggccagccggccggccatggactggggaccatcgctggaggagaaccggacgggcatgtatgtggccacgctggctgggagccagtcaccaaagccactgatggtgcacatgcgcaagtacgggggcatcaccagcttcgagaacacggccatcgaggtggaccgtgagattgcagaggaggaggagtcgatgatgtgaggcaggaggcaggcgggcagaaggccctgcccgggacctcacagtcccttcttagaagcctgcaaaggtcagctgtgccctctgggattctgagaggctatgggggggcctgccatagggatgccagtcccccagtgggggtcccttctgcagcctctgcctctcctgaaacctctgacaaccccctacacacacacacaggcatactcagacccactcaaagctgagaatgatccaactcagccctactttgcggatggacatattaaggccaggaggggagggacttgccccaggtcgcatggcagaggggacttgaacccacgcctcctgaccagccagctccctttcccatggggcagccggcaccaccttctcatctctattcagggcctacacccctccctttttggggggagcctgtccccacacaccttagcacaaccagaatcttgagttgggcagggaaggtcagggctacagaggctcttgaggctccgaggccctggggatcaaaggtcaatgagttaggtggggagaaagatccctgggggctcctgtatgcaggactcctgaaggaggtgggagctgagggccctggaggatggggaaggtttgcagagagaggaagaagagggcagggtggggaggagctctgggccagaggatgctgagctgcctgggcagagaccaagagggttggagacactagttttaccaggttacaggagggttcaagacagaaggaaaactaacagagggggagccagggatgatggggtgggcaggggatttgcatgatgaggagtatcattccagatctgtgcagagcggatcggacgggacagggtggagcggggaggcctgtgcaaagtgggaaagagctgccggtggcctgagccagggtgctggggctgcgggtggggaaaggaggccccagcacttcagacaaagaccaccccttcacccactggaccccaagccgcaaaagctggggaggtaggaagggtcactgtgagggcccagggcccctctcttcccatctcccttgtcctggtggccttcagtgtctcttccagttccaggagctgctgggaagctggccttcattgttggtgacagggcaaccatgggactaggaggtggcccatacacatggctggctggtcctgaggccacccaccttgttccaggacatgggcccgggcccggtgtgggggtagacgcagagggcagagggtagcccttggtactgtgggtccctcaaagaggagagtggggtgcagaaatgcctcagcatggctcatgcacacagcattctcccgtggggcagggttccctcatgcaacaggcctccctgtggccagcctctctgcctgtctctcgctgcgtccccccaaccccttgtgttctattggttcattgttaataaatatcaaatgaggtcacgctcctta

SEQ ID NO: 184516 - DNA, 2431 bp, Homo sapiens
  Payload ID: 16334
  Gene Symbol: SLC6A7
  Gene Name: solute carrier family 6 (neurotransmitter transporter), member 7
  ENST ID: ENST00000524041
  CDS Start-End: 244-2244
atgcgggcgcagcagtgcacccttccccagcctcgggcgctgcgcagggacagacaaggcattcgcagcgccctgcccgcgctccacgcccgcagccgccagacggcagcgcctgcgtccgtgcccgccccagccggtgcgcgggagccgcgggggcaaaggcgcagtggccagcggaccatctctcgtgccctcgctctctgcgctccggggcagctgagccccggccacccgctctccaagatgaagaagctccagggagctcacctccgcaagcctgtcaccccagacctgctgatgacccccagtgaccagggcgatgtcgacctggatgtggactttgctgcacaccgggggaactggacaggcaagctggacttcctgctgtcctgcattggctactgtgtaggcctggggaatgtctggcgcttcccctatcgagcgtacaccaatggaggaggcgccttcctcgtgccctacttcctcatgctggccatctgtggcatccccctcttcttcctggagctctccctgggccagttctccagcctagggcccctggctgtctggaaaatcagccctctcttcaaaggcgccggcgcagccatgctgctcatcgtgggcttggtggccatctactacaacatgatcatcgcctacgtgctcttctacctcttcgcctccctcaccagcgacctaccctgggagcactgtggcaactggtggaacacagaactctgcctggagcacagagtctccaaggacggcaacggggccctgcccctcaacctcacctgcaccgtcagccccagcgaggagtactggagccgctacgtcctccacatccaaggcagccagggcatcggcagccctggggagatccgctggaacctctgcctctgcctgctgctggcctgggtcatcgtgttcctctgtatcctcaagggtgtgaagtcttcgggcaaggtggtgtatttcacggccacgttcccctacctcatcctgctcatgctgctggtccgcggagtcaccctcccaggggcctggaagggcatccagttctatctcaccccccagttccaccacttgttgtcttccaaggtgtggattgaagctgctcttcagatcttctattccctgggtgtgggcttcggggggctcctcacctttgcctcctacaacacgtttcaccagaacatctatagagacactttcatcgtcactctgggcaacgccatcaccagcatcctggctggctttgccatcttctccgtgctgggctacatgtctcaggagctgggcgtgcctgtggaccaagtagccaaagcaggccctggcctggcctttgtcgtctacccacaggccatgaccatgctgcctctgtcacccttctggtcctttctcttcttcttcatgcttctgactctcggcctagatagccagtttgcttttctggagaccattgtgacagctgtgacagatgagttcccatactacctgcggcccaagaaggcggtgttctcagggctcatctgcgtggccatgtacctgatggggctgatcctcaccactgatgggggcatgtactggctggtccttctggatgactacagcgccagcttcgggctgatggtggtggttatcaccacgtgccttgccgtgacacgggtgtatggcattcagaggttctgccgagacatccacatgatgctgggcttcaagccgggcctctacttcagggcctgctggctgttcctgtccccagccacgctcttggccctcatggtgtatagcatcgtcaagtaccagccctcggagtatggcagttaccgcttcccgccctgggctgagctgctgggcatcctgatgggcctgctgtcctgcctcatgatcccagctggcatgctggtggctgtgcttcgagaagagggctcactctgggagcggctccaacaggccagccggccggccatggactggggaccatcgctggaggagaaccggacgggcatgtatgtggccacgctggctgggagccagtcaccaaagccactgatggtgcacatgcgcaagggcacatctgctaggggtcttctctatgcaagaatgacagtatctgccacgtacatccggagcacggacaagatgctgtcctgccttcaaggagcacacagttctgcagaaacttgcttaggtgacttcaaaccagagatctgtggtgaggaagtgacggtggtggggtgatgacatgggagaattccagcaaaatccacctgggagaaccagcagctccactccacggacagagtggatctctgcggcacagcaacgcagcgaccccagcctggtccctcagctgtaagacacacacggggtgcttctcagggcatggtgtttcctgcttgggcaacccacccaccctgccgcttta

SEQ ID NO: 184517 - DNA, 3763 bp, Homo sapiens
  Payload ID: 16335
  Gene Symbol: SLC6A8
  Gene Name: solute carrier family 6 (neurotransmitter transporter), member 8
  Uniprot ID: P48029
  ENST ID: ENST00000253122
  CDS Start-End: 477-2384
gcctccgcgggccccggccggggcggggggcgcgggccacaggcccctgctccggccgccgcttgcagaccgcgggcgccgatgtcgcccgcgccccgctaggctgagcctcgggtcgggcgaggagccgccgcagccgccgccgcccgagccgcgggcaggagcctcgggagccgccgccgccgccgccgccgcccggccgggccccgccgccgcccgcgcgcccccgggcccccgacacacatgagattcttcaggctcactttcaagtgcttcgtggactgcttctgactgcgccgcccgcgccccgcaccccgccgcccgcccgccgccccgtcccccggcccggccgccccccggcccccggccggcccgcgccctcggggccctccccggtgccgccggtgccccccgcctgaccgccgccccccgtgaggcgccgcgaccccggcccggccgtgcggcccgccgaggccatggcgaagaagagcgccgagaacggcatctatagcgtgtccggcgacgagaagaagggccccctcatcgcgcccgggcccgacggggccccggccaagggcgacggccccgtgggcctggggacacccggcggccgcctggccgtgccgccgcgcgagacctggacgcgccagatggacttcatcatgtcgtgcgtgggcttcgccgtgggcttgggcaacgtgtggcgcttcccctacctgtgctacaagaacggcggaggtgtgttccttattccctacgtcctgatcgccctggttggaggaatccccattttcttcttagagatctcgctgggccagttcatgaaggccggcagcatcaatgtctggaacatctgtcccctgttcaaaggcctgggctacgcctccatggtgatcgtcttctactgcaacacctactacatcatggtgctggcctggggcttctattacctggtcaagtcctttaccaccacgctgccctgggccacatgtggccacacctggaacactcccgactgcgtggagatcttccgccatgaagactgtgccaatgccagcctggccaacctcacctgtgaccagcttgctgaccgccggtcccctgtcatcgagttctgggagaacaaagtcttgaggctgtctgggggactggaggtgccaggggccctcaactgggaggtgaccctttgtctgctggcctgctgggtgctggtctacttctgtgtctggaagggggtcaaatccacgggaaagatcgtgtacttcactgctacattcccctacgtggtcctggtcgtgctgctggtgcgtggagtgctgctgcctggcgccctggatggcatcatttactatctcaagcctgactggtcaaagctggggtcccctcaggtgtggatagatgcggggacccagattttcttttcttacgccattggcctgggggccctcacagccctgggcagctacaaccgcttcaacaacaactgctacaaggacgccatcatcctggctctcatcaacagtgggaccagcttctttgctggcttcgtggtcttctccatcctgggcttcatggctgcagagcagggcgtgcacatctccaaggtggcagagtcagggccgggcctggccttcatcgcctacccgcgggctgtcacgctgatgccagtggccccactctgggctgccctgttcttcttcatgctgttgctgcttggtctcgacagccagtttgtaggtgtggagggcttcatcaccggcctcctcgacctcctcccggcctcctactacttccgtttccaaagggagatctctgtggccctctgttgtgccctctgctttgtcatcgatctctccatggtgactgatggcgggatgtacgtcttccagctgtttgactactactcggccagcggcaccaccctgctctggcaggccttttgggagtgcgtggtggtggcctgggtgtacggagctgaccgcttcatggacgacattgcctgtatgatcgggtaccgaccttgcccctggatgaaatggtgctggtccttcttcaccccgctggtctgcatgggcatcttcatcttcaacgttgtgtactacgagccgctggtctacaacaacacctacgtgtacccgtggtggggtgaggccatgggctgggccttcgccctgtcctccatgctgtgcgtgccgctgcacctcctgggctgcctcctcagggccaagggcaccatggctgagcgctggcagcacctgacccagcccatctggggcctccaccacttggagtaccgagctcaggacgcagatgtcaggggcctgaccaccctgaccccagtgtccgagagcagcaaggtcgtcgtggtggagagtgtcatgtgacaactcagctcacatcaccagctcacctctggtagccatagcagcccctgcttcagccccaccgcacccctccagggggcctgcctttccctgacacttttggggtctgcctgggggaggaggggagaaagcaccatgagtgctcactaaaacaactttttccatttttaataaaacgccaaaaatatcacaacccaccaaaaatagatgcctctccccctccagccctagccgagctggtcctaggccccgcctagtgccccacccccacccacagtgctgcactcctcctgcccctgccacgcccaccccctgcccacctctccaggctctgctctgcagcacacccgtgggtgacccctcaccccagaagcagcagtggcagcttgggaaatgtgaggaagggaaggagggagagacgggagggaggagagagaggagaagggaggcaggggaggggcagcagaaccaaggcaaatatttcagctgggctatacccctctccccatccctgttatagaagcttagagagccagccagcaatggaaccttctggttcctgcgccaatcgccaccagtatcaattgtgtgagcttgggtgcgagtgcacgcgtgcgtgagtacggagagtatatatagatctctatctcttagcaaaggtgaatgccagatgtaaatggcgcctctgggcaaaggaggcttgtattttgcacattttataaaaacttgagagaatgagatttctgcttgtatatttctaaaaagaggaaggagcccaaaccatcctctccttaccactcccatccctgtgagccctaccttacccctctgcccctagccaaggagtgtgaatttatagatctaactttcataggcaaaacaaaagcttcgagctgttgcgtgtgtgagtctgttgtgtggatgtgcgtgtgtggtccccagccccagactggattggaaaagtgcatggtgggggcctcggggctgtccccacgctgtccctttgccacaagtctgtggggcaagaggctgcaatattccgtcctgggtgtctgggctgctaacctggcctgctcaggcttcccaccctgtgcggggcacacccccaggaagggaccctggacacggctcccacgtccaggcttaaggtggatgcacttcccgcacctccagtcttctgtgtagcagctttaacccacgtttgtctgtcacgtccagtcccgagacggctgagtgaccccaagaaaggcttccccgacacccagacagaggctgcagggctggggctgggtgagggtggcgggcctgcggggacattctactgtgctaaaaagccactgcagacatagcaataaaaacatgtcattttccaaagcagg

SEQ ID NO: 184518 - DNA, 266 bp, Homo sapiens
  Payload ID: 16335
  Gene Symbol: SLC6A8
  Gene Name: solute carrier family 6 (neurotransmitter transporter), member 8
  ENST ID: ENST00000457723
  CDS Start-End: 1-266
ggacgccatcatcctggctctcatcaacagtgggaccagcttctttgctggcttcgtggtcttctccatcctgggcttcatggctgcagagcagggcgtgcacatctccaaggtggcagagtcagggccgggcctggccttcatcgcctacccgcgggctgtcacgctgatgccagtggccccactctgggctgccctgttcttcttcatgctgttgctgcttggtctcgacagccaggtgtggagggcttcatcaccggcctcct

SEQ ID NO: 184519 - DNA, 468 bp, Homo sapiens
  Payload ID: 16335
  Gene Symbol: SLC6A8
  Gene Name: solute carrier family 6 (neurotransmitter transporter), member 8
  ENST ID: ENST00000413787
  CDS Start-End: 1-468
ctgctacattcccctacgtggtcctggtcgtgctgctggtgcgtggagtgctgctgcctggcgccctggatggcatcatttactatctcaagcctgactggtcaaagctggggtcccctcagccctgggcagctacaaccgcttcaacaacaactgctacaatgggaccagcttctttgctggcttcgtggtcttctccatcctgggcttcatggctgcagagcagggcgtgcacatctccaaggtggcagagtcagggagatctctgtggccctctgttgtgccctctgctttgtcatcgatctctccatggtgactgatggcgggatgtacgtcttccagctgtttgactactactcggccagcggcaccaccctgctctggcaggccttttgggagtgcgtggtggtggcctgggtgtacggagctgaccgcttcatggacgacattgcctgtatgatcgggtac

SEQ ID NO: 184520 - DNA, 1892 bp, Homo sapiens
  Payload ID: 16335
  Gene Symbol: SLC6A8
  Gene Name: solute carrier family 6 (neurotransmitter transporter), member 8
  Uniprot ID: P48029
  ENST ID: ENST00000430077
  CDS Start-End: 217-1779
gtgtgtcctgtgactacaaaacagcactggggttgctggaagccgaagtgacccggtgatgggtgggaaacagaggtccagagcaaaggcctttgcccaaggtcaggagaaggatgctgggacctggagtcaggtgtgttccttattccctacgtcctgatcgccctggttggaggaatccccattttcttcttagagatctcgctgggccagttcatgaaggccggcagcatcaatgtctggaacatctgtcccctgttcaaaggcctgggctacgcctccatggtgatcgtcttctactgcaacacctactacatcatggtgctggcctggggcttctattacctggtcaagtcctttaccaccacgctgccctgggccacatgtggccacacctggaacactcccgactgcgtggagatcttccgccatgaagactgtgccaatgccagcctggccaacctcacctgtgaccagcttgctgaccgccggtcccctgtcatcgagttctgggagaacaaagtcttgaggctgtctgggggactggaggtgccaggggccctcaactgggaggtgaccctttgtctgctggcctgctgggtgctggtctacttctgtgtctggaagggggtcaaatccacgggaaagatcgtgtacttcactgctacattcccctacgtggtcctggtcgtgctgctggtgcgtggagtgctgctgcctggcgccctggatggcatcatttactatctcaagcctgactggtcaaagctggggtcccctcaggtgtggatagatgcggggacccagattttcttttcttacgccattggcctgggggccctcacagccctgggcagctacaaccgcttcaacaacaactgctacaaggacgccatcatcctggctctcatcaacagtgggaccagcttctttgctggcttcgtggtcttctccatcctgggcttcatggctgcagagcagggcgtgcacatctccaaggtggcagagtcagggccgggcctggccttcatcgcctacccgcgggctgtcacgctgatgccagtggccccactctgggctgccctgttcttcttcatgctgttgctgcttggtctcgacagccagtttgtaggtgtggagggcttcatcaccggcctcctcgacctcctcccggcctcctactacttccgtttccaaagggagatctctgtggccctctgttgtgccctctgctttgtcatcgatctctccatggtgactgatggcgggatgtacgtcttccagctgtttgactactactcggccagcggcaccaccctgctctggcaggccttttgggagtgcgtggtggtggcctgggtgtacggagctgaccgcttcatggacgacattgcctgtatgatcgggtaccgaccttgcccctggatgaaatggtgctggtccttcttcaccccgctggtctgcatgggcatcttcatcttcaacgttgtgtactacgagccgctggtctacaacaacacctacgtgtacccgtggtggggtgaggccatgggctgggccttcgccctgtcctccatgctgtgcgtgccgctgcacctcctgggctgcctcctcagggccaagggcaccatggctgagcgctggcagcacctgacccagcccatctggggcctccaccacttggagtaccgagctcaggacgcagatgtcaggggcctgaccaccctgaccccagtgtccgagagcagcaaggtcgtcgtggtggagagtgtcatgtgacaactcagctcacatcaccagctcacctctggtagccatagcagcccctgcttcagccccaccgcacccctccagggggcctgcctttccctgacacttttggggtctgcctg

SEQ ID NO: 184521 - DNA, 523 bp, Homo sapiens
  Payload ID: 16335
  Gene Symbol: SLC6A8
  Gene Name: solute carrier family 6 (neurotransmitter transporter), member 8
  ENST ID: ENST00000442457
  CDS Start-End: 1-523
ggatagatgcggggacccagattttcttttcttacgccattggcctgggggccctcacagccctgggcagctacaaccgcttcaacaacaactgctacaatgggaccagcttctttgctggcttcgtggtcttctccatcctgggcttcatggctgcagagcagggcgtgcacatctccaaggtggcagagtcagggccgggcctggccttcatcgcctacccgcgggctgtcacgctgatgccagtggccccactctgggctgccctgttcttcttcatgctgttgctgcttggtctcgacagccagtttgtaggtgtggagggcttcatcaccggcctcctcgacctcctcccggcctcctactacttccgtttccaaagggagatctctgtggccctctgttgtgccctctgctttgtcatcgatctctccatggtgactgatggcgggatgtacgtcttccagctgtttgactactactcggccagcggcaccaccctgctctggcaggccttttggga

SEQ ID NO: 184522 - DNA, 334 bp, Homo sapiens
  Payload ID: 16335
  Gene Symbol: SLC6A8
  Gene Name: solute carrier family 6 (neurotransmitter transporter), member 8
  ENST ID: ENST00000429147
  CDS Start-End: 1-334
cttccgccatgaagactgtgccaatgccagcctggccaacctcacctgtgaccagcttgctgaccgccggtcccctgtcatcgagttctgggagaacaaagtcttgaggctgtctgggggactggaggtgccaggggccctcaactgggaggtgaccctttgtctgctggcctgctgggtgctggtctacttctgtgtctggaagggggtcaaatccacgggaaaggtaccactagaggcatgcagcggggagggtggctcagccctgggagccggatgtctgtgccaggcacacctgtggcaacgggaggtgaccagacagagtctagcccta

SEQ ID NO: 184523 - DNA, 2168 bp, Homo sapiens
  Payload ID: 16336
  Gene Symbol: SLC6A9
  Gene Name: solute carrier family 6 (neurotransmitter transporter, glycine), member 9
  Uniprot ID: P48067
  ENST ID: ENST00000357730
  CDS Start-End: 193-2151
cccacacaccccactccagctccggagcacccgtgctgggctgcatggggactggccggaggggcagggccaggggagcgggtaggcagagcttcgggaggagatgaggtgaaagtaattgacgctgcccagcccggcagtgggagaggcaggggatgcgtcagtgtcgcgctggagctggcagaggtgtgaatgagcggcggagacacgcgggctgcgatcgctcgccccaggatggccgcggctcatggacctgtggccccctcttccccagaacagaatggtgctgtgcccagcgaggccaccaagagggaccagaacctcaaacggggcaactggggcaaccagatcgagtttgtactgacgagcgtgggctatgccgtgggcctgggcaatgtctggcgcttcccatacctctgctatcgcaacgggggaggcgccttcatgttcccctacttcatcatgctcatcttctgcgggatccccctcttcttcatggagctctccttcggccagtttgcaagccaggggtgcctgggggtctggaggatcagccccatgttcaaaggagtgggctatggtatgatggtggtgtccacctacatcggcatctactacaatgtggtcatctgcatcgccttctactacttcttctcgtccatgacgcacgtgctgccctgggcctactgcaataacccctggaacacgcatgactgcgccggtgtactggacgcctccaacctcaccaatggctctcggccagccgccttgcccagcaacctctcccacctgctcaaccacagcctccagaggaccagccccagcgaggagtactggaggctgtacgtgctgaagctgtcagatgacattgggaactttggggaggtgcggctgcccctccttggctgcctcggtgtctcctggttggtcgtcttcctctgcctcatccgaggggtcaagtcttcagggaaagtggtgtacttcacggccacgttcccctacgtggtgctgaccattctgtttgtccgcggagtgaccctggagggagcctttgacggcatcatgtactacctaaccccgcagtgggacaagatcctggaggccaaggtgtggggtgatgctgcctcccagatcttctactcactgggctgcgcgtggggaggcctcatcaccatggcttcctacaacaagttccacaataactgttaccgggacagtgtcatcatcagcatcaccaactgtgccaccagcgtctatgctggcttcgtcatcttctccatcctcggcttcatggccaatcacctgggcgtggatgtgtcccgtgtggcagaccacggccctggcctggccttcgtggcttaccccgaggccctcacactacttcccatctccccgctgtggtctctgctcttcttcttcatgcttatcctgctggggctgggcactcagttctgcctcctggagacgctggtcacagccattgtggatgaggtggggaatgagtggatcctgcagaaaaagacctatgtgaccttgggcgtggctgtggctggcttcctgctgggcatccccctcaccagccaggcaggcatctattggctgctgctgatggacaactatgcggccagcttctccttggtggtcatctcctgcatcatgtgtgtggccatcatgtacatctacgggcaccggaactacttccaggacatccagatgatgctgggattcccaccacccctcttctttcagatctgctggcgcttcgtctctcccgccatcatcttctttattctagttttcactgtgatccagtaccagccgatcacctacaaccactaccagtacccaggctgggccgtggccattggcttcctcatggctctgtcctccgtcctctgcatccccctctacgccatgttccggctctgccgcacagacggggacaccctcctccagcgtttgaaaaatgccacaaagccaagcagagactggggccctgccctcctggagcaccggacagggcgctacgcccccaccatagccccctctcctgaggacggcttcgaggtccagccactgcacccggacaaggcgcagatccccattgtgggcagtaatggctccagccgcctccaggactcccggatatgagcacagctgccagggga

SEQ ID NO: 184524 - DNA, 2330 bp, Homo sapiens
  Payload ID: 16336
  Gene Symbol: SLC6A9
  Gene Name: solute carrier family 6 (neurotransmitter transporter, glycine), member 9
  Uniprot ID: P48067
  ENST ID: ENST00000360584
  CDS Start-End: 193-2313
cccacacaccccactccagctccggagcacccgtgctgggctgcatggggactggccggaggggcagggccaggggagcgggtaggcagagcttcgggaggagatgaggtgaaagtaattgacgctgcccagcccggcagtgggagaggcaggggatgcgtcagtgtcgcgctggagctggcagaggtgtgaatgagcggcggagacacgcgggctgcgatcgctcgccccaggatggccgcggctcatggacctgtggccccctcttccccagaacaggtgacgcttctccctgttcagagatccttcttcctgccacccttttctggagccactccctctacttccctagcagagtctgtcctcaaagtctggcatggggcctacaactctggtctccttccccaactcatggcccagcactccctagccatggcccagaatggtgctgtgcccagcgaggccaccaagagggaccagaacctcaaacggggcaactggggcaaccagatcgagtttgtactgacgagcgtgggctatgccgtgggcctgggcaatgtctggcgcttcccatacctctgctatcgcaacgggggaggcgccttcatgttcccctacttcatcatgctcatcttctgcgggatccccctcttcttcatggagctctccttcggccagtttgcaagccaggggtgcctgggggtctggaggatcagccccatgttcaaaggagtgggctatggtatgatggtggtgtccacctacatcggcatctactacaatgtggtcatctgcatcgccttctactacttcttctcgtccatgacgcacgtgctgccctgggcctactgcaataacccctggaacacgcatgactgcgccggtgtactggacgcctccaacctcaccaatggctctcggccagccgccttgcccagcaacctctcccacctgctcaaccacagcctccagaggaccagccccagcgaggagtactggaggctgtacgtgctgaagctgtcagatgacattgggaactttggggaggtgcggctgcccctccttggctgcctcggtgtctcctggttggtcgtcttcctctgcctcatccgaggggtcaagtcttcagggaaagtggtgtacttcacggccacgttcccctacgtggtgctgaccattctgtttgtccgcggagtgaccctggagggagcctttgacggcatcatgtactacctaaccccgcagtgggacaagatcctggaggccaaggtgtggggtgatgctgcctcccagatcttctactcactgggctgcgcgtggggaggcctcatcaccatggcttcctacaacaagttccacaataactgttaccgggacagtgtcatcatcagcatcaccaactgtgccaccagcgtctatgctggcttcgtcatcttctccatcctcggcttcatggccaatcacctgggcgtggatgtgtcccgtgtggcagaccacggccctggcctggccttcgtggcttaccccgaggccctcacactacttcccatctccccgctgtggtctctgctcttcttcttcatgcttatcctgctggggctgggcactcagttctgcctcctggagacgctggtcacagccattgtggatgaggtggggaatgagtggatcctgcagaaaaagacctatgtgaccttgggcgtggctgtggctggcttcctgctgggcatccccctcaccagccaggcaggcatctattggctgctgctgatggacaactatgcggccagcttctccttggtggtcatctcctgcatcatgtgtgtggccatcatgtacatctacgggcaccggaactacttccaggacatccagatgatgctgggattcccaccacccctcttctttcagatctgctggcgcttcgtctctcccgccatcatcttctttattctagttttcactgtgatccagtaccagccgatcacctacaaccactaccagtacccaggctgggccgtggccattggcttcctcatggctctgtcctccgtcctctgcatccccctctacgccatgttccggctctgccgcacagacggggacaccctcctccagcgtttgaaaaatgccacaaagccaagcagagactggggccctgccctcctggagcaccggacagggcgctacgcccccaccatagccccctctcctgaggacggcttcgaggtccagccactgcacccggacaaggcgcagatccccattgtgggcagtaatggctccagccgcctccaggactcccggatatgagcacagctgccagggga

SEQ ID NO: 184525 - DNA, 1926 bp, Homo sapiens
  Payload ID: 16336
  Gene Symbol: SLC6A9
  Gene Name: solute carrier family 6 (neurotransmitter transporter, glycine), member 9
  ENST ID: ENST00000372306
  CDS Start-End: 141-1880
acctgggcgcaccgcggtgcggacccagcacgcctgggccgggggctgcagcatgctcttgagatctgtggcctgaaaggcgctggaagcagagcctgtgagtgtggtccccgtcaccagagccccaacccaccgccgccatggtaggaaaaggtgccaaagggatgctgaatggtgctgtgcccagcgaggccaccaagagggaccagaacctcaaacggggcaactggggcaaccagatcgagtttgtactgacgagcgtgggctatgccgtgggcctgggcaatgtctggcgcttcccatacctctgctatcgcaacgggggaggcgccttcatgttcccctacttcatcatgctcatcttctgcgggatccccctcttcttcatggagctctccttcggccagtttgcaagccaggggtgcctgggggtctggaggatcagccccatgttcaaaggagtgggctatggtatgatggtggtgtccacctacatcggcatctactacaatgtggtcatctgcatcgccttctactacttcttctcgtccatgacgcacgtgctgccctgggcctactgcaataacccctggaacacgcatgactgcgccggtgtactggacgcctccaacctcaccaatggctctcggccagccgccttgcccagcaacctctcccacctgctcaaccacagcctccagaggaccagccccagcgaggagtactggaggctgtacgtgctgaagctgtcagatgacattgggaactttggggaggtgcggctgcccctccttggctgcctcggtgtctcctggttggtcgtcttcctctgcctcatccgaggggtcaagtcttcagggaaagtggtgtacttcacggccacgttcccctacgtggtgctgaccattctgtttgtccgcggagtgaccctggagggagcctttgacggcatcatgtactacctaaccccgcagtgggacaagatcctggaggccaaggtgtggggtgatgctgcctcccagatcttctactcactgggctgcgcgtggggaggcctcatcaccatggcttcctacaacaagttccacaataactgttaccgggacagtgtcatcatcagcatcaccaactgtgccaccagcgtctatgctggcttcgtcatcttctccatcctcggcttcatggccaatcacctgggcgtggatgtgtcccgtgtggcagaccacggccctggcctggccttcgtggcttaccccgaggccctcacactacttcccatctccccgctgtggtctctgctcttcttcttcatgcttatcctgctggggctgggcactcagttctgcctcctggagacgctggtcacagccattgtggatgaggtggggaatgagtggatcctgcagaaaaagacctatgtgaccttgggcgtggctgtggctggcttcctgctgggcatccccctcaccagccaggcaggcatctattggctgctgctgatggacaactatgcggccagcttctccttggtggtcatctcctgcatcatgtgtgtggccatcatgtacatctacggtgagcactcgagcctccggcctcccgcgacccggcccttggcccgcccactctgtcctgcgggtctgctgaccccccatctctccagggcaccggaactacttccaggacatccagatgatgctgggattcccaccacccctcttctttcagatctgctggcgcttcgtctctcccgccatcatcttcctccaggctcaggtccaccgccgcctcccccagaatcctcttcacttcgcgtcgctcccggagcggaacgtgctcctccaccagctcccacagcgagggggagtgccggagcatgacccaccgacgccgccgtccccggctcggacctacgggccgcaggtc

SEQ ID NO: 184526 - DNA, 2162 bp, Homo sapiens
  Payload ID: 16336
  Gene Symbol: SLC6A9
  Gene Name: solute carrier family 6 (neurotransmitter transporter, glycine), member 9
  ENST ID: ENST00000372307
  CDS Start-End: 329-2053
ttttccagggtccagggcaagtgcccgcatgggctgggagccggtgtgtcctcatccctggacgccggggacgggtggagatgtcagcggatggcagcgagggtgaggagactcgaaagctacacttctcccctgtaggacatcctgacttgaccttcaaaagaatggtgctgtgcccagcgaggccaccaagagggaccagaacctcaaacggggcaactggggcaaccagatcgagtttgtactgacgagcgtgggctatgccgtgggcctgggcaatgtctggcgcttcccatacctctgctatcgcaacgggggaggcgccttcatgttcccctacttcatcatgctcatcttctgcgggatccccctcttcttcatggagctctccttcggccagtttgcaagccaggggtgcctgggggtctggaggatcagccccatgttcaaaggagtgggctatggtatgatggtggtgtccacctacatcggcatctactacaatgtggtcatctgcatcgccttctactacttcttctcgtccatgacgcacgtgctgccctgggcctactgcaataacccctggaacacgcatgactgcgccggtgtactggacgcctccaacctcaccaatggctctcggccagccgccttgcccagcaacctctcccacctgctcaaccacagcctccagaggaccagccccagcgaggagtactggaggctgtacgtgctgaagctgtcagatgacattgggaactttggggaggtgcggctgcccctccttggctgcctcggtgtctcctggttggtcgtcttcctctgcctcatccgaggggtcaagtcttcagggaaagtggtgtacttcacggccacgttcccctacgtggtgctgaccattctgtttgtccgcggagtgaccctggagggagcctttgacggcatcatgtactacctaaccccgcagtgggacaagatcctggaggccaaggtgtggggtgatgctgcctcccagatcttctactcactgggctgcgcgtggggaggcctcatcaccatggcttcctacaacaagttccacaataactgttaccgggacagtgtcatcatcagcatcaccaactgtgccaccagcgtctatgctggcttcgtcatcttctccatcctcggcttcatggccaatcacctgggcgtggatgtgtcccgtgtggcagaccacggccctggcctggccttcgtggcttaccccgaggccctcacactacttcccatctccccgctgtggtctctgctcttcttcttcatgcttatcctgctggggctgggcactcagttctgcctcctggagacgctggtcacagccattgtggatgaggtggggaatgagtggatcctgcagaaaaagacctatgtgaccttgggcgtggctgtggctggcttcctgctgggcatccccctcaccagccaggcaggcatctattggctgctgctgatggacaactatgcggccagcttctccttggtggtcatctcctgcatcatgtgtgtggccatcatgtacatctacgggcaccggaactacttccaggacatccagatgatgctgggattcccaccacccctcttctttcagatctgctggcgcttcgtctctcccgccatcatcttcctccaggctcaggtccaccgccgcctcccccagaatcctcttcacttcgcgtcgctcccggagcggaacgtgctcctccaccagctcccacagcgagggggagtgccggagcatgacccaccgacgccgccgtccccggctcggacctacgggccgcaggtcagagtgcgggaggtaccgcgggcccgccggcaacgctcaccaaaccccgcccctctatgggccccgccctctcccaagccccacccgtgctctgccgctggtcccctcggctgggattgcccgttccggaactgccagtccttggcgctctcttctgcccggcttttggccgactcggatgccgggggcccagaaaccaggcagtgggaaccagggccctagccccacctcttccgcgtggccatcacccgggaaaccacgccgcgactctagggccccgccccctcccgtgtttggtccggcgggcggcgcgtgccggctgggagttcag

SEQ ID NO: 184527 - DNA, 3130 bp, Homo sapiens
  Payload ID: 16336
  Gene Symbol: SLC6A9
  Gene Name: solute carrier family 6 (neurotransmitter transporter, glycine), member 9
  Uniprot ID: P48067
  ENST ID: ENST00000372310
  CDS Start-End: 167-2068
gatgcaactttccctttaagaaagccacctgggcgcaccgcggtgcggacccagcacgcctgggccgggggctgcagcatgctcttgagatctgtggcctgaaaggcgctggaagcagagcctgtgagtgtggtccccgtcaccagagccccaacccaccgccgccatggtaggaaaaggtgccaaagggatgctgaatggtgctgtgcccagcgaggccaccaagagggaccagaacctcaaacggggcaactggggcaaccagatcgagtttgtactgacgagcgtgggctatgccgtgggcctgggcaatgtctggcgcttcccatacctctgctatcgcaacgggggaggcgccttcatgttcccctacttcatcatgctcatcttctgcgggatccccctcttcttcatggagctctccttcggccagtttgcaagccaggggtgcctgggggtctggaggatcagccccatgttcaaaggagtgggctatggtatgatggtggtgtccacctacatcggcatctactacaatgtggtcatctgcatcgccttctactacttcttctcgtccatgacgcacgtgctgccctgggcctactgcaataacccctggaacacgcatgactgcgccggtgtactggacgcctccaacctcaccaatggctctcggccagccgccttgcccagcaacctctcccacctgctcaaccacagcctccagaggaccagccccagcgaggagtactggaggctgtacgtgctgaagctgtcagatgacattgggaactttggggaggtgcggctgcccctccttggctgcctcggtgtctcctggttggtcgtcttcctctgcctcatccgaggggtcaagtcttcagggaaagtggtgtacttcacggccacgttcccctacgtggtgctgaccattctgtttgtccgcggagtgaccctggagggagcctttgacggcatcatgtactacctaaccccgcagtgggacaagatcctggaggccaaggtgtggggtgatgctgcctcccagatcttctactcactgggctgcgcgtggggaggcctcatcaccatggcttcctacaacaagttccacaataactgttaccgggacagtgtcatcatcagcatcaccaactgtgccaccagcgtctatgctggcttcgtcatcttctccatcctcggcttcatggccaatcacctgggcgtggatgtgtcccgtgtggcagaccacggccctggcctggccttcgtggcttaccccgaggccctcacactacttcccatctccccgctgtggtctctgctcttcttcttcatgcttatcctgctggggctgggcactcagttctgcctcctggagacgctggtcacagccattgtggatgaggtggggaatgagtggatcctgcagaaaaagacctatgtgaccttgggcgtggctgtggctggcttcctgctgggcatccccctcaccagccaggcaggcatctattggctgctgctgatggacaactatgcggccagcttctccttggtggtcatctcctgcatcatgtgtgtggccatcatgtacatctacgggcaccggaactacttccaggacatccagatgatgctgggattcccaccacccctcttctttcagatctgctggcgcttcgtctctcccgccatcatcttctttattctagttttcactgtgatccagtaccagccgatcacctacaaccactaccagtacccaggctgggccgtggccattggcttcctcatggctctgtcctccgtcctctgcatccccctctacgccatgttccggctctgccgcacagacggggacaccctcctccagcgtttgaaaaatgccacaaagccaagcagagactggggccctgccctcctggagcaccggacagggcgctacgcccccaccatagccccctctcctgaggacggcttcgaggtccagccactgcacccggacaaggcgcagatccccattgtgggcagtaatggctccagccgcctccaggactcccggatatgagcacagctgccaggggagtggccccacccccaccccgtgctcccaccgcagagactggtgaggcagaggccaggtgtctctgcctgccccctgccacgccctggccaggacggctgctgtcaccttggtcaccactgctagtgcagtcattcatgctcatgtccccagtgtttacatgtcctttggatgccaagatagcagctggggggaggggtgggagtggagggttgctgggaggtccaaagcactttggaggggtctcgggccaggtccccagcagcctggatggctttacgtggcctccgatacccttataccctgccctgagctgaggttctgggtgggcctccagccccatgactagtgctcctgccctcagagccgaccccagcctctgccaggcacatttggctattcctccctaggggcaggatgaagggctgggggactgcccagtgttacttgtcaggctgtgctgcccagccctgtttatctgtgtaattatttttgtaaacattgtattctctgtggtcgccacctcctcgcccccagcctcgggttcagtctgtcttccaggcctgcttgcacctcactgggctgctccggggtctctgcccctcattccaggcctggctgtcaggcccagccagcaggggcccgtgacccagcagcctgcccaaagcatttgtttctgggggatggggtgggggctgctccacaggaggtttgagcccagcaccctggggaaggggaccctgcacgacacccccttgccctccctccatgaggctaaaggcccagtcttcccaaatgtgctgccctcgttcatgtgccaaatggccccagcccacatgcccctcccctctctggagtgggagccccttctgaagtgtctgaatccctgaagtgttcatttgtccgtcctctgtgcagtgacagccccggccaagccacctctaatcctctgtagcaataacggtgcgccgcccatccctgcccattgtgcaccactaggattttaaagtccatagattttaatgaaatttctattcctgtctctga

SEQ ID NO: 184528 - DNA, 591 bp, Homo sapiens
  Payload ID: 16336
  Gene Symbol: SLC6A9
  Gene Name: solute carrier family 6 (neurotransmitter transporter, glycine), member 9
  ENST ID: ENST00000466926
  CDS Start-End: 243-591
acaacaggctgtggaagagctgcgagcggcgcggcggggcgggcgaactcggcgcggcacagagcctcgggaggctgatgcaactttccctttaagaaagccacctgggcgcaccgcggtgcggacccagcacgcctgggccgggggctgcagcatgctcttgagatctgtggcctgaaaggcgctggaagcagagcctgtgagtgtggtccccgtcaccagagccccaacccaccgccgccatggtaggaaaaggtgccaaagggatgctggtgacgcttctccctgttcagagatccttcttcctgccacccttttctggagccactccctctacttccctagcagagtctgtcctcaaagtctggcatggggcctacaactctggtctccttccccaactcatggcccagcactccctagccatggcccagaatggtgctgtgcccagcgaggccaccaagagggaccagaacctcaaacggggcaactggggcaaccagatcgagtttgtactgacgagcgtgggctatgccgtgggcctgggcaatgtctggcgcttcccatacctctgctatcgcaacgggggag

SEQ ID NO: 184529 - DNA, 1881 bp, Homo sapiens
  Payload ID: 16336
  Gene Symbol: SLC6A9
  Gene Name: solute carrier family 6 (neurotransmitter transporter, glycine), member 9
  ENST ID: ENST00000475075
  CDS Start-End: 211-1779
gatgcaactttccctttaagaaagccacctgggcgcaccgcggtgcggacccagcacgcctgggccgggggctgcagcatgctcttgagatctgtggcctgaaaggcgctggaagcagagcctgtgagtgtggtccccgtcaccagagccccaacccaccgccgccatggtaggaaaaggtgccaaagggatgctggagtgggctatggtatgatggtggtgtccacctacatcggcatctactacaatgtggtcatctgcatcgccttctactacttcttctcgtccatgacgcacgtgctgccctgggcctactgcaataacccctggaacacgcatgactgcgccggtgtactggacgcctccaacctcaccaatggctctcggccagccgccttgcccagcaacctctcccacctgctcaaccacagcctccagaggaccagccccagcgaggagtactggaggctgtacgtgctgaagctgtcagatgacattgggaactttggggaggtgcggctgcccctccttggctgcctcggtgtctcctggttggtcgtcttcctctgcctcatccgaggggtcaagtcttcagggaaagtggtgtacttcacggccacgttcccctacgtggtgctgaccattctgtttgtccgcggagtgaccctggagggagcctttgacggcatcatgtactacctaaccccgcagtgggacaagatcctggaggccaaggtgtggggtgatgctgcctcccagatcttctactcactgggctgcgcgtggggaggcctcatcaccatggcttcctacaacaagttccacaataactgttaccgggacagtgtcatcatcagcatcaccaactgtgccaccagcgtctatgctggcttcgtcatcttctccatcctcggcttcatggccaatcacctgggcgtggatgtgtcccgtgtggcagaccacggccctggcctggccttcgtggcttaccccgaggccctcacactacttcccatctccccgctgtggtctctgctcttcttcttcatgcttatcctgctggggctgggcactcagttctgcctcctggagacgctggtcacagccattgtggatgaggtggggaatgagtggatcctgcagaaaaagacctatgtgaccttgggcgtggctgtggctggcttcctgctgggcatccccctcaccagccaggcaggcatctattggctgctgctgatggacaactatgcggccagcttctccttggtggtcatctcctgcatcatgtgtgtggccatcatgtacatctacgggcaccggaactacttccaggacatccagatgatgctgggattcccaccacccctcttctttcagatctgctggcgcttcgtctctcccgccatcatcttctttattctagttttcactgtgatccagtaccagccgatcacctacaaccactaccagtacccaggctgggccgtggccattggcttcctcatggctctgtcctccgtcctctgcatccccctctacgccatgttccggctctgccgcacagacggggacaccctcctccagcgtttgaaaaatgccacaaagccaagcagagactggggccctgccctcctggagcaccggacagggcgctacgcccccaccatagccccctctcctgaggacggcttcgaggtccagccactgcacccggacaaggcgcagatccccattgtgggcagtaatggctccagccgcctccaggactcccggatatgagcacagctgccaggggagtggccccacccccaccccgtgctcccaccgcagagactggtgaggcagaggccaggtgtctctgcctgccccctgccacgccct

SEQ ID NO: 184530 - DNA, 524 bp, Homo sapiens
  Payload ID: 16336
  Gene Symbol: SLC6A9
  Gene Name: solute carrier family 6 (neurotransmitter transporter, glycine), member 9
  ENST ID: ENST00000528803
  CDS Start-End: 122-524
aacaaaccccacacaccccactccagctccggagcacccgtgctgggctgcatggggactggccggaggggcagggccaggggagcgggtaggcagagcttcgggaggagatgaggtgtgaatgagcggcggagacacgcgggctgcgatcgctcgccccaggatggccgcggctcatggacctgtggccccctcttccccagaacagaatggtgctgtgcccagcgaggccaccaagagggaccagaacctcaaacggggcaactggggcaaccagatcgagtttgtactgacgagcgtgggctatgccgtgggcctgggcaatgtctggcgcttcccatacctctgctatcgcaacgggggaggcgccttcatgttcccctacttcatcatgctcatcttctgcgggatccccctcttcttcatggagctctccttcggccagtttgcaagccaggggtgcctgggggtctggaggatcagccccatgttcaaaggagtgggctatggtatgatggtggtgt

SEQ ID NO: 184531 - DNA, 4879 bp, Homo sapiens
  Payload ID: 16337
  Gene Symbol: SLC6A15
  Gene Name: solute carrier family 6 (neutral amino acid transporter), member 15
  Uniprot ID: Q9H2J7
  ENST ID: ENST00000266682
  CDS Start-End: 543-2735
gtaacacgggcgggccgagcacgtgggcgcctccgtcacaccctcacacatacacacacgcgcgcgcgcacacacacatacgcatgtacacgcgcacccgcacccgcgcgcctgtatcccgtgctgtttccctggcagacacacaggcgctcacgagtctctccttgccagcctgcagggcggcgacccccaaaacccagctccgggtcccaacctaggcaagaagctgcttctctgccaacagctcctcttcggcctccgtcacagccacctggaccctaccctttcgcgactgctgctgctgctgcccggacgtggaagcagcaagaggcgcttggtcaagacacactgacggtacctacagaatactggacatacggattcagaatccataaggctttatcaccttgaatcaaggatttatttgatatcatcctcggtctttacttcctatcaagtaacattgttttgaaaaatagagttaacacatttgccataagggagtttttttttttttttttaaatacttcgcatactctccaatgcccaaaaatagcaaggtggtaaaaagagaattagatgatgatgttactgagtctgtcaaagaccttctttccaatgaagacgcagctgatgatgcttttaagacaagtgaactaattgttgatggccaggaagagaaagatacagatgttgaagaaggatctgaagtcgaagatgaaagaccagcttggaacagtaaactacaatacatcctggcccaagttggattttctgtaggtttaggaaatgtgtggcgatttccatacctatgtcagaagaatgggggcggtgcatatcttttaccatatttaatactacttatggtaataggtattcccctttttttcttggaactctctgtgggtcaaagaattcggcgaggcagcattggtgtatggaattacataagccctaaactgggcgggattggatttgcaagttgtgtagtgtgctattttgtagctctctactacaacgtcatcattggctggagtttgttttatttttctcagtcttttcagcaacccctgccttgggatcagtgtcctttggtgaaaaatgcttcacacacttttgtagaaccagaatgtgaacaaagttctgccaccacctattactggtacagggaagcactgaatatttcaagttccatttctgaaagtgggggcttaaactggaagatgaccatctgcttgttggctgcctgggtcatggtttgcttggctatgatcaaaggcattcagtcttctggaaaaatcatatattttagttctctgtttccatatgtggtacttatttgcttcctcatcagagcattccttttaaatggttcaattgatggcattcgccacatgtttacccctaagcttgaaataatgctggagcccaaggtctggagagaagctgctactcaagtgttctttgccttaggtctgggatttggtggtgtcattgccttttcaagctacaacaagagagacaacaactgccactttgatgctgtcctggtgtccttcatcaattttttcacttctgtcctggcaacattggtggtgtttgcagttctgggcttcaaagcaaatgtcataaatgagaaatgcattacacaaaattcagagacgatcatgaaatttttgaaaatggggaacattagtcaggatattattccccatcatatcaacctttcaactgttactgcagaagattatcatttagtttatgacatcattcaaaaagtgaaagaagaagagtttcctgctcttcatctcaattcctgtaaaattgaagaagagctaaataaagctgttcaggggaccggcttagcttttattgcctttacagaagcgatgacacattttcctgcatctcccttctggtcagtgatgtttttcctcatgctggtcaatctaggccttggcagtatgtttggaaccattgaagggattgtcacgcctattgtggacactttcaaagtgaggaaagaaattcttactgttatctgttgtcttctggcattttgtattggcctgatatttgtgcaacgctctggaaattactttgttacaatgtttgatgattattctgctacactgcctctgctaattgtagtcattttggagaatattgctgtatgctttgtttatggcatagataagtttatggaagacctaaaagatatgctgggctttgctcccagcagatattactactatatgtggaaatatatttctcctctaatgctattatcattgctaatagctagtgttgtgaatatgggattaagtcctcctggctataacgcatggattgaagataaggcatctgaagaatttctgagctatccaacatggggactggttgtttgtgtctctctggttgtctttgcaatactcccagtccctgtagttttcattgttcgtcgcttcaaccttatagatgatagttctggtaatttagcatctgtgacctataagagaggaagggtcctgaaagagcctgtgaacttagagggcgatgatacaagcctcattcacggaaaaataccgagcgagatgccatctccaaattttggtaaaaatatttatcgaaaacagagtggatccccaactctggatactgctcccaatggacggtatggaatagggtacttgatggcagatattatgccagatatgccagaatctgatttgtagctgggggaaaagtcagtgggttttatttggttcatttttaccaatgaacattggccctagtaggagaagcattaggcttcacttatcagagggcaatctcaggtgttccgtggctgtgatctttaatcctaacagtatatgtcagttcaacttgagcattcttttggattctttggtttacatttgtgcagaaaggattgcagacaaatcttaggagggctgaggtacatgtttgccaggatttttttttaagtacctttggtgtattttcaaatatttctatctcttaaaaaaatggtattacctcagtttctaataatttctgggtttagtagtgttgacaattaaaaatggtatacattaaaatttataagtttgccttcagggtaacttccagtgtcacaatgagcagttctgtaagtgggtgcctctcagcacatttctatgaatatattatgtagataggctgtattgattttggtagcattgacaccttcttaggcaattagttgaagaaaactgcaaaatattttcttatgtaatagctgtatagagcaatagcaatcaaagcatgagaaggcactaacgctgggatgaaagatgagattcagaggtgactgagaatcatgtgagtgatggctgtatattttgtgtaaaatatatgtgtgaaaatgaactaagagtgagttactcagcactctcaagaattatgcagattctgcatttttcttatgccgtgtgcctaaaaacctacttgatatttattgtggtttcaagattattcatagtatatttatacaatatacttgcaatgcatttaagtacttaaagtactaatttgaaaacttgaagcaagatggcattttaattaatatatttctgttttgcttctgttttatgcaaatataaatcatttttaagtgattgttaaaattgtaatgcattacattttaatctacaaataaacaaagtttaaaaatgatgtttgtttttcacattgattttctttgtatcacctgaactggattgtctttcatttcagtcagcacttagacatttcataataactaaacatcacattccaagtgggatgaattacattaattgaatagagttaccaccgcttcagagtctaaggaaaaatagagtattatggttcaatggtgttcttatgtagtcttatgattcttgaaaaagtacttacagcctcccaagaaaccatgtgtacaattgactgcttgctgattcaatattgtctgcaaagtataaaagactatgatttttaaataaaactgttgtatatatgaaattggatagagcagaggaacctcactgagtgtcctctagttaaaaatctttcatttatcctaccaccagatcagttacatttttaaaacaatgatggatatagcagcaaaataagtgaggtaatacacatgccatatcaattgatttatttcagccagtattctcgctctgctatagatagatgttaataaatggtatcacagcatttaaagtattaaatccactggtgcataaatttttagtcttttaaaatatattcatgaatattgtgtttgtatccctttaaaatgtttaatattttataaataggcagtatatgcacattatacaaaactaaaaaattatgacaattcagtgtgaagtaagttctcatccaacatttctcctggccatccattctccatctttaaaggcaatcaccattgccagtttcttctgtatccttctggaaatacaatatattacataaatgacagcattctatattctctcttctatatcttacctatttctgtgaataatttattttggacagcattttatgtatgaatattcacaaatgtgcttccttatttcagaggctgaactaataaaaattttgtttatttttgtgttgaggcaatatttttatatggtaccctaatctttaatacttaacctgccagactttaaccgtaacacaataatgtattgccaaatagcaccattcttcttctctcactctcttgccatgggggctcttaaaaaaaaaagtatacatctaaggtgtacaacatgctgttttgatgtatataaatatagtgaaagcaaataaagtatatatctaaggtgtacaa

SEQ ID NO: 184532 - DNA, 3108 bp, Homo sapiens
  Payload ID: 16337
  Gene Symbol: SLC6A15
  Gene Name: solute carrier family 6 (neutral amino acid transporter), member 15
  ENST ID: ENST00000309283
  CDS Start-End: 12-962
agcttgaaataatgctggagcccaaggtctggagagaagctgctactcaagtgttctttgccttaggtctgggatttggtggtgtcattgccttttcaagctacaacaagagagacaacaactgccactttgatgctgtcctggtgtccttcatcaattttttcacttctgtcctggcaacattggtggtgtttgcagttctgggcttcaaagcaaatgtcataaatgagaaatgcattacacaaaattcagagacgatcatgaaatttttgaaaatggggaacattagtcaggatattattccccatcatatcaacctttcaactgttactgcagaagattatcatttagtttatgacatcattcaaaaagtgaaagaagaagagtttcctgctcttcatctcaattcctgtaaaattgaagaagagctaaataaagctgttcaggggaccggcttagcttttattgcctttacagaagcgatgacacattttcctgcatctcccttctggtcagtgatgtttttcctcatgctggtcaatctaggccttggcagtatgtttggaaccattgaagggattgtcacgcctattgtggacactttcaaagtgaggaaagaaattcttactgttatctgttgtcttctggcattttgtattggcctgatatttgtgcaacgctctggaaattactttgttacaatgtttgatgattattctgctacactgcctctgctaattgtagtcattttggagaatattgctgtatgctttgtttatggcatagataagtttatggaagacctaaaagatatgctgggctttgctcccagcagatattactactatatgtggaaatatatttctcctctaatgctattatcattgctaatagctagtgttgtgaatatgggattaagtcctcctggctataacgcatggattgaagataagcatctgtgacctataagagaggaagggtcctgaaagagcctgtgaacttagagggcgatgatacaagcctcattcacggaaaaataccgagcgagatgccatctccaaattttggtaaaaatatttatcgaaaacagagtggatccccaactctggatactgctcccaatggacggtatggaatagggtacttgatggcagatattatgccagatatgccagaatctgatttgtagctgggggaaaagtcagtgggttttatttggttcatttttaccaatgaacattggccctagtaggagaagcattaggcttcacttatcagagggcaatctcaggtgttccgtggctgtgatctttaatcctaacagtatatgtcagttcaacttgagcattcttttggattctttggtttacatttgtgcagaaaggattgcagacaaatcttaggagggctgaggtacatgtttgccaggatttttttttaagtacctttggtgtattttcaaatatttctatctcttaaaaaaatggtattacctcagtttctaataatttctgggtttagtagtgttgacaattaaaaatggtatacattaaaatttataagtttgccttcagggtaacttccagtgtcacaatgagcagttctgtaagtgggtgcctctcagcacatttctatgaatatattatgtagataggctgtattgattttggtagcattgacaccttcttaggcaattagttgaagaaaactgcaaaatattttcttatgtaatagctgtatagagcaatagcaatcaaagcatgagaaggcactaacgctgggatgaaagatgagattcagaggtgactgagaatcatgtgagtgatggctgtatattttgtgtaaaatatatgtgtgaaaatgaactaagagtgagttactcagcactctcaagaattatgcagattctgcatttttcttatgccgtgtgcctaaaaacctacttgatatttattgtggtttcaagattattcatagtatatttatacaatatacttgcaatgcatttaagtacttaaagtactaatttgaaaacttgaagcaagatggcattttaattaatatatttctgttttgcttctgttttatgcaaatataaatcatttttaagtgattgttaaaattgtaatgcattacattttaatctacaaataaacaaagtttaaaaatgatgtttgtttttcacattgattttctttgtatcacctgaactggattgtctttcatttcagtcagcacttagacatttcataataactaaacatcacattccaagtgggatgaattacattaattgaatagagttaccaccgcttcagagtctaaggaaaaatagagtattatggttcaatggtgttcttatgtagtcttatgattcttgaaaaagtacttacagcctcccaagaaaccatgtgtacaattgactgcttgctgattcaatattgtctgcaaagtataaaagactatgatttttaaataaaactgttgtatatatgaaattggatagagcagaggaacctcactgagtgtcctctagttaaaaatctttcatttatcctaccaccagatcagttacatttttaaaacaatgatggatatagcagcaaaataagtgaggtaatacacatgccatatcaattgatttatttcagccagtattctcgctctgctatagatagatgttaataaatggtatcacagcatttaaagtattaaatccactggtgcataaatttttagtcttttaaaatatattcatgaatattgtgtttgtatccctttaaaatgtttaatattttataaataggcagtatatgcacattatacaaaactaaaaaattatgacaattcagtgtgaagtaagttctcatccaacatttctcctggccatccattctccatctttaaaggcaatcaccattgccagtttcttctgtatccttctggaaatacaatatattacataaatgacagcattctatattctctcttctatatcttacctatttctgtgaataatttattttggacagcattttatgtatgaatattcacaaatgtgcttccttatttcagaggctgaactaataaaaattttgtttatttttg

SEQ ID NO: 184533 - DNA, 4229 bp, Homo sapiens
  Payload ID: 16337
  Gene Symbol: SLC6A15
  Gene Name: solute carrier family 6 (neutral amino acid transporter), member 15
  Uniprot ID: Q9H2J7
  ENST ID: ENST00000450363
  CDS Start-End: 460-1329
atgtacacgcgcacccgcacccgcgcgcctgtatcccgtgctgtttccctggcagacacacaggcgctcacgagtctctccttgccagcctgcagggcggcgacccccaaaacccagctccgggtcccaacctaggcaagaagctgcttctctgccaacagctcctcttcggcctccgtcacagccacctggaccctaccctttcgcgactgctgctgctgctgcccggacgtggaagcagcaagaggcgcttggtcaagacacactgacggtacctacagaatactggacatacggattcagaatccataaggctttatcaccttgaatcaaggatttatttgatatcatcctcggtctttacttcctatcaagtaacattgttttgaaaaatagagttaacacatttgccataagggagtttttttttttttttttaaatacttcgcatactctccaatgcccaaaaatagcaaggtggtaaaaagagaattagatgatgatgttactgagtctgtcaaagaccttctttccaatgaagacgcagctgatgatgcttttaagacaagtgaactaattgttgatggccaggaagagaaagatacagatgttgaagaaggatctgaagtcgaagatgaaagaccagcttggaacagtaaactacaatacatcctggcccaagttggattttctgtaggtttaggaaatgtgtggcgatttccatacctatgtcagaagaatgggggcggtgcatatcttttaccatatttaatactacttatggtaataggtattcccctttttttcttggaactctctgtgggtcaaagaattcggcgaggcagcattggtgtatggaattacataagccctaaactgggcgggattggatttgcaagttgtgtagtgtgctattttgtagctctctactacaacgtcatcattggctggagtttgttttatttttctcagtcttttcagcaacccctgccttgggatcagtgtcctttggtgaaaaatgcttcacacacttttgtagaaccagaatgtgaacaaagttctgccaccacctattactggtacagggaagcactgaatatttcaagttccatttctgaaagtgggggcttaaactggaagatgaccatctgcttgttggctgcctgggtcatggtttgcttggctatgatcaaaggcattcagtcttctggaaaagttagtatgttagagcccttcctcattctgctaatcaccatttctggattcatccctctctcaaattctgttacagatttctgtgggcaaatcacacataacacttcattctaggtagttaaatattagtgaaaagtgacacttcaaaagtgtgcttacatttttaaaaagacaaataaaaacagtgttttatagtgaaatctaaggttaattataatctttccttatttcaacaagatctttaaaatttttgtgaatacttaaaagtcctttctttttgccctttattcaattagtcctaatgtttcagttctctaattaccaattagttaaattatggaaattggggaaagtggtaaaatgagtaattcattcattttgtttgtttgatatcatttgtttctctctgctgtaggtgttctaaggaatagctgcataagacattttgaaataatgtaatgtgaagtgtttcttaaagctctgaacatcattaagtagttaataataattccaacaaggaattcagagtaatgtaaaagactaaatatcattccttctaaggcaaattgaaaattagaatggttgtggtttaaaaagacattaagtgaattctaggtagcttgtttgttattatttttaaaggacgctctaggaaagtaattgctattcactattttgctttcgtattactttttttttttttttttcattatcacagccattgttctaaagctctccacatctcttggctggatcatagcaagaatttactgttggctcttctctctgccgtttaactgtccagctgtgctattttccttttcaaagtataactgatttcaggctaacttattaccactcatcatcatatactagcaggaatggcaatagtagtagtagtagcagcagcaatagtagaagtagtcataataacaataataataaatgatgataaagatgtttctgacaagaattagggtaagaacagtaattgaagccaattatttattacaaatgtattttgctttgggtactgtgataactactttttatactttatcccatttaattataaaaaccactcttgagaagtaatttttattttcagaaccattttacagatttaaaataaacaggtttgaggaattagtttaacttatccaaagtttcgtggctattaagttctagtatttggagtcaaatgcaagtctgtctaaatctagagcccatgttctttaactgcaacactataatgtctcaccccgtcctagtcccaccaattagtcaactcttttagggcagaagtctgtctaattcatctttgcttcctgttactttatatttaattaaaaattttagtgactttttaacttgtaaattgtagctgattttacatttatcttcctgaaggaaactctgtatcattttgtcttttgaatttgtgaatatacttgttaacacatctaaatatctttaagtctttggcaatgttattgtattatatgactaaataacttcgaattgttcaattgtgtatgtcttccactatgtcagagccacattcccgtcacattataaatgaaggagtggattcttaaataagacctaaccatatttatatgattcctaacataatatcatttggtagaaagaaaaccaactgtggtcatccagagaagctcaaaaactcttgtactcaggttctcttactaccacgttttgtttctgtttcttcttagtctgtgtcttagcatcacttaaagaactattcatccttttcttatcacagaatcttggggttgttcttctcatgtcatgtagtgtaaatttatatagaaaatgtaatacaatttatttagtacatacatttattattttaatgagaatgcctcaggaaaagactagtatttgggcaatatttgaagaaagaatttaacaggcactgatggggagaaagctagctgtaggtaatgtgagcaaagatgtggaagccaaaattgtcacaattcctcaatctgaaacaatgagttaaatataataacaatgactttatgaggaattaaaggttaagctttgtgtttacctactaaacagaaaatgcctccaaataaacagtgtcacaagtacagaagagagaaatattgtttaaggctagcacatggaaaaacaacttagaggatttagcagctaaaagaagaatgagtcagctggtgatgtgcttggtcaaaacacacagtcatacatgcatatacatataccccaaaatgctaagtggaaactgcatgaattaaaagaggggtatgatagggacattgtcctttgggctaggtaggcacatatcagttggaccacatctgcaatactggattttactgaaatcttgtattttcctttttattatgagaaatttcagctcagtgatcaaagtcttcaaatagttaaaccaaaagaagaatagggctgctttgtgtggccatagagagcaaaactatgatcaaatagtgggtattatggaggaggttgtgatggtggtaagccttcaaagaaagaaaggcctttcaagaatcaaacttgataataatgaaatcagttgcctcaatggtagagagctcagcatcactggaggtggtcacacagaggtagcatgtgccctagttacagaatctattaaggggatgactgtctcaaatatgtaggacagaaatgagaagccccaagcttgcttttaactctaaggtagtattttctactctgactactttcctgttgttactactactatgctaaatactatgcatacattatcttgtttattctttctatcagctagataatttgcatattttatccccattttactgcaaagttgacaagctcagggaaaataaatagttggccagaattaagcaaccaatacatgatagacagggctaaaactgggctacagaattttcaaaaagaatgatacattctgaaggtatgtttataataaacatttttcatatgtaaaacaa

SEQ ID NO: 184534 - DNA, 563 bp, Homo sapiens
  Payload ID: 16337
  Gene Symbol: SLC6A15
  Gene Name: solute carrier family 6 (neutral amino acid transporter), member 15
  ENST ID: ENST00000549540
  CDS Start-End: 276-563
attcgcttccgttcgctttagcaaaggcagaaggcgactaccgaggacagagtgttttcacgtgaccacagttcccctttgcttgaggtacctacagaatactggacatacggattcagaatccataaggctttatcaccttgaatcaaggatttatttgatatcatcctcggtctttacttcctatcaagtaacattgttttgaaaaatagagttaacacatttgccataagggagtttttttttttttttttaaatacttcgcatactctccaatgcccaaaaatagcaaggtggtaaaaagagaattagatgatgatgttactgagtctgtcaaagaccttctttccaatgaagacgcagctgatgatgcttttaagacaagtgaactaattgttgatggccaggaagagaaagatacagatgttgaagaaggatctgaagtcgaagatgaaagaccagcttggaacagtaaactacaatacatcctggcccaagttggattttctgtaggtttaggaaatgtgtggcgatttccatacctatgtcagaagaatgggggc

SEQ ID NO: 184535 - DNA, 582 bp, Homo sapiens
  Payload ID: 16337
  Gene Symbol: SLC6A15
  Gene Name: solute carrier family 6 (neutral amino acid transporter), member 15
  ENST ID: ENST00000551612
  CDS Start-End: 368-582
atgtacacgcgcacccgcacccgcgcgcctgtatcccgtgctgtttccctggcagacacacaggcgctcacgagtctctccttgccagcctgcagggcggcgacccccaaaacccagctccgggtcccaacctaggcaagaagctgcttctctgccaacagctcctcttcggcctccgtcacagccacctggaccctaccctttcgcgactgctgctgctgctgcccggacgtggaagcagcaagaggcgcttggtcaagacacactgacgatcatatattttagttctctgtttccatatgtggtacttatttgcttcctcatcagagcattccttttaaatggttcaattgatggcattcgccacatgtttacccctaagcttgaaataatgctggagcccaaggtctggagagaagctgctactcaagtgttctttgccttaggtctgggatttggtggtgtcattgccttttcaagctacaacaagagagacaacaactgccactttgatgctgtcctggtgtccttcatcaattttttcacttctgtcctggcaacattggtggtgtttgcagttct

SEQ ID NO: 184536 - DNA, 2221 bp, Homo sapiens
  Payload ID: 16337
  Gene Symbol: SLC6A15
  Gene Name: solute carrier family 6 (neutral amino acid transporter), member 15
  Uniprot ID: Q9H2J7
  ENST ID: ENST00000552192
  CDS Start-End: 312-2183
acatacgcatgtacacgcgcacccgcacccgcgcgcctgtatcccgtgctgtttccctggcagacacacaggcgctcacgagtctctccttgccagcctgcagggcggcgacccccaaaacccagctccgggtcccaacctaggcaagaagctgcttctctgccaacagctcctcttcggcctccgtcacagccacctggaccctaccctttcgcgactgctgctgctgctgcccggacgtggaagcagcaagaggcgcttggtcaagacacactgacggtgcatatcttttaccatatttaatactacttatggtaataggtattcccctttttttcttggaactctctgtgggtcaaagaattcggcgaggcagcattggtgtatggaattacataagccctaaactgggcgggattggatttgcaagttgtgtagtgtgctattttgtagctctctactacaacgtcatcattggctggagtttgttttatttttctcagtcttttcagcaacccctgccttgggatcagtgtcctttggtgaaaaatgcttcacacacttttgtagaaccagaatgtgaacaaagttctgccaccacctattactggtacagggaagcactgaatatttcaagttccatttctgaaagtgggggcttaaactggaagatgaccatctgcttgttggctgcctgggtcatggtttgcttggctatgatcaaaggcattcagtcttctggaaaaatcatatattttagttctctgtttccatatgtggtacttatttgcttcctcatcagagcattccttttaaatggttcaattgatggcattcgccacatgtttacccctaagcttgaaataatgctggagcccaaggtctggagagaagctgctactcaagtgttctttgccttaggtctgggatttggtggtgtcattgccttttcaagctacaacaagagagacaacaactgccactttgatgctgtcctggtgtccttcatcaattttttcacttctgtcctggcaacattggtggtgtttgcagttctgggcttcaaagcaaatgtcataaatgagaaatgcattacacaaaattcagagacgatcatgaaatttttgaaaatggggaacattagtcaggatattattccccatcatatcaacctttcaactgttactgcagaagattatcatttagtttatgacatcattcaaaaagtgaaagaagaagagtttcctgctcttcatctcaattcctgtaaaattgaagaagagctaaataaagctgttcaggggaccggcttagcttttattgcctttacagaagcgatgacacattttcctgcatctcccttctggtcagtgatgtttttcctcatgctggtcaatctaggccttggcagtatgtttggaaccattgaagggattgtcacgcctattgtggacactttcaaagtgaggaaagaaattcttactgttatctgttgtcttctggcattttgtattggcctgatatttgtgcaacgctctggaaattactttgttacaatgtttgatgattattctgctacactgcctctgctaattgtagtcattttggagaatattgctgtatgctttgtttatggcatagataagtttatggaagacctaaaagatatgctgggctttgctcccagcagatattactactatatgtggaaatatatttctcctctaatgctattatcattgctaatagctagtgttgtgaatatgggattaagtcctcctggctataacgcatggattgaagataaggcatctgaagaatttctgagctatccaacatggggactggttgtttgtgtctctctggttgtctttgcaatactcccagtccctgtagttttcattgttcgtcgcttcaaccttatagatgatagttctggtaatttagcatctgtgacctataagagaggaagggtcctgaaagagcctgtgaacttagagggcgatgatacaagcctcattcacggaaaaataccgagcgagatgccatctccaaattttggtaaaaatatttatcgaaaacagagtggatccccaactctggatactgctcccaatggacggtatggaatagggtacttgatggcagatattatgccagatatgccagaatctgatttgtagctgggggaaaagtcagtgggttttatttggttcatttt

SEQ ID NO: 184537 - DNA, 546 bp, Homo sapiens
  Payload ID: 16337
  Gene Symbol: SLC6A15
  Gene Name: solute carrier family 6 (neutral amino acid transporter), member 15
  ENST ID: ENST00000551010
  CDS Start-End: 488-546
gtttaggggacggttcagccattttcaaaaggaggctaagctttgtgttcagaggtgtatattttaggaattctccacgtggcttaattacgagcatgccttgattgttagcagagcctgcagggcggcgacccccaaaacccagctccgggtcccaacctaggcaagaagctgcttctctgccaacagctcctcttcggcctccgtcacagccacctggaccctaccctttcgcgactgctgctgctgctgcccggacgtggaagcagcaagaggcgcttggtcaagacacactgacggtacctacagaatactggacatacggattcagaatccataaggctttatcaccttgaatcaaggatttatttgatatcatcctcggtctttacttcctatcaagtaacattgttttgaaaaatagagttaacacatttgccataagggagtttttttttttttttttaaatacttcgcatactctccaatgcccaaaaatagcaaggtggtaaaaagagaattagatgatgatgttactgagtctgt

SEQ ID NO: 184538 - DNA, 6427 bp, Homo sapiens
  Payload ID: 16338
  Gene Symbol: SLC6A17
  Gene Name: solute carrier family 6 (neutral amino acid transporter), member 17
  Uniprot ID: Q9H1V8
  ENST ID: ENST00000331565
  CDS Start-End: 486-2669
agggtggcctttcggaaagcgagggaacagtgcgcgcagcgctccgcccagctccgttctgctccgcagagccggcgctgccagggcgcagggagggcggcactcggccccagtcttcgcaatcccgcgcgctctctccgccgtgggacctgggtccccgcgccgctcccctgagccccgagcgcgcggcgggcgggagccaggttgggactggtggtgaggcagggagtgaggagcgagcggagtcgcgtgcgccggcgcgcagctccgggtcgccccagccccagccgggggcctgtggcccgggggaggagctgtgcgtccgcgacccgtcggggatcgcagctgctcggccggagtgcacgggccgagtctgcgcgactacccacgcgtgacaggtccctgaatgagaaggagctgacagcagctgaattccatcttctctgtgtgctggggagcagggctacacggcccaggtggcatcaatgccgaagaacagcaaagtgacccagcgtgagcacagcagtgagcatgtcactgagtccgtggccgacctgctggccctcgaggagcctgtggactataagcagagtgtactgaatgtggctggtgaggcaggcggcaagcagaaggcggtggaggaggagctggatgcagaggaccggccggcctggaacagtaagctgcagtacatcctggcccagattggcttctctgtgggcctcggcaacatctggaggttcccctacctgtgccagaaaaatggaggaggtgcttacctggtgccctacctggtgctgctgatcatcatcgggatccccctcttcttcctggagctggctgtgggtcagaggatccgccgcggcagcatcggtgtgtggcactatatatgtccccgcctggggggcatcggcttctccagctgcatagtctgtctctttgtggggctgtattataatgtgatcatcgggtggagcatcttctatttcttcaagtccttccagtacccgctgccctggagtgaatgtcctgtcgtcaggaatgggagcgtggcagtggtggaggcagagtgtgaaaagagctcagccactacctacttctggtaccgagaggccttggacatctctgactccatctcggagagtgggggcctcaactggaagatgaccctgtgcctcctcgtggcctggagcatcgtggggatggctgtcgttaagggcatccagtcctcggggaaggtgatgtatttcagctccctcttcccctacgtggtgctggcctgcttcctggtccgggggctgttgctgcgaggggcagttgatggcatcctacacatgttcactcccaagctggacaagatgctggacccccaggtgtggcgggaggcagctacccaggtcttctttgccttgggcctgggctttggtggtgtcattgccttctccagctacaataagcaggacaacaactgccacttcgatgccgccctggtgtccttcatcaacttcttcacgtcagtgttggccaccctcgtggtgtttgctgtgctgggcttcaaggccaacatcatgaatgagaagtgtgtggtcgagaatgctgagaaaatcctagggtaccttaacaccaacgtcctgagccgggacctcatcccaccccacgtcaacttctcccacctgaccacaaaggactacatggagatgtacaatgtcatcatgaccgtgaaggaggaccagttctcagccctgggccttgacccctgccttctggaggacgagctggacaagtccgtgcagggcacaggcctggccttcatcgccttcactgaggccatgacgcacttccccgcctccccgttctggtccgtcatgttcttcttgatgcttatcaacctgggcctgggcagcatgatcgggaccatggcaggcatcaccacgcccatcatcgacaccttcaaggtgcccaaggagatgttcacagtgggctgctgtgtctttgcattcctcgtggggctgttgttcgtccagcgctccggaaactactttgtcaccatgttcgatgactactcggccaccctgccactcactctcatcgtcatccttgagaacatcgctgtggcctggatttatggaaccaagaagttcatgcaggagctgacggagatgctgggcttccgcccctaccgcttctatttctacatgtggaagttcgtgtctccactatgcatggctgtgctcaccacagccagcatcatccagctgggggtcacgcccccgggctacagcgcctggatcaaggaggaggctgccgagcgctacctgtatttccccaactgggccatggcactcctgatcaccctcatcgtcgtggcgacgctgcccatccctgtggtgttcgtcctgcggcacttccacctgctctctgatggctccaacaccctctccgtgtcctacaagaagggccgcatgatgaaggacatctccaacctggaggagaacgatgagacccgcttcatcctcagcaaggtgcccagtgaggcaccttcccccatgcccactcaccgttcctatctggggcccggcagcacatcacccctggagaccagcggtaaccccaatggacgctatgggagcggctacctgctggccagcacccctgagtcggagctgtgaccactgcccaagccctgcccgcctctccccccacgctcaacctgcccacttgtccaggcctggcctctttcttgaggtggccaccaggcccaggccaggccctttgcccaagaagagagggtctgccctgcctcactcccctcttcagtcccagtagactctgctccctagccctgagcaggaggctgggagcagctctgtttcctaattcaggaccccactcatctagccctccaagagcctccgccaaattgtagccatgtaattggaacaacccataaggcctgcttcccagtccatgggagattccaagtggccactgcaggagtcactcacctccctctctccctgtaacttgccacctgcagttcttagggctgtggggtcagatggtggtggtgagaggccttggggctggggaaggagagtggactttggctcactctgccatgagaacaggacaccatcctgcccagcccagacggggttgctcctggtccaagaggctacctgctccaaggcggagggtgggagcaggtgtgccagggctcagggctcagacttgggagggcctaggcagaagccccaagttctgttttctgaggtatgtgctgcccttggcttcagcatgagccttggtagcagaaggtgaggaacctcctctgccctggtccctgggtggaatcttcccatgtccttggccctgcctggggtgtgtggtgtgtgctcctgcatcttgtctgggagtgcagtgaccgggaccagaaccttccccacctcaattagggcttagccatctccctgtccccagcacccctccccagcccacagtggtggcctctgcctctttcctggagagagaaggacagtgcacggagaggtttccagagcacaaattgttggttcctagcacaaattagatggtttggagcacaatggtgaagcacactcccctccctcctcacctggggtccaatgttctgtctagtggcagcttttcccctggaacaggggtccctggagttcacaggcttatccccaggaagcctcactcctggggaaagacagataatttcactgcccctttgagccaccactcactctccttattacacaagcacagccgcccagtgtgcacatcatgtgcagacaccttggaaacctttcccaagccttcctggcccacagtggccagtgccataggcagtgctgtggacagtagaggctgccaaaggcaagggctggtcttcaggatggaggccagcctgtgcagaaggctgcagctgacaacagcgaccccacctgccattaccttcagggcctcctctggaagagaacccattctcagagtgcagccagggaggaacctgacccaagagtaaatgtctgcagagagatggatggatggatggatagatggatggatgggttggggagtgggggtggatggatggatagatggatggatggatggatggatgggttggggggtgggggtggatggatagatggatggatggatggacggatggggtgggggaaggaaggaaaggagggagaaaggagggaatactggctccatctttgagagctctggtgggcagggcagaaacaggccacagtgctcaacccggacaccctcacgaagggtcgcaagtcactcttgtggctcagattgctcttaggacctggagggacagaccagaatcagggtcccctcctttacccctgagttccttactgttcccccaagcctgggagcagtctatcccccaaccctgccatctcccttactcatccctcttccacagcttcccctttctagccccctctgccctacctgtctttcctgagtgtttgaggggagagagagacccacatctccccaaagagatgagcttttggggcacaacatcccaccgcagtccccctcacccgacaacacctcctacctggccccttgccaaatcccaagcagaattagcaacaggaaaagcagagccccaggagagacactctactatatatactcttctatatattctgtttctattgtatattcactctgtacatgtgggtgtaaatgctgttaaatgacaaacccaatattatactgtggctggtggactattttcatcctcagtgctgtacagatctattttcattgtatatttgatatatttttaattttgtagcgtgtggctgggccaggccccagcgggaggggctgagctggggctgtgtgcttgctaggtgtgggcgcgctagtgctcgttgtagccttttgctgtgtcttcgctgtgtgttagacgtagggcctagagctcggggtgtgtgtgtgcgtgctgtgtgtatggtgtgcacatacgtgagtgtgggtgtgtgtagcgtgctgatctgtgactcccagtgttcaccaccttcctgaagaccacgctccctccccctgcctcctcctcctcctcttggctctattgggagcctcagggccggcagggtgcttcgggagccccctgctacggggaaaggcatgtgtttcttgctggtgactcattgccttcacaccactgggtttgccagaaacagggaaggagggcgttaagggaaaaaaaaaatcctcaaatttatttaccagtcagcttcttgctgttcccagtagaatcgctagctcttctccagaggaaaagtactaggattcttaagatggcgagaccccaagagggatctcatagcactgctgcatttgccgttgacgcagtcctgacagtgtttgaaaagggccgcctgccccctccccactgtgcttttgatgcctttggagtcaaaggcaggtggggtcacctgatgagctaagatccagccccagaatcctggaggagcaggaggtagcaggagaggaccaggtccccaagtcccttcacagggtccccacccccactggctttggtgctgtccacacagtgcccaccagaaggcagagggaactccagggcagggatgtgcctgaaagagtcaacagtcccctgatcccctacctctgcctgccctccagccccatcaccagcttcttgctcagggagacttccgccctcctcactgaggcaacatgaagcccgaggcccagatgggggctgaacaggtagggcacatcagttaatgccagtgaggtcagcttctgccctccagcaatacatgtgcaggggttgctgctttcccagtgccaggagaacccccgctccgagtcagcctgtgtgggtcatgaggctggggcccaggagacacggtcccaggcactgcacaggcctgcagtattaccaggcggaggggctgcttttctgcccttcctcacccccacgccccaccccactcccccagagtactccccactgtgaaaagagctggaaactaaactggttagaatgaacctggctccctgagcatccctggatccttcaaataggccctgagatgtgaggtctgctgcttcactggggcccgatgactttggctgggggagggggcctagggcctcttctcattgaaagctctgctttatacagacccaagcatacacaccaggccgtcactttgggttctggcataagttcagaacaattcaagtccatgtgtcccatggctggtcagagccctgggtcaaaaccactcagcccaggggaggggatgaggcattgtcaccctagacccctcttcctctctcccccaccatagtgtgcaataaagtgtctgttcttaccaaa

SEQ ID NO: 184539 - DNA, 2121 bp, Homo sapiens
  Payload ID: 16339
  Gene Symbol: SLC6A18
  Gene Name: solute carrier family 6 (neutral amino acid transporter), member 18
  Uniprot ID: Q96N87
  ENST ID: ENST00000324642
  CDS Start-End: 124-2010
aatacaactgcagtggggctgcttgtggtttccaaacgtcggcagaggctggagacggctctctagtgctgggtgtggagtgaggcaccacccttgccctgaagcctggggcactcagtcaccatggctcatgccccagaaccggacccggccgcctgcgacctcggggatgagaggcccaagtgggacaacaaggcccagtacctcctgagctgcactgggtttgccgtgggactggggaacatttggcggttcccatacctgtgccagacctatggaggaggggccttcctcatcccctacgtcatcgcgctggtcttcgaggggatccccattttccacgtcgagctcgccatcggccagcggctgcggaagggcagcgtcggcgtgtggacggccatctccccgtacctcagtggagtagggctgggctgtgtcacgctgtccttcctgatcagcctgtactacaacaccatcgtggcgtgggtgctgtggtacctcctcaactccttccagcacccgctgccctggagctcctgcccaccggacctcaacagaacagggtttgtggaggagtgccagggcagcagcgccgtgagctacttctggtaccggcagacactgaacatcacagccgacatcaatgacagtggctccatccagtggtggctgctcatctgcttggcagcctcctgggcagtcgtgtacatgtgtgtcatcaggggcattgagactacagggaaggtgatttacttcacagctttgttcccttacctggtcctgaccatctttctcatcagagggctgaccctgccaggggcaacaaaaggactcatctacttgttcactcccaacatgcacattctccagaacccccgggtgtggctggacgcagccacccagatattcttctctctgtccctggccttcggaggacacatcgcttttgcaagttacaactcgcccaggaatgactgccagaaggatgcggtggtcatcgccctggtcaacaggatgacctccctgtacgcgtccatcgctgtcttctctgtcctggggttcaaagcaactaatgactacgagcactgcctggacagaaacatcctcagcctcatcaacgactttgacttcccagagcagagcatctccagggacgactacccagccgtcctcatgcacctgaacgccacctggcccaagagggtggcccagctccccctgaaggcctgcctcctggaagactttctggataagagtgcctcgggcccgggcctggccttcgtcgtcttcacggagaccgacctccacatgccgggggctcctgtgtgggccatgctcttcttcgggatgctgttcaccttggggctatcgaccatgttcgggaccgtggaggcggtcatcacacccctgctggacgtgggggtcctgcctagatgggtccccaaggaggccctgactgggctggtctgcctggtctgcttcctctccgccacctgcttcacgctgcagtctgggaactactggctggagattttcgacaattttgccgcttccccgaacctgctcatgttggcctttctcgaggttgtgggtgtcgtttatgtttatggaatgaaacggttctgcgatgacattgcgtggatgaccgggaggcggcccagcccctactggcggctgacctggagggtggtcagtcccctgctgctgaccatctttgtggcttacatcatcctcctgttctggaagccactgagatacaaggcctggaaccccaaatacgagctgttcccctcgcgtcaggagaagctctacccgggctgggcgcgcgccgcctgtgtgctgctgtccttgctgcccgtgctgtgggtcccggtggccgcgcttgctcagctgctcacccggcggaggcggacgtggagggacagggacgcgcgcccagacacggacatgcgcccggacacggacacgcgcccagacacggacatgcgcccggacacggacatgcgctgaagccggccggagcggggcctgcatgggcgggtctgtgggggggcttggcctgatggtgggcggggccccgcccacagggccgaccccaatacaccagcgactcaaccttga

SEQ ID NO: 184540 - DNA, 5174 bp, Homo sapiens
  Payload ID: 16340
  Gene Symbol: SLC6A19
  Gene Name: solute carrier family 6 (neutral amino acid transporter), member 19
  Uniprot ID: Q695T7
  ENST ID: ENST00000304460
  CDS Start-End: 57-1961
actcgccctccagcttctgccctgcctgctgtgtgcggagccgtccagcgaccaccatggtgaggctcgtgctgcccaaccccggcctagacgcccggatcccgtccctggctgagctggagaccatcgagcaggaggaggccagctcccggccgaagtgggacaacaaggcgcagtacatgctcacctgcctgggcttctgcgtgggcctcggcaacgtgtggcgcttcccctacctgtgtcagagccacggaggaggagccttcatgatcccgttcctcatcctgctggtcctggagggcatccccctgctgtacctggagttcgccatcgggcagcggctgcggcggggcagcctgggtgtgtggagctccatccacccggccctgaagggcctaggcctggcctccatgctcacgtccttcatggtgggactgtattacaacaccatcatctcctggatcatgtggtacttattcaactccttccaggagcctctgccctggagcgactgcccgctcaacgagaaccagacagggtatgtggacgagtgcgccaggagctcccctgtggactacttctggtaccgagagacgctcaacatctccacgtccatcagcgactcgggctccatccagtggtggatgctgctgtgcctggcctgcgcatggagcgtcctgtacatgtgcaccatccgcggcatcgagaccaccgggaaggccgtgtacatcacctccacgctgccctatgtcgtcctgaccatcttcctcatccgaggcctgacgctgaagggcgccaccaatggcatcgtcttcctcttcacgcccaacgtcacggagctggcccagccggacacctggctggacgcgggcgcacaggtcttcttctccttctccctggccttcgggggcctcatctccttctccagctacaactctgtgcacaacaactgcgagaaggactcggtgattgtgtccatcatcaacggcttcacatcggtgtatgtggccatcgtggtctactccgtcattgggttccgcgccacacagcgctacgacgactgcttcagcacgaacatcctgaccctcatcaacgggttcgacctgcctgaaggcaacgtgacccaggagaactttgtggacatgcagcagcggtgcaacgcctccgaccccgcggcctacgcgcagctggtgttccagacctgcgacatcaacgccttcctctcagaggccgtggagggcacaggcctggccttcatcgtcttcaccgaggccatcaccaagatgccgttgtccccactgtggtctgtgctcttcttcattatgctcttctgcctggggctgtcatctatgtttgggaacatggagggcgtcgttgtgcccctgcaggacctcagagtcatccccccgaagtggcccaaggaggtgctcacaggcctcatctgcctggggacattcctcattggcttcatcttcacgctgaactccggccagtactggctctccctgctggacagctatgccggctccattcccctgctcatcatcgccttctgcgagatgttctctgtggtctacgtgtacggtgtggacaggttcaataaggacatcgagttcatgatcggccacaagcccaacatcttctggcaagtcacgtggcgcgtggtcagccccctgctcatgctgatcatcttcctcttcttcttcgtggtagaggtcagtcaggagctgacctacagcatctgggaccctggctacgaggaatttcccaaatcccagaagatctcctacccgaactgggtgtatgtggtggtggtgattgtggctggagtgccctccctcaccatccctggctatgccatctacaagctcatcaggaaccactgccagaagccaggggaccatcaggggctggtgagcacactgtccacagcctccatgaacggggacctgaagtactgagaaggcccatcccacggcgtgccatacactggtgtcagggaaggaggaaccagcaagacctgtggggtgggggccgggctgcacctgcatgtgtgtaagcgtgagtgtatgctcgtgtgtgagtgtgtgtattgtacacgcatgtgccatgtgtgcagatatgtatcgtgtgtgcatgtacatgcatgggcactgtgtgagtgtgcacgtgtatgcacacatatacatgtgtgtgggtgtgtgtattgtatgtgcatgtgccatgtgtgcagatgtgtcatgttgtgtgtgtgcatgtacatgtatggacattgtgtgagtgtgcaagtgtgcatgcatatacatgtgtgcgatatttgctgcccgtgtgtgtgcatgtatatatagacatacatgcctatgttgtgtgtggtgtgcatatgtgtgaacacacacgtgtatacatgcatgcacatgtgctcgtacaatgggtgtccacatgcacgtgtatatgtatatctgtgagtgtatatacatgcatgcaattgtgtgtatgtgtgttctgtgtgtgcgtttgcaagtatatatgcacatgtgtatatgtacatgtatgcctgtgtgacgtgtgtatatgtgagcatgtgtacgtgtgtgtatacgtgtgttgtgtatatgtgtgtgtctgtacctgtttgtgtatatgtgtgtgatgtgtgctcgtgtgtgtgcatattcaggcaggtgtgcatttgtgcatgccagtgtgtatgtatgtgcgcatatggacacgcatggacacgcatatggacacatatggacacacatatggacacgtgtggatatgtgtgcgtacacgtcgctgggacacatgcctgccactcggggcccagctgccctctgtgtttgtccttgccacagtcacggggtgcatgtgcagaggggagcagaccactggggacgtgctgtgccctgcacgtgcccgggggaagcggaagctgcagctggggtgggggcagcacctctatgcttcatctctgtgggtggcaggagacaaaagcacagggtactatcttggctcctgggagcgactcttgctacccacccccacccatccccttccccttggtgttgacctttgacctgggggttcccagagccctgtagccctcgacccggagcagcctctcggaagccggagtgggcagttgctggcgattctgagaaaacttggccgcatccaccggggccctgcctccagtcggccgctgccgagtctctgcgttctggccgcttcccggcttaatgaatgccagccatttaatcattgctcctgccaccacaaatagatgagcagttaaataaaactcaacttggcataattcaaggcaaataccactctgtgcattttcttaagaggacatgagctgtgtgaatttttagccagcctttggaaaagatgggttacagggtaactcaaccctggctgccatccttgggcactgtgtgtgtccagggcaccttggaggaccgtgcagcccccagaagcttccagctcccgcaccactcagtgaagcccagcctggcgcctgccctgcccccgtcacgggatgggcccccattggggttcaacattccatcgcagccaaaggcagtcggcacttgggacatctgcttccacggacaggtcacctccgctttgcacggaagaatctggatgcttacattaaactggtgttctgagagttcctacggacaggtcacctccgctttgcatggaagaatctggatgcttacattaaactggtgttctgagagttcctacggacaggtcacctctgctttccatagaagaatctggacgcttacattaaactgatgttctgagaattcctacaggcaggactgaaagcctggtgtgtgccagtatgatgttccacccacagaaacctggtcacaatcgtcccttccagcaccccatccagcagtgactgcacacactgagtcccctaccagcccctttcaccctgctgactgtcactgggccctgggatgcgcaagactccacagcagcagaggtggggggacatatcacagcctctgcccccggctgtgatgccaccgaggggctcgcctgctgatggcttcaacagggtctcacctcatcttttcctgctctttggccctggatcgagaaaatttccatcagtgccccattaatatgctgccctgtggcatctgcccaggaggccctgccaggcgtgcacaggtgtgcattggtgtaccctggcatgcacaggtgtgcactgatgtgccctggcatccattggtgtaccctggtgtgcctgccataggaccctgggcgggagctcccatctcatctacatctcctgattcatgcgttgtttcataggtttcaatgtctctgtaaatgtggtagaaatgcaggctttatgggcataaagtgtacatttctaaataaatcccttctattgagtatgctcaccctagaagttactgttgtccagacgtagagggatgagtgagccagtgacctcagacgggatggtggggacggcaggtccagctcctgcctcctcctggggggtctggctttgggggcttgctccgaagaggccatggcccaggcctgtggcctcacaatggggaccaaccagctcttctcatcttcttccctcacacttcctctcactcaaataagaaccttccaaaaatgtgtccacctgggcccctgccctgggactcatggatttggagttgtggccacacggttgaggggtgcagtgtccagtggaatggggcaattgcgggcctgggggcccttggcctgtccgtggcgggagcatctgcaaggaggagccccagagtccagggagcactgtggggagctccttagagctgaactcacccggcgtcaactcatcaaccctccacccatggacaggggtgcccccagcacaggagaggactcagccctctgcccccacgcacggtgggtgcctgtcaccctgtcctgcccagcggcccgagggcagcagtgggtgtgagggcagcccccggcctcccaagagcagctgagaggatccctgcgggaatccgggcttcgggtgcatgcgatctgatctgagttgtttctgacagtgacagagtgacaatctataagtatctcaagatcaaatggttaaataaaacataagaaatttaaaacgattaaaa

SEQ ID NO: 184541 - DNA, 3337 bp, Homo sapiens
  Payload ID: 16340
  Gene Symbol: SLC6A19
  Gene Name: solute carrier family 6 (neutral amino acid transporter), member 19
  ENST ID: ENST00000515652
  CDS Start-End: 57-1121
actcgccctccagcttctgccctgcctgctgtgtgcggagccgtccagcgaccaccatggtgaggctcgtgctgcccaaccccggcctagacgcccggatcccgtccctggctgagctggagaccatcgagcaggaggaggccagctcccggccgaagtgggacaacaaggcgcagtacatgctcacctgcctgggcttctgcgtgggcctcggcaacgtgtggcgcttcccctacctgtgtcagagccacggaggaggagccttcatgatcccgttcctcatcctgctggtcctggagggcatccccctgctgtacctggagttcgccatcgggcagcggctgcggcggggcagcctgggtgtgtggagctccatccacccggccctgaagggcctaggagcctctgccctggagcgactgcccgctcaacgagaaccagacagggtatgtggacgagtgcgccaggagctcccctgtggactacttctggtaccgagagacgctcaacatctccacgtccatcagcgactcgggctccatccagtggtggatgctgctgtgcctggcctgcgcatggagcgtcctgtacatgtgcaccatccgcggcatcgagaccaccgggaaggccgtgtacatcacctccacgctgccctatgtcgtcctgaccatcttcctcatccgaggcctgacgctgaagggcgccaccaatggcatcgtcttcctcttcacgcccaacgtcacggagctggcccagccggacacctggctggacgcgggcgcacaggtcttcttctccttctccctggccttcgggggcctcatctccttctccagctacaactctgtgcacaacaactgcgagaaggactcggtgattgtgtccatcatcaacggcttcacatcggtgtatgtggccatcgtggtctactccgtcattgggttccgcgccacacagcgctacgacgactgcttcagcacgtgagtggctgtcccaccatcctggtgccttgggctgcgcctccaggaagcctcccagcctccctggccccaggtggccgtcagcctcaatctgacccgcaggaacatcctgaccctcatcaacgggttcgacctgcctgaaggcaacgtgacccaggagaactttgtggacatgcagcagcggtgcaacgcctccgaccccgcggcctacgcgcagctggtgttccagacctgcgacatcaacgccttcctctcagaggccgtggagggcacaggcctggccttcatcgtcttcaccgaggccatcaccaagatgccgttgtccccactgtggtctgtgctcttcttcattatgctcttctgcctggggctgtcatctatgtttgggaacatggagggcgtcgttgtgcccctgcaggacctcagagtcatccccccgaagtggcccaaggaggtgctcacaggcctcatctgcctggggacattcctcattggcttcatcttcacgctgaactccggccagtactggctctccctgctggacagctatgccggctccattcccctgctcatcatcgccttctgcgagatgttctctgtggtctacgtgtacggtgtggacaggttcaataaggacatcgagttcatgatcggccacaagcccaacatcttctggcaagtcacgtggcgcgtggtcagccccctgctcatgctgatcatcttcctcttcttcttcgtggtagaggtcagtcaggagctgacctacagcatctgggaccctggctacgaggaatttcccaaatcccagaagatctcctacccgaactgggtgtatgtggtggtggtgattgtggctggagtgccctccctcaccatccctggctatgccatctacaagctcatcaggaaccactgccagaagccaggggaccatcaggggctggtgagcacactgtccacagcctccatgaacggggacctgaagtactgagaaggcccatcccacggcgtgccatacactggtgtcagggaaggaggaaccagcaagacctgtggggtgggggccgggctgcacctgcatgtgtgtaagcgtgagtgtatgctcgtgtgtgagtgtgtgtattgtacacgcatgtgccatgtgtgcagatatgtatcgtgtgtgcatgtacatgcatgggcactgtgtgagtgtgcacgtgtatgcacacatatacatgtgtgtgggtgtgtgtattgtatgtgcatgtgccatgtgtgcagatgtgtcatgttgtgtgtgtgcatgtacatgtatggacattgtgtgagtgtgcaagtgtgcatgcatatacatgtgtgcgatatttgctgcccgtgtgtgtgcatgtatatatagacatacatgcctatgttgtgtgtggtgtgcatatgtgtgaacacacacgtgtatacatgcatgcacatgtgctcgtacaatgggtgtccacatgcacgtgtatatgtatatctgtgagtgtatatacatgcatgcaattgtgtgtatgtgtgttctgtgtgtgcgtttgcaagtatatatgcacatgtgtatatgtacatgtatgcctgtgtgacgtgtgtatatgtgagcatgtgtacgtgtgtgtatacgtgtgttgtgtatatgtgtgtgtctgtacctgtttgtgtatatgtgtgtgatgtgtgctcgtgtgtgtgcatattcaggcaggtgtgcatttgtgcatgccagtgtgtatgtatgtgcgcatatggacacgcatggacacgcatatggacacatatggacacacatatggacacgtgtggatatgtgtgcgtacacgtcgctgggacacatgcctgccactcggggcccagctgccctctgtgtttgtccttgccacagtcacggggtgcatgtgcagaggggagcagaccactggggacgtgctgtgccctgcacgtgcccgggggaagcggaagctgcagctggggtgggggcagcacctctatgcttcatctctgtgggtggcaggagacaaaagcacagggtactatcttggctcctgggagcgactcttgctacccacccccacccatccccttccccttggtgttgacctttgacctgggggttcccagagccctgtagccctcgacccggagcagcctctcggaagccggagtgggcagttgctggcgattctgagaaaacttggccgcatccaccggggccctgcctccagtcggccgctgccgagtctctgcgttctggccgcttcccggcttaatgaatgccagccatttaatcattgctcctgccaccacaaatagatgagcagttaaataaaactcaacttggcataattcaaggc

SEQ ID NO: 184542 - DNA, 5247 bp, Homo sapiens
  Payload ID: 16341
  Gene Symbol: SLC6A20
  Gene Name: solute carrier family 6 (proline IMINO transporter), member 20
  Uniprot ID: Q9NP91
  ENST ID: ENST00000353278
  CDS Start-End: 52-1719
actgccgtgccggacccccgagccggagccgagcgcgccgaggccggggccatggagaaagcgcggccgctgtgggccaactcgctacagttcgtgttcgcctgcatctcgtacgccgtgggcctgggcaacgtgtggcgattcccgtacctgtgccagatgtacggcggaggtagtttcctggtcccctacatcatcatgcttatcgtggagggaatgccgctcttgtacctggaactggctgtggggcagcgcatgcggcagggcagcatcggcgcctggaggaccatcagcccgtacctcagtggtgtcggggtcgccagcgtggtggtctctttcttcctctccatgtactacaacgtcatcaacgcctgggccttctggtacctcttccactccttccaggatcccctgccgtggtctgtctgcccactgaatggtaaccacacgggctacgatgaggagtgtgagaaggcgtcctccacacagtacttctggtacaggaaaaccctcaatatctcgccgtccctccaggagaacgggggtgtgcagtgggagccggcgctgtgcctcctcctggcctggctggtggtgtacctgtgcatcctgcgtggcaccgagtccactggcaagatagagcagctggccaaccccaaggcctggatcaatgcagccacccagatcttcttctcacttggcctgggcttcggcagcctgatcgccttcgccagctacaatgagccatccaacaactgccagaagcacgccatcatcgtgtccctcatcaacagcttcacctccatatttgccagcattgtcaccttctccatctatggcttcaaggccaccttcaattatgaaaactgcttgaagaaggtgagtctgctgctgaccaacacttttgaccttgaagatggctttttgacagccagcaacctggagcaggtgaagggctacctcgcatctgcctacccaagcaaatacagcgagatgttcccgcaaatcaaaaactgcagcttggaatcggagctagacacggccgtccagggcactggcctggcattcatcgtctacacagaggccattaaaaacatggaggtgtcccagctgtggtcggtgctctacttcttcatgctgctgatgctgggcattgggagcatgctggggaacacagcggccatcctcacccctctgacagacagcaagatcatctccagccacctgcccaaggaggccatctcaggtctggtgtgccttgtcaactgtgccattggcatggtgttcacgatggaggctgggaactactggtttgacatattcaacgactacgcggccacactgtccctgctgctcatcgtgctggtggagacgattgccgtgtgctacgtgtacgggctgaggagatttgaaagtgaccttaaggccatgaccggccgagctgtgagctggtactggaaggtgatgtgggctggcgtaagcccactgctgattgtcagcctctttgtcttctacctgagcgactacatcctcacggggaccctgaagtatcaagcctgggacgcctcccagggccagctcgtgaccaaagattacccggcctatgcactggctgtcatcgggctgcttgtggcctcctccaccatgtgcatccccctggcggccctggggacttttgttcagcgtcgcctcaagaggggagacgcagaccccgtggcctgagatgtgggcttcccagccgctcacggttttacagatactatttacaggcggaaactcctcggctgctttttcaaatgcttaagccaggagtgctcagcccatcaacttcctgagtgtctaaagaagatgaggaaggtgtgcaggaagaaaactcccttgggagaacgcacaccctcccgtggtggctgttcctccctgtcacctgcctcctcatcatggaagggggtgggctatgaaagccggtctcaaagataactgcatccttcattccaggaaagccctagaattagggcacattgcaaactgaaatatgactataattcttatgggaccaaatttaagcaatttttgtttttggctgaagagacaccaaaatattagaggacaaatatttttagatccatttaaggagttttgaagtgcctaagatgacctatttgtcagtggtgcaaaattaattctcttcttttttgagttgtagtgaatatgcaatttctgtgttccccttccaccctttaaatcttaggatgacaagttataaagaaagaagatctttgtctgggacccccaaagggatcctttctctaaggtctctgacggtgggtccaggaccagacctctctacaaaaaattgccccaactacagtttgcaaccccaaaccacattagaagtctgtgcagacatccctccgtggtgtgtgtcttggtgcattggaaaaggagtcaggagccactgtgaggtgagaatgaaagtggatctcagctgggcacggtggctcacgcctgtaatcctagcaccttgggggtcaaggtgggtggatcacttgaggtcaggagtttgaggccagcctggccaacatggcgaaaccccatttctactaaaaatacaaaaaaattagctgggagtggtggcataggcctgtaattccagctactctggctgctgaggcacaagaatcatttgaacctaggaggtggcggttgctgtgagccaagatcatgccactccactccagtctgggcgacagagcaagactctgactcaaaaaaaaaaaaaaaaaaaagtggctctgactttcccataggcttaatattacatttggacatcgtggccaactctatcaagaccacaaataccacttacaattaattttaaattattcatctgtacatagttttctaaaatgtatataattcaaacagagcatcttgtaactgaagacacaccatatctatgatatcgcattagtccatgtggggaaaagaaagatcagattgttactgtgtctgtgtagaaaaggaagacataagaaactccattttgatctgtactaagaaaaattgtttctgctttgagatgttgttagcctataactttagccccaactctgtgctcacagaaacatgcgctgtaatgaatcaaagtttaatggatttagggctgtgcaggatgtgccttgttaacaatatgtttgcaggctgtatgcttggtagaagtcatcgccattctccattctcgattaaccagggacacaatgcacagcagaaagctgcagggacctctgcccaagaaagcctgggtattgtccaaggtttcccccccactgagacagcctgagatatggcctcatgggaagggaaagacctgactgtcccccagcccgacacctgtaaagggtcggtgctgaggaggaatagtgaaggagggaggcctctttgcagttgagataagaggaaggcttctgtctcctgcttgtccctggtaatggaatgtctcggtgtaaaaagctgaccattcccattcgttctattctgagataggagaaaaccgccctgtggctggaggtgagatatgctggcagcaatactgctctgttactccttgctacactgagatgtttgggtaaagagaaacataaatctagcctacgtgcacatctgggcacagtacctttccttgaacttattcgtgatacagattcctttgctcacatgtttccctgctgaccttcttcccacctgttgccctgctacactcccctcgctaagacagtaaaaataatgatcaataaatactgagggaactcagaggccagcgccggtgcgggtcctccacatgctgagcgccggtcctgggcccactgttctttctctatactttgtctctgtgtcttatttcttttctcaaaaaaatttttctttttttaactgcaataaagtaggtcgttacccctaaagtgagcgagtcccttcctgctctaacgtccagtgcttccttgagatcatggaattctggagagtttctgtggatatatttgcacagatatctttgaagacacaaacactcacctgggacgttggccggagatgtctttttatttttgtgctgtaaaattctcttacagcaaaaataggctttagaaaggtcttctactgtcttcagcaaccatctcatcttccagcttcacctgattgtccagttatcatacatttgactttcaaatgtatgaaccagcatgtaccccatggatttaatcttatctaccccgtggattcaatcttcttatcagaaggttcttttatgtcaaaaaacctgctgtcaaggcttgaagagccggcacactcaatggcaaacacagcaccgagtctgctctgaatcctggaggatctggccctcctctcaatccccactcacagtcaccgtcttacaactcagggccacctgggatcagtcatcagtcagggtgcgtaagccttgaataccaggtagcctcaggagtgaaaagataaatgtcctagatcattaccttattcagtgtccccaccttgcagcgcattccaaccacctgggagcatttaaaactccagatgcccacaccacaccctggggccacccatcagaccttctggaagcaagacctgggcctccatggccccaaaaactccctaggtgatccgatgtgcagccaaatctgagaggccccatttaaaaaagaaagaacatgggtggtacattgaggagtatttacattttataaaatgacttaaaaatttgaaggcatttttgagcatttccaattatatggaagagttacttctacggaatagtttttgctcatggaactcaaacagatgaagcaccactgttacagaataatgtgctccagatgaaaatgtctcgtttctgtgaatttcatgaagagcagaacatttctcaagaatcctcttgagccagtaatcaatcctgtctcaaaaaatgttctttgccatttcctagatactgcacaaaagtggccatgtcgacatttgtccacccaccctccaataagctggagcgacaaagggacattccatccctgtacccttagtggtagccatgacacgatggccagatcatggactccggaaagctttctgtttttactggaaacatagcaaaccttgatttagctccaagaaattgagtagggaaatatttgttttttagcaattgtcatagtaaataaaactctaagcaagtgtatctac

SEQ ID NO: 184543 - DNA, 5423 bp, Homo sapiens
  Payload ID: 16341
  Gene Symbol: SLC6A20
  Gene Name: solute carrier family 6 (proline IMINO transporter), member 20
  Uniprot ID: Q9NP91
  ENST ID: ENST00000358525
  CDS Start-End: 117-1895
gaggcgcggggccacccccaagccgagccggggtgggacggcgcgcctggcgaccgcgcactgagactgccgtgccggacccccgagccggagccgagcgcgccgaggccggggccatggagaaagcgcggccgctgtgggccaactcgctacagttcgtgttcgcctgcatctcgtacgccgtgggcctgggcaacgtgtggcgattcccgtacctgtgccagatgtacggcggaggtagtttcctggtcccctacatcatcatgcttatcgtggagggaatgccgctcttgtacctggaactggctgtggggcagcgcatgcggcagggcagcatcggcgcctggaggaccatcagcccgtacctcagtggtgtcggggtcgccagcgtggtggtctctttcttcctctccatgtactacaacgtcatcaacgcctgggccttctggtacctcttccactccttccaggatcccctgccgtggtctgtctgcccactgaatggtaaccacacgggctacgatgaggagtgtgagaaggcgtcctccacacagtacttctggtacaggaaaaccctcaatatctcgccgtccctccaggagaacgggggtgtgcagtgggagccggcgctgtgcctcctcctggcctggctggtggtgtacctgtgcatcctgcgtggcaccgagtccactggcaaggtggtgtatttcacggcgtcactgccctattgcgtgctcatcatctacctcatcaggggcctcacgctccacggagccaccaatggcctcatgtacatgttcactcccaagatagagcagctggccaaccccaaggcctggatcaatgcagccacccagatcttcttctcacttggcctgggcttcggcagcctgatcgccttcgccagctacaatgagccatccaacaactgccagaagcacgccatcatcgtgtccctcatcaacagcttcacctccatatttgccagcattgtcaccttctccatctatggcttcaaggccaccttcaattatgaaaactgcttgaagaaggtgagtctgctgctgaccaacacttttgaccttgaagatggctttttgacagccagcaacctggagcaggtgaagggctacctcgcatctgcctacccaagcaaatacagcgagatgttcccgcaaatcaaaaactgcagcttggaatcggagctagacacggccgtccagggcactggcctggcattcatcgtctacacagaggccattaaaaacatggaggtgtcccagctgtggtcggtgctctacttcttcatgctgctgatgctgggcattgggagcatgctggggaacacagcggccatcctcacccctctgacagacagcaagatcatctccagccacctgcccaaggaggccatctcaggtctggtgtgccttgtcaactgtgccattggcatggtgttcacgatggaggctgggaactactggtttgacatattcaacgactacgcggccacactgtccctgctgctcatcgtgctggtggagacgattgccgtgtgctacgtgtacgggctgaggagatttgaaagtgaccttaaggccatgaccggccgagctgtgagctggtactggaaggtgatgtgggctggcgtaagcccactgctgattgtcagcctctttgtcttctacctgagcgactacatcctcacggggaccctgaagtatcaagcctgggacgcctcccagggccagctcgtgaccaaagattacccggcctatgcactggctgtcatcgggctgcttgtggcctcctccaccatgtgcatccccctggcggccctggggacttttgttcagcgtcgcctcaagaggggagacgcagaccccgtggcctgagatgtgggcttcccagccgctcacggttttacagatactatttacaggcggaaactcctcggctgctttttcaaatgcttaagccaggagtgctcagcccatcaacttcctgagtgtctaaagaagatgaggaaggtgtgcaggaagaaaactcccttgggagaacgcacaccctcccgtggtggctgttcctccctgtcacctgcctcctcatcatggaagggggtgggctatgaaagccggtctcaaagataactgcatccttcattccaggaaagccctagaattagggcacattgcaaactgaaatatgactataattcttatgggaccaaatttaagcaatttttgtttttggctgaagagacaccaaaatattagaggacaaatatttttagatccatttaaggagttttgaagtgcctaagatgacctatttgtcagtggtgcaaaattaattctcttcttttttgagttgtagtgaatatgcaatttctgtgttccccttccaccctttaaatcttaggatgacaagttataaagaaagaagatctttgtctgggacccccaaagggatcctttctctaaggtctctgacggtgggtccaggaccagacctctctacaaaaaattgccccaactacagtttgcaaccccaaaccacattagaagtctgtgcagacatccctccgtggtgtgtgtcttggtgcattggaaaaggagtcaggagccactgtgaggtgagaatgaaagtggatctcagctgggcacggtggctcacgcctgtaatcctagcaccttgggggtcaaggtgggtggatcacttgaggtcaggagtttgaggccagcctggccaacatggcgaaaccccatttctactaaaaatacaaaaaaattagctgggagtggtggcataggcctgtaattccagctactctggctgctgaggcacaagaatcatttgaacctaggaggtggcggttgctgtgagccaagatcatgccactccactccagtctgggcgacagagcaagactctgactcaaaaaaaaaaaaaaaaaaaagtggctctgactttcccataggcttaatattacatttggacatcgtggccaactctatcaagaccacaaataccacttacaattaattttaaattattcatctgtacatagttttctaaaatgtatataattcaaacagagcatcttgtaactgaagacacaccatatctatgatatcgcattagtccatgtggggaaaagaaagatcagattgttactgtgtctgtgtagaaaaggaagacataagaaactccattttgatctgtactaagaaaaattgtttctgctttgagatgttgttagcctataactttagccccaactctgtgctcacagaaacatgcgctgtaatgaatcaaagtttaatggatttagggctgtgcaggatgtgccttgttaacaatatgtttgcaggctgtatgcttggtagaagtcatcgccattctccattctcgattaaccagggacacaatgcacagcagaaagctgcagggacctctgcccaagaaagcctgggtattgtccaaggtttcccccccactgagacagcctgagatatggcctcatgggaagggaaagacctgactgtcccccagcccgacacctgtaaagggtcggtgctgaggaggaatagtgaaggagggaggcctctttgcagttgagataagaggaaggcttctgtctcctgcttgtccctggtaatggaatgtctcggtgtaaaaagctgaccattcccattcgttctattctgagataggagaaaaccgccctgtggctggaggtgagatatgctggcagcaatactgctctgttactccttgctacactgagatgtttgggtaaagagaaacataaatctagcctacgtgcacatctgggcacagtacctttccttgaacttattcgtgatacagattcctttgctcacatgtttccctgctgaccttcttcccacctgttgccctgctacactcccctcgctaagacagtaaaaataatgatcaataaatactgagggaactcagaggccagcgccggtgcgggtcctccacatgctgagcgccggtcctgggcccactgttctttctctatactttgtctctgtgtcttatttcttttctcaaaaaaatttttctttttttaactgcaataaagtaggtcgttacccctaaagtgagcgagtcccttcctgctctaacgtccagtgcttccttgagatcatggaattctggagagtttctgtggatatatttgcacagatatctttgaagacacaaacactcacctgggacgttggccggagatgtctttttatttttgtgctgtaaaattctcttacagcaaaaataggctttagaaaggtcttctactgtcttcagcaaccatctcatcttccagcttcacctgattgtccagttatcatacatttgactttcaaatgtatgaaccagcatgtaccccatggatttaatcttatctaccccgtggattcaatcttcttatcagaaggttcttttatgtcaaaaaacctgctgtcaaggcttgaagagccggcacactcaatggcaaacacagcaccgagtctgctctgaatcctggaggatctggccctcctctcaatccccactcacagtcaccgtcttacaactcagggccacctgggatcagtcatcagtcagggtgcgtaagccttgaataccaggtagcctcaggagtgaaaagataaatgtcctagatcattaccttattcagtgtccccaccttgcagcgcattccaaccacctgggagcatttaaaactccagatgcccacaccacaccctggggccacccatcagaccttctggaagcaagacctgggcctccatggccccaaaaactccctaggtgatccgatgtgcagccaaatctgagaggccccatttaaaaaagaaagaacatgggtggtacattgaggagtatttacattttataaaatgacttaaaaatttgaaggcatttttgagcatttccaattatatggaagagttacttctacggaatagtttttgctcatggaactcaaacagatgaagcaccactgttacagaataatgtgctccagatgaaaatgtctcgtttctgtgaatttcatgaagagcagaacatttctcaagaatcctcttgagccagtaatcaatcctgtctcaaaaaatgttctttgccatttcctagatactgcacaaaagtggccatgtcgacatttgtccacccaccctccaataagctggagcgacaaagggacattccatccctgtacccttagtggtagccatgacacgatggccagatcatggactccggaaagctttctgtttttactggaaacatagcaaaccttgatttagctccaagaaattgagtagggaaatatttgttttttagcaattgtcatagtaaataaaactctaagcaagtgtatctac

SEQ ID NO: 184544 - DNA, 910 bp, Homo sapiens
  Payload ID: 16341
  Gene Symbol: SLC6A20
  Gene Name: solute carrier family 6 (proline IMINO transporter), member 20
  ENST ID: ENST00000413781
  CDS Start-End: 117-910
gaggcgcggggccacccccaagccgagccggggtgggacggcgcgcctggcgaccgcgcactgagactgccgtgccggacccccgagccggagccgagcgcgccgaggccggggccatggagaaagcgcggccgctgtgggccaactcgctacagttcgtgttcgcctgcatctcgtacgccgtgggcctgggcaacgtgtggcgattcccgtacctgtgccagatgtacggcggaggggtcgccagcgtggtggtctctttcttcctctccatgtactacaacgtcatcaacgcctgggccttctggtacctcttccactccttccaggatcccctgccgtggtctgtctgcccactgaatggtaaccacacgggctacgatgaggagtgtgagaaggcgtcctccacacagtacttctggtacaggaaaaccctcaatatctcgccgtccctccaggagaacgggggtgtgcagtgggagccggcgctgtgcctcctcctggcctggctggtggtgtacctgtgcatcctgcgtggcaccgagtccactggcaaggtggtgtatttcacggcgtcactgccctattgcgtgctcatcatctacctcatcaggggcctcacgctccacggagccaccaatggcctcatgtacatgttcactcccaagatagagcagctggccaaccccaaggcctggatcaatgcagccacccagatcttcttctcacttggcctgggcttcggcagcctgatcgccttcgccagctacaatgagccatccaacaactgccagaagcacgccatcatcgtgtccctcatcaacagcttcacctccatatttgccagcattgtcaccttctccatctatggcttcaaggccaccttcaattatgaaaactgcttgaagaa

SEQ ID NO: 184545 - DNA, 2662 bp, Homo sapiens
  Payload ID: 16341
  Gene Symbol: SLC6A20
  Gene Name: solute carrier family 6 (proline IMINO transporter), member 20
  ENST ID: ENST00000456124
  CDS Start-End: 65-1708
accgcgcactgagactgccgtgccggacccccgagccggagccgagcgcgccgaggccggggccatggagaaagcgcggccgctgtgggccaactcgctacagttcgtgttcgcctgcatctcgtacgccgtgggcctgggcaacgtgtggcgattcccgtacctgtgccagatgtacggcggaggtagtttcctggtcccctacatcatcatgcttatcgtggagggaatgccgctcttgtacctggaactggctgtggggcagcgcatgcggcagggcagcatcggcgcctggaggaccatcagcccgtacctcagtggtgtcggggtcgccagcgtggtggtctctttcttcctctccatgtactacaacgtcatcaacgcctgggccttctggtacctcttccactccttccaggatcccctgccgtggtctgtctgcccactgaatggtaaccacacgggctacgatgaggagtgtgagaaggcgtcctccacacagtacttctggtacaggaaaaccctcaatatctcgccgtccctccaggagaacgggggtgtgcagtgggagccggcgctgtgcctcctcctggcctggctggtggtgtacctgtgcatcctgcgtggcaccgagtccactggcaaggtggtgtatttcacggcgtcactgccctattgcgtgctcatcatctacctcatcaggggcctcacgctccacggagccaccaatggcctcatgtacatgttcactcccaagatagagcagctggccaaccccaaggcctggatcaatgcagccacccagatcttcttctcacttggcctgggcttcggcagcctgatcgccttcgccagctacaatgagccatccaacaactgccagaagcacgccatcatcgtgtccctcatcaacagcttcacctccatatttgccagcattgtcaccttctccatctatggcttcaaggccaccttcaattatgaaaactgcttgaagaaggtgagtctgctgctgaccaacacttttgaccttgaagatggctttttgacagccagcaacctggagcaggtgaagggctacctcgcatctgcctacccaagcaaatacagcgagatgttcccgcaaatcaaaaactgcagcttggaatcggagctagacacggccgtccagggcactggcctggcattcatcgtctacacagaggccattaaaaacatggaggtgtcccagctgtggtcggtgctctacttcttcatgctgctgatgctgggcattgggagcatgctggggaacacagcggccatcctcacccctctgacagacagcaagatcatctccagccacctgcccaaggaggccatctcaggtctggtgtgccttgtcaactgtgccattggcatggtgttcacgatggaggctgggaactactggtttgacatattcaacgactacgcggccacactgtccctgctgctcatcgtgctggtggagacgattgccgtgtgctacgtgtacgggctgaggagatttgaaagtgaccttaaggccatgaccggccgagctgtgagctggtactggaaggtgatgtgggctggcgtaagcccactgctgattgtcagcctctttgtcttctacctgagcgactacatcctcacggggaccctgaagtatcaagcctgggacgcctcccaggatgacaagttataaagaaagaagatctttgtctgggacccccaaagggatcctttctctaaggtctctgacggtgggtccaggaccagacctctctacaaaaaattgccccaactacagtttgcaaccccaaaccacattagaagtctgtgcagacatccctccgtggtgtgtgtcttggtgcattggaaaaggagtcaggagccactgtgagtaggtcgttacccctaaagtgagcgagtcccttcctgctctaacgtccagtgcttccttgagatcatggaattctggagagtttctgtggatatatttgcacagatatctttgaagacacaaacactcacctgggacgttggccggagatgtctttttatttttgtgctgtaaaattctcttacagcaaaaataggctttagaaaggtcttctactgtcttcagcaaccatctcatcttccagcttcacctgattgtccagttatcatacatttgactttcaaatgtatgaaccagcatgtaccccatggatttaatcttatctaccccgtggattcaatcttcttatcagaaggttcttttatgtcaaaaaacctgctgtcaaggcttgaagagccggcacactcaatggcaaacacagcaccgagtctgctctgaatcctggaggatctggccctcctctcaatccccactcacagtcaccgtcttacaactcagggccacctgggatcagtcatcagtcagggtgcgtaagccttgaataccaggtagcctcaggagtgaaaagataaatgtcctagatcattaccttattcagtgtccccaccttgcagcgcattccaaccacctgggagcatttaaaactccagatgcccacaccacaccctggggccacccatcagaccttctggaagcaagacctgggcctccatggccccaaaaactccctaggtgatccgatgtgcagccaaatct

SEQ ID NO: 184546 - DNA, 2938 bp, Homo sapiens
  Payload ID: 16342
  Gene Symbol: SLC6A16
  Gene Name: solute carrier family 6, member 16
  Uniprot ID: Q9GZN6
  ENST ID: ENST00000335875
  CDS Start-End: 243-2453
gcagagaatcggcgggaaaggccgcgcgccaggcagatcgaggggtgtcgcccaaaccgatctgtcgacgcctgaaggggcctgaggagattgctaggcttctcagctggggcttcttcaccctcatttttgtccgactggctggactgaagaacctggcagaagccttggggctagggtctcctcaggaagatgaaccctcccttgcagaagcgggagctgccccagagagtctgtgtgagatgaagacagaggcccagccttcgacatccttgctggcaaacacctcatggactggcacagtgatttctgacagtgtcccaggaagtcaaacgtgggaagacaagggttcattgacccggtctgcaacatcttggacctcagaggcccaagtttcagcagcccgggttgcagaggctcaggccaggaccagtcagcccaagcaaatttctgtattggaggcgttaactgcctcagccctgaaccagaaacccacgcatgagaaggtgcagatgacagagaagaaagagagtgaggtcctccttgcccgtccgttctggtccagcaaaactgagtatattctggctcaggtgggcttctctatgaagccatcttgtctctggcgctttgcctacctgtggcttaacagtggaggctgcagtttcgctgccatctacatcttcatgctgttcctggtcggggttcctcttctcttcctggagatggcagctggtcagagcatgcgtcagggtggcatgggtgtatggaagatcattgccccctggattggtggtgtggggtattctagcttcatggtgtgcttcatcctcggcctgtacttcaatgtggtcaattcctggatcatcttctacatgagccagtccttccagtttcccgttccatgggagaaatgtcccttaacgatgaactctagtggctttgatcctgaatgtgaacggacaacaccctccatatacttctggtaccagcaggccttgaaggcctcagacagaatcgaggatggcgggtcaccagtctacagtctggtcctgcccttctttctttgctggtgtcttgttggtgctttcatgatcaatgggctcaagtccactgggaaggtaatctatgtcttggtactgctcccctgtttcatcattgtcggtttcttcatccggactctactcctggaaggggcaaaatttggccttcaacagttggtggttgccaagatatcggatgtgtacaatatgagtgtgtggtctctagcagggggtcaagttttgtctaacacaggcataggccttggctccgttgcctccttagcctcctacatgccccagtccaacaactgtctcagtgatgcctttctcgtgtctgtgataaacctgctcactttgttggttttcacatctttcaacttctgtgtcctgggcttctgggcgacagtcatcacacatcgctgctgtgagaggaatgctgaaatacttttaaagctgataaacctagggaaactgcctcctgatgccaagccccctgtcaacctgctttacaacccaacctccatctacaatgcctggctcagtggccttccccagcacatcaaaagcatggttctccgcgaggtgactgagtgcaacatagagactcagtttcttaaggctagcgagggcccaaagtttgcattcctgtcctttgttgaagccatgtccttccttcctccgtctgtcttctggtcttttatcttcttcctgatgttgctggccatggggctgagcagcgcaatagggattatgcagggcatcattactccactccaggacaccttctctttcttcaggaaacatacaaagctgctcatagtgggagtctttttgctcatgttcgtgtgcggcctcttcttcactcgaccttcaggcagctacttcatcagactgctgagtgactactggatagtcttccccatcatcgtcgttgtcgtatttgaaaccatggctgtatcctgggcctatggggccaggaggttccttgcagacctgacgatcctgttgggccaccccatctctcccatctttggttggctgtggccccatctgtgtccagttgtgctgctaatcatctttgtgaccatgatggttcatctttgtatgaagccgatcacctacatgtcctgggactcaagcacctcaaaagaggtgcttcgaccatacccaccgtgggcactgctcttgatgatcaccctttttgccattgtcatcctccccatccctgcatactttgtatactgccgcatacataggattcccttcaggcccaagagcggagacgggcctatgacagcctccacatccctacccctaagtcaccagctaacacccagtaaagaggttcaaaaggaagaaattctacaagttgatgaaacaaagtacccatcaacttgtaatgtgacttcctaacttcattaatttggcttcacataacatatcccttagaacagatccaatagacaactcttaatatcagcttgcaactgttgatctccctggatccagaaccacttttatttccaagaggaggggcattctttgggggtgttcatggggcctggacttgcaatcccttcctgggtcccatcttacctggtgaccaccatcattgttttccccatcctcttcctcaacacacatacatgcacaacacatatacaatactagtgatgtctaccagtcctgctacttctggggtgcctgtctcctggaatggagctggaggagcaatgctgttggtgaataaatcagtctactggaactccaaggactggatgtaagcagatctttttttcctatagatgtctcagatgttcagttttcctgtcacaaggcttccagtctgtattagttcattttcacactgctaataaagacatacctgaaactgggaa

SEQ ID NO: 184547 - DNA, 2983 bp, Homo sapiens
  Payload ID: 16342
  Gene Symbol: SLC6A16
  Gene Name: solute carrier family 6, member 16
  Uniprot ID: Q9GZN6
  ENST ID: ENST00000454748
  CDS Start-End: 203-2182
aggggtgtcgcccaaaccgatctgtcgacgcctgaaggggcctgaggagattgctaggcttctcagctggggcttcttcaccctcatttttgtccgactggctggactgaagaacctggcagaagccttggggctagggtctcctcaggaagatgaaccctcccttgcagaagcgggagctgccccagagagtctgtgtgagatgaagacagaggcccagccttcgacatccttgctggcaaacacctcatggactggcacagtgatttctgacagtgtcccaggaagtcaaacgtgggaagacaagggttcattgacccggtctgcaacatcttggacctcagaggcccaagtttcagcagcccgggttgcagaggctcaggccaggaccagtcagcccaagcaaatttctgtattggaggcgttaactgcctcagccctgaaccagaaacccacgcatgagaaggtgcagatgacagagaagaaagagagtgaggtcctccttgcccgtccgttctggtccagcaaaactgagtatattctggctcaggtgggcttctctatgaagccatcttgtctctggcgctttgcctacctgtggcttaacagtggaggctgcagtttcgctgccatctacatcttcatgctgttcctggtcggggttcctcttctcttcctggagatggcagctggtcagagcatgcgtcagggtggcatgggtgtatggaagatcattgccccctggattggtggtgtggggtattctagcttcatggtgtgcttcatcctcggcctgtacttcaatgtggtcaattcctggatcatcttctacatgagccagtccttccagtttcccgttccatgggagaaatgtcccttaacgatgaactctagtggctttgatcctgaatgtgaacggacaacaccctccatatacttctggtaccagcaggccttgaaggcctcagacagaatcgaggatggcgggtcaccagtctacagtctggtcctgcccttctttctttgctggtgtcttgttggtgctttcatgatcaatgggctcaagtccactgggaaggtaatctatgtcttggtactgctcccctgtttcatcattgtcggtttcttcatccggactctactcctggaaggggcaaaatttggccttcaacagttggtggttgccaagatatcggatgtgtacaatatgagtgtgtggtctctagcagggggtcaagttttgtctaacacaggcataggccttggctccgttgcctccttagcctcctacatgccccagtccaacaactgtctcagtgatgcctttctcgtgtctgtgataaacctgctcactttgttggttttcacatctttcaacttctgtgtcctgggcttctgggcgacagtcatcacacatcgctgctgtgagaggaatgctgaaatacttttaaagctgataaacctagggaaactgcctcctgatgccaagccccctgtcaacctgctttacaacccaacctccatctacaatgcctggctcagtggccttccccagcacatcaaaagcatggttctccgcgaggtgactgagtgcaacatagagactcagtttcttaaggctagcgagggcccaaagtttgcattcctgtcctttgttgaagccatgtccttccttcctccgtctgtcttctggtcttttatcttcttcctgatgttgctggccatggggctgagcagcgcaatagggattatgcagggcatcattactccactccaggacaccttctctttcttcaggaaacatacaaagctgctcatagtgggagtctttttgctcatgttcgtgtgcggcctcttcttcactcgaccttcaggcagctacttcatcagactgctgagtgactactggatagtcttccccatcatcgtcgttgtcgtatttgaaaccatggctgtatcctgggcctatggggccaggaggttccttgcagacctgacgatcctgttgggccaccccatctctcccatctttggttggctgtggccccatctgtgtccagttgtgctgctaatcatctttgtgaccatgatggttcatctttgtatgaagccgatcacctacatgtcctgggactcaagcaccgtgagcctcccccaggacccagaacccctttgggagtaggggccagacctttcaattcactctgggtgaaagaacccagtcatctcattctcttactgcccgaagactcatgggttttctgctttggttccccacccatccttcccctccacaactcttccttttctcttggggattttgatattctgaacccttttcccatctctccacagtcaaaagaggtgcttcgaccatacccaccgtgggcactgctcttgatgatcaccctttttgccattgtcatcctccccatccctgcatactttgtatactgccgcatacataggattcccttcaggcccaagagcggagacgggcctatgacagcctccacatccctacccctaagtcaccagctaacacccagtaaagaggttcaaaaggaagaaattctacaagttgatgaaacaaagtacccatcaacttgtaatgtgacttcctaacttcattaatttggcttcacataacatatcccttagaacagatccaatagacaactcttaatatcagcttgcaactgttgatctccctggatccagaaccacttttatttccaagaggaggggcattctttgggggtgttcatggggcctggacttgcaatcccttcctgggtcccatcttacctggtgaccaccatcattgttttccccatcctcttcctcaacacacatacatgcacaacacatatacaatactagtgatgtctaccagtcctgctacttctggggtgcctgtctcctggaatggagctggaggagcaatgctgttggtgaataaatcagtctactggaactccaa

SEQ ID NO: 184548 - DNA, 794 bp, Homo sapiens
  Payload ID: 16342
  Gene Symbol: SLC6A16
  Gene Name: solute carrier family 6, member 16
  ENST ID: ENST00000598828
  CDS Start-End: 305-794
ggcgggaaaggccgcgcgccaggcagatcgaggggtgtcgcccaaaccgatctgtcgacgcctgaaggggcctgaggagattgctaggcttctcagctggggcttcttcaccctcatttttgtccgactggctggactgaagaacctggcagaagccttggggctagggaatgctgaaatacttttaaagctgataaacctagggaaactgcctcctgatgccaagccccctgtcaacctgctttacaacccaacctccatctacaatgcctggctcagtggccttccccagcacatcaaaagcatggttctccgcgaggtgactgagtgcaacatagagactcagtttcttaaggctagcgagggcccaaagtttgcattcctgtcctttgttgaagccatgtccttccttcctccgtctgtcttctggtcttttatcttcttcctgatgttgctggccatggggctgagcagcgcaatagggattatgcagggcatcattactccactccaggacaccttctctttcttcaggaaacatacaaagctgctcatagtgggagtctttttgctcatgttcgtgtgcggcctcttcttcactcgaccttcaggcagctacttcatcagactgctgagtgactactggatagtcttccccatcatcgtcgttgtcgtatttgaaaccatggctgtatcctgggcctatggggccaggaggttccttgcagacctgacgatcctgttgggccaccccatctctcccatctttggttggctgtggccccatctgtgtc

SEQ ID NO: 184549 - DNA, 453 bp, Homo sapiens
  Payload ID: 16342
  Gene Symbol: SLC6A16
  Gene Name: solute carrier family 6, member 16
  ENST ID: ENST00000594180
  CDS Start-End: 1-102
ttgttggttttcacatctttcaacttctgtgtcctgggcttctgggcgacagtcatcacacatcgctgctgtgagagcagagacagggtttcaccgtgttagccaggacggtctcgatcttctgacctcgtgatccgcccgcctcggcctcccaaagtgctgggattacagacgtgagccaccacgccaggcctaatctgtgcttttaaaatgctgtataatgtttcagtatatgaatataccacagtttttaaaaatccattcaactattgataacatttggagtctttccagttttatgctattaaaacaatgttgctgcaaacattcttatgcatgttcctgatgtactacatatgtgcacatttttctgggatatgagttagattgttggggcatagttgtctattcttgggtaacaaatcactctggaagtaaatggattaaaacaac

SEQ ID NO: 184550 - DNA, 410 bp, Homo sapiens
  Payload ID: 16342
  Gene Symbol: SLC6A16
  Gene Name: solute carrier family 6, member 16
  ENST ID: ENST00000594917
  CDS Start-End: 1-410
tgggtgtatggaagatcattgccccctggattggtggtgtggggtattctagcttcatggtgtgcttcatcctcggcctgtacttcaatgtggtcaattcctggatcatcttctacatgagccagtccttccagtttcccgttccatgggagaaatgtcccttaacgatgaactctagtggctttgatcctgaatgtgaacggacaacaccctccatatacttctggtaccagcaggccttgaaggcctcagacagaatcgaggatggcgggtcaccagtctacagtctggtcctgcccttctttctttgctggtgtcttgttggtgctttcatgatcaatgggctcaagtccactgggaagcagagacagggtttcaccgtgttagccaggacggtctcgatcttctga

SEQ ID NO: 184551 - DNA, 642 bp, Homo sapiens
  Payload ID: 16342
  Gene Symbol: SLC6A16
  Gene Name: solute carrier family 6, member 16
  ENST ID: ENST00000597969
  CDS Start-End: 1-442
gtacttcaatgtggtcaattcctggatcatcttctacatgagccagtccttccagtttcccgttccatgggagaaatgtcccttaacgatgaactctagtggctttgatcctgaatgtgaacggacaacaccctccatatacttctggtaccagcaggccttgaaggcctcagacagaatcgaggatggcgggtcaccagtctacagtctggtcctgcccttctttctttgctggtgtcttgttggtgctttcatgatcaatgggctcaagtccactgggaaggtaatctatgtcttggtactgctcccctgtttcatcattgtcggtttcttcatccggactctactcctggaaggggcaaaatttggccttcaacagttggtggttgccaagcagagacagggtttcaccgtgttagccaggacggtctcgatcttctgacctcgtgatccgcccgcctcggcctcccaaagtgctgggattacagacgtgagccaccacgccaggcctaatctgtgcttttaaaatgctgtataatgtttcagtatatgaatataccacagtttttaaaaatccattcaactattgataacatttggagtctttccagttttatgctattaaaacaatgttgctgcaaa

SEQ ID NO: 184552 - DNA, 1761 bp, Homo sapiens
  Payload ID: 16343
  Gene Symbol: SLC7A9
  Gene Name: solute carrier family 7 (amino acid transporter light chain, bo,+ system), member 9
  Uniprot ID: P82251
  ENST ID: ENST00000023064
  CDS Start-End: 193-1656
ccatttctagggttggaccgtgcaggcacgggcggtcagctgggccgcagctcctccggctctgcagggtcacggaggaagccagctcccctagtccaggccgagcttgcacttgcgtcttgtctgctgctgctgaaccaagatttagctgtgcgccctccttgcagtctcctggaaccagcaggaggaaacatgggggatactggcctgagaaagcggagagaggatgagaagtcgatccagagccaagagcctaagaccaccagtctccaaaaggagctgggcctcatcagtggcatctccatcatcgtgggcaccatcattggctctgggatcttcgtttcccccaagtctgtgctcagcaacacggaagctgtggggccctgcctcatcatatgggcggcttgcggggtcctcgcgacgctgggtgccctgtgctttgcggagcttggcacaatgatcaccaagtcagggggagagtatccctacctgatggaggcctacgggcccatccccgcctacctcttctcctgggccagcctgatcgtcattaagcccacgtccttcgccatcatctgcctcagcttctccgagtatgtgtgtgcgcccttctatgtgggctgcaagcctcctcaaatcgttgtgaaatgcctggccgccgccgccatcttgttcatctcgacagtgaactcactgagcgtgcggctgggaagctacgtccagaacatcttcaccgcggccaagctggtgatcgtggccatcatcatcatcagcgggctggtgctcctggcccaaggaaacacaaagaattttgataattctttcgagggcgcccagctgtctgtgggagccatcagcctggcgttttacaatggactctgggcctatgatggatggaatcaactcaattacatcacagaagaacttagaaacccttacagaaacctgcctttggccattatcatcgggatccccctggtgacggcgtgctacatcctcatgaacgtgtcctacttcaccgtgatgactgccaccgaactcctgcagtcccaggcggtggctgtgacatttggtgaccgtgttctctatcctgcttcttggatcgttccactttttgtggcattttcaaccatcggtgctgctaacgggacctgcttcacagcgggcagactcatttacgtggcgggccgggagggtcacatgctcaaagtgctttcttacatcagcgtcaggcgcctcactccagcccccgccatcatcttttatggtatcatagcaacgatttatatcatccctggtgacataaactcgttagtcaattatttcagctttgccgcatggctgttttatggcctgacgattctaggactcatcgtgatgagatttacaaggaaagagctggaaaggcctatcaaggtgcccgtagtcattcccgtcttgatgacactcatctctgtgtttttggttctggctccaatcatcagcaagcccacctgggagtacctctactgtgtgctgtttatattaagcggccttttattttacttcctgtttgtccactacaagtttggatgggctcagaaaatctcaaagccgattaccatgcaccttcagatgctaatggaagtggtcccaccggaggaagaccctgagtaacaagctccgtctcttgtagccaagtcagctgaatttattttcttaagcaatatttgtggttatttcttcctttttttcttacgaataaaatatactcagatgttt

SEQ ID NO: 184553 - DNA, 1752 bp, Homo sapiens
  Payload ID: 16343
  Gene Symbol: SLC7A9
  Gene Name: solute carrier family 7 (amino acid transporter light chain, bo,+ system), member 9
  Uniprot ID: P82251
  ENST ID: ENST00000590341
  CDS Start-End: 178-1641
ggcacgggcggtcagctgggccgcagctcctccggctctgcagggtcacggaggaaggtaagtaagccagctcccctagtccaggccgagcttgcacttgcgtcttgtctgctgctgctgaaccaagatttagctgtgcgccctccttgcagtctcctggaaccagcaggaggaaacatgggggatactggcctgagaaagcggagagaggatgagaagtcgatccagagccaagagcctaagaccaccagtctccaaaaggagctgggcctcatcagtggcatctccatcatcgtgggcaccatcattggctctgggatcttcgtttcccccaagtctgtgctcagcaacacggaagctgtggggccctgcctcatcatatgggcggcttgcggggtcctcgcgacgctgggtgccctgtgctttgcggagcttggcacaatgatcaccaagtcagggggagagtatccctacctgatggaggcctacgggcccatccccgcctacctcttctcctgggccagcctgatcgtcattaagcccacgtccttcgccatcatctgcctcagcttctccgagtatgtgtgtgcgcccttctatgtgggctgcaagcctcctcaaatcgttgtgaaatgcctggccgccgccgccatcttgttcatctcgacagtgaactcactgagcgtgcggctgggaagctacgtccagaacatcttcaccgcggccaagctggtgatcgtggccatcatcatcatcagcgggctggtgctcctggcccaaggaaacacaaagaattttgataattctttcgagggcgcccagctgtctgtgggagccatcagcctggcgttttacaatggactctgggcctatgatggatggaatcaactcaattacatcacagaagaacttagaaacccttacagaaacctgcctttggccattatcatcgggatccccctggtgacggcgtgctacatcctcatgaacgtgtcctacttcaccgtgatgactgccaccgaactcctgcagtcccaggcggtggctgtgacatttggtgaccgtgttctctatcctgcttcttggatcgttccactttttgtggcattttcaaccatcggtgctgctaacgggacctgcttcacagcgggcagactcatttacgtggcgggccgggagggtcacatgctcaaagtgctttcttacatcagcgtcaggcgcctcactccagcccccgccatcatcttttatggtatcatagcaacgatttatatcatccctggtgacataaactcgttagtcaattatttcagctttgccgcatggctgttttatggcctgacgattctaggactcatcgtgatgagatttacaaggaaagagctggaaaggcctatcaaggtgcccgtagtcattcccgtcttgatgacactcatctctgtgtttttggttctggctccaatcatcagcaagcccacctgggagtacctctactgtgtgctgtttatattaagcggccttttattttacttcctgtttgtccactacaagtttggatgggctcagaaaatctcaaagccgattaccatgcaccttcagatgctaatggaagtggtcccaccggaggaagaccctgagtaacaagctccgtctcttgtagccaagtcagctgaatttattttcttaagcaatatttgtggttatttcttcctttttttcttacgaataaaatatactcagatgtttaaaata

SEQ ID NO: 184554 - DNA, 1030 bp, Homo sapiens
  Payload ID: 16343
  Gene Symbol: SLC7A9
  Gene Name: solute carrier family 7 (amino acid transporter light chain, bo,+ system), member 9
  ENST ID: ENST00000592232
  CDS Start-End: 6-125
gaaacatgggggatactggcctgagaaagcggagagaggatgagaagtcgatccagagccaagagcctaagaccaccagtctccaaaaggaggtgccctgtgctttgcggagcttggcacaatgatcaccaagtcagggggagagtatccctacctgatggaggcctacgggcccatccccgcctacctcttctcctgggccagcctgatcgtcattaagcccacgtccttcgccatcatctgcctcagcttctccgagtatgtgtgtgcgcccttctatgtgggctgcaagcctcctcaaatcgttgtgaaatgcctggccgccgccgccatctgaatcaactcaattacatcacagaagaacttagaaacccttacagaaacctgcctttggccattatcatcgggatccccctggtgacggcgtgctacatcctcatgaacgtgtcctacttcaccgtgatgactgccaccgaactcctgcagtcccaggcggtggctgtgacatttggtgaccgtgttctctatcctgcttcttggatcgttccactttttgtggcattttcaaccatcggtgctgctaacgggacctgcttcacagcgggcagggtatcatagcaacgatttatatcatccctggtgacataaactcgttagtcaattatttcagctttgccgcatggctgttttatggcctgacgattctaggactcatcgtgatgagatttacaaggaaagagctggaaaggcctatcaaggtgcccgtagtcattcccgtcttgatgacactcatctctgtgtttttggttctggctccaatcatcagcaagcccacctgggagtacctctactgtgtgctgtttatattaagcggccttttattttacttcctgtttgtccactacaagtttggatgggctcagaaaatctcaaagccgattaccatgcaccttcagatgctaatggaagtggtcccaccggaggaagaccctgagtaacaagctccgtctcttgtagccaagtcagctga

SEQ ID NO: 184555 - DNA, 1998 bp, Homo sapiens
  Payload ID: 16343
  Gene Symbol: SLC7A9
  Gene Name: solute carrier family 7 (amino acid transporter light chain, bo,+ system), member 9
  ENST ID: ENST00000590465
  CDS Start-End: 163-282
ggcggtcagctgggccgcagctcctccggctctgcagggtcacggaggaagccagctcccctagtccaggccgagcttgcacttgcgtcttgtctgctgctgctgaaccaagatttagctgtgcgccctccttgcagtctcctggaaccagcaggaggaaacatgggggatactggcctgagaaagcggagagaggatgagaagtcgatccagagccaagagcctaagaccaccagtctccaaaaggaggtgccctgtgctttgcggagcttggcacaatgatcaccaagtcagggggagagtatccctacctgatggaggcctacgggcccatccccgcctacctcttctcctgggccagcctgatcgtcattaagcccacgtccttcgccatcatctgcctcagcttctccgagtatgtgtgtgcgcccttctatgtgggctgcaagcctcctcaaatcgttgtgaaatgcctggccgccgccgccatctgaatcaactcaattacatcacagaagaacttagaaacccttacaggtaacagctgaatcagtgcagaggacagtagccgggcagcctgatttctcttctcctggtgaaggctggagctatttccctgggtattccatgatgcccttcccgacagtgaattatttctttttttttttttttgagacagagtcttgctctgttgcctaggctggagtgcagtggtgcaatctcagctcactcatttttgtatttttttagtagagatgagattttgccatgttggccaggctggtcttgaactcccaacctcaagagattcgcccatctcggcctcccaaagtgctgggattacaggtgtgagccactgcacccggccagcgaatggtttcttatgagctcactatgcacgcttagagtttggtttggtttgggacagagcagtggctcctaagggagggaagagcttggtcttcctttatctctggcttattttgctttataaacagttccatgtgaactgctctggagtctgagagaggcagcattctcatttgaaaatgtcttatgttcctgctgggcctctgctacctgcgaatcttctccctgggagggcctcagggagggcgtccatcttccgcgggaggctgtggtctgaacgtgggtctccgtgtcattgcccctcccagaaacctgcctttggccattatcatcgggatccccctggtgacggcgtgctacatcctcatgaacgtgtcctacttcaccgtgatgactgccaccgaactcctgcagtcccaggcggtggctgtgacatttggtgaccgtgttctctatcctgcttcttggatcgttccactttttgtggcattttcaaccatcggtgctgctaacgggacctgcttcacagcgggcagactcatttacgtggcgggccgggagggtcacatgctcaaagtgctttcttacatcagcgtcaggcgcctcactccagcccccgccatcatcttttatggtatcatagcaacgatttatatcatccctggtgacataaactcgttagtcaattatttcagctttgccgcatggctgttttatggcctgacgattctaggactcatcgtgatgagatttacaaggaaagagctggaaaggcctatcaaggtgcccgtagtcattcccgtcttgatgacactcatctctgtgtttttggttctggctccaatcatcagcaagcccacctgggagtacctctactgtgtgctgtttatattaagcggccttttattttacttcctgtttgtccactacaagtttggatgggctcagaaaatctcaaagccgattaccatgcaccttcagatgctaatggaagtggtcccaccggaggaagaccctgagtaacaagctccgtctcttgtagccaagtcagctgaatttattttcttaagcaatatttgtggttatttcttcctttttttcttacgaataaaatatactcagatgttt

SEQ ID NO: 184556 - DNA, 1568 bp, Homo sapiens
  Payload ID: 16343
  Gene Symbol: SLC7A9
  Gene Name: solute carrier family 7 (amino acid transporter light chain, bo,+ system), member 9
  Uniprot ID: P82251
  ENST ID: ENST00000587772
  CDS Start-End: 105-1568
atttctagggttggaccgtgcaggcacgggcggtcagctgggccgcagctcctccggctctgcagggtcacggaggaagtctcctggaaccagcaggaggaaacatgggggatactggcctgagaaagcggagagaggatgagaagtcgatccagagccaagagcctaagaccaccagtctccaaaaggagctgggcctcatcagtggcatctccatcatcgtgggcaccatcattggctctgggatcttcgtttcccccaagtctgtgctcagcaacacggaagctgtggggccctgcctcatcatatgggcggcttgcggggtcctcgcgacgctgggtgccctgtgctttgcggagcttggcacaatgatcaccaagtcagggggagagtatccctacctgatggaggcctacgggcccatccccgcctacctcttctcctgggccagcctgatcgtcattaagcccacgtccttcgccatcatctgcctcagcttctccgagtatgtgtgtgcgcccttctatgtgggctgcaagcctcctcaaatcgttgtgaaatgcctggccgccgccgccatcttgttcatctcgacagtgaactcactgagcgtgcggctgggaagctacgtccagaacatcttcaccgcggccaagctggtgatcgtggccatcatcatcatcagcgggctggtgctcctggcccaaggaaacacaaagaattttgataattctttcgagggcgcccagctgtctgtgggagccatcagcctggcgttttacaatggactctgggcctatgatggatggaatcaactcaattacatcacagaagaacttagaaacccttacagaaacctgcctttggccattatcatcgggatccccctggtgacggcgtgctacatcctcatgaacgtgtcctacttcaccgtgatgactgccaccgaactcctgcagtcccaggcggtggctgtgacatttggtgaccgtgttctctatcctgcttcttggatcgttccactttttgtggcattttcaaccatcggtgctgctaacgggacctgcttcacagcgggcagactcatttacgtggcgggccgggagggtcacatgctcaaagtgctttcttacatcagcgtcaggcgcctcactccagcccccgccatcatcttttatggtatcatagcaacgatttatatcatccctggtgacataaactcgttagtcaattatttcagctttgccgcatggctgttttatggcctgacgattctaggactcatcgtgatgagatttacaaggaaagagctggaaaggcctatcaaggtgcccgtagtcattcccgtcttgatgacactcatctctgtgtttttggttctggctccaatcatcagcaagcccacctgggagtacctctactgtgtgctgtttatattaagcggccttttattttacttcctgtttgtccactacaagtttggatgggctcagaaaatctcaaagccgattaccatgcaccttcagatgctaatggaagtggtcccaccggaggaagaccctgagtaa

SEQ ID NO: 184557 - DNA, 4537 bp, Homo sapiens
  Payload ID: 16344
  Gene Symbol: SLC7A5
  Gene Name: solute carrier family 7 (amino acid transporter light chain, L system), member 5
  Uniprot ID: Q01650
  ENST ID: ENST00000261622
  CDS Start-End: 67-1590
gcggcgcgcacactgctcgctgggccgcggctcccgggtgtcccaggcccggccggtgcgcagagcatggcgggtgcgggcccgaagcggcgcgcgctagcggcgccggcggccgaggagaaggaagaggcgcgggagaagatgctggccgccaagagcgcggacggctcggcgccggcaggcgagggcgagggcgtgaccctgcagcggaacatcacgctgctcaacggcgtggccatcatcgtggggaccattatcggctcgggcatcttcgtgacgcccacgggcgtgctcaaggaggcaggctcgccggggctggcgctggtggtgtgggccgcgtgcggcgtcttctccatcgtgggcgcgctctgctacgcggagctcggcaccaccatctccaaatcgggcggcgactacgcctacatgctggaggtctacggctcgctgcccgccttcctcaagctctggatcgagctgctcatcatccggccttcatcgcagtacatcgtggccctggtcttcgccacctacctgctcaagccgctcttccccacctgcccggtgcccgaggaggcagccaagctcgtggcctgcctctgcgtgctgctgctcacggccgtgaactgctacagcgtgaaggccgccacccgggtccaggatgcctttgccgccgccaagctcctggccctggccctgatcatcctgctgggcttcgtccagatcgggaagggtgatgtgtccaatctagatcccaacttctcatttgaaggcaccaaactggatgtggggaacattgtgctggcattatacagcggcctctttgcctatggaggatggaattacttgaatttcgtcacagaggaaatgatcaacccctacagaaacctgcccctggccatcatcatctccctgcccatcgtgacgctggtgtacgtgctgaccaacctggcctacttcaccaccctgtccaccgagcagatgctgtcgtccgaggccgtggccgtggacttcgggaactatcacctgggcgtcatgtcctggatcatccccgtcttcgtgggcctgtcctgcttcggctccgtcaatgggtccctgttcacatcctccaggctcttcttcgtggggtcccgggaaggccacctgccctccatcctctccatgatccacccacagctcctcacccccgtgccgtccctcgtgttcacgtgtgtgatgacgctgctctacgccttctccaaggacatcttctccgtcatcaacttcttcagcttcttcaactggctctgcgtggccctggccatcatcggcatgatctggctgcgccacagaaagcctgagcttgagcggcccatcaaggtgaacctggccctgcctgtgttcttcatcctggcctgcctcttcctgatcgccgtctccttctggaagacacccgtggagtgtggcatcggcttcaccatcatcctcagcgggctgcccgtctacttcttcggggtctggtggaaaaacaagcccaagtggctcctccagggcatcttctccacgaccgtcctgtgtcagaagctcatgcaggtggtcccccaggagacatagccaggaggccgagtggctgccggaggagcatgcgcagaggccagttaaagtagatcacctcctcgaacccactccggttccccgcaacccacagctcagctgcccatcccagtccctcgccgtccctcccaggtcgggcagtggaggctgctgtgaaaactctggtacgaatctcatccctcaactgagggccagggacccaggtgtgcctgtgctcctgcccaggagcagcttttggtctccttgggccctttttcccttccctcctttgtttacttatatatatattttttttaaacttaaattttgggtcaacttgacaccactaagatgattttttaaggagctgggggaaggcaggagccttcctttctcctgccccaagggcccagaccctgggcaaacagagctactgagacttggaacctcattgctaccacagacttgcactgaagccggacagctgcccagacacatgggcttgtgacattcgtgaaaaccaaccctgtgggcttatgtctctgccttagggtttgcagagtggaaactcagccgtagggtggcactgggagggggtgggggatctgggcaaggtgggtgattcctcccaggaggtgcttgaggccccgatggactcctgaccataatcctagccccgagacaccatcctgagccagggaacagccccagggttggggggtgccggcatctcccctagctcaccaggcctggcctctgggcagtgtggcctcttggctatttctgtgtccagttttggaggctgagttctggttcatgcagacaaagccctgtccttcagtcttctagaaacagagacaagaaaggcagacacaccgcggccaggcacccatgtgggcgcccaccctgggctccacacagcagtgtcccctgccccagaggtcgcagctaccctcagcctccaatgcattggcctctgtaccgcccggcagccccttctggccggtgctgggttcccactcccggcctaggcacctccccgctctccctgtcacgctcatgtcctgtcctggtcctgatgcccgttgtctaggagacagagccaagcactgctcacgtctctgccgcctgcgtttggaggcccctgggctctcacccagtccccacccgcctgcagagagggaactagggcaccccttgtttctgttgttcccgtgaatttttttcgctatgggaggcagccgaggcctggccaatgcggcccactttcctgagctgtcgctgcctccatggcagcagccagggacccccagaacaagaagaccccgcaggatccctcctgagctcggggggctctgccttctcaggccccgggcttcccttctccccagccagaggtggagccaagtggtccagcgtcactccagtgctcagctgtggctggaggagctggcctgtggcacagccctgagtgtcccaagccgggagccaacgaagccggacacggcttcactgaccagcggctgctcaagccgcaagctctcagcaagtgcccagtggagcctgccgcccccgcctgggcaccgggaccccctcaccatccagtgggcccggagaaacctgatgaacagtttggggactcaggaccagatgtccgtctctcttgcttgaggaatgaagacctttattcacccctgccccgttgcttcccgctgcacatggacagacttcacagcgtctgctcataggacctgcatccttcctggggacgaattccactcgtccaagggacagcccacggtctggaggccgaggaccaccagcaggcaggtggactgactgtgttgggcaagacctcttccctctgggcctgttctcttggctgcaaataaggacagcagctggtgccccacctgcctggtgcattgctgtgtgaatccaggaggcagtggacatcgtaggcagccacggccccgggtccaggagaagtgctccctggaggcacgcaccactgcttcccactggggccggcggggcccacgcacgacgtcagcctcttaccttcccgcctcggctaggggtcctcgggatgccgttctgttccaacctcctgctctgggacgtggacatgcctcaaggatacagggagccggcggcctctcgacggcacgcacttgcctgttggctgctgcggctgtgggcgagcatgggggctgccagcgtctgttgtggaaagtagctgctagtgaaatggctggggccgctggggtccgtcttcacactgcgcaggtctcttctgggcgtctgagctggggtgggagctcctccgcagaaggttggtggggggtccagtctgtgatccttggtgctgtgtgccccactccagcctggggaccccacttcagaaggtaggggccgtgtcccgcggtgctgactgaggcctgcttccccctccccctcctgctgtgctggaattccacagggaccagggccaccgcaggggactgtctcagaagacttgatttttccgtccctttttctccacactccactgacaaacgtccccagcggtttccacttgtgggcttcaggtgttttcaagcacaacccaccacaacaagcaagtgcattttcagtcgttgtgcttttttgttttgtgctaacgtcttactaatttaaagatgctgtcggcaccatgtttatttatttccagtggtcatgctcagccttgctgctctgcgtggcgcaggtgccatgcctgctccctgtctgtgtcccagccacgcagggccatccactgtgacgtcggccgaccaggctggacaccctctgccgagtaatgacgtgtgtggctgggaccttctttattctgtgttaatggctaacctgttacactgggctgggttgggtagggtgttctggcttttttgtggggtttttatttttaaagaaacactcaatcatccta

SEQ ID NO: 184558 - DNA, 3983 bp, Homo sapiens
  Payload ID: 16344
  Gene Symbol: SLC7A5
  Gene Name: solute carrier family 7 (amino acid transporter light chain, L system), member 5
  ENST ID: ENST00000565644
  CDS Start-End: 311-1036
gtcctttcacgcgtgtcttcgtgttggtgcgcttttcactggtcataaagtgctgctcacggccgtgaactgctacagcgtgaaggccgccacccgggtccaggatgcctttgccgccgccaagctcctggccctggccctgatcatcctgctgggcttcgtccagatcgggaagggtgatgtgtccaatctagatcccaacttctcatttgaaggcaccaaactggatgtggggaacattgtgctggcattatacagcggcctctttgcctatggaggatggaattacttgaatttcgtcacagaggaaatgatcaacccctacagaaacctgcccctggccatcatcatctccctgcccatcgtgacgctggtgtacgtgctgaccaacctggcctacttcaccaccctgtccaccgagcagatgctgtcgtccgaggccgtggccgtggacttcgggaactatcacctgggcgtcatgtcctggatcatccccgtcttcgtgggcctgtcctgcttcggctccgtcaatgggtccctgttcacatcctccaggctcttcttcgtggggtcccgggaaggccacctgccctccatcctctccatgatccacccacagctcctcacccccgtgccgtccctcgtgttcacgtgtgtgatgacgctgctctacgccttctccaaggacatcttctccgtcatcaacttcttcagcttcttcaactggctctgcgtggccctggccatcatcggcatgatctggctgcgccacagaaagcctgagcttgagcggcccatcaaggtgaacctggccctgcctgtgttcttcatcctggcctgcctcttcctgatcgccgtctccttctggaagacacccgtggagtgtggcatcggcttcaccatcatcctcagcgggctgcccgtctacttcttcggggtctggtggaaaaacaagcccaagtggctcctccagggcatcttctccacgaccgtcctgtgtcagaagctcatgcaggtggtcccccaggagacatagccaggaggccgagtggctgccggaggagcatgcgcagaggccagttaaagtagatcacctcctcgaacccactccggttccccgcaacccacagctcagctgcccatcccagtccctcgccgtccctcccaggtcgggcagtggaggctgctgtgaaaactctggtacgaatctcatccctcaactgagggccagggacccaggtgtgcctgtgctcctgcccaggagcagcttttggtctccttgggccctttttcccttccctcctttgtttacttatatatatattttttttaaacttaaattttgggtcaacttgacaccactaagatgattttttaaggagctgggggaaggcaggagccttcctttctcctgccccaagggcccagaccctgggcaaacagagctactgagacttggaacctcattgctaccacagacttgcactgaagccggacagctgcccagacacatgggcttgtgacattcgtgaaaaccaaccctgtgggcttatgtctctgccttagggtttgcagagtggaaactcagccgtagggtggcactgggagggggtgggggatctgggcaaggtgggtgattcctcccaggaggtgcttgaggccccgatggactcctgaccataatcctagccccgagacaccatcctgagccagggaacagccccagggttggggggtgccggcatctcccctagctcaccaggcctggcctctgggcagtgtggcctcttggctatttctgtgtccagttttggaggctgagttctggttcatgcagacaaagccctgtccttcagtcttctagaaacagagacaagaaaggcagacacaccgcggccaggcacccatgtgggcgcccaccctgggctccacacagcagtgtcccctgccccagaggtcgcagctaccctcagcctccaatgcattggcctctgtaccgcccggcagccccttctggccggtgctgggttcccactcccggcctaggcacctccccgctctccctgtcacgctcatgtcctgtcctggtcctgatgcccgttgtctaggagacagagccaagcactgctcacgtctctgccgcctgcgtttggaggcccctgggctctcacccagtccccacccgcctgcagagagggaactagggcaccccttgtttctgttgttcccgtgaatttttttcgctatgggaggcagccgaggcctggccaatgcggcccactttcctgagctgtcgctgcctccatggcagcagccagggacccccagaacaagaagaccccgcaggatccctcctgagctcggggggctctgccttctcaggccccgggcttcccttctccccagccagaggtggagccaagtggtccagcgtcactccagtgctcagctgtggctggaggagctggcctgtggcacagccctgagtgtcccaagccgggagccaacgaagccggacacggcttcactgaccagcggctgctcaagccgcaagctctcagcaagtgcccagtggagcctgccgcccccgcctgggcaccgggaccccctcaccatccagtgggcccggagaaacctgatgaacagtttggggactcaggaccagatgtccgtctctcttgcttgaggaatgaagacctttattcacccctgccccgttgcttcccgctgcacatggacagacttcacagcgtctgctcataggacctgcatccttcctggggacgaattccactcgtccaagggacagcccacggtctggaggccgaggaccaccagcaggcaggtggactgactgtgttgggcaagacctcttccctctgggcctgttctcttggctgcaaataaggacagcagctggtgccccacctgcctggtgcattgctgtgtgaatccaggaggcagtggacatcgtaggcagccacggccccgggtccaggagaagtgctccctggaggcacgcaccactgcttcccactggggccggcggggcccacgcacgacgtcagcctcttaccttcccgcctcggctaggggtcctcgggatgccgttctgttccaacctcctgctctgggacgtggacatgcctcaaggatacagggagccggcggcctctcgacggcacgcacttgcctgttggctgctgcggctgtgggcgagcatgggggctgccagcgtctgttgtggaaagtagctgctagtgaaatggctggggccgctggggtccgtcttcacactgcgcaggtctcttctgggcgtctgagctggggtgggagctcctccgcagaaggttggtggggggtccagtctgtgatccttggtgctgtgtgccccactccagcctggggaccccacttcagaaggtaggggccgtgtcccgcggtgctgactgaggcctgcttccccctccccctcctgctgtgctggaattccacagggaccagggccaccgcaggggactgtctcagaagacttgatttttccgtccctttttctccacactccactgacaaacgtccccagcggtttccacttgtgggcttcaggtgttttcaagcacaacccaccacaacaagcaagtgcattttcagtcgttgtgcttttttgttttgtgctaacgtcttactaatttaaagatgctgtcggcaccatgtttatttatttccagtggtcatgctcagccttgctgctctgcgtggcgcaggtgccatgcctgctccctgtctgtgtcccagccacgcagggccatccactgtgacgtcggccgaccaggctggacaccctctgccgagtaatgacgtgtgtggctgggaccttctttattctgtgttaatggctaacctgttacactgggctgggttgggtagggtgttctggcttttttgtggggtttttatttttaaagaaacactcaatcatccta

SEQ ID NO: 184559 - DNA, 4216 bp, Homo sapiens
  Payload ID: 16345
  Gene Symbol: SLC7A8
  Gene Name: solute carrier family 7 (amino acid transporter light chain, L system), member 8
  Uniprot ID: Q9UHI5
  ENST ID: ENST00000316902
  CDS Start-End: 727-2334
tcccgaaaccagagggatggggccggctgtgcagtagaacggggatcgaaaagaggaaaacaagggcacgaagaccagcgagaaagaagaggacacctgggaaaggcggaagcagaagacggggaagggaaaagaaacccaaagcaggtggaaaccagatctagagcaacaccgtcaggttcacagtttgtttttctagaagagaagaaagtacctgaggattgctcttttttcctaccgttaatgaaaactacttttgtcttcatcataaaagaaaaaactaaggggaggtaaaggcagtctcctgttttattagggggagaggtgaagggaaatccaggctcactttctgaataagccactgcctggtgcacagagcagaaccatcctggtttctgaagacacatccctttcagcagaattccagccggagtcgctggcacagttctatttttatatttaaatgtatgtctcccctggcctttttttttttttttttttttagcaacacttttcttgtttgtaaacgcgagtgaccagaaagtgtgaatgcggagtaggaatatttttcgtgttctcttttatctgcttgccttttttagagagtagcagtggttcctatttcggaaaaggacgttctaattcaaagctctctcccaatatatttacacgaatacgcatttagaaagggaggcagcttttgaggttgcaatcctactgagaaggatggaagaaggagccaggcaccgaaacaacaccgaaaagaaacacccaggtgggggcgagtcggacgccagccccgaggctggttccggagggggcggagtagccctgaagaaagagatcggattggtcagtgcctgtggtatcatcgtagggaacatcatcggctctggaatctttgtctcgccaaagggagtgctggagaatgctggttctgtgggccttgctctcatcgtctggattgtgacgggcttcatcacagttgtgggagccctctgctatgctgaactcggggtcaccatccccaaatctggaggtgactactcctatgtcaaggacatcttcggaggactggctgggttcctgaggctgtggattgctgtgctggtgatctaccccaccaaccaggctgtcatcgccctcaccttctccaactacgtgctgcagccgctcttccccacctgcttccccccagagtctggccttcggctcctggctgccatctgcttattgctcctcacatgggtcaactgttccagtgtgcggtgggccacccgggttcaagacatcttcacagctgggaagctcctggccttggccctgattatcatcatggggattgtacagatatgcaaaggagagtacttctggctggagccaaagaatgcatttgagaatttccaggaacctgacatcggcctcgtcgcactggctttccttcagggctcctttgcctatggaggctggaactttctgaattacgtgactgaggagcttgttgatccctacaagaaccttcccagagccatcttcatctccatcccactggtcacatttgtgtatgtctttgccaatgtcgcttatgtcactgcaatgtccccccaggagctgctggcatccaacgccgtcgctgtgacttttggagagaagctcctaggagtcatggcctggatcatgcccatttctgttgccctgtccacatttggaggagttaatgggtctctcttcacctcctctcggctgttcttcgctggagcccgagagggccaccttcccagtgtgttggccatgatccacgtgaagcgctgcaccccaatcccagccctgctcttcacatgcatctccaccctgctgatgctggtcaccagcgacatgtacacactcatcaactatgtgggcttcatcaactacctcttctatggggtcacggttgctggacagatagtccttcgctggaagaagcctgatatcccccgccccatcaagatcaacctgctgttccccatcatctacttgctgttctgggccttcctgctggtcttcagcctgtggtcagagccggtggtgtgtggcattggcctggccatcatgctgacaggagtgcctgtctatttcctgggtgtttactggcaacacaagcccaagtgtttcagtgacttcattgagctgctaaccctggtgagccagaagatgtgtgtggtcgtgtaccccgaggtggagcggggctcagggacagaggaggctaatgaggacatggaggagcagcagcagcccatgtaccaacccactcccacgaaggacaaggacgtggcggggcagccccagccctgaggaccaccattccctggctactctctccttcctcccccttttatcctacctccctgccttggtcctgccaacacatgcgagtacacacacacccctctctctgcttttgtcaggcagtggtaggactttggtgtgggtggtgagaaattgtaaacaaaaactgacattcatacccaaagaaccagcctctcaccccagggtccatgtcccaggccccactccagtgctgcccacactcccagctgctggaggagaggggagatgccaaggtgccctgcaggacctccctccgggccacaccctcagctgcctcttcaggaaccggagctcattactgccttccctcccagggaggccccttcagagaggagaggccacaggagctgcattgtggggggacaggctcaagcaattctgtccccatcaaggggtcagctggagagacccaagaccctatctgttcaccagggacccaaaatccaaggggatgcttccctctgccctctttcctgcccctccccatcatacctgcacccaccccagccagggctccctgtccagaattcggttctcctcaggacgccaactcccagagctaaggaccaaggagaagaacagcctctccacccccaagccaggcggttgaggaacatattgagaaaggttcagattgcagaaacccagccctgcccctgcctcctgcatccagcccccaacatggtgccaaagcttccagaagccaaaaagcttctgatttttaaggtagtgggcatctctctcctaatgacgaagctgctcagcaactccacctgcccgccgcaggaaggagcagtcccctgctatccctgcagccactcccagcacacccgcacacagccagcaccaccgcccccaccgtgcacttctcctctctgggccttggcttgggaccaggtacgaaggatccccaagcccttcaggcctgagatcagagccagatcagccttaagtcacctcccatccaagaacttggcctaaaaatactcccctatttctaaccctcaggacggatctgatattaaatgccttccctgggaggaagggtgctttccccctccctagaggtgcccattccataccctgggagactgaggagagcattggctgaagcccagttcctttcccatccatccccaactccaataatcccccactcctcgcaggtctcagtgtcatgctgtcttggggcagggtgaaagggtagtggcagcagggcgcccactctggagatcctcaaaaaaggccctcctctgtggctggcagcctctgacctttccctgggcttcaaaggaaggctatggagtttgctgtgggccctgcaaccttcccagccactcctgctgcactaaggacttaggatccttttatcacaaatcgggattctctcccccaccccgaattctgtctgcttaaactggaatacacaggagcccttcctggcctggatggtgtctcccagcttccccgcccagcttgcccaccccatagttggtgagatgccaagtttggtctgagttgtgaccccttcagagtagatgcccggcaggctggggttggcccctggagggtcaggggaccatcttcttattccctcttttctcattcctccaacttcctcccctccttcaattatttttttgtaaagttgatgccttactttttggataaatatttttgaagctggtatttctatttcttttggattttttttaatgtaaggttgttttgggggatggagttagaaccttaatgataatttctttcgtttggtgtaggttttagagatttgttttgtggagaggtttttttcttttgatgtaataaaatttaaaatggaaatgaa

SEQ ID NO: 184560 - DNA, 3066 bp, Homo sapiens
  Payload ID: 16345
  Gene Symbol: SLC7A8
  Gene Name: solute carrier family 7 (amino acid transporter light chain, L system), member 8
  ENST ID: ENST00000339733
  CDS Start-End: 1-692
tgtgcctccaggagcactcacagccctcacagcttctctgcaccctcctcctctgctggtgtgtccttggaagagagaggcccttccggaaggctcagagcacctcctctcctttggagggggttccgagatttctaaaacgtttgctcctcacatgggtcaactgttccagtgtgcggtgggccacccgggttcaagacatcttcacagctgggaagctcctggccttggccctgattatcatcatggggattgtacagatatgcaaaggagagtacttctggctggagccaaagaatgcatttgagaatttccaggaacctgacatcggcctcgtcgcactggctttccttcagggctcctttgcctatggaggctggaactttctgaattacgtgactgaggagcttgttgatccctacaagctgttcttcgctggagcccgagagggccaccttcccagtgtgttggccatgatccacgtgaagcgctgcaccccaatcccagccctgctcttcacatgcatctccaccctgctgatgctggtcaccagcgacatgtacacactcatcaactatgtgggcttcatcaactacctcttctatggggtcacggttgctggacagatagtccttcgctggaagaagcctgatatcccccgccccatcaagcccctgccctaccaggggtgagtgtgggaccacagagccgagggaagcccagcctttgcccttgaggatgtgtctctgtgggtgaagaagagagagaatgccccagtccctagtcctgggggccacgtggcctacacagttcatacgcctcatgcctctgctccacagatcaacctgctgttccccatcatctacttgctgttctgggccttcctgctggtcttcagcctgtggtcagagccggtggtgtgtggcattggcctggccatcatgctgacaggagtgcctgtctatttcctgggtgtttactggcaacacaagcccaagtgtttcagtgacttcattgagctgctaaccctggtgagccagaagatgtgtgtggtcgtgtaccccgaggtggagcggggctcagggacagaggaggctaatgaggacatggaggagcagcagcagcccatgtaccaacccactcccacgaaggacaaggacgtggcggggcagccccagccctgaggaccaccattccctggctactctctccttcctcccccttttatcctacctccctgccttggtcctgccaacacatgcgagtacacacacacccctctctctgcttttgtcaggcagtggtaggactttggtgtgggtggtgagaaattgtaaacaaaaactgacattcatacccaaagaaccagcctctcaccccagggtccatgtcccaggccccactccagtgctgcccacactcccagctgctggaggagaggggagatgccaaggtgccctgcaggacctccctccgggccacaccctcagctgcctcttcaggaaccggagctcattactgccttccctcccagggaggccccttcagagaggagaggccacaggagctgcattgtggggggacaggctcaagcaattctgtccccatcaaggggtcagctggagagacccaagaccctatctgttcaccagggacccaaaatccaaggggatgcttccctctgccctctttcctgcccctccccatcatacctgcacccaccccagccagggctccctgtccagaattcggttctcctcaggacgccaactcccagagctaaggaccaaggagaagaacagcctctccacccccaagccaggcggttgaggaacatattgagaaaggttcagattgcagaaacccagccctgcccctgcctcctgcatccagcccccaacatggtgccaaagcttccagaagccaaaaagcttctgatttttaaggtagtgggcatctctctcctaatgacgaagctgctcagcaactccacctgcccgccgcaggaaggagcagtcccctgctatccctgcagccactcccagcacacccgcacacagccagcaccaccgcccccaccgtgcacttctcctctctgggccttggcttgggaccaggtacgaaggatccccaagcccttcaggcctgagatcagagccagatcagccttaagtcacctcccatccaagaacttggcctaaaaatactcccctatttctaaccctcaggacggatctgatattaaatgccttccctgggaggaagggtgctttccccctccctagaggtgcccattccataccctgggagactgaggagagcattggctgaagcccagttcctttcccatccatccccaactccaataatcccccactcctcgcaggtctcagtgtcatgctgtcttggggcagggtgaaagggtagtggcagcagggcgcccactctggagatcctcaaaaaaggccctcctctgtggctggcagcctctgacctttccctgggcttcaaaggaaggctatggagtttgctgtgggccctgcaaccttcccagccactcctgctgcactaaggacttaggatccttttatcacaaatcgggattctctcccccaccccgaattctgtctgcttaaactggaatacacaggagcccttcctggcctggatggtgtctcccagcttccccgcccagcttgcccaccccatagttggtgagatgccaagtttggtctgagttgtgaccccttcagagtagatgcccggcaggctggggttggcccctggagggtcaggggaccatcttcttattccctcttttctcattcctccaacttcctcccctccttcaattatttttttgtaaagttgatgccttactttttggataaatatttttgaagctggtatttctatttcttttggattttttttaatgtaaggttgttttgggggatggagttagaaccttaatgataatttctttcgtttggtgtaggttttagagatttgttttgtggagaggtttttttcttttgatgtaataaaatttaaaatggaaatgaa

SEQ ID NO: 184561 - DNA, 1752 bp, Homo sapiens
  Payload ID: 16345
  Gene Symbol: SLC7A8
  Gene Name: solute carrier family 7 (amino acid transporter light chain, L system), member 8
  Uniprot ID: Q9UHI5
  ENST ID: ENST00000453702
  CDS Start-End: 245-1243
caacctccagcctgggcacccagacccagagggctgctgggagggacatgcctcaccccttttgctccagctggaggggagggagtctgtgggagctggccagagcgtggcagaaggcagagaagtgaacgccccagcaaaagtgctcctcacatgggtcaactgttccagtgtgcggtgggccacccgggttcaagacatcttcacagctgggaagctcctggccttggccctgattatcatcatggggattgtacagatatgcaaaggagagtacttctggctggagccaaagaatgcatttgagaatttccaggaacctgacatcggcctcgtcgcactggctttccttcagggctcctttgcctatggaggctggaactttctgaattacgtgactgaggagcttgttgatccctacaagaaccttcccagagccatcttcatctccatcccactggtcacatttgtgtatgtctttgccaatgtcgcttatgtcactgcaatgtccccccaggagctgctggcatccaacgccgtcgctgtgacttttggagagaagctcctaggagtcatggcctggatcatgcccatttctgttgccctgtccacatttggaggagttaatgggtctctcttcacctcctctcggctgttcttcgctggagcccgagagggccaccttcccagtgtgttggccatgatccacgtgaagcgctgcaccccaatcccagccctgctcttcacatgcatctccaccctgctgatgctggtcaccagcgacatgtacacactcatcaactatgtgggcttcatcaactacctcttctatggggtcacggttgctggacagatagtccttcgctggaagaagcctgatatcccccgccccatcaagatcaacctgctgttccccatcatctacttgctgttctgggccttcctgctggtcttcagcctgtggtcagagccggtggtgtgtggcattggcctggccatcatgctgacaggagtgcctgtctatttcctgggtgtttactggcaacacaagcccaagtgtttcagtgacttcattgagctgctaaccctggtgagccagaagatgtgtgtggtcgtgtaccccgaggtggagcggggctcagggacagaggaggctaatgaggacatggaggagcagcagcagcccatgtaccaacccactcccacgaaggacaaggacgtggcggggcagccccagccctgaggaccaccattccctggctactctctccttcctcccccttttatcctacctccctgccttggtcctgccaacacatgcgagtacacacacacccctctctctgcttttgtcaggcagtggtaggactttggtgtgggtggtgagaaattgtaaacaaaaactgacattcatacccaaagaaccagcctctcaccccagggtccatgtcccaggccccactccagtgctgcccacactcccagctgctggaggagaggggagatgccaaggtgccctgcaggacctccctccgggccacaccctcagctgcctcttcaggaaccggagctcattactgccttccctcccagggaggccccttcagagaggagaggccacaggagctgcattgtggggggacaggctcaagcaattctgtccccatcaaggggtcagctggagagacccaagaccctatctgttcaccagggacccaaaatccaaggggatgcttccctctgccctctttc

SEQ ID NO: 184562 - DNA, 3018 bp, Homo sapiens
  Payload ID: 16345
  Gene Symbol: SLC7A8
  Gene Name: solute carrier family 7 (amino acid transporter light chain, L system), member 8
  Uniprot ID: Q9UHI5
  ENST ID: ENST00000422941
  CDS Start-End: 203-1138
gtagccacacccacgcccccacaggcccggcttccctgcccagcggctccaacctccagcctgggcacccagacccagagggctgctgggagggacatgcctcaccccttttgctccagctggaggggagggagtctgtgggagctggccagagcgtggcagaaggcagagaagtgaacgccccagcaaaagtgctcctcacatgggtcaactgttccagtgtgcggtgggccacccgggttcaagacatcttcacagctgggaagctcctggccttggccctgattatcatcatggggattgtacagatatgcaaaggaaccttcccagagccatcttcatctccatcccactggtcacatttgtgtatgtctttgccaatgtcgcttatgtcactgcaatgtccccccaggagctgctggcatccaacgccgtcgctgtgacttttggagagaagctcctaggagtcatggcctggatcatgcccatttctgttgccctgtccacatttggaggagttaatgggtctctcttcacctcctctcggctgttcttcgctggagcccgagagggccaccttcccagtgtgttggccatgatccacgtgaagcgctgcaccccaatcccagccctgctcttcacatgcatctccaccctgctgatgctggtcaccagcgacatgtacacactcatcaactatgtgggcttcatcaactacctcttctatggggtcacggttgctggacagatagtccttcgctggaagaagcctgatatcccccgccccatcaagatcaacctgctgttccccatcatctacttgctgttctgggccttcctgctggtcttcagcctgtggtcagagccggtggtgtgtggcattggcctggccatcatgctgacaggagtgcctgtctatttcctgggtgtttactggcaacacaagcccaagtgtttcagtgacttcattgagctgctaaccctggtgagccagaagatgtgtgtggtcgtgtaccccgaggtggagcggggctcagggacagaggaggctaatgaggacatggaggagcagcagcagcccatgtaccaacccactcccacgaaggacaaggacgtggcggggcagccccagccctgaggaccaccattccctggctactctctccttcctcccccttttatcctacctccctgccttggtcctgccaacacatgcgagtacacacacacccctctctctgcttttgtcaggcagtggtaggactttggtgtgggtggtgagaaattgtaaacaaaaactgacattcatacccaaagaaccagcctctcaccccagggtccatgtcccaggccccactccagtgctgcccacactcccagctgctggaggagaggggagatgccaaggtgccctgcaggacctccctccgggccacaccctcagctgcctcttcaggaaccggagctcattactgccttccctcccagggaggccccttcagagaggagaggccacaggagctgcattgtggggggacaggctcaagcaattctgtccccatcaaggggtcagctggagagacccaagaccctatctgttcaccagggacccaaaatccaaggggatgcttccctctgccctctttcctgcccctccccatcatacctgcacccaccccagccagggctccctgtccagaattcggttctcctcaggacgccaactcccagagctaaggaccaaggagaagaacagcctctccacccccaagccaggcggttgaggaacatattgagaaaggttcagattgcagaaacccagccctgcccctgcctcctgcatccagcccccaacatggtgccaaagcttccagaagccaaaaagcttctgatttttaaggtagtgggcatctctctcctaatgacgaagctgctcagcaactccacctgcccgccgcaggaaggagcagtcccctgctatccctgcagccactcccagcacacccgcacacagccagcaccaccgcccccaccgtgcacttctcctctctgggccttggcttgggaccaggtacgaaggatccccaagcccttcaggcctgagatcagagccagatcagccttaagtcacctcccatccaagaacttggcctaaaaatactcccctatttctaaccctcaggacggatctgatattaaatgccttccctgggaggaagggtgctttccccctccctagaggtgcccattccataccctgggagactgaggagagcattggctgaagcccagttcctttcccatccatccccaactccaataatcccccactcctcgcaggtctcagtgtcatgctgtcttggggcagggtgaaagggtagtggcagcagggcgcccactctggagatcctcaaaaaaggccctcctctgtggctggcagcctctgacctttccctgggcttcaaaggaaggctatggagtttgctgtgggccctgcaaccttcccagccactcctgctgcactaaggacttaggatccttttatcacaaatcgggattctctcccccaccccgaattctgtctgcttaaactggaatacacaggagcccttcctggcctggatggtgtctcccagcttccccgcccagcttgcccaccccatagttggtgagatgccaagtttggtctgagttgtgaccccttcagagtagatgcccggcaggctggggttggcccctggagggtcaggggaccatcttcttattccctcttttctcattcctccaacttcctcccctccttcaattatttttttgtaaagttgatgccttactttttggataaatatttttgaagctggtatttctatttcttttggattttttttaatgtaaggttgttttgggggatggagttagaaccttaatgataatttctttcgtttggtgtaggttttagagatttgttttgtggagaggtttttttcttttgatgtaataaaatttaaaatggaaatg

SEQ ID NO: 184563 - DNA, 1819 bp, Homo sapiens
  Payload ID: 16345
  Gene Symbol: SLC7A8
  Gene Name: solute carrier family 7 (amino acid transporter light chain, L system), member 8
  Uniprot ID: Q9UHI5
  ENST ID: ENST00000529705
  CDS Start-End: 101-1393
gtggtgattcagcagaaaccccagctccagcagctggcgcaggagctaacaggataagaaggaaggggaagagagagccaggaagggaggaggggaggggatggggcagtatgggcaggagcttagctggaagtgtttggtaaaagctgtgtgcctccaggagcactcacagccctcacagcttctctgcaccctcctcctctgctggtgtgtccttggaagagagaggcccttccggaaggctcagagcacctcctctcctttggagggggttccgagatttctaaaacgtttgctcctcacatgggtcaactgttccagtgtgcggtgggccacccgggttcaagacatcttcacagctgggaagctcctggccttggccctgattatcatcatggggattgtacagatatgcaaaggagagtacttctggctggagccaaagaatgcatttgagaatttccaggaacctgacatcggcctcgtcgcactggctttccttcagggctcctttgcctatggaggctggaactttctgaattacgtgactgaggagcttgttgatccctacaagaaccttcccagagccatcttcatctccatcccactggtcacatttgtgtatgtctttgccaatgtcgcttatgtcactgcaatgtccccccaggagctgctggcatccaacgccgtcgctgtgacttttggagagaagctcctaggagtcatggcctggatcatgcccatttctgttgccctgtccacatttggaggagttaatgggtctctcttcacctcctctcggctgttcttcgctggagcccgagagggccaccttcccagtgtgttggccatgatccacgtgaagcgctgcaccccaatcccagccctgctcttcacatgcatctccaccctgctgatgctggtcaccagcgacatgtacacactcatcaactatgtgggcttcatcaactacctcttctatggggtcacggttgctggacagatagtccttcgctggaagaagcctgatatcccccgccccatcaagatcaacctgctgttccccatcatctacttgctgttctgggccttcctgctggtcttcagcctgtggtcagagccggtggtgtgtggcattggcctggccatcatgctgacaggagtgcctgtctatttcctgggtgtttactggcaacacaagcccaagtgtttcagtgacttcattgagctgctaaccctggtgagccagaagatgtgtgtggtcgtgtaccccgaggtggagcggggctcagggacagaggaggctaatgaggacatggaggagcagcagcagcccatgtaccaacccactcccacgaaggacaaggacgtggcggggcagccccagccctgaggaccaccattccctggctactctctccttcctcccccttttatcctacctccctgccttggtcctgccaacacatgcgagtacacacacacccctctctctgcttttgtcaggcagtggtaggactttggtgtgggtggtgagaaattgtaaacaaaaactgacattcatacccaaagaaccagcctctcaccccagggtccatgtcccaggccccactccagtgctgcccacactcccagctgctggaggagaggggagatgccaaggtgccctgcaggacctccctccgggccacaccctcagctgcctcttcaggaaccggagctcattactgccttccctcccagggaggccccttcagagaggagaggccacaggagctgcattgtggggggacaggctcaagcaattctgtccccatca

SEQ ID NO: 184564 - DNA, 536 bp, Homo sapiens
  Payload ID: 16345
  Gene Symbol: SLC7A8
  Gene Name: solute carrier family 7 (amino acid transporter light chain, L system), member 8
  ENST ID: ENST00000524758
  CDS Start-End: 254-536
aagagaagcacgttagtgtgtggagaagccactctcccgaaaccagagggatggggccggctgtgcagtagaacggggatcgaaaagaggaaaacaagggcacgaagaccagcgagaaagaagaggacacctgggaaaggcggaagcagaagacggggaagggaaaagaaacccaaagcaggtggaaaccagatctagagcaacaccgtcagaaagggaggcagcttttgaggttgcaatcctactgagaaggatggaagaaggagccaggcaccgaaacaacaccgaaaagaaacacccaggtgggggcgagtcggacgccagccccgaggctggttccggagggggcggagtagccctgaagaaagagatcggattggtcagtgcctgtggtatcatcgtagggaacatcatcggctctggaatctttgtctcgccaaagggagtgctggagaatgctggttctgtgggccttgctctcatcgtctggattgtgacgggcttcatcacagttgtgggagccctctgctatgctg

SEQ ID NO: 184565 - DNA, 3557 bp, Homo sapiens
  Payload ID: 16345
  Gene Symbol: SLC7A8
  Gene Name: solute carrier family 7 (amino acid transporter light chain, L system), member 8
  ENST ID: ENST00000469263
  CDS Start-End: 728-1597
ctcccgaaaccagagggatggggccggctgtgcagtagaacggggatcgaaaagaggaaaacaagggcacgaagaccagcgagaaagaagaggacacctgggaaaggcggaagcagaagacggggaagggaaaagaaacccaaagcaggtggaaaccagatctagagcaacaccgtcaggttcacagtttgtttttctagaagagaagaaagtacctgaggattgctcttttttcctaccgttaatgaaaactacttttgtcttcatcataaaagaaaaaactaaggggaggtaaaggcagtctcctgttttattagggggagaggtgaagggaaatccaggctcactttctgaataagccactgcctggtgcacagagcagaaccatcctggtttctgaagacacatccctttcagcagaattccagccggagtcgctggcacagttctatttttatatttaaatgtatgtctcccctggcctttttttttttttttttttttagcaacacttttcttgtttgtaaacgcgagtgaccagaaagtgtgaatgcggagtaggaatatttttcgtgttctcttttatctgcttgccttttttagagagtagcagtggttcctatttcggaaaaggacgttctaattcaaagctctctcccaatatatttacacgaatacgcatttagaaagggaggcagcttttgaggttgcaatcctactgagaaggatggaagaaggagccaggcaccgaaacaacaccgaaaagaaacacccaggtgggggcgagtcggacgccagccccgaggctggttccggagggggcggagtagccctgaagaaagagatcggattggtcagtgcctgtggtatcatcgtagggaacatcatcggctctggaatctttgtctcgccaaagggagtgctggagaatgctggttctgtgggccttgctctcatcgtctggattgtgacgggcttcatcacagttgtgggagccctctgctatgctgaactcggggtcaccatccccaaatctggaggtgactactcctatgtcaaggacatcttcggaggactggctgggttcctgaggctgtggattgctgtgctggtgatctaccccaccaaccaggctgtcatcgccctcaccttctccaactacgtgctgcagccgctcttccccacctgcttccccccagagtctggccttcggctcctggctgccatctgcttattgctcctcacatgggtcaactgttccagtgtgcggtgggccacccgggttcaagacatcttcacagctgggaagctcctggccttggccctgattatcatcatggggattgtacagatatgcaaaggagagtacttctggctggagccaaagaatgcatttgagaatttccaggaacctgacatcggcctcgtcgcactggctttccttcagggctcctttgcctatggaggctggaactttctgaattacgtgactgaggagcttgttgatccctacaaagctgctaaccctggtgagccagaagatgtgtgtggtcgtgtaccccgaggtggagcggggctcagggacagaggaggctaatgaggacatggaggagcagcagcagcccatgtaccaacccactcccacgaaggacaaggacgtggcggggcagccccagccctgaggaccaccattccctggctactctctccttcctcccccttttatcctacctccctgccttggtcctgccaacacatgcgagtacacacacacccctctctctgcttttgtcaggcagtggtaggactttggtgtgggtggtgagaaattgtaaacaaaaactgacattcatacccaaagaaccagcctctcaccccagggtccatgtcccaggccccactccagtgctgcccacactcccagctgctggaggagaggggagatgccaaggtgccctgcaggacctccctccgggccacaccctcagctgcctcttcaggaaccggagctcattactgccttccctcccagggaggccccttcagagaggagaggccacaggagctgcattgtggggggacaggctcaagcaattctgtccccatcaaggggtcagctggagagacccaagaccctatctgttcaccagggacccaaaatccaaggggatgcttccctctgccctctttcctgcccctccccatcatacctgcacccaccccagccagggctccctgtccagaattcggttctcctcaggacgccaactcccagagctaaggaccaaggagaagaacagcctctccacccccaagccaggcggttgaggaacatattgagaaaggttcagattgcagaaacccagccctgcccctgcctcctgcatccagcccccaacatggtgccaaagcttccagaagccaaaaagcttctgatttttaaggtagtgggcatctctctcctaatgacgaagctgctcagcaactccacctgcccgccgcaggaaggagcagtcccctgctatccctgcagccactcccagcacacccgcacacagccagcaccaccgcccccaccgtgcacttctcctctctgggccttggcttgggaccaggtacgaaggatccccaagcccttcaggcctgagatcagagccagatcagccttaagtcacctcccatccaagaacttggcctaaaaatactcccctatttctaaccctcaggacggatctgatattaaatgccttccctgggaggaagggtgctttccccctccctagaggtgcccattccataccctgggagactgaggagagcattggctgaagcccagttcctttcccatccatccccaactccaataatcccccactcctcgcaggtctcagtgtcatgctgtcttggggcagggtgaaagggtagtggcagcagggcgcccactctggagatcctcaaaaaaggccctcctctgtggctggcagcctctgacctttccctgggcttcaaaggaaggctatggagtttgctgtgggccctgcaaccttcccagccactcctgctgcactaaggacttaggatccttttatcacaaatcgggattctctcccccaccccgaattctgtctgcttaaactggaatacacaggagcccttcctggcctggatggtgtctcccagcttccccgcccagcttgcccaccccatagttggtgagatgccaagtttggtctgagttgtgaccccttcagagtagatgcccggcaggctggggttggcccctggagggtcaggggaccatcttcttattccctcttttctcattcctccaacttcctcccctccttcaattatttttttgtaaagttgatgccttactttttggataaatatttttgaagctggtatttctatttcttttggattttttttaatgtaaggttgttttgggggatggagttagaaccttaatgataatttctttcgtttggtgtaggttttagagatttgttttgtggagaggtttttttcttttgatgtaataaaatttaaaatgg

SEQ ID NO: 184566 - DNA, 1499 bp, Homo sapiens
  Payload ID: 16345
  Gene Symbol: SLC7A8
  Gene Name: solute carrier family 7 (amino acid transporter light chain, L system), member 8
  ENST ID: ENST00000528860
  CDS Start-End: 237-386
agcctgggcacccagacccagagggctgctgggagggacatgcctcaccccttttgctccagctggaggggagggagtctgtgggagctggccagagcgtggcagaaggcagagaagtgaacgccccagcaaaagtgctcctcacatgggtcaactgttccagtgtgcggtgggccacccgggttcaagacatcttcacagctgggaagctcctggccttggccctgattatcatcatggggattgtacagatatgcaaaggaaccttcccagagccatcttcatctccatcccactggtcacatttgtgtatgtctttgccaatgtcgcttatgtcactgcaatgtccccccaggagctgctggcatccaacgccgtcgctgtgacttttggagagaagctcctaggagtcatggcctggatcatgcccatttctgttgccctgtccacatttggaggagttaatgggtctctcttcacctcctctcggctgttcttcgctggagcccgagagggccaccttcccagtgtgttggccatgatccacgtgaagcgctgcaccccaatcccagccctgctcttcacatgcatctccaccctgctgatgctggtcaccagcgacatgtacacactcatcaactatgtgggcttcatcaactacctcttctatggggtcacggttgctggacagatagtccttcgctggaagaagcctgatatcccccgccccatcaagatcaacctgctgttccccatcatctacttgctgttctgggccttcctgctggtcttcagcctgtggtcagagccggtggtgtgtggcattggcctggccatcatgctgacaggagtgcctgtctatttcctgggtgtttactggcaacacaagcccaagtgtttcagtgacttcattgagctgctaaccctggtgagccagaagatgtgtgtggtcgtgtaccccgaggtggagcggggctcagggacagaggaggctaatgaggacatggaggagcagcagcagcccatgtaccaacccactcccacgaaggacaaggacgtggcggggcagccccagccctgaggaccaccattccctggctactctctccttcctcccccttttatcctacctccctgccttggtcctgccaacacatgcgagtacacacacacccctctctctgcttttgtcaggcagtggtaggactttggtgtgggtggtgagaaattgtaaacaaaaactgacattcatacccaaagaaccagcctctcaccccagggtccatgtcccaggccccactccagtgctgcccacactcccagctgctggaggagaggggagatgccaaggtgccctgcaggacctccctccgggccacaccctcagctgcctcttcaggaaccggagctcattactgccttccctcccagggaggccccttcagagaggagaggccacaggagctgcattgtggggggacaggctcaagcaattctgt

SEQ ID NO: 184567 - DNA, 658 bp, Homo sapiens
  Payload ID: 16345
  Gene Symbol: SLC7A8
  Gene Name: solute carrier family 7 (amino acid transporter light chain, L system), member 8
  ENST ID: ENST00000525062
  CDS Start-End: 425-658
gaagccactctcccgaaaccagagggatggggccggctgtgcagtagaacggggatcgaaaagaggaaaacaagggcacgaagaccagcgagaaagaagaggacacctgggaaaggcggaagcagaagacggggaagggaaaagaaacccaaagcaggtggaaaccagatctagagcaacaccgtcaggttcacagtttgtttttctagaagagaagaaagtacctgaggattgctcttttttcctaccgttaatgaaaactacttttgtcttcatcataaaagaaaaaactaaggggagagagtagcagtggttcctatttcggaaaaggacgttctaattcaaagctctctcccaatatatttacacgaatacgcatttagaaagggaggcagcttttgaggttgcaatcctactgagaaggatggaagaaggagccaggcaccgaaacaacaccgaaaagaaacacccaggtgggggcgagtcggacgccagccccgaggctggttccggagggggcggagtagccctgaagaaagagatcggattggtcagtgcctgtggtatcatcgtagggaacatcatcggctctggaatctttgtctcgccaaagggagtgctggagaatgctggttctgtgggccttgctctcatcgtc

SEQ ID NO: 184568 - DNA, 2267 bp, Homo sapiens
  Payload ID: 16345
  Gene Symbol: SLC7A8
  Gene Name: solute carrier family 7 (amino acid transporter light chain, L system), member 8
  ENST ID: ENST00000618208
  CDS Start-End: 1356-2267
agtgtgtggagaagccactctcccgaaaccagagggatggggccggctgtgcagtagaacggggatcgaaaagaggaaaacaagggcacgaagaccagcgagaaagaagaggacacctgggaaaggcggaagcagaagacggggaagggaaaagaaacccaaagcaggtggaaaccagatctagagcaacaccgtcaggttcacagtttgtttttctagaagagaagaaagtacctgaggattgctcttttttcctaccgttaatgaaaactacttttgtcttcatcataaaagaaaaaactaaggggaggtaaaggcagtctcctgttttattagggggagaggtgaagggaaatccaggctcactttctgaataagccactgcctggtgcacagagcagaaccatcctggtttctgaagacacatccctttcagcagaattccagccggagtcgctggcacagttctatttttatatttaaatgtatgtctcccctggcctttttttttttttttttttttagcaacacttttcttgtttgtaaacgcgagtgaccagaaagtgtgaatgcggagtaggaatatttttcgtgttctcttttatctgcttgccttttttagagagtagcagtggttcctatttcggaaaaggacgttctaattcaaagctctctcccaatatatttacacgaatacgcatttagaaagggaggcagcttttgaggttgcaatcctactgagaaggatggaagaaggagccaggcaccgaaacaacaccgaaaagaaacacccaggtgggggcgagtcggacgccagccccgaggctggttccggagggggcggagtagccctgaagaaagagatcggattggtcagtgcctgtggtatcatcgtagggaacatcatcggctctggaatctttgtctcgccaaagggagtgctggagaatgctggttctgtgggccttgctctcatcgtctggattgtgacgggcttcatcacagttgtgggagccctctgctatgctgaactcggggtcaccatccccaaatctggaggtgactactcctatgtcaaggacatcttcggaggactggctgggttcctgaggctgtggattgctgtgctggtgatctaccccaccaaccaggctgtcatcgccctcaccttctccaactacgtgctgcagccgctcttccccacctgcttccccccagagtctggccttcggctcctggctgccatctgcttattgctcctcacatgggtcaactgttccagtgtgcggtgggccacccgggttcaagacatcttcacagctgggaagctcctggccttggccctgattatcatcatggggattgtacagatatgcaaaggagagtacttctggctggagccaaagaatgcatttgagaatttccaggaacctgacatcggcctcgtcgcactggctttccttcagggctcctttgcctatggaggctggaactttctgaattacgtgactgaggagcttgttgatccctacaagaaccttcccagagccatcttcatctccatcccactggtcacatttgtgtatgtctttgccaatgtcgcttatgtcactgcaatgtccccccaggagctgctggcatccaacgccgtcgctgtgacttttggagagaagctcctaggagtcatggcctggatcatgcccatttctgttgccctgtccacatttggaggagttaatgggtctctcttcacctcctctcggctgttcttcgctggagcccgagagggccaccttcccagtgtgttggccatgatccacgtgaagcgctgcaccccaatcccagccctgctcttcacatgcatctccaccctgctgatgctggtcaccagcgacatgtacacactcatcaactatgtgggcttcatcaactacctcttctatggggtcacggttgctggacagatagtccttcgctggaagaagcctgatatcccccgccccatcaagatcaacctgctgttccccatcatctacttgctgttctgggccttcctgctggtcttcagcctgtggtcagagccggtggtgtgtggcattggcctggccatcatgctgacaggagtgcctgtctatttcctgggtgtttactggcaacacaagcccaagtgtttcagtgacttcattgagctgctaaccctggtgagccagaagatgtgtgtggtcgtgtaccccgaggtggaggggctcagggacagaggaggctaa

SEQ ID NO: 184569 - DNA, 4227 bp, Homo sapiens
  Payload ID: 16345
  Gene Symbol: SLC7A8
  Gene Name: solute carrier family 7 (amino acid transporter light chain, L system), member 8
  ENST ID: ENST00000617478
  CDS Start-End: 1356-1988
agtgtgtggagaagccactctcccgaaaccagagggatggggccggctgtgcagtagaacggggatcgaaaagaggaaaacaagggcacgaagaccagcgagaaagaagaggacacctgggaaaggcggaagcagaagacggggaagggaaaagaaacccaaagcaggtggaaaccagatctagagcaacaccgtcaggttcacagtttgtttttctagaagagaagaaagtacctgaggattgctcttttttcctaccgttaatgaaaactacttttgtcttcatcataaaagaaaaaactaaggggaggtaaaggcagtctcctgttttattagggggagaggtgaagggaaatccaggctcactttctgaataagccactgcctggtgcacagagcagaaccatcctggtttctgaagacacatccctttcagcagaattccagccggagtcgctggcacagttctatttttatatttaaatgtatgtctcccctggcctttttttttttttttttttttagcaacacttttcttgtttgtaaacgcgagtgaccagaaagtgtgaatgcggagtaggaatatttttcgtgttctcttttatctgcttgccttttttagagagtagcagtggttcctatttcggaaaaggacgttctaattcaaagctctctcccaatatatttacacgaatacgcatttagaaagggaggcagcttttgaggttgcaatcctactgagaaggatggaagaaggagccaggcaccgaaacaacaccgaaaagaaacacccaggtgggggcgagtcggacgccagccccgaggctggttccggagggggcggagtagccctgaagaaagagatcggattggtcagtgcctgtggtatcatcgtagggaacatcatcggctctggaatctttgtctcgccaaagggagtgctggagaatgctggttctgtgggccttgctctcatcgtctggattgtgacgggcttcatcacagttgtgggagccctctgctatgctgaactcggggtcaccatccccaaatctggaggtgactactcctatgtcaaggacatcttcggaggactggctgggttcctgaggctgtggattgctgtgctggtgatctaccccaccaaccaggctgtcatcgccctcaccttctccaactacgtgctgcagccgctcttccccacctgcttccccccagagtctggccttcggctcctggctgccatctgcttattgctcctcacatgggtcaactgttccagtgtgcggtgggccacccgggttcaagacatcttcacagctgggaagctcctggccttggccctgattatcatcatggggattgtacagatatgcaaaggagagtacttctggctggagccaaagaatgcatttgagaatttccaggaacctgacatcggcctcgtcgcactggctttccttcagggctcctttgcctatggaggctggaactttctgaattacgtgactgaggagcttgttgatccctacaagaaccttcccagagccatcttcatctccatcccactggtcacatttgtgtatgtctttgccaatgtcgcttatgtcactgcaatgtccccccaggagctgctggcatccaacgccgtcgctgtgacttttggagagaagctcctaggagtcatggcctggatcatgcccatttctgttgccctgtccacatttggaggagttaatgggtctctccacctcctctcggctgttcttcgctggagcccgagagggccaccttcccagtgtgttggccatgatccacgtgaagcgctgcaccccaatcccagccctgctcttcacatgcatctccaccctgctgatgctggtcaccagcgacatgtacacactcatcaactatgtgggcttcatcaactacctcttctatggggtcacggttgctggacagatagtccttcgctggaagaagcctgatatcccccgccccatcaagatcaacctgctgttccccatcatctacttgctgttctgggccttcctgctggtcttcagcctgtggtcagagccggtggtgtgtggcattggcctggccatcatgctgacaggagtgcctgtctatttcctgggtgtttactggcaacacaagcccaagtgtttcagtgacttcattgagctgctaaccctggtgagccagaagatgtgtgtggtcgtgtaccccgaggtggagcggggctcagggacagaggaggctaatgaggacatggaggagcagcagcagcccatgtaccaacccactcccacgaaggacaaggacgtggcggggcagccccagccctgaggaccaccattccctggctactctctccttcctcccccttttatcctacctccctgccttggtcctgccaacacatgcgagtacacacacacccctctctctgcttttgtcaggcagtggtaggactttggtgtgggtggtgagaaattgtaaacaaaaactgacattcatacccaaagaaccagcctctcaccccagggtccatgtcccaggccccactccagtgctgcccacactcccagctgctggaggagaggggagatgccaaggtgccctgcaggacctccctccgggccacaccctcagctgcctcttcaggaaccggagctcattactgccttccctcccagggaggccccttcagagaggagaggccacaggagctgcattgtggggggacaggctcaagcaattctgtccccatcaaggggtcagctggagagacccaagaccctatctgttcaccagggacccaaaatccaaggggatgcttccctctgccctctttcctgcccctccccatcatacctgcacccaccccagccagggctccctgtccagaattcggttctcctcaggacgccaactcccagagctaaggaccaaggagaagaacagcctctccacccccaagccaggcggttgaggaacatattgagaaaggttcagattgcagaaacccagccctgcccctgcctcctgcatccagcccccaacatggtgccaaagcttccagaagccaaaaagcttctgatttttaaggtagtgggcatctctctcctaatgacgaagctgctcagcaactccacctgcccgccgcaggaaggagcagtcccctgctatccctgcagccactcccagcacacccgcacacagccagcaccaccgcccccaccgtgcacttctcctctctgggccttggcttgggaccaggtacgaaggatccccaagcccttcaggcctgagatcagagccagatcagccttaagtcacctcccatccaagaacttggcctaaaaatactcccctatttctaaccctcaggacggatctgatattaaatgccttccctgggaggaagggtgctttccccctccctagaggtgcccattccataccctgggagactgaggagagcattggctgaagcccagttcctttcccatccatccccaactccaataatcccccactcctcgcaggtctcagtgtcatgctgtcttggggcagggtgaaagggtagtggcagcagggcgcccactctggagatcctcaaaaaaggccctcctctgtggctggcagcctctgacctttccctgggcttcaaaggaaggctatggagtttgctgtgggccctgcaaccttcccagccactcctgctgcactaaggacttaggatccttttatcacaaatcgggattctctcccccaccccgaattctgtctgcttaaactggaatacacaggagcccttcctggcctggatggtgtctcccagcttccccgcccagcttgcccaccccatagttggtgagatgccaagtttggtctgagttgtgaccccttcagagtagatgcccggcaggctggggttggcccctggagggtcaggggaccatcttcttattccctcttttctcattcctccaacttcctcccctccttcaattatttttttgtaaagttgatgccttactttttggataaatatttttgaagctggtatttctatttcttttggattttttttaatgtaaggttgttttgggggatggagttagaaccttaatgataatttctttcgtttggtgtaggttttagagatttgttttgtggagaggtttttttcttttgatgtaataaaatttaaaatgg

SEQ ID NO: 184570 - DNA, 1371 bp, Homo sapiens
  Payload ID: 16345
  Gene Symbol: SLC7A8
  Gene Name: solute carrier family 7 (amino acid transporter light chain, L system), member 8
  ENST ID: ENST00000621729
  CDS Start-End: 384-1016
tcatcgtctggattgtgacgggcttcatcacagttgtgggagccctctgctatgctgaactcggggtcaccatccccaaatctggaggtgactactcctatgtcaaggacatcttcggaggactggctgggttcctgaggctgtggattgctgtgctggtgatctaccccaccaaccaggctgtcatcgccctcaccttctccaactacgtgctgcagccgctcttccccacctgcttccccccagagtctggccttcggctcctggctgccatctgcttattgctcctcacatgggtcaactgttccagtgtgcggtgggccacccgggttcaagacatcttcacagctgggaagctcctggccttggccctgattatcatcatggggattgtacagatatgcaaaggagagtacttctggctggagccaaagaatgcatttgagaatttccaggaacctgacatcggcctcgtcgcactggctttccttcagggctcctttgcctatggaggctggaactttctgaattacgtgactgaggagcttgttgatccctacaagaaccttcccagagccatcttcatctccatcccactggtcacatttgtgtatgtctttgccaatgtcgcttatgtcactgcaatgtccccccaggagctgctggcatccaacgccgtcgctgtgacttttggagagaagctcctaggagtcatggcctggatcatgcccatttctgttgccctgtccacatttggaggagttaatgggtctctcttcctcctctcggctgttcttcgctggagcccgagagggccaccttcccagtgtgttggccatgatccacgtgaagcgctgcaccccaatcccagccctgctcttcacatgcatctccaccctgctgatgctggtcaccagcgacatgtacacactcatcaactatgtgggcttcatcaactacctcttctatggggtcacggttgctggacagatagtccttcgctggaagaagcctgatatcccccgccccatcaagatcaacctgctgttccccatcatctacttgctgttctgggccttcctgctggtcttcagcctgtggtcagagccggtggtgtgtggcattggcctggccatcatgctgacaggagtgcctgtctatttcctgggtgtttactggcaacacaagcccaagtgtttcagtgacttcattgagctgctaaccctggtgagccagaagatgtgtgtggtcgtgtaccccgaggtggagcggggctcagggacagaggaggctaatgaggacatggacacacccctctctctgcttttgtcaggcagtggtaggactttggtgtgggtggtgagaaattgt

SEQ ID NO: 184571 - DNA, 6251 bp, Homo sapiens
  Payload ID: 16346
  Gene Symbol: SLC7A6
  Gene Name: solute carrier family 7 (amino acid transporter light chain, y+L system), member 6
  Uniprot ID: Q92536
  ENST ID: ENST00000219343
  CDS Start-End: 213-1760
cggcggcggcgcgaccgagcatcctggcggcgccgggccactgggagagtttatgtggccgaggcagacaagtggaattaggccttgctgcaggggacttcatttccttctcagtactggacccatttatgaggaggtggcttatgaaagtgtgatgttcgcgtatttcttgacaggccacagcaaacacaggtgtgcaggaaccgtttgtcatggaagccagggagcctgggaggcccacacccacctaccatcttgtccctaacaccagccagtcccaggtggaagaagatgtcagctcgccacctcaaaggtcctccgaaactatgcagctgaagaaggagatctccctgctgaatggggtcagcctggtggtgggcaacatgatcggctcagggatctttgtctcacccaagggtgtgctggtacacactgcctcctatgggatgtcactgattgtgtgggccattggtgggctcttctctgttgtgggtgccctttgttatgcagagctggggaccaccatcaccaagtcgggagccagctacgcttatattctagaggcctttgggggcttcattgccttcatccgcctgtgggtctcactgctagttgttgagcccaccggtcaggccatcatcgccatcacctttgccaactacatcatccagccgtccttccccagctgtgatcccccatacctggcctgccgtctcctggctgctgcttgcatatgtctgctgacatttgtgaactgtgcctatgtcaagtggggcacacgtgtgcaggacacgttcacttacgccaaggtcgtagcgctcattgccatcattgtcatgggccttgttaaactgtgccagggacactctgagcactttcaggacgcctttgagggttcctcctgggacatgggaaacctctctcttgccctctactctgccctcttctcttactcaggttgggacacccttaattttgtaacagaagaaatcaaaaacccagaaagaaatttgcccttggccattgggatttctatgccaattgtgacgctcatctacatcctgaccaatgtggcctattacacagtgctgaacatttcagatgtccttagcagtgatgctgtggctgtgacatttgctgaccagacgtttggcatgttcagctggaccatccccattgctgttgccctgtcctgctttgggggcctcaatgcatccatctttgcttcatcaaggttgttcttcgtgggctcccgggagggccacctaccggaccttctgtccatgatccacattgagcgttttacacctatccctgctttactgttcaattgcaccatggcactcatctacctcatcgtggaggatgttttccagcttatcaactacttcagcttcagctactggttcttcgtgggcctgtctgttgttggacagctctacctccgctggaaggagcccaagcggccccggcctctcaagctgagcgtgtttttccccatcgtgttctgcatatgctccgtgtttctggtgatagtgcccctcttcactgacaccattaattccctcattggcatcgggattgccctttctggagtccctttctacttcatgggtgtttacctgccagagtcccggaggccattgtttattcggaatgtcctggctgctatcaccagaggcacccagcagctttgcttttgtgtcctgactgagcttgatgtagccgaagaaaaaaaggatgagaggaaaactgactagaggtcagaggtggctttctgaggcctggaaggcaggccaaccagcaaaatcctgataacaagactctgtgggcccaactctcctgaattaaaggagccttttgacccaatcatatagtggggctcagggccagtgctcactcttattggtaagctataggagactcaggatctgggccaacctcaaggtgggggcttcagagggtggggggaagattggggaacggggggaatggtcatttagttttactcctgataggtagatgcagctcttacagatatttacttggtaaagtgcagtggggaagagggaatgctaggttgatagggctggtggcttctgaatttggtatttgaactaggagtccctatagaggggctgctttatgggaagtttttctctgaccaggtacaacacctgactttaaaggcctgaaatgctaccatttcttcctctggctcaaaattcttccctggggagagagttatattcccttatttattgatatttagtccagaacaccagttctaacgaagcatgcgtgtctcttcatctacaggatgcaataggctgattgtatttaaaaatcaaagtacccaaaactgagtccctttgggctcagaaatgtctgtggtattgggtcagactctgaccacaggttttatgctgtttagcacaatttctattgagtcttacctgcaacaatgaaccttaaagatttttttactcacgtacctgttacactttagcatacagatagatcatagatcacgttacaagcacttggctcaggtccagcaaggacagatgaacaaattcctgagtcagaagtctgttaatattgctgttttgaaggacaatcctttattttacttgagaccttacatctttgttctagctgacagtaaatctctgggtttctgttacgaactctaagagggctgaaacttctgatattcaggtggatcacctgaattctctcagctgtcaatggcttggagaacatctcatgggcccaagtcatcaaataacctgttcctctctgtaagggcagtgtgagggactgctgtgcagacccaagcaatcccaacctggtgctaggtcatttcacttttctgaaaacctcacatcaggctgcatcctcttctgtccctggcaccaggctttgtttacacttggagccaccttggtgtgggtcaccgggacagtgtactcctctcctgccagcctccccttccccgaggtgtggtggctgcagtctcaggaagagcttggtacttgtggggacttctgttttctccctgtggagatcagtgaagactgggaggaaagctgcttcaacctgagtccggctcttcagcaggctgcacaagtggaagcaactaattctggtgctcaggctgggctctccacccaagttaggcctgctctggcctaatggatcttactgtatgagcaggacggctgcattggattgtacaactgttttgtgatgcccccagacactgtcatcctgggccgagaagaacctgctagcttgacataccccatgggcttatccttaggttttggaattggtcaacagtgaggcagtctcccttcctgaccattcttctccacccagtcacagataagggaataaccttggccatatatttgctcaataaagattgaaggaagcatggtcatagttgccctgggttcagagcataatgcatatgtgaagcatggggtgacattcctactgtcatgggtttgggatttgtaacggcaaattcctgcccgacgacagggtgtcttatgcaaaggctgacttgcctgaacgctaagaacatgacttctgtctgagctaagctggcacccatcccagggctcctctggagctaatcctttaagcaaaatgtgcttgccttttaaagatccctgaccccagctttagctttctccaccagataaccagctaatcccaggaatttgctgccccccaccagtggcttctagggaaagcaaggacctcacatgccaggtgccctagtacttgcttagtgagccatgtcatcctcctttcatttttggatggtgacagcatttttcccctctgtgctggatacagacttctcccaggatcctctctttgggagcgaagccagaggatccctacagcactcaagcttcatggtggaattaatttctgccagctctttgttgtctgtctccttaaatccttttcctggtgtgcttattatcccttttgcagtgagtacagtttattaagttgtcagccctttaatattggggaaacttaatgagtataaatagcagggagcacattgtaacagcacagtgttttgtttttttcacccggttgctgtatgagaatggctttcaatcctttgtttctatgcctacagacagaaagcaagatgtctaatattagacatacaagttgctgcctgttataacggtgaattatacctttgtgcatgcctaggatgtttgttgttttaattagctgcaatatatacggcctgtgtacacagaatttaatcacttcggcaggttgaacaactccatgtagataagagcaagtgtaggcaaaggtttagaaaatggacataaagtcaaagaatgatggcaggtaggatgaaggagagatacttaggaaatcctaaaagaggcggcaagaaggtacctccctgtgtaactcaccttcccccatgacagtgagtaagagacactcacaggctatgagggtacacccctagctgaatgttctgtgttgtttccttagacctgtggtgtccgctgcaacagctactagccacgtgtagctaattacattaaaatgaaataaaattaaaagctcagtttctcagttgcgctaatcacatttcaagtgctcagcagccacccgtgtctactactacacagtgcagacacagaacatatcatcactgcagatagttctactggacaatgttacgctagaataaacaccaaggcagtcagttaaggcagctatggtttggaaaggcatacggacagagtctgcttagaagagatacaagttgttaataaaattgatcctgttgatagtagtttgtttttgtggtgggtgctgtgaagagtaaacattactcagtggaaagctaagttcagaaggtactttgtttttcctcccttgccttaagtccttggtatttataatcaatgctgaaccttctatttcactaccgctccctgttttagatattcagatttaaaaggttttcaaagaattactttcttccatgttcaaagctagattttactaaacacatgtatcacattcatatatattgtttcttggccccactgccaaaggaagtcagtcagtaatttcacaaccgttatcagagtttggaagcagaaatagctgttaactaaaatctcccactgctcagactactttctgccctaatggccattactatccagtctgtattgctacaagggacccactggtaccccttttagattctatcaaaaggaacagggttttcctagaggcaggcagcctggtggtatggcacagcagaagcttactgctaatgaaatgggaacctccccctcccttgtggtttcagcacagaacctgaatgccaggaaaaattcctgggccaagaagctaaagctaaagaaaccttccttttttcaacgtttttttttctttcaaactgtagggtcacttttgattgaggcaaaggggtcctactgtaagtggaaaagactcactcccctaacataagttttcactgtggtgggatggtgccgcccgatatgcttgatatgcttttccttccacatgttaagctaggaaacctaacaggatgtcagcagggcagttaactctggactcagagccctcaagggcatgtggcagaacctcatggacatcacaagaccatcagtctgaatccaggtcgtgggggctgtcatagccgaactccttctgcacatccagagggtacttgctccacatccgctgtctgctgctgcctctttcctcctcactcaggctgttgtagtcagcagagcctagaatgacatcccgggagtggattctaaatgtgattttcctaggctactgcaggagccccttctcttctcagaaaggtctgtttttgttcccgattgtaatgcaaaatccttgctcaataaataaaaaagaatatagaattcttttttttttaaagaaggaatcactttcctatcatctaaaccaagttccttcacactggagtattttgtcacttctcccctccgtggagtattttgtcacttctcccctccgtataggattttttgttgttgtaagagttgtagtcatattgtaaatatttttgtacctttctccttttaacgtgttattgacaaacctccccaaaagaatatgcaattgtttgattcatttctctgttatcagacaccaataaattctttttgttgggc

SEQ ID NO: 184572 - DNA, 5074 bp, Homo sapiens
  Payload ID: 16346
  Gene Symbol: SLC7A6
  Gene Name: solute carrier family 7 (amino acid transporter light chain, y+L system), member 6
  ENST ID: ENST00000379152
  CDS Start-End: 195-884
gcatcctggcggcgccgggccactgggagagtttatgtggccgaggcagacaagtggaattaggccttgctgcaggggacttcatttccttctcagtactggacccatttatgaggaggtggcttatgaaagtgtgatgttcgcgtatttcttgacaggccacagcaaacacaggtgtgcaggaaccgtttgtcatggaagccagggagcctgggaggcccacacccacctaccatcttgtccctaacaccagccagtcccaggtggaagaagatgtcagctcgccacctcaaaggtcctccgaaactatgcagctgaagaaggagatctccctgctgaatggggtcagcctggtggtgggcaacatgatcggctcagggatctttgtctcacccaagggtgtgctggtacacactgcctcctatgggatgtcactgattgtgtgggccattggtgggctcttctctgttgtgggtgccctttgttatgcagagctggggaccaccatcaccaagtcgggagccagctacgcttatattctagaggcctttgggggcttcattgccttcatccgcctgtgggtctcactgctagttgttgagcccaccggtcaggccatcatcgccatcacctttgccaactacatcatccagccgtccttccccagctgtgatcccccatacctggcctgccgtctcctggctgctgcttgcatatgtctgctgacatttgtgaactgtgcctatgtcaagtggggcacacgtgtgcaggacacgttcacttacgccaaggtcgtagcgctcattgccatcattgtcatgggccttgttaaactgtgccaggaaatttgcccttggccattgggatttctatgccaattgtgacgctcatctacatcctgaccaatgtggcctattacacagtgctgaacatttcagatgtccttagcagtgatgctgtggctgtgacatttgctgaccagacgtttggcatgttcagctggaccatccccattgctgttgccctgtcctgctttgggggcctcaatgcatccatctttgcttcatcaaggttgttcttcgtgggctcccgggagggccacctaccggaccttctgtccatgatccacattgagcgttttacacctatccctgctttactgttcaattgcaccatggcactcatctacctcatcgtggaggatgttttccagcttatcaactacttcagcttcagctactggttcttcgtgggcctgtctgttgttggacagctctacctccgctggaaggagcccaagcggccccggcctctcaagctgagcgtgtttttccccatcgtgttctgcatatgctccgtgtttctggtgatagtgcccctcttcactgacaccattaattccctcattggcatcgggattgccctttctggagtccctttctacttcatgggtgtttacctgccagagtcccggaggccattgtttattcggaatgtcctggctgctatcaccagaggcacccagcagctttgcttttgtgtcctgactgagcttgatgtagccgaagaaaaaaaggatgagaggaaaactgactagaggtcagaggtggctttctgaggcctggaaggcaggccaaccagcaaaatcctgataacaagactctgtgggcccaactctcctgaattaaaggagccttttgacccaatcatatagtggggctcagggccagtgctcactcttattggctttgtttacacttggagccaccttggtgtgggtcaccgggacagtgtactcctctcctgccagcctccccttccccgaggtgtggtggctgcagtctcaggaagagcttggtacttgtggggacttctgttttctccctgtggagatcagtgaagactgggaggaaagctgcttcaacctgagtccggctcttcagcaggctgcacaagtggaagcaactaattctggtgctcaggctgggctctccacccaagttaggcctgctctggcctaatggatcttactgtatgagcaggacggctgcattggattgtacaactgttttgtgatgcccccagacactgtcatcctgggccgagaagaacctgctagcttgacataccccatgggcttatccttaggttttggaattggtcaacagtgaggcagtctcccttcctgaccattcttctccacccagtcacagataagggaataaccttggccatatatttgctcaataaagattgaaggaagcatggtcatagttgccctgggttcagagcataatgcatatgtgaagcatggggtgacattcctactgtcatgggtttgggatttgtaacggcaaattcctgcccgacgacagggtgtcttatgcaaaggctgacttgcctgaacgctaagaacatgacttctgtctgagctaagctggcacccatcccagggctcctctggagctaatcctttaagcaaaatgtgcttgccttttaaagatccctgaccccagctttagctttctccaccagataaccagctaatcccaggaatttgctgccccccaccagtggcttctagggaaagcaaggacctcacatgccaggtgccctagtacttgcttagtgagccatgtcatcctcctttcatttttggatggtgacagcatttttcccctctgtgctggatacagacttctcccaggatcctctctttgggagcgaagccagaggatccctacagcactcaagcttcatggtggaattaatttctgccagctctttgttgtctgtctccttaaatccttttcctggtgtgcttattatcccttttgcagtgagtacagtttattaagttgtcagccctttaatattggggaaacttaatgagtataaatagcagggagcacattgtaacagcacagtgttttgtttttttcacccggttgctgtatgagaatggctttcaatcctttgtttctatgcctacagacagaaagcaagatgtctaatattagacatacaagttgctgcctgttataacggtgaattatacctttgtgcatgcctaggatgtttgttgttttaattagctgcaatatatacggcctgtgtacacagaatttaatcacttcggcaggttgaacaactccatgtagataagagcaagtgtaggcaaaggtttagaaaatggacataaagtcaaagaatgatggcaggtaggatgaaggagagatacttaggaaatcctaaaagaggcggcaagaaggtacctccctgtgtaactcaccttcccccatgacagtgagtaagagacactcacaggctatgagggtacacccctagctgaatgttctgtgttgtttccttagacctgtggtgtccgctgcaacagctactagccacgtgtagctaattacattaaaatgaaataaaattaaaagctcagtttctcagttgcgctaatcacatttcaagtgctcagcagccacccgtgtctactactacacagtgcagacacagaacatatcatcactgcagatagttctactggacaatgttacgctagaataaacaccaaggcagtcagttaaggcagctatggtttggaaaggcatacggacagagtctgcttagaagagatacaagttgttaataaaattgatcctgttgatagtagtttgtttttgtggtgggtgctgtgaagagtaaacattactcagtggaaagctaagttcagaaggtactttgtttttcctcccttgccttaagtccttggtatttataatcaatgctgaaccttctatttcactaccgctccctgttttagatattcagatttaaaaggttttcaaagaattactttcttccatgttcaaagctagattttactaaacacatgtatcacattcatatatattgtttcttggccccactgccaaaggaagtcagtcagtaatttcacaaccgttatcagagtttggaagcagaaatagctgttaactaaaatctcccactgctcagactactttctgccctaatggccattactatccagtctgtattgctacaagggacccactggtaccccttttagattctatcaaaaggaacagggttttcctagaggcaggcagcctggtggtatggcacagcagaagcttactgctaatgaaatgggaacctccccctcccttgtggtttcagcacagaacctgaatgccaggaaaaattcctgggccaagaagctaaagctaaagaaaccttccttttttcaacgtttttttttctttcaaactgtagggtcacttttgattgaggcaaaggggtcctactgtaagtggaaaagactcactcccctaacataagttttcactgtggtgggatggtgccgcccgatatgcttgatatgcttttccttccacatgttaagctaggaaacctaacaggatgtcagcagggcagttaactctggactcagagccctcaagggcatgtggcagaacctcatggacatcacaagaccatcagtctgaatccaggtcgtgggggctgtcatagccgaactccttctgcacatccagagggtacttgctccacatccgctgtctgctgctgcctctttcctcctcactcaggctgttgtagtcagcagagcctagaatgacatcccgggagtggattctaaatgtgattttcctaggctactgcaggagccccttctcttctcagaaaggtctgtttttgttcccgattgtaatgcaaaatccttgctcaataaataaaaaagaatatagaattcttttttttttaaagaaggaatcactttcctatcatctaaaccaagttccttcacactggagtattttgtcacttctcccctccgtggagtattttgtcacttctcccctccgtataggattttttgttgttgtaagagttgtagtcatattgtaaatatttttgtacctttctccttttaacgtgttattgacaaacctccccaaaagaatatgcaattgtttgattcatttctctgttatcagacaccaataaattctttttgttgggc

SEQ ID NO: 184573 - DNA, 1030 bp, Homo sapiens
  Payload ID: 16346
  Gene Symbol: SLC7A6
  Gene Name: solute carrier family 7 (amino acid transporter light chain, y+L system), member 6
  ENST ID: ENST00000563080
  CDS Start-End: 168-812
agagtttatgtggccgaggcagacaagtggaattaggccttgctgcaggggacttcatttccttctcagtactggacccatttatgaggaggtggcttatgaaagtgtgatgttcgcgtatttcttgacaggccacagcaaacacaggtgtgcaggaaccgtttgtcatggaagccagggagcctgggaggcccacacccacctaccatcttgtccctaacaccagccagtcccaggtggaagaagatgtcagctcgccacctcaaaggtcctccgaaactatgcagctgaagaaggagatctccctgctgaatggggtcagcctggtggtgggcaacatgatcggctcagggatctttgtctcacccaagggtgtgctggtacacactgcctcctatgggatgtcactgattgtgtgggccattggtgggctcttctctgttgtgggtgccctttgttatgcagagctggggaccaccatcaccaagtcgggagccagctacgcttatattctagaggcctttgggggcttcattgccttcatccgcctgtgggtctcactgctagttgttgagcccaccggtcaggccatcatcgccatcacctttgccaactacatcatccagccgtccttccccagctgtgatcccccatacctggcctgccgtctcctggctgctgcttgcatatgtaacctgccatctgcattcaaatttacctcacttactgatgagtttcttttggccatgaagaggtcttgtgtctcctgtggtttggaaccttgggagtctgggtgggaaagagtctgctgacatttgtgaactgtgcctatgtcaagtggggcacacgtgtgcaggacacgttcacttacgccaaggtcgtagcgctcattgccatcattgtcatgggccttgttaaactgtgccaggacatttgctgaccagacgtttggcatgttcagctggaccatccccattgctgttgccctgtcctgctttgggggcctcaatgcatccatctttgcttcatc

SEQ ID NO: 184574 - DNA, 6308 bp, Homo sapiens
  Payload ID: 16346
  Gene Symbol: SLC7A6
  Gene Name: solute carrier family 7 (amino acid transporter light chain, y+L system), member 6
  Uniprot ID: Q92536
  ENST ID: ENST00000566454
  CDS Start-End: 270-1817
cgccgggccactgggagagtttatgtggccgaggcagacaagtggaattaggccttgctgcaggggacttcatttccttctcagtactggacccatttatgaggaggtggcttatgaaagtgtgatgttcgcgtatttcttgacaggcagtggcgtgatcttggctcactgcaacctccgactccctggttcaagcgattctcctgcctcagcctcctgagtggggattacaggccacagcaaacacaggtgtgcaggaaccgtttgtcatggaagccagggagcctgggaggcccacacccacctaccatcttgtccctaacaccagccagtcccaggtggaagaagatgtcagctcgccacctcaaaggtcctccgaaactatgcagctgaagaaggagatctccctgctgaatggggtcagcctggtggtgggcaacatgatcggctcagggatctttgtctcacccaagggtgtgctggtacacactgcctcctatgggatgtcactgattgtgtgggccattggtgggctcttctctgttgtgggtgccctttgttatgcagagctggggaccaccatcaccaagtcgggagccagctacgcttatattctagaggcctttgggggcttcattgccttcatccgcctgtgggtctcactgctagttgttgagcccaccggtcaggccatcatcgccatcacctttgccaactacatcatccagccgtccttccccagctgtgatcccccatacctggcctgccgtctcctggctgctgcttgcatatgtctgctgacatttgtgaactgtgcctatgtcaagtggggcacacgtgtgcaggacacgttcacttacgccaaggtcgtagcgctcattgccatcattgtcatgggccttgttaaactgtgccagggacactctgagcactttcaggacgcctttgagggttcctcctgggacatgggaaacctctctcttgccctctactctgccctcttctcttactcaggttgggacacccttaattttgtaacagaagaaatcaaaaacccagaaagaaatttgcccttggccattgggatttctatgccaattgtgacgctcatctacatcctgaccaatgtggcctattacacagtgctgaacatttcagatgtccttagcagtgatgctgtggctgtgacatttgctgaccagacgtttggcatgttcagctggaccatccccattgctgttgccctgtcctgctttgggggcctcaatgcatccatctttgcttcatcaaggttgttcttcgtgggctcccgggagggccacctaccggaccttctgtccatgatccacattgagcgttttacacctatccctgctttactgttcaattgcaccatggcactcatctacctcatcgtggaggatgttttccagcttatcaactacttcagcttcagctactggttcttcgtgggcctgtctgttgttggacagctctacctccgctggaaggagcccaagcggccccggcctctcaagctgagcgtgtttttccccatcgtgttctgcatatgctccgtgtttctggtgatagtgcccctcttcactgacaccattaattccctcattggcatcgggattgccctttctggagtccctttctacttcatgggtgtttacctgccagagtcccggaggccattgtttattcggaatgtcctggctgctatcaccagaggcacccagcagctttgcttttgtgtcctgactgagcttgatgtagccgaagaaaaaaaggatgagaggaaaactgactagaggtcagaggtggctttctgaggcctggaaggcaggccaaccagcaaaatcctgataacaagactctgtgggcccaactctcctgaattaaaggagccttttgacccaatcatatagtggggctcagggccagtgctcactcttattggtaagctataggagactcaggatctgggccaacctcaaggtgggggcttcagagggtggggggaagattggggaacggggggaatggtcatttagttttactcctgataggtagatgcagctcttacagatatttacttggtaaagtgcagtggggaagagggaatgctaggttgatagggctggtggcttctgaatttggtatttgaactaggagtccctatagaggggctgctttatgggaagtttttctctgaccaggtacaacacctgactttaaaggcctgaaatgctaccatttcttcctctggctcaaaattcttccctggggagagagttatattcccttatttattgatatttagtccagaacaccagttctaacgaagcatgcgtgtctcttcatctacaggatgcaataggctgattgtatttaaaaatcaaagtacccaaaactgagtccctttgggctcagaaatgtctgtggtattgggtcagactctgaccacaggttttatgctgtttagcacaatttctattgagtcttacctgcaacaatgaaccttaaagatttttttactcacgtacctgttacactttagcatacagatagatcatagatcacgttacaagcacttggctcaggtccagcaaggacagatgaacaaattcctgagtcagaagtctgttaatattgctgttttgaaggacaatcctttattttacttgagaccttacatctttgttctagctgacagtaaatctctgggtttctgttacgaactctaagagggctgaaacttctgatattcaggtggatcacctgaattctctcagctgtcaatggcttggagaacatctcatgggcccaagtcatcaaataacctgttcctctctgtaagggcagtgtgagggactgctgtgcagacccaagcaatcccaacctggtgctaggtcatttcacttttctgaaaacctcacatcaggctgcatcctcttctgtccctggcaccaggctttgtttacacttggagccaccttggtgtgggtcaccgggacagtgtactcctctcctgccagcctccccttccccgaggtgtggtggctgcagtctcaggaagagcttggtacttgtggggacttctgttttctccctgtggagatcagtgaagactgggaggaaagctgcttcaacctgagtccggctcttcagcaggctgcacaagtggaagcaactaattctggtgctcaggctgggctctccacccaagttaggcctgctctggcctaatggatcttactgtatgagcaggacggctgcattggattgtacaactgttttgtgatgcccccagacactgtcatcctgggccgagaagaacctgctagcttgacataccccatgggcttatccttaggttttggaattggtcaacagtgaggcagtctcccttcctgaccattcttctccacccagtcacagataagggaataaccttggccatatatttgctcaataaagattgaaggaagcatggtcatagttgccctgggttcagagcataatgcatatgtgaagcatggggtgacattcctactgtcatgggtttgggatttgtaacggcaaattcctgcccgacgacagggtgtcttatgcaaaggctgacttgcctgaacgctaagaacatgacttctgtctgagctaagctggcacccatcccagggctcctctggagctaatcctttaagcaaaatgtgcttgccttttaaagatccctgaccccagctttagctttctccaccagataaccagctaatcccaggaatttgctgccccccaccagtggcttctagggaaagcaaggacctcacatgccaggtgccctagtacttgcttagtgagccatgtcatcctcctttcatttttggatggtgacagcatttttcccctctgtgctggatacagacttctcccaggatcctctctttgggagcgaagccagaggatccctacagcactcaagcttcatggtggaattaatttctgccagctctttgttgtctgtctccttaaatccttttcctggtgtgcttattatcccttttgcagtgagtacagtttattaagttgtcagccctttaatattggggaaacttaatgagtataaatagcagggagcacattgtaacagcacagtgttttgtttttttcacccggttgctgtatgagaatggctttcaatcctttgtttctatgcctacagacagaaagcaagatgtctaatattagacatacaagttgctgcctgttataacggtgaattatacctttgtgcatgcctaggatgtttgttgttttaattagctgcaatatatacggcctgtgtacacagaatttaatcacttcggcaggttgaacaactccatgtagataagagcaagtgtaggcaaaggtttagaaaatggacataaagtcaaagaatgatggcaggtaggatgaaggagagatacttaggaaatcctaaaagaggcggcaagaaggtacctccctgtgtaactcaccttcccccatgacagtgagtaagagacactcacaggctatgagggtacacccctagctgaatgttctgtgttgtttccttagacctgtggtgtccgctgcaacagctactagccacgtgtagctaattacattaaaatgaaataaaattaaaagctcagtttctcagttgcgctaatcacatttcaagtgctcagcagccacccgtgtctactactacacagtgcagacacagaacatatcatcactgcagatagttctactggacaatgttacgctagaataaacaccaaggcagtcagttaaggcagctatggtttggaaaggcatacggacagagtctgcttagaagagatacaagttgttaataaaattgatcctgttgatagtagtttgtttttgtggtgggtgctgtgaagagtaaacattactcagtggaaagctaagttcagaaggtactttgtttttcctcccttgccttaagtccttggtatttataatcaatgctgaaccttctatttcactaccgctccctgttttagatattcagatttaaaaggttttcaaagaattactttcttccatgttcaaagctagattttactaaacacatgtatcacattcatatatattgtttcttggccccactgccaaaggaagtcagtcagtaatttcacaaccgttatcagagtttggaagcagaaatagctgttaactaaaatctcccactgctcagactactttctgccctaatggccattactatccagtctgtattgctacaagggacccactggtaccccttttagattctatcaaaaggaacagggttttcctagaggcaggcagcctggtggtatggcacagcagaagcttactgctaatgaaatgggaacctccccctcccttgtggtttcagcacagaacctgaatgccaggaaaaattcctgggccaagaagctaaagctaaagaaaccttccttttttcaacgtttttttttctttcaaactgtagggtcacttttgattgaggcaaaggggtcctactgtaagtggaaaagactcactcccctaacataagttttcactgtggtgggatggtgccgcccgatatgcttgatatgcttttccttccacatgttaagctaggaaacctaacaggatgtcagcagggcagttaactctggactcagagccctcaagggcatgtggcagaacctcatggacatcacaagaccatcagtctgaatccaggtcgtgggggctgtcatagccgaactccttctgcacatccagagggtacttgctccacatccgctgtctgctgctgcctctttcctcctcactcaggctgttgtagtcagcagagcctagaatgacatcccgggagtggattctaaatgtgattttcctaggctactgcaggagccccttctcttctcagaaaggtctgtttttgttcccgattgtaatgcaaaatccttgctcaataaataaaaaagaatatagaattcttttttttttaaagaaggaatcactttcctatcatctaaaccaagttccttcacactggagtattttgtcacttctcccctccgtggagtattttgtcacttctcccctccgtataggattttttgttgttgtaagagttgtagtcatattgtaaatatttttgtacctttctccttttaacgtgttattgacaaacctccccaaaagaatatgcaattgtttgattcatttctctgttatcagacaccaataaattctttttgttgggc

SEQ ID NO: 184575 - DNA, 510 bp, Homo sapiens
  Payload ID: 16346
  Gene Symbol: SLC7A6
  Gene Name: solute carrier family 7 (amino acid transporter light chain, y+L system), member 6
  ENST ID: ENST00000568088
  CDS Start-End: 426-510
actgggaggtaacgggctgggccatgggcgggcgcgccgggagcggggccggggctgggccgcgttctgtgggagccgaaccctgtgggtcttcgctgccgccgtcgggagcgggatgcggcccagaaacagcgcggggctggccgatcggggccgcgcgagaggcgctgcggagtttatgtggccgaggcagacaagtggaattaggccttgctgcaggggacttcatttccttctcagtactggacccatttatgaggaggtggcttatgaaagtgtgatgttcgcgtatttcttgacaggcagtggcgtgatcttggctcactgcaacctccgactccctggttcaagcgattctcctgcctcagcctcctgagtggggattacaggccacagcaaacacaggtgtgcaggaaccgtttgtcatggaagccagggagcctgggaggcccacacccacctaccatcttgtccctaacaccagccagtcccaggtggaagaagatgtca

SEQ ID NO: 184576 - DNA, 514 bp, Homo sapiens
  Payload ID: 16346
  Gene Symbol: SLC7A6
  Gene Name: solute carrier family 7 (amino acid transporter light chain, y+L system), member 6
  ENST ID: ENST00000563146
  CDS Start-End: 240-514
ggccgaggcagacaagtggaattaggccttgctgcaggggacttcatttccttctcagtactggacccatttatgaggaggtggcttatgaaagtgtgatgttcgcgtatttcttgacagtggcgtgatcttggctcactgcaacctccgactccctggttcaagcgattctcctgcctcagcctcctgagtggggattacaggccacagcaaacacaggtgtgcaggaaccgtttgtcatggaagccagggagcctgggaggcccacacccacctaccatcttgtccctaacaccagccagtcccaggtggaagaagatgtcagctcgccacctcaaaggtcctccgaaactatgcagctgaagaaggagatctccctgctgaatggggtcagcctggtggtgggcaacatgatcggctcagggatctttgtctcacccaagggtgtgctggtacacactgcctcctatgggatgtcactgattgtgtgggccattggtgggctcttctctgt

SEQ ID NO: 184577 - DNA, 526 bp, Homo sapiens
  Payload ID: 16346
  Gene Symbol: SLC7A6
  Gene Name: solute carrier family 7 (amino acid transporter light chain, y+L system), member 6
  ENST ID: ENST00000566579
  CDS Start-End: 1-383
tgaatggggtcagcctggtggtgggcaacatgatcggctcagggatctttgtctcacccaagggtgtgctggtacacactgcctcctatgggatgtcactgattgtgtgggccattggtgggctcttctctgttgtgggtgccctttgttatgcagagctggggaccaccatcaccaagtcgggagccagctacgcttatattctagaggcctttgggggcttcattgccttcatccgcctgtgggtctcactgctagttgttgagcccaccggtcaggccatcatcgccatcacctttgccaactacatcatccagccgtccttccccagctgtgatcccccatacctggcctgccgtctcctggctgctgcttgcatataaatttgcccttggccattgggatttctatgccaattgtgacgctcatctacatcctgaccaatgtggcctattacacagtgctgaacatttcagatgtccttagcagtgatgctgtggctgtgacatttgctgaccagacgttt

SEQ ID NO: 184578 - DNA, 547 bp, Homo sapiens
  Payload ID: 16346
  Gene Symbol: SLC7A6
  Gene Name: solute carrier family 7 (amino acid transporter light chain, y+L system), member 6
  ENST ID: ENST00000564708
  CDS Start-End: 326-547
gggctgggccatgggcgggcgcgccgggagcggggccggggctgggccgcgttctgtgggagccgaaccctgtgggtcttcgctgccgccgtcgggagcgggatgcggcccagaaacagcgcggggctggccgatcggggccgcgcgagaggcgctgcggagtttatgtggccgaggcagacaagtggaattaggccttgctgcaggggacttcatttccttctcagtactggacccatttatgaggaggtggcttatgaaagtgtgatgttcgcgtatttcttgacaggccacagcaaacacaggtgtgcaggaaccgtttgtcatggaagccagggagcctgggaggcccacacccacctaccatcttgtccctaacaccagccagtcccaggtggaagaagatgtcagctcgccacctcaaaggtcctccgaaactatgcagctgaagaaggagatctccctgctgaatggggtcagcctggtggtgggcaacatgatcggctcagggatctttgtctcacccaagggtgtgctggtacacact

SEQ ID NO: 184579 - DNA, 493 bp, Homo sapiens
  Payload ID: 16346
  Gene Symbol: SLC7A6
  Gene Name: solute carrier family 7 (amino acid transporter light chain, y+L system), member 6
  ENST ID: ENST00000562727
  CDS Start-End: 422-493
tcagtgcccagccatccggggcttgtctctcagaactgctcccagatttcagatctgggaggagcagacttgaaaggctgtgagtacttccttatatcagttccacctctttttggtggcggtgaggccttttggggacctgcccaggctgcctgcattactcaggtcccatgtgtgctgcgcagacggcttttgcttcccaactttgatctcagatcgttattcaagtcgttacactggagtttattttcctggcaatttatgtggccgaggcagacaagtggaattaggccttgctgcaggggacttcatttccttctcagtactggacccatttatgaggaggtggcttatgaaagtgtgatgttcgcgtatttcttgacaggccacagcaaacacaggtgtgcaggaaccgtttgtcatggaagccagggagcctgggaggcccacacccacctaccatcttgtccctaacaccagccagtcccaggtg

SEQ ID NO: 184580 - DNA, 581 bp, Homo sapiens
  Payload ID: 16346
  Gene Symbol: SLC7A6
  Gene Name: solute carrier family 7 (amino acid transporter light chain, y+L system), member 6
  ENST ID: ENST00000568024
  CDS Start-End: 213-581
atggcttggtgccagagtgagagcaaaagtggtgctgccttaaagctcagcctcactgaagcagagaccaagtcttgctctgttgccaggcagtggcgtgatcttggctcactgcaacctccgactccctggttcaagcgattctcctgcctcagcctcctgagtggggattacaggccacagcaaacacaggtgtgcaggaaccgtttgtcatggaagccagggagcctgggaggcccacacccacctaccatcttgtccctaacaccagccagtcccaggtggaagaagatgtcagctcgccacctcaaaggtcctccgaaactatgcagctgaagaaggagatctccctgctgaatggggtcagcctggtggtgggcaacatgatcggctcagggatctttgtctcacccaagggtgtgctggtacacactgcctcctatgggatgtcactgattgtgtgggccattggtgggctcttctctgttgtgggtgccctttgttatgcagagctggggaccaccatcaccaagtcgggagccagctacgcttatattctagaggcctttgggggcttcatt

SEQ ID NO: 184581 - DNA, 573 bp, Homo sapiens
  Payload ID: 16346
  Gene Symbol: SLC7A6
  Gene Name: solute carrier family 7 (amino acid transporter light chain, y+L system), member 6
  ENST ID: ENST00000566834
  CDS Start-End: 280-573
atcctggcggcgccgggccactgggagagtttatgtggccgaggcagacaagtggaattaggccttgctgcaggggacttcatttccttctcagtactggacccatttatgaggaggtggcttatgaaagtgtgatgttcgcgtatttcttgacaggcagtggcgtgatcttggctcactgcaacctccgactccctggttcaagcgattctcctgcctcagcctcctgagtggggattacaggccacagcaaacacaggtgtgcaggaaccgtttgtcatggaagccagggagcctgggaggcccacacccacctaccatcttgtccctaacaccagccagtcccaggtggaagaagatgtcagctcgccacctcaaaggtcctccgaaactatgcagctgaagaaggagatctccctgctgaatgggttgttgagcccaccggtcaggccatcatcgccatcacctttgccaactacatcatccagccgtccttccccagctgtgatcccccatacctggcctgccgtctcctggctgctgcttgcatatgtaacctgccatctgcattca

SEQ ID NO: 184582 - DNA, 543 bp, Homo sapiens
  Payload ID: 16346
  Gene Symbol: SLC7A6
  Gene Name: solute carrier family 7 (amino acid transporter light chain, y+L system), member 6
  ENST ID: ENST00000567346
  CDS Start-End: 1-153
gtgaactgtgcctatgtcaagtggggcacacgtgtgcaggacacgttcacttacgccaaggtcgtagcgctcattgccatcattgtcatgggccttgttaaactgtgccaggaaatttgcccttggccattgggatttctatgccaattgtgacgctcatctacatcctgaccaatgtggcctattacacagtgctgaacatttcagatgtccttagcagtgatgctgtggctgtgacatttgctgaccagacgtttggcatgttcagctggaccatccccattgctgttgccctgtcctgctttgggggcctcaatgcatccatctttgcttcatcaaggttgttcttcgtgggctcccgggagggccacctaccggaccttctgtccatgatccacattgagcgttttacacctatccctgctttactgttcaatgtaagctttgctgggaccacggggctcaggtggatctgtgcattgctccttctgatttgtgctaagttgttaaataagagggaccctgagaaaggccttactctaa

SEQ ID NO: 184583 - DNA, 6124 bp, Homo sapiens
  Payload ID: 16346
  Gene Symbol: SLC7A6
  Gene Name: solute carrier family 7 (amino acid transporter light chain, y+L system), member 6
  ENST ID: ENST00000618043
  CDS Start-End: 227-916
ctgagctgccgcggcggcggcggcgcgaccgagcatcctggcggcgccgggccactgggagagtttatgtggccgaggcagacaagtggaattaggccttgctgcaggggacttcatttccttctcagtactggacccatttatgaggaggtggcttatgaaagtgtgatgttcgcgtatttcttgacaggccacagcaaacacaggtgtgcaggaaccgtttgtcatggaagccagggagcctgggaggcccacacccacctaccatcttgtccctaacaccagccagtcccaggtggaagaagatgtcagctcgccacctcaaaggtcctccgaaactatgcagctgaagaaggagatctccctgctgaatggggtcagcctggtggtgggcaacatgatcggctcagggatctttgtctcacccaagggtgtgctggtacacactgcctcctatgggatgtcactgattgtgtgggccattggtgggctcttctctgttgtgggtgccctttgttatgcagagctggggaccaccatcaccaagtcgggagccagctacgcttatattctagaggcctttgggggcttcattgccttcatccgcctgtgggtctcactgctagttgttgagcccaccggtcaggccatcatcgccatcacctttgccaactacatcatccagccgtccttccccagctgtgatcccccatacctggcctgccgtctcctggctgctgcttgcatatgtctgctgacatttgtgaactgtgcctatgtcaagtggggcacacgtgtgcaggacacgttcacttacgccaaggtcgtagcgctcattgccatcattgtcatgggccttgttaaactgtgccaggaaatttgcccttggccattgggatttctatgccaattgtgacgctcatctacatcctgaccaatgtggcctattacacagtgctgaacatttcagatgtccttagcagtgatgctgtggctgtgacatttgctgaccagacgtttggcatgttcagctggaccatccccattgctgttgccctgtcctgctttgggggcctcaatgcatccatctttgcttcatcaaggttgttcttcgtgggctcccgggagggccacctaccggaccttctgtccatgatccacattgagcgttttacacctatccctgctttactgttcaattgcaccatggcactcatctacctcatcgtggaggatgttttccagcttatcaactacttcagcttcagctactggttcttcgtgggcctgtctgttgttggacagctctacctccgctggaaggagcccaagcggccccggcctctcaagctgagcgtgtttttccccatcgtgttctgcatatgctccgtgtttctggtgatagtgcccctcttcactgacaccattaattccctcattggcatcgggattgccctttctggagtccctttctacttcatgggtgtttacctgccagagtcccggaggccattgtttattcggaatgtcctggctgctatcaccagaggcacccagcagctttgcttttgtgtcctgactgagcttgatgtagccgaagaaaaaaaggatgagaggaaaactgactagaggtcagaggtggctttctgaggcctggaaggcaggccaaccagcaaaatcctgataacaagactctgtgggcccaactctcctgaattaaaggagccttttgacccaatcatatagtggggctcagggccagtgctcactcttattggtaagctataggagactcaggatctgggccaacctcaaggtgggggcttcagagggtggggggaagattggggaacggggggaatggtcatttagttttactcctgataggtagatgcagctcttacagatatttacttggtaaagtgcagtggggaagagggaatgctaggttgatagggctggtggcttctgaatttggtatttgaactaggagtccctatagaggggctgctttatgggaagtttttctctgaccaggtacaacacctgactttaaaggcctgaaatgctaccatttcttcctctggctcaaaattcttccctggggagagagttatattcccttatttattgatatttagtccagaacaccagttctaacgaagcatgcgtgtctcttcatctacaggatgcaataggctgattgtatttaaaaatcaaagtacccaaaactgagtccctttgggctcagaaatgtctgtggtattgggtcagactctgaccacaggttttatgctgtttagcacaatttctattgagtcttacctgcaacaatgaaccttaaagatttttttactcacgtacctgttacactttagcatacagatagatcatagatcacgttacaagcacttggctcaggtccagcaaggacagatgaacaaattcctgagtcagaagtctgttaatattgctgttttgaaggacaatcctttattttacttgagaccttacatctttgttctagctgacagtaaatctctgggtttctgttacgaactctaagagggctgaaacttctgatattcaggtggatcacctgaattctctcagctgtcaatggcttggagaacatctcatgggcccaagtcatcaaataacctgttcctctctgtaagggcagtgtgagggactgctgtgcagacccaagcaatcccaacctggtgctaggtcatttcacttttctgaaaacctcacatcaggctgcatcctcttctgtccctggcaccaggctttgtttacacttggagccaccttggtgtgggtcaccgggacagtgtactcctctcctgccagcctccccttccccgaggtgtggtggctgcagtctcaggaagagcttggtacttgtggggacttctgttttctccctgtggagatcagtgaagactgggaggaaagctgcttcaacctgagtccggctcttcagcaggctgcacaagtggaagcaactaattctggtgctcaggctgggctctccacccaagttaggcctgctctggcctaatggatcttactgtatgagcaggacggctgcattggattgtacaactgttttgtgatgcccccagacactgtcatcctgggccgagaagaacctgctagcttgacataccccatgggcttatccttaggttttggaattggtcaacagtgaggcagtctcccttcctgaccattcttctccacccagtcacagataagggaataaccttggccatatatttgctcaataaagattgaaggaagcatggtcatagttgccctgggttcagagcataatgcatatgtgaagcatggggtgacattcctactgtcatgggtttgggatttgtaacggcaaattcctgcccgacgacagggtgtcttatgcaaaggctgacttgcctgaacgctaagaacatgacttctgtctgagctaagctggcacccatcccagggctcctctggagctaatcctttaagcaaaatgtgcttgccttttaaagatccctgaccccagctttagctttctccaccagataaccagctaatcccaggaatttgctgccccccaccagtggcttctagggaaagcaaggacctcacatgccaggtgccctagtacttgcttagtgagccatgtcatcctcctttcatttttggatggtgacagcatttttcccctctgtgctggatacagacttctcccaggatcctctctttgggagcgaagccagaggatccctacagcactcaagcttcatggtggaattaatttctgccagctctttgttgtctgtctccttaaatccttttcctggtgtgcttattatcccttttgcagtgagtacagtttattaagttgtcagccctttaatattggggaaacttaatgagtataaatagcagggagcacattgtaacagcacagtgttttgtttttttcacccggttgctgtatgagaatggctttcaatcctttgtttctatgcctacagacagaaagcaagatgtctaatattagacatacaagttgctgcctgttataacggtgaattatacctttgtgcatgcctaggatgtttgttgttttaattagctgcaatatatacggcctgtgtacacagaatttaatcacttcggcaggttgaacaactccatgtagataagagcaagtgtaggcaaaggtttagaaaatggacataaagtcaaagaatgatggcaggtaggatgaaggagagatacttaggaaatcctaaaagaggcggcaagaaggtacctccctgtgtaactcaccttcccccatgacagtgagtaagagacactcacaggctatgagggtacacccctagctgaatgttctgtgttgtttccttagacctgtggtgtccgctgcaacagctactagccacgtgtagctaattacattaaaatgaaataaaattaaaagctcagtttctcagttgcgctaatcacatttcaagtgctcagcagccacccgtgtctactactacacagtgcagacacagaacatatcatcactgcagatagttctactggacaatgttacgctagaataaacaccaaggcagtcagttaaggcagctatggtttggaaaggcatacggacagagtctgcttagaagagatacaagttgttaataaaattgatcctgttgatagtagtttgtttttgtggtgggtgctgtgaagagtaaacattactcagtggaaagctaagttcagaaggtactttgtttttcctcccttgccttaagtccttggtatttataatcaatgctgaaccttctatttcactaccgctccctgttttagatattcagatttaaaaggttttcaaagaattactttcttccatgttcaaagctagattttactaaacacatgtatcacattcatatatattgtttcttggccccactgccaaaggaagtcagtcagtaatttcacaaccgttatcagagtttggaagcagaaatagctgttaactaaaatctcccactgctcagactactttctgccctaatggccattactatccagtctgtattgctacaagggacccactggtaccccttttagattctatcaaaaggaacagggttttcctagaggcaggcagcctggtggtatggcacagcagaagcttactgctaatgaaatgggaacctccccctcccttgtggtttcagcacagaacctgaatgccaggaaaaattcctgggccaagaagctaaagctaaagaaaccttccttttttcaacgtttttttttctttcaaactgtagggtcacttttgattgaggcaaaggggtcctactgtaagtggaaaagactcactcccctaacataagttttcactgtggtgggatggtgccgcccgatatgcttgatatgcttttccttccacatgttaagctaggaaacctaacaggatgtcagcagggcagttaactctggactcagagccctcaagggcatgtggcagaacctcatggacatcacaagaccatcagtctgaatccaggtcgtgggggctgtcatagccgaactccttctgcacatccagagggtacttgctccacatccgctgtctgctgctgcctctttcctcctcactcaggctgttgtagtcagcagagcctagaatgacatcccgggagtggattctaaatgtgattttcctaggctactgcaggagccccttctcttctcagaaaggtctgtttttgttcccgattgtaatgcaaaatccttgctcaataaataaaaaagaatatagaattcttttttttttaaagaaggaatcactttcctatcatctaaaccaagttccttcacactggagtattttgtcacttctcccctccgtggagtattttgtcacttctcccctccgtataggattttttgttgttgtaagagttgtagtcatattgtaaatatttttgtacctttctccttttaacgtgttattgacaaacctccccaaaagaatatgcaattgtttgattcatttctctgttatcagacaccaataaattctttttgttgggccttc

SEQ ID NO: 184584 - DNA, 2263 bp, Homo sapiens
  Payload ID: 16347
  Gene Symbol: SLC7A7
  Gene Name: solute carrier family 7 (amino acid transporter light chain, y+L system), member 7
  Uniprot ID: Q9UM01
  ENST ID: ENST00000285850
  CDS Start-End: 340-1875
atttcagtccccgttaccctctgctttttctgctcctcagagtcaacagctgttgcagcatgagcgatacgcttggttctcctaactagcaccttcccctctcccctgactcagctggtagcccctcctccccgcacctgcccaaaggtcactggacaggcatttgtctggccttcccttttactgctggctgggaaggaggagcatcagaccacagatcctggaaggcacttctctccctgactgctgctcacactgccgtgagaacctgcttatatccaggaccaaggagtgagtggcaatgccaggaagctggtgaagggtttcctctcctccaccatggttgacagcactgagtatgaagtggcctcccagcctgaggtggaaacctcccctttgggtgatggggccagcccagggccggagcaggtgaagctgaagaaggagatctcactgcttaacggcgtgtgcctgattgtggggaacatgatcggctcgggcatctttgtttcccccaagggtgtgctcatatacagtgcctcctttggtctctctctggtcatctgggctgtcgggggcctcttctccgtctttggggccctttgttatgcggaactgggcaccaccattaagaaatctggggccagctatgcctatatcctggaggcctttggaggattccttgctttcatcagactctggacctccctgctcatcattgagcccaccagccaggccatcattgccatcacctttgccaactacatggtacagcctctcttcccgagctgcttcgccccttatgctgccagccgcctgctggctgctgcctgcatttgtctcttaaccttcattaactgtgcctatgtcaaatggggaaccctggtacaagatattttcacctatgctaaagtattggcactgatcgcggtcatcgttgcaggcattgttagacttggccagggagcctctactcattttgagaattcctttgagggttcatcatttgcagtgggtgacattgccctggcactgtactcagctctgttctcctactcaggctgggacaccctcaactatgtcactgaagagatcaagaatcctgagaggaacctgcccctctccattggcatctccatgcccattgtcaccatcatctatatcttgaccaatgtggcctattatactgtgctagacatgagagacatcttggccagtgatgctgttgctgtgacttttgcagatcagatatttggaatatttaactggataattccactgtcagttgcattatcctgttttggtggcctcaatgcctccattgtggctgcttctaggcttttctttgtgggctcaagagaaggccatctccctgatgccatctgcatgatccatgttgagcggttcacaccagtgccttctctgctcttcaatggtatcatggcattgatctacttgtgcgtggaagacatcttccagctcattaactactacagcttcagctactggttctttgtggggctttctattgtgggtcagctttatctgcgctggaaggagcctgatcgacctcgtcccctcaagctcagcgttttcttcccgattgtcttctgcctctgcaccatcttcctggtggctgttccactttacagtgatactatcaactccctcatcggcattgccattgccctctcaggcctgcccttttacttcctcatcatcagagtgccagaacataagcgaccgctttacctccgaaggatcgtggggtctgccacaaggtacctccaggtcctgtgtatgtcagttgctgcagaaatggatttggaagatggaggagagatgcccaagcaacgggatcccaaatctaactaaacaccatctggaatcctgatgtggaaagcaggggtttctggtctactggctagagctaaggaagttgaaaaggaaagctcacttctttggaggcacctgtccagaagcctggcctaggcagcttcaacctttgaacttactttttgaaatgaaaagtaatttatttgttttgctacatactgttccagacttttaaaggggacaatgaaggtgactgtggggaggagcatgtcaggtttgggcttggttgttttagaagcacctgggtgtgcctacctactcctcttttcttttaaaagggcccacaatgctccaatttcctgtctcctttagagagacatgaaactatcacaggtgctggatgacaataaaagtttatgttcctaaa

SEQ ID NO: 184585 - DNA, 2098 bp, Homo sapiens
  Payload ID: 16347
  Gene Symbol: SLC7A7
  Gene Name: solute carrier family 7 (amino acid transporter light chain, y+L system), member 7
  Uniprot ID: Q9UM01
  ENST ID: ENST00000397528
  CDS Start-End: 243-1778
aatctcagcatgggaacaagcctttgtgtcacactgtgcaaccttcctccctttcttaaatgcttggggcatttgtctggccttcccttttactgctggctgggaaggaggagcatcagaccacagatcctggaaggcacttctctccctgactgctgctcacactgccgtgagaacctgcttatatccaggaccaaggaggcaatgccaggaagctggtgaagggtttcctctcctccaccatggttgacagcactgagtatgaagtggcctcccagcctgaggtggaaacctcccctttgggtgatggggccagcccagggccggagcaggtgaagctgaagaaggagatctcactgcttaacggcgtgtgcctgattgtggggaacatgatcggctcgggcatctttgtttcccccaagggtgtgctcatatacagtgcctcctttggtctctctctggtcatctgggctgtcgggggcctcttctccgtctttggggccctttgttatgcggaactgggcaccaccattaagaaatctggggccagctatgcctatatcctggaggcctttggaggattccttgctttcatcagactctggacctccctgctcatcattgagcccaccagccaggccatcattgccatcacctttgccaactacatggtacagcctctcttcccgagctgcttcgccccttatgctgccagccgcctgctggctgctgcctgcatttgtctcttaaccttcattaactgtgcctatgtcaaatggggaaccctggtacaagatattttcacctatgctaaagtattggcactgatcgcggtcatcgttgcaggcattgttagacttggccagggagcctctactcattttgagaattcctttgagggttcatcatttgcagtgggtgacattgccctggcactgtactcagctctgttctcctactcaggctgggacaccctcaactatgtcactgaagagatcaagaatcctgagaggaacctgcccctctccattggcatctccatgcccattgtcaccatcatctatatcttgaccaatgtggcctattatactgtgctagacatgagagacatcttggccagtgatgctgttgctgtgacttttgcagatcagatatttggaatatttaactggataattccactgtcagttgcattatcctgttttggtggcctcaatgcctccattgtggctgcttctaggcttttctttgtgggctcaagagaaggccatctccctgatgccatctgcatgatccatgttgagcggttcacaccagtgccttctctgctcttcaatggtatcatggcattgatctacttgtgcgtggaagacatcttccagctcattaactactacagcttcagctactggttctttgtggggctttctattgtgggtcagctttatctgcgctggaaggagcctgatcgacctcgtcccctcaagctcagcgttttcttcccgattgtcttctgcctctgcaccatcttcctggtggctgttccactttacagtgatactatcaactccctcatcggcattgccattgccctctcaggcctgcccttttacttcctcatcatcagagtgccagaacataagcgaccgctttacctccgaaggatcgtggggtctgccacaaggtacctccaggtcctgtgtatgtcagttgctgcagaaatggatttggaagatggaggagagatgcccaagcaacgggatcccaaatctaactaaacaccatctggaatcctgatgtggaaagcaggggtttctggtctactggctagagctaaggaagttgaaaaggaaagctcacttctttggaggcacctgtccagaagcctggcctaggcagcttcaacctttgaacttactttttgaaatgaaaagtaatttatttgttttgctacatactgttccagacttttaaaggggacaatgaaggtgactgtggggaggagcatgtcaggtttgggcttggttgttttagaagcacctgggtgtgcctacctactcctcttttcttttaaaagggcccacaatgctccaatttc

SEQ ID NO: 184586 - DNA, 2094 bp, Homo sapiens
  Payload ID: 16347
  Gene Symbol: SLC7A7
  Gene Name: solute carrier family 7 (amino acid transporter light chain, y+L system), member 7
  Uniprot ID: Q9UM01
  ENST ID: ENST00000397529
  CDS Start-End: 202-1737
atttcagtccccgttaccctctgctttttctgctcctcagagtcaacagctgttgcagcatgagcgatacgcttggttctcctaactagcaccttcccctctcccctgactcagctggtagcccctcctccccgcacctgcccaaaggtcactggacagggcaatgccaggaagctggtgaagggtttcctctcctccaccatggttgacagcactgagtatgaagtggcctcccagcctgaggtggaaacctcccctttgggtgatggggccagcccagggccggagcaggtgaagctgaagaaggagatctcactgcttaacggcgtgtgcctgattgtggggaacatgatcggctcgggcatctttgtttcccccaagggtgtgctcatatacagtgcctcctttggtctctctctggtcatctgggctgtcgggggcctcttctccgtctttggggccctttgttatgcggaactgggcaccaccattaagaaatctggggccagctatgcctatatcctggaggcctttggaggattccttgctttcatcagactctggacctccctgctcatcattgagcccaccagccaggccatcattgccatcacctttgccaactacatggtacagcctctcttcccgagctgcttcgccccttatgctgccagccgcctgctggctgctgcctgcatttgtctcttaaccttcattaactgtgcctatgtcaaatggggaaccctggtacaagatattttcacctatgctaaagtattggcactgatcgcggtcatcgttgcaggcattgttagacttggccagggagcctctactcattttgagaattcctttgagggttcatcatttgcagtgggtgacattgccctggcactgtactcagctctgttctcctactcaggctgggacaccctcaactatgtcactgaagagatcaagaatcctgagaggaacctgcccctctccattggcatctccatgcccattgtcaccatcatctatatcttgaccaatgtggcctattatactgtgctagacatgagagacatcttggccagtgatgctgttgctgtgacttttgcagatcagatatttggaatatttaactggataattccactgtcagttgcattatcctgttttggtggcctcaatgcctccattgtggctgcttctaggcttttctttgtgggctcaagagaaggccatctccctgatgccatctgcatgatccatgttgagcggttcacaccagtgccttctctgctcttcaatggtatcatggcattgatctacttgtgcgtggaagacatcttccagctcattaactactacagcttcagctactggttctttgtggggctttctattgtgggtcagctttatctgcgctggaaggagcctgatcgacctcgtcccctcaagctcagcgttttcttcccgattgtcttctgcctctgcaccatcttcctggtggctgttccactttacagtgatactatcaactccctcatcggcattgccattgccctctcaggcctgcccttttacttcctcatcatcagagtgccagaacataagcgaccgctttacctccgaaggatcgtggggtctgccacaaggtacctccaggtcctgtgtatgtcagttgctgcagaaatggatttggaagatggaggagagatgcccaagcaacgggatcccaaatctaactaaacaccatctggaatcctgatgtggaaagcaggggtttctggtctactggctagagctaaggaagttgaaaaggaaagctcacttctttggaggcacctgtccagaagcctggcctaggcagcttcaacctttgaacttactttttgaaatgaaaagtaatttatttgttttgctacatactgttccagacttttaaaggggacaatgaaggtgactgtggggaggagcatgtcaggtttgggcttggttgttttagaagcacctgggtgtgcctacctactcctcttttcttttaaaagggcccacaatgctccaatttcctgtctcctttagagagacatgaaactatcacaggtg

SEQ ID NO: 184587 - DNA, 2447 bp, Homo sapiens
  Payload ID: 16347
  Gene Symbol: SLC7A7
  Gene Name: solute carrier family 7 (amino acid transporter light chain, y+L system), member 7
  Uniprot ID: Q9UM01
  ENST ID: ENST00000397532
  CDS Start-End: 527-2062
gcatggaggacacagagagagagagtgctgtgtattccttccccgctactgtcctgtcctcagctaacttgctctgggacagcttccccagggctacagatactgcactcagctgactgtcctttcttctgggcccctggtcccagagcagagctgacaaaggagattcctgagagagcaccttcttatcacagaaagtgctgagccaagagctcctagctgccccttttgcagatgtgaagggccagtgaaccttggacccagatggttgcttaatactcctttccccctccctcactccttcctttgcgggctgcctcacctcctccacccttcttgcttaaatccataggcatttgtctggccttcccttttactgctggctgggaaggaggagcatcagaccacagatcctggaaggcacttctctccctgactgctgctcacactgccgtgagaacctgcttatatccaggaccaaggaggcaatgccaggaagctggtgaagggtttcctctcctccaccatggttgacagcactgagtatgaagtggcctcccagcctgaggtggaaacctcccctttgggtgatggggccagcccagggccggagcaggtgaagctgaagaaggagatctcactgcttaacggcgtgtgcctgattgtggggaacatgatcggctcgggcatctttgtttcccccaagggtgtgctcatatacagtgcctcctttggtctctctctggtcatctgggctgtcgggggcctcttctccgtctttggggccctttgttatgcggaactgggcaccaccattaagaaatctggggccagctatgcctatatcctggaggcctttggaggattccttgctttcatcagactctggacctccctgctcatcattgagcccaccagccaggccatcattgccatcacctttgccaactacatggtacagcctctcttcccgagctgcttcgccccttatgctgccagccgcctgctggctgctgcctgcatttgtctcttaaccttcattaactgtgcctatgtcaaatggggaaccctggtacaagatattttcacctatgctaaagtattggcactgatcgcggtcatcgttgcaggcattgttagacttggccagggagcctctactcattttgagaattcctttgagggttcatcatttgcagtgggtgacattgccctggcactgtactcagctctgttctcctactcaggctgggacaccctcaactatgtcactgaagagatcaagaatcctgagaggaacctgcccctctccattggcatctccatgcccattgtcaccatcatctatatcttgaccaatgtggcctattatactgtgctagacatgagagacatcttggccagtgatgctgttgctgtgacttttgcagatcagatatttggaatatttaactggataattccactgtcagttgcattatcctgttttggtggcctcaatgcctccattgtggctgcttctaggcttttctttgtgggctcaagagaaggccatctccctgatgccatctgcatgatccatgttgagcggttcacaccagtgccttctctgctcttcaatggtatcatggcattgatctacttgtgcgtggaagacatcttccagctcattaactactacagcttcagctactggttctttgtggggctttctattgtgggtcagctttatctgcgctggaaggagcctgatcgacctcgtcccctcaagctcagcgttttcttcccgattgtcttctgcctctgcaccatcttcctggtggctgttccactttacagtgatactatcaactccctcatcggcattgccattgccctctcaggcctgcccttttacttcctcatcatcagagtgccagaacataagcgaccgctttacctccgaaggatcgtggggtctgccacaaggtacctccaggtcctgtgtatgtcagttgctgcagaaatggatttggaagatggaggagagatgcccaagcaacgggatcccaaatctaactaaacaccatctggaatcctgatgtggaaagcaggggtttctggtctactggctagagctaaggaagttgaaaaggaaagctcacttctttggaggcacctgtccagaagcctggcctaggcagcttcaacctttgaacttactttttgaaatgaaaagtaatttatttgttttgctacatactgttccagacttttaaaggggacaatgaaggtgactgtggggaggagcatgtcaggtttgggcttggttgttttagaagcacctgggtgtgcctacctactcctcttttcttttaaaagggcccacaatgctccaatttcctgtctcctttagagagacatgaaactatcacaggtgctggatgacaataaaagtttatgttcct

SEQ ID NO: 184588 - DNA, 847 bp, Homo sapiens
  Payload ID: 16347
  Gene Symbol: SLC7A7
  Gene Name: solute carrier family 7 (amino acid transporter light chain, y+L system), member 7
  ENST ID: ENST00000488800
  CDS Start-End: 424-847
atctgggttttcaatcacggctccgccatcttgggtcatcgtacggaaggagagacaaaactgcagtacaggtttttgagagctgtcaaatctctgctatatcagtactggctaaattaggtgttaaatgattgagcttcaagatgggcaaatcatgacttcggactacattcctccttgcctggcggctgggaaattccgtccgcgctgctgctaagacttcagatgaaagacgctccggggactccggcatttgtctggccttcccttttactgctggctgggaaggaggagcatcagaccacagatcctggaaggcacttctctccctgactgctgctcacactgccgtgagaacctgcttatatccaggaccaaggaggcaatgccaggaagctggtgaagggtttcctctcctccaccatggttgacagcactgagtatgaagtggcctcccagcctgaggtggaaacctcccctttgggtgatggggccagcccagggccggagcaggtgaagctgaagaaggagatctcactgcttaacggcgtgtgcctgattgtggggaacatgatcggctcgggcatctttgtttcccccaagggtgtgctcatatacagtgcctcctttggtctctctctggtcatctgggctgtcgggggcctcttctccgtctttggggccctttgttatgcggaactgggcaccaccattaagaaatctggggccagctatgcctatatcctggaggcctttggaggattccttgctttcatcagactctggacctccctgctcatcattgagcccaccagccaggccatcattgccatcacctttgccaact

SEQ ID NO: 184589 - DNA, 569 bp, Homo sapiens
  Payload ID: 16347
  Gene Symbol: SLC7A7
  Gene Name: solute carrier family 7 (amino acid transporter light chain, y+L system), member 7
  ENST ID: ENST00000557629
  CDS Start-End: 220-569
ttgctgcccgacgccttcccagcttagtggagcccactttctttggcatttgtctggccttcccttttactgctggctgggaaggaggagcatcagaccacagatcctggaaggcacttctctccctgactgctgctcacactgccgtgagaacctgcttatatccaggaccaaggaggcaatgccaggaagctggtgaagggtttcctctcctccaccatggttgacagcactgagtatgaagtggcctcccagcctgaggtggaaacctcccctttgggtgatggggccagcccagggccggagcaggtgaagctgaagaaggagatctcactgcttaacggcgtgtgcctgattgtggggaacatgatcggctcgggcatctttgtttcccccaagggtgtgctcatatacagtgcctcctttggtctctctctggtcatctgggctgtcgggggcctcttctccgtctttggggccctttgttatgcggaactgggcaccaccattaagaaatctggggccagctatgcctatatcctggaggcctttggaggattccttgcttt

SEQ ID NO: 184590 - DNA, 720 bp, Homo sapiens
  Payload ID: 16347
  Gene Symbol: SLC7A7
  Gene Name: solute carrier family 7 (amino acid transporter light chain, y+L system), member 7
  ENST ID: ENST00000554758
  CDS Start-End: 227-720
tttgtgtcacactgtgcaaccttcctccctttcttaaatgcttggggcatttgtctggccttcccttttactgctggctgggaaggaggagcatcagaccacagatcctggaaggcacttctctccctgactgctgctcacactgccgtgagaacctgcttatatccaggaccaaggagtgagtggcaatgccaggaagctggtgaagggtttcctctcctccaccatggttgacagcactgagtatgaagtggcctcccagcctgaggtggaaacctcccctttgggtgatggggccagcccagggccggagcaggtgaagctgaagaaggagatctcactgcttaacggcgtgtgcctgattgtggggaacatgatcggctcgggcatctttgtttcccccaagggtgtgctcatatacagtgcctcctttggtctctctctggtcatctgggctgtcgggggcctcttctccgtctttggggccctttgttatgcggaactgggcaccaccattaagaaatctggggccagctatgcctatatcctggaggcctttggaggattccttgctttcatcagactctggacctccctgctcatcattgagcccaccagccaggccatcattgccatcacctttgccaactacatggtacagcctctcttcccgagctgcttcgccccttatgctgccagccgcctgctggctgctgcctg

SEQ ID NO: 184591 - DNA, 3017 bp, Homo sapiens
  Payload ID: 16347
  Gene Symbol: SLC7A7
  Gene Name: solute carrier family 7 (amino acid transporter light chain, y+L system), member 7
  ENST ID: ENST00000556287
  CDS Start-End: 1201-2133
tggagtgcagtggcctaatgtgggttcactgcaagctccgcctcccgggttcatgccattctcctcattctcctgcctcagcctcccgaatagctgggactacaggtgcccgccaccacgcccggctaatttttatttttttgtgtttttagtagagacggggtttcaccgtgttagccaggatggtcttgatctcctgaccttgtgatccgcctgcctcagcctcccaaagtgctgggattacaggcgtgagccaccgcgtctggcctgatttcctcatattttttaggaaagtggagtcaacttatatttgaggaaggcgtttataggaatttatgcttatcccagagatcttggtatgttttgtcaagaatgaaaaggcacgtgggtctggtggggatgcagtcagatatttgatctcttgactgtgtttcttttgaagtagtctgaggctcagactttggggcagtggcccaggcttggaggcaaccccccagtctctctttgcatggggaagtgtgcagagttctcttagaacacccagtcacatggtgtagagactgctcttacacttcctgtaatctcagcatgggaacaagcctttgtgtcacactgtgcaaccttcctccctttcttaaatgcttggggtgagagagaagagaggctagggtggggcatggaggacacagagagagagagtgctgtgtattccttccccgctactgtcctgtcctcagctaacttgctctgggacagcttccccagggctacagatactgcactcagctgactgtcctttcttctgggcccctggtcccagagcagagctgacaaaggagattcctgagagagcaccttcttatcacagaaagtgctgagccaagagctcctagctgccccttttgcagatgtgaagggccagtgaaccttggacccagatggttgcttaatactcctttccccctccctcactccttcctttgcgggctgcctcacctcctccacccttcttgcttaaatccataggcatttgtctggccttcccttttactgctggctgggaaggaggagcatcagaccacagatcctggaaggcacttctctccctgactgctgctcacactgccgtgagaacctgcttatatccaggaccaaggaggcaatgccaggaagctggtgaagggtttcctctcctccaccatggttgacagcactgagtatgaagtggcctcccagcctgaggtggaaacctcccctttgggtgatggggccagcccagggccggagcaggtgaagctgaagaaggagatctcactgcttaacggcgtgtgcctgattgtggggaacatgatcggctcgggcatctttgtttcccccaagggtgtgctcatatacagtgcctcctttggtctctctctggtcatctgggctgtcgggggcctcttctccgtctttggggccctttgttatgcggaactgggcaccaccattaagaaatctggggccagctatgcctatatcctggaggcctttggaggattccttgctttcatcagactctggacctccctgctcatcattgagcccaccagccaggccatcattgccatcacctttgccaactacatggtacagcctctcttcccgagctgcttcgccccttatgctgccagccgcctgctggctgctgcctgcatttgtctcttaaccttcattaactgtgcctatgtcaaatggggaaccctggtacaagatattttcacctatgctaaagtattggcactgatcgcggtcatcgttgcaggcattgttagacttggccagggagcctctactcattttgagaattcctttgagggttcatcatttgcagtgggtgacattgccctggcactgtactcagctctgttctcctactcaggctgggacaccctcaactatgtcactgaagagatcaagaatcctgagaggaacctgcccctctccattggcatctccatgcccattgtcaccatcatctatatcttgaccaatgtggcctattatactgtgctagacatgagagacatcttggccagtgatgctgttgctgtggcttttctttgtgggctcaagagaaggccatctccctgatgccatctgcatgatccatgttgagcggttcacaccagtgccttctctgctcttcaatggtatcatggcattgatctacttgtgcgtggaagacatcttccagctcattaactactacagcttcagctactggttctttgtggggctttctattgtgggtcagctttatctgcgctggaaggagcctgatcgacctcgtcccctcaagctcagcgttttcttcccgattgtcttctgcctctgcaccatcttcctggtggctgttccactttacagtgatactatcaactccctcatcggcattgccattgccctctcaggcctgcccttttacttcctcatcatcagagtgccagaacataagcgaccgctttacctccgaaggatcgtggggtctgccacaaggtacctccaggtcctgtgtatgtcagttgctgcagaaatggatttggaagatggaggagagatgcccaagcaacgggatcccaaatctaactaaacaccatctggaatcctgatgtggaaagcaggggtttctggtctactggctagagctaaggaagttgaaaaggaaagctcacttctttggaggcacctgtccagaagcctggcctaggcagcttcaacctttgaacttactttttgaaatgaaaagtaatttatttgttttgctacatactgttccagacttttaaaggggacaatgaaggtgactgtggggaggagcatgtcaggtttgggcttggttgttttagaagcacctgggtgtgcctacctactcctcttttcttttaaaagggcccacaatgctccaatttcctgtctcctttagagagacatgaaactatcacaggtgctggatgacaataaaagtttatgttcct

SEQ ID NO: 184592 - DNA, 572 bp, Homo sapiens
  Payload ID: 16347
  Gene Symbol: SLC7A7
  Gene Name: solute carrier family 7 (amino acid transporter light chain, y+L system), member 7
  ENST ID: ENST00000557129
  CDS Start-End: 253-572
atattttttaggaaagtggagtcaacttatatttgaggaaggcgtttataggaatttatgcttatcccagagatcttggcatttgtctggccttcccttttactgctggctgggaaggaggagcatcagaccacagatcctggaaggcacttctctccctgactgctgctcacactgccgtgagaacctgcttatatccaggaccaaggaggcaatgccaggaagctggtgaagggtttcctctcctccaccatggttgacagcactgagtatgaagtggcctcccagcctgaggtggaaacctcccctttgggtgatggggccagcccagggccggagcaggtgaagctgaagaaggagatctcactgcttaacggcgtgtgcctgattgtggggaacatgatcggctcgggcatctttgtttcccccaagggtgtgctcatatacagtgcctcctttggtctctctctggtcatctgggctgtcgggggcctcttctccgtctttggggccctttgttatgcggaactgggcaccaccattaagaaatctggggccagctatgcctatat

SEQ ID NO: 184593 - DNA, 505 bp, Homo sapiens
  Payload ID: 16347
  Gene Symbol: SLC7A7
  Gene Name: solute carrier family 7 (amino acid transporter light chain, y+L system), member 7
  ENST ID: ENST00000556350
  CDS Start-End: 1-505
acatgagagacatcttggccagtgatgctgttgctgtgacttttgcagatcagatatttggaatatttaactggataattccactgtcagttgcattatcctgttttggtggcctcaatgcctccattgtggctgcttctaggcttttctttgtgggctcaagagaaggccatctccctgatgccatctgcatgatccatgttgagcggttcacaccagtgccttctctgctcttcaatctcagcgttttcttcccgattgtcttctgcctctgcaccatcttcctggtggctgttccactttacagtgatactatcaactccctcatcggcattgccattgccctctcaggcctgcccttttacttcctcatcatcagagtgccagaacataagcgaccgctttacctccgaaggatcgtggggtctgccacaaggtacctccaggtcctgtgtatgtcagttgctgcagaaatggatttggaagatggaggagagatgcccaa
